United States Patent Application Publication US 2011/0183924 A1 - sequence listing, part 108

SEQ ID NO: 321821 - DNA, 3665 bp, Homo sapiens
agcgggggggcgcgcgccgcctctcgctccgcccaacccgcgcgcgagcctgggcggggagggggagccaggaagctgcgagcgcgctggggagcgcagctgcaggcgttggggcggcaggagccgcggagccggcgctgagaggggctgcggccggagcgggcggctgagacaaaggcgacgatagggccagatttgagtgtgtgaatttttgagtgaaacctggaacccaaatgagaagaaatctgcaaggaataactactgacagtgaatctgcggtcatctgtatgcataatatggaatgttcttaacccagaagtagctgaatgtgttactccattgctgaggagtgactatctgttatagtccctgggtcaagacaacaatttttataccttcgtcgtggttcagaaaggagtctctgtagaaccagaagcaaagaaaggaaacaatccaaatttttctttattaaatcgactgtgtaagatacttgacttccaggaacaaaaacacggtgaaataataaaatttcatcttggcatcactggacatcatcgtattgaggagcgtatttttggaacttcccgagttgagatttggaaccttcattggtgctcatttactgtggactgtaagcatgagtgaattctggttgtgtttcaactgctgtattgcagaacagcctcagcctaaaaggcgacggcggattgacagaagtatgattggagagcccacaaactttgtgcatacagctcatgttggatcaggagacctgttcagtggaatgaattcagttagctccattcagaaccaaatgcagtccaagggaggttatggaggtggaatgcctgccaatgtccagatgcagctcgtggatacgaaggcgggatagccctggtcctttctccaaagtgtgatggcaccttgtccaccctgtcgtgattattccagtgagatgttactgttctgctctgaagaagatactgtcagacgaatcctgcatttccttcagctggcatgcatgcctttggactcatggacagagttctttggattgtcactgaattttcaatgtttaatcagtatggatctgatcttcgcatgatcttttttgtgaatgctaacaccattttgcagttttttttttctattttaaacatttttcttttcactgccgaccccctgccttacgattttattggaaagcaaggacctgctattatttgttaatttgccatcatttatgtatattttggaaggtatgagacccacaagcacaatgatcatttttatttgtttgtttgtttgaaacttcagcagaatagatatctgcatgctttatgaagttgttgcttcggtaagagcccatgggatgccagaaattaacatttctttgctgccatgggctgatgatgctgctattagataaagtttagctgtggcaccaagtcacatcattttcatagaaaaagattacttgtagcttattttagaagtatgaccttttggtctgtttgattgattgattagaattgcaataaaagaaaagcttgcattcataaggcattcattctgttgtaaatgttcaatatatttattttgagagcaaggacctgtggttgtaaacaggtgtggttacaggtgtggttatgtatctgagtgttgcggtcatactctcctccagtccaatcctgagcatcttcatcttattaattagctgttcgtttctttgtgcactcattcttttatttttacttctttttaatgttatggtatccagttgtttccagtagcagtttcttgaacttctggcctgtactactaactgcagacctccagagtcactggcctttctgtgctctacatattattttaggggccacatcagttgccaagagcaacatacataccgacctggctgaattattgccagtgaaaacaacctgtacgaagcctttgctcaggttctaaaatatgtttgtccttgcacgaattttgtatatttcaaatatttctgtaaaggtttcttcttttctgttagagtgtggtgttaagccagagtcagtggtttgtgttctcattaaaatgtttgtttaaatcctatgtccaattcaagcctatctaactacatttggtaggattaacatttcatataacaaatggggcttaattaaaaactttaacttggaataaaggaacagggatcactttatcttctgccttcatttaccttagtccaagattcttgcaaaacaggcaactgaacaaacattaggtttatgtaggtaaaatgtgaaagcatttctcctccactttttaaaatttaatttacccagtacagcggggcaccagattacttgatctttgtattttgcagttttgagcctttgtgtcaatcccaagcacagagaggatctgccaaggaaaaacatttgcatcttcggagtagacattttgcagtttgtttaataacaacttctaaagtaagttgaattcatccattgtcactgattcaccaagtggatgttgcattgtggaatttgcctgagtactgttgtcattctgctcagccaggcacggtcagtttcttggccagggacattgctatgtgctgtgtgcaagctctttagaagagagattggattttcttggcattatcagcactcatgctatttagtctacttctattttgactgactctttaaattagtacaatttttctacttgtcatataactcctggaacaatagtacgggaagccgtgatccttttccctgactcatgattttagtctttttccaaatcgctgttttttttttgtttttttttttttttgctgctccaacgaccagcatgtgttggagcagatctccatggtaagccaaaagtggacttgtcagcctataactactctgcagctgccactaactctacaggcacagtaactacactttatacaggagcacatgccaaagtgcctgggaggtgccaataaaatcaagaaataagaaaactacaaaaaaagatacggtattaaccttggacataattttttttagggaggcagctttcccacttttataaagggggttgtaaatctcaagaggtcatttgttccccatagcagcatatctcatttttaaattgaagcgaattaaataggattttactactcaacattcattatactgttaatctttgctgaaatatatgctaacaaatgttaagcaagggaaactgaagacttagtcatgtggattgttagcagtgatctgcattctgtaaaagaggtactttcccatgatgtaggcatgaagtggtgccagtaagcgtagagcggaaatgttgactttagttaacattgggtttagcatttccagtgcagcattatcagtgggcctttaaaaatacttcgtaagtacattagctttcactttgttgttaaattatagcagactcattatagagaacaagtttgccttgattttgtttaaaatgacttctgctaagcacccagaagataaaattgacatatttttataatataagcatactttttttgtacattgtgttcattcttgaataaaatgagttctgtgttggcttgtagatactaaaaagaaagtattgattttgattcaataaatgttttctttcaatcctgg

SEQ ID NO: 321822 - DNA, 3754 bp, Homo sapiens
agcgggggggcgcgcgccgcctctcgctccgcccaacccgcgcgcgagcctgggcggggagggggagccaggaagctgcgagcgcgctggggagcgcagctgcaggcgttggggcggcaggagccgcggagccggcgctgagaggggctgcggccggagcgggcggctgagacaaaggcgacgatagggccagatttgagtgtgtgaatttttgagtgaaacctggaacccaaatgagaagaaatctgcaaggaataactactgacagtgaatctgcggtcatctgtatgcataatatggaatgttcttaacccagaagtagctgaatgtgttactccattgctgaggagtgactatctgttatagtccctgggtcaagacaacaatttttataccttcgtcgtggttcagaaaggagtctctgtagaaccagaagcaaagaaaggaaacaatccaaatttttctttattaaatcgactgtgtaagatacttgacttccaggaacaaaaacacggtgaaataataaaatttcatcttggcatcactggacatcatcgtattgaggagcgtatttttggaacttcccgagttgagatttggaaccttcattggtgctcatttactgtggactgtaagcatgagtgaattctggttgtgtttcaactgctgtattgcagaacagcctcagcctaaaaggcgacggcggattgacagaagtatgattggagagcccacaaactttgtgcatacagctcatgttggatcaggagacctgttcagtggaatgaattcagttagctccattcagaaccaaatgcagtccaagggaggttatggaggtggaatgcctgccaatgtccagatgcagctcgtggatacgaaggcgggatagccctggtcctttctccaggttattgtgaatttctatattttctctgtccactattctgtaatttttttttgtcctgtgattgcttttattttgaattacaaaaaagaagtgtgatggcaccttgtccaccctgtcgtgattattccagtgagatgttactgttctgctctgaagaagatactgtcagacgaatcctgcatttccttcagctggcatgcatgcctttggactcatggacagagttctttggattgtcactgaattttcaatgtttaatcagtatggatctgatcttcgcatgatcttttttgtgaatgctaacaccattttgcagttttttttttctattttaaacatttttcttttcactgccgaccccctgccttacgattttattggaaagcaaggacctgctattatttgttaatttgccatcatttatgtatattttggaaggtatgagacccacaagcacaatgatcatttttatttgtttgtttgtttgaaacttcagcagaatagatatctgcatgctttatgaagttgttgcttcggtaagagcccatgggatgccagaaattaacatttctttgctgccatgggctgatgatgctgctattagataaagtttagctgtggcaccaagtcacatcattttcatagaaaaagattacttgtagcttattttagaagtatgaccttttggtctgtttgattgattgattagaattgcaataaaagaaaagcttgcattcataaggcattcattctgttgtaaatgttcaatatatttattttgagagcaaggacctgtggttgtaaacaggtgtggttacaggtgtggttatgtatctgagtgttgcggtcatactctcctccagtccaatcctgagcatcttcatcttattaattagctgttcgtttctttgtgcactcattcttttatttttacttctttttaatgttatggtatccagttgtttccagtagcagtttcttgaacttctggcctgtactactaactgcagacctccagagtcactggcctttctgtgctctacatattattttaggggccacatcagttgccaagagcaacatacataccgacctggctgaattattgccagtgaaaacaacctgtacgaagcctttgctcaggttctaaaatatgtttgtccttgcacgaattttgtatatttcaaatatttctgtaaaggtttcttcttttctgttagagtgtggtgttaagccagagtcagtggtttgtgttctcattaaaatgtttgtttaaatcctatgtccaattcaagcctatctaactacatttggtaggattaacatttcatataacaaatggggcttaattaaaaactttaacttggaataaaggaacagggatcactttatcttctgccttcatttaccttagtccaagattcttgcaaaacaggcaactgaacaaacattaggtttatgtaggtaaaatgtgaaagcatttctcctccactttttaaaatttaatttacccagtacagcggggcaccagattacttgatctttgtattttgcagttttgagcctttgtgtcaatcccaagcacagagaggatctgccaaggaaaaacatttgcatcttcggagtagacattttgcagtttgtttaataacaacttctaaagtaagttgaattcatccattgtcactgattcaccaagtggatgttgcattgtggaatttgcctgagtactgttgtcattctgctcagccaggcacggtcagtttcttggccagggacattgctatgtgctgtgtgcaagctctttagaagagagattggattttcttggcattatcagcactcatgctatttagtctacttctattttgactgactctttaaattagtacaatttttctacttgtcatataactcctggaacaatagtacgggaagccgtgatccttttccctgactcatgattttagtctttttccaaatcgctgttttttttttgtttttttttttttttgctgctccaacgaccagcatgtgttggagcagatctccatggtaagccaaaagtggacttgtcagcctataactactctgcagctgccactaactctacaggcacagtaactacactttatacaggagcacatgccaaagtgcctgggaggtgccaataaaatcaagaaataagaaaactacaaaaaaagatacggtattaaccttggacataattttttttagggaggcagctttcccacttttataaagggggttgtaaatctcaagaggtcatttgttccccatagcagcatatctcatttttaaattgaagcgaattaaataggattttactactcaacattcattatactgttaatctttgctgaaatatatgctaacaaatgttaagcaagggaaactgaagacttagtcatgtggattgttagcagtgatctgcattctgtaaaagaggtactttcccatgatgtaggcatgaagtggtgccagtaagcgtagagcggaaatgttgactttagttaacattgggtttagcatttccagtgcagcattatcagtgggcctttaaaaatacttcgtaagtacattagctttcactttgttgttaaattatagcagactcattatagagaacaagtttgccttgattttgtttaaaatgacttctgctaagcacccagaagataaaattgacatatttttataatataagcatactttttttgtacattgtgttcattcttgaataaaatgagttctgtgttggcttgtagatactaaaaagaaagtattgattttgattcaataaatgttttctttcaatcctgg

SEQ ID NO: 321823 - DNA, 3496 bp, Homo sapiens
agcgggggggcgcgcgccgcctctcgctccgcccaacccgcgcgcgagcctgggcggggagggggagccaggaagctgcgagcgcgctggggagcgcagctgcaggcgttggggcggcaggagccgcggagccggcgctgagaggggctgcggccggagcgggcggctgagacaaaggcgacgactatctgttatagtccctgggtcaagacaacaatttttataccttcgtcgtggttcagaaaggagtctctgtagaaccagaagcaaagaaaggaaacaatccaaatttttctttattaaatcgactgtgtaagatacttgacttccaggaacaaaaacacggtgaaataataaaatttcatcttggcatcactggacatcatcgtattgaggagcgtatttttggaacttcccgagttgagatttggaaccttcattggtgctcatttactgtggactgtaagcatgagtgaattctggttgtgtttcaactgctgtattgcagaacagcctcagcctaaaaggcgacggcggattgacagaagtatgattggagagcccacaaactttgtgcatacagctcatgttggatcaggagacctgttcagtggaatgaattcagttagctccattcagaaccaaatgcagtccaagggaggttatggaggtggaatgcctgccaatgtccagatgcagctcgtggatacgaaggcgggatagccctggtcctttctccaaagtgtgatggcaccttgtccaccctgtcgtgattattccagtgagatgttactgttctgctctgaagaagatactgtcagacgaatcctgcatttccttcagctggcatgcatgcctttggactcatggacagagttctttggattgtcactgaattttcaatgtttaatcagtatggatctgatcttcgcatgatcttttttgtgaatgctaacaccattttgcagttttttttttctattttaaacatttttcttttcactgccgaccccctgccttacgattttattggaaagcaaggacctgctattatttgttaatttgccatcatttatgtatattttggaaggtatgagacccacaagcacaatgatcatttttatttgtttgtttgtttgaaacttcagcagaatagatatctgcatgctttatgaagttgttgcttcggtaagagcccatgggatgccagaaattaacatttctttgctgccatgggctgatgatgctgctattagataaagtttagctgtggcaccaagtcacatcattttcatagaaaaagattacttgtagcttattttagaagtatgaccttttggtctgtttgattgattgattagaattgcaataaaagaaaagcttgcattcataaggcattcattctgttgtaaatgttcaatatatttattttgagagcaaggacctgtggttgtaaacaggtgtggttacaggtgtggttatgtatctgagtgttgcggtcatactctcctccagtccaatcctgagcatcttcatcttattaattagctgttcgtttctttgtgcactcattcttttatttttacttctttttaatgttatggtatccagttgtttccagtagcagtttcttgaacttctggcctgtactactaactgcagacctccagagtcactggcctttctgtgctctacatattattttaggggccacatcagttgccaagagcaacatacataccgacctggctgaattattgccagtgaaaacaacctgtacgaagcctttgctcaggttctaaaatatgtttgtccttgcacgaattttgtatatttcaaatatttctgtaaaggtttcttcttttctgttagagtgtggtgttaagccagagtcagtggtttgtgttctcattaaaatgtttgtttaaatcctatgtccaattcaagcctatctaactacatttggtaggattaacatttcatataacaaatggggcttaattaaaaactttaacttggaataaaggaacagggatcactttatcttctgccttcatttaccttagtccaagattcttgcaaaacaggcaactgaacaaacattaggtttatgtaggtaaaatgtgaaagcatttctcctccactttttaaaatttaatttacccagtacagcggggcaccagattacttgatctttgtattttgcagttttgagcctttgtgtcaatcccaagcacagagaggatctgccaaggaaaaacatttgcatcttcggagtagacattttgcagtttgtttaataacaacttctaaagtaagttgaattcatccattgtcactgattcaccaagtggatgttgcattgtggaatttgcctgagtactgttgtcattctgctcagccaggcacggtcagtttcttggccagggacattgctatgtgctgtgtgcaagctctttagaagagagattggattttcttggcattatcagcactcatgctatttagtctacttctattttgactgactctttaaattagtacaatttttctacttgtcatataactcctggaacaatagtacgggaagccgtgatccttttccctgactcatgattttagtctttttccaaatcgctgttttttttttgtttttttttttttttgctgctccaacgaccagcatgtgttggagcagatctccatggtaagccaaaagtggacttgtcagcctataactactctgcagctgccactaactctacaggcacagtaactacactttatacaggagcacatgccaaagtgcctgggaggtgccaataaaatcaagaaataagaaaactacaaaaaaagatacggtattaaccttggacataattttttttagggaggcagctttcccacttttataaagggggttgtaaatctcaagaggtcatttgttccccatagcagcatatctcatttttaaattgaagcgaattaaataggattttactactcaacattcattatactgttaatctttgctgaaatatatgctaacaaatgttaagcaagggaaactgaagacttagtcatgtggattgttagcagtgatctgcattctgtaaaagaggtactttcccatgatgtaggcatgaagtggtgccagtaagcgtagagcggaaatgttgactttagttaacattgggtttagcatttccagtgcagcattatcagtgggcctttaaaaatacttcgtaagtacattagctttcactttgttgttaaattatagcagactcattatagagaacaagtttgccttgattttgtttaaaatgacttctgctaagcacccagaagataaaattgacatatttttataatataagcatactttttttgtacattgtgttcattcttgaataaaatgagttctgtgttggcttgtagatactaaaaagaaagtattgattttgattcaataaatgttttctttcaatcctgg

SEQ ID NO: 321824 - DNA, 3246 bp, Homo sapiens
agcgggggggcgcgcgccgcctctcgctccgcccaacccgcgcgcgagcctgggcggggagggggagccaggaagctgcgagcgcgctggggagcgcagctgcaggcgttggggcggcaggagccgcggagccggcgctgagaggggctgcggccggagcgggcggctgagacaaaggcgacgaaaaggcgacggcggattgacagaagtatgattggagagcccacaaactttgtgcatacagctcatgttggatcaggagacctgttcagtggaatgaattcagttagctccattcagaaccaaatgcagtccaagggaggttatggaggtggaatgcctgccaatgtccagatgcagctcgtggatacgaaggcgggatagccctggtcctttctccaggttattgtgaatttctatattttctctgtccactattctgtaatttttttttgtcctgtgattgcttttattttgaattacaaaaaagaagtgtgatggcaccttgtccaccctgtcgtgattattccagtgagatgttactgttctgctctgaagaagatactgtcagacgaatcctgcatttccttcagctggcatgcatgcctttggactcatggacagagttctttggattgtcactgaattttcaatgtttaatcagtatggatctgatcttcgcatgatcttttttgtgaatgctaacaccattttgcagttttttttttctattttaaacatttttcttttcactgccgaccccctgccttacgattttattggaaagcaaggacctgctattatttgttaatttgccatcatttatgtatattttggaaggtatgagacccacaagcacaatgatcatttttatttgtttgtttgtttgaaacttcagcagaatagatatctgcatgctttatgaagttgttgcttcggtaagagcccatgggatgccagaaattaacatttctttgctgccatgggctgatgatgctgctattagataaagtttagctgtggcaccaagtcacatcattttcatagaaaaagattacttgtagcttattttagaagtatgaccttttggtctgtttgattgattgattagaattgcaataaaagaaaagcttgcattcataaggcattcattctgttgtaaatgttcaatatatttattttgagagcaaggacctgtggttgtaaacaggtgtggttacaggtgtggttatgtatctgagtgttgcggtcatactctcctccagtccaatcctgagcatcttcatcttattaattagctgttcgtttctttgtgcactcattcttttatttttacttctttttaatgttatggtatccagttgtttccagtagcagtttcttgaacttctggcctgtactactaactgcagacctccagagtcactggcctttctgtgctctacatattattttaggggccacatcagttgccaagagcaacatacataccgacctggctgaattattgccagtgaaaacaacctgtacgaagcctttgctcaggttctaaaatatgtttgtccttgcacgaattttgtatatttcaaatatttctgtaaaggtttcttcttttctgttagagtgtggtgttaagccagagtcagtggtttgtgttctcattaaaatgtttgtttaaatcctatgtccaattcaagcctatctaactacatttggtaggattaacatttcatataacaaatggggcttaattaaaaactttaacttggaataaaggaacagggatcactttatcttctgccttcatttaccttagtccaagattcttgcaaaacaggcaactgaacaaacattaggtttatgtaggtaaaatgtgaaagcatttctcctccactttttaaaatttaatttacccagtacagcggggcaccagattacttgatctttgtattttgcagttttgagcctttgtgtcaatcccaagcacagagaggatctgccaaggaaaaacatttgcatcttcggagtagacattttgcagtttgtttaataacaacttctaaagtaagttgaattcatccattgtcactgattcaccaagtggatgttgcattgtggaatttgcctgagtactgttgtcattctgctcagccaggcacggtcagtttcttggccagggacattgctatgtgctgtgtgcaagctctttagaagagagattggattttcttggcattatcagcactcatgctatttagtctacttctattttgactgactctttaaattagtacaatttttctacttgtcatataactcctggaacaatagtacgggaagccgtgatccttttccctgactcatgattttagtctttttccaaatcgctgttttttttttgtttttttttttttttgctgctccaacgaccagcatgtgttggagcagatctccatggtaagccaaaagtggacttgtcagcctataactactctgcagctgccactaactctacaggcacagtaactacactttatacaggagcacatgccaaagtgcctgggaggtgccaataaaatcaagaaataagaaaactacaaaaaaagatacggtattaaccttggacataattttttttagggaggcagctttcccacttttataaagggggttgtaaatctcaagaggtcatttgttccccatagcagcatatctcatttttaaattgaagcgaattaaataggattttactactcaacattcattatactgttaatctttgctgaaatatatgctaacaaatgttaagcaagggaaactgaagacttagtcatgtggattgttagcagtgatctgcattctgtaaaagaggtactttcccatgatgtaggcatgaagtggtgccagtaagcgtagagcggaaatgttgactttagttaacattgggtttagcatttccagtgcagcattatcagtgggcctttaaaaatacttcgtaagtacattagctttcactttgttgttaaattatagcagactcattatagagaacaagtttgccttgattttgtttaaaatgacttctgctaagcacccagaagataaaattgacatatttttataatataagcatactttttttgtacattgtgttcattcttgaataaaatgagttctgtgttggcttgtagatactaaaaagaaagtattgattttgattcaataaatgttttctttcaatcctgg

SEQ ID NO: 321825 - DNA, 3705 bp, Homo sapiens
agcgggggggcgcgcgccgcctctcgctccgcccaacccgcgcgcgagcctgggcggggagggggagccaggaagctgcgagcgcgctggggagcgcagctgcaggcgttggggcggcaggagccgcggagccggcgctgagaggggctgcggccggagcgggcggctgagacaaaggcgacgatagggccagatttgagtgtgtgaatttttgagtgaaacctggaacccaaatgagaagaaatctgcaaggaataactactgacagtgaatctgcggtcatctgtatgcataatatggaatgttcttaacccagaagtagctgaatgtgttactccattgctgaggagtgactatctgttatagtccctgggtcaagacaacaatttttataccttcgtcgtggttcagaaaggagtctctgtagaaccagaagcaaagaaaggaaacaatccaaatttttctttattaaatcgactgtgtaagatacttgacttccaggaacaaaaacacggtgaaataataaaatttcatcttggcatcactggacatcatcgtattgaggagcgtatttttggaacttcccgagttgagatttggaaccttcattggtgctcatttactgtggactgtaagcatgagtgaattctggttgtgtttcaactgctgtattgcagaacagcctcagcctaaaaggcgacggcggattgacagaagtatgattggagagcccacaaactttgtgcatacagctcatgttggatcaggagacctgttcagtggaatgaattcagttagctccattcagaaccaaatgcagtccaagggaggttatggaggtggaatgcctgccaatgtccagatgcagctcgtggatacgaaggcgggatagccctggtcctttctccaggttattgtgaatttctatattttctctgtccactattctgtaatttttttttgtcctgtgattgcttttattttgaattacaaaaaagaagtgtgatggcaccttgtccaccctgtcgtgattattccagtgagatgttactgttctgctctgaagaagatactgtcagacgaatcctgcatttccttcagctggcatgcatgcctttggactcatggacagagttctttggattgtcactgaattttcaatgtttaatcagtatggatctgatcttcgcatgatcttttttgtgaatgctaacaccattttgcagttttttttttctattttaaacatttttcttttcactgccgaccccctgccttacgattttattggaaagcaaggacctgctattatttgttaatttgccatcatttatgtatattttggaaggtatgagacccacaagcacaatgatcatttttatttgtttgtttgtttgaaacttcagcagaatagatatctgcatgctttatgaagttgttgcttcggtaagagcccatgggatgccagaaattaacatttctttgctgccatgggctgatgatgctgctattagataaagtttagctgtggcaccaagtcacatcattttcatagaaaaagattacttgtagcttattttagaagtatgaccttttggtctgtttgattgattgattagaattgcaataaaagaaaagcttgcattcataaggcattcattctgttgtaaatgttcaatatatttattttgagagcaaggacctgtggttgtaaacaggtgtggttacaggtgtggttatgtatctgagtgttgcggtcatactctcctccagtccaatcctgagcatcttcatcttattaattagctgttcgtttctttgtgcactcattcttttatttttacttctttttaatgttatggtatccagttgtttccagtagcagtttcttgaacttctggcctgtactactaactgcagacctccagagtcactggcctttctgtgctctacatattattttaggggccacatcagttgccaagagcaacatacataccgacctggctgaattattgccagtgaaaacaacctgtacgaagcctttgctcaggttctaaaatatgtttgtccttgcacgaattttgtatatttcaaatatttctgtaaaggtttcttcttttctgttagagtgtggtgttaagccagagtcagtggtttgtgttctcattaaaatgtttgtttaaatcctatgtccaattcaagcctatctaactacatttggtaggattaacatttcatataacaaatggggcttaattaaaaactttaacttggaataaaggaacagggatcactttatcttctgccttcatttaccttagtccaagattcttgcaaaacaggcaactgaacaaacattaggtttatgtaggtaaaatgtgaaagcatttctcctccactttttaaaatttaatttacccagtacagcggggcaccagattacttgatctttgtattttgcagttttgagcctttgtgtcaatcccaagcacagagaggatctgccaaggaaaaacatttgcatcttcggagtagacattttgcagtttgtttaataacaacttctaaagtaagttgaattcatccattgtcactgattcaccaagtggatgttgcattgtggaatttgcctgagtactgttgtcattctgctcagccaggcacggtcagtttcttggccagggacattgctatgtgctgtgtgcaagctctttagaagagagattggattttcttggcattatcagcactcatgctatttagtctacttctattttgactgactctttaaattagtacaatttttctacttgtcatataactcctggaacaatagtacgggaagccgtgatccttttccctgactcatgattttagtctttttccaaatcgctgttttttttttgtttttttttttttttgctgctccaacgaccagcatgtgttggagcagatctccatggtaagccaaaagtggacttgtcagcctataactactctgcagctgccactaactctacaggcacagtaactacactttatacaggagcacatgccaaagtgcctgggaggtgccaataaaatcaagaaataagaaaactacaaaaaaagatacggtattaaccttggacataattttttttagggaggcagctttcccacttttataaagggggttgtaaatctcaagaggtcatttgttccccatagcagcatatctcatttttaaattgaagcgaattaaataggattttactactcaacattcattatactgttaatctttgctgaaatatatgctaacaaatgttaagcaagggaaactgaagacttagtcatgtggattgttagcagtgatctgcattctgtaaaagaggtactttcccatgatgtaggcatgaagtggtgccagtaagcgtagagcggaaatgttgactttagttaacattgggtttagcatttccagtgcagcattatcagtgggcctttaaaaatacttcgtaagtacattagctttcactttgttgttaaattatagcagactcattatagagaacaagtttgccttgattttgtttaaaatgacttctgctaagcacccagaagataaaattgacatatttttataatataagcatactttttttgtacattgtgttcattcttgaataaaatgagttctgtgttggcttgtagatacta

SEQ ID NO: 321826 - DNA, 4475 bp, Homo sapiens
  misc_feature (3762)..(3762): n is a, c, g, or t
  misc_feature (3765)..(3766): n is a, c, g, or t
  misc_feature (3843)..(3843): n is a, c, g, or t
agcgggggggcgcgcgccgcctctcgctccgcccaacccgcgcgcgagcctgggcggggagggggagccaggaagctgcgagcgcgctggggagcgcagctgcaggcgttggggcggcaggagccgcggagccggcgctgagaggggctgcggccggagcgggcggctgagacaaaggcgacgatagggccagatttgagtgtgtgaatttttgagtgaaacctggaacccaaatgagaagaaatctgcaaggaataactactgacagtgaatctgcggtcatctgtatgcataatatggaatgttcttaacccagaagtagctgaatgtgttactccattgctgaggagtgactatctgttatagtccctgggtcaagacaacaatttttataccttcgtcgtggttcagaaaggagtctctgtagaaccagaagcaaagaaaggaaacaatccaaatttttctttattaaatcgactgtgtaagatacttgacttccaggaacaaaaacacggtgaaataataaaatttcatcttggcatcactggacatcatcgtattgaggagcgtatttttggaacttcccgagttgagatttggaaccttcattggtgctcatttactgtggactgtaagcatgagtgaattctggttgtgtttcaactgctgtattgcagaacagcctcagcctaaaaggcgacggcggattgacagaagtatgattggagagcccacaaactttgtgcatacagctcatgttggatcaggagacctgttcagtggaatgaattcagttagctccattcagaaccaaatgcagtccaagggaggttatggaggtggaatgcctgccaatgtccagatgcagctcgtggatacgaaggcgggatagccctggtcctttctccaggttattgtgaatttctatattttctctgtccactattctgtaatttttttttgtcctgtgattgcttttattttgaattacaaaaaagaagtgtgatggcaccttgtccaccctgtcgtgattattccagtgagatgttactgttctgctctgaagaagatactgtcagacgaatcctgcatttccttcagctggcatgcatgcctttggactcatggacagagttctttggattgtcactgaattttcaatgtttaatcagtatggatctgatcttcgcatgatcttttttgtgaatgctaacaccattttgcagttttttttttctattttaaacatttttcttttcactgccgaccccctgccttacgattttattggaaagcaaggacctgctattatttgttaatttgccatcatttatgtatattttggaaggtatgagacccacaagcacaatgatcatttttatttgtttgtttgtttgaaacttcagcagaatagatatctgcatgctttatgaagttgttgcttcggtaagagcccatgggatgccagaaattaacatttctttgctgccatgggctgatgatgctgctattagataaagtttagctgtggcaccaagtcacatcattttcatagaaaaagattacttgtagcttattttagaagtatgaccttttggtctgtttgattgattgattagaattgcaataaaagaaaagcttgcattcataaggcattcattctgttgtaaatgttcaatatatttattttgagagcaaggacctgtggttgtaaacaggtgtggttacaggtgtggttatgtatctgagtgttgcggtcatactctcctccagtccaatcctgagcatcttcatcttattaattagctgttcgtttctttgtgcactcattcttttatttttacttctttttaatgttatggtatccagttgtttccagtagcagtttcttgaacttctggcctgtactactaactgcagacctccagagtcactggcctttctgtgctctacatattattttaggggccacatcagttgccaagagcaacatacataccgacctggctgaattattgccagtgaaaacaacctgtacgaagcctttgctcaggttctaaaatatgtttgtccttgcacgaattttgtatatttcaaatatttctgtaaaggtttcttcttttctgttagagtgtggtgttaagccagagtcagtggtttgtgttctcattaaaatgtttgtttaaatcctatgtccaattcaagcctatctaactacatttggtaggattaacatttcatataacaaatggggcttaattaaaaactttaacttggaataaaggaacagggatcactttatcttctgccttcatttaccttagtccaagattcttgcaaaacaggcaactgaacaaacattaggtttatgtaggtaaaatgtgaaagcatttctcctccactttttaaaatttaatttacccagtacagcggggcaccagattacttgatctttgtattttgcagttttgagcctttgtgtcaatcccaagcacagagaggatctgccaaggaaaaacatttgcatcttcggagtagacattttgcagtttgtttaataacaacttctaaagtaagttgaattcatccattgtcactgattcaccaagtggatgttgcattgtggaatttgcctgagtactgttgtcattctgctcagccaggcacggtcagtttcttggccagggacattgctatgtgctgtgtgcaagctctttagaagagagattggattttcttggcattatcagcactcatgctatttagtctacttctattttgactgactctttaaattagtacaatttttctacttgtcatataactcctggaacaatagtacgggaagccgtgatccttttccctgactcatgattttagtctttttccaaatcgctgttttttttttgtttttttttttttttgctgctccaacgaccagcatgtgttggagcagatctccatggtaagccaaaagtggacttgtcagcctataactactctgcagctgccactaactctacaggcacagtaactacactttatacaggagcacatgccaaagtgcctgggaggtgccaataaaatcaagaaataagaaaactacaaaaaaagatacggtattaaccttggacataattttttttagggaggcagctttcccacttttataaagggggttgtaaatctcaagaggtcatttgttccccatagcagcatatctcatttttaaattgaagcgaattaaataggattttactactcaacattcattatactgttaatctttgctgaaatatatgctaacaaatgttaagcaagggaaactgaagacttagtcatgtggattgttagcagtgatctgcattctgtaaaagaggtactttcccatgatgtaggcatgaagtggtgccagtaagcgtagagcggaaatgttgactttagttaacattgggtttagcatttccagtgcagcattatcagtgggcctttaaaaatacttcgtaagtacattagctttcactttgttgttaaattatagcagactcattatagagaacaagtttgccttgattttgtttaaaatgacttctgctaagcacccagaagataaaattgacatatttttataatataagcatactttttttgtacattgtgttcattcttgaataaaatgagttctgtgttggcttgtagatactaaaaagaaagtattgattttgattcaataaatgttttctttcaatcctggaaaaaaanaannaaaaaaaaaaaaaaaaaattgggggggggcggggcccggaaaaggtttttaaaaaaatgccggttgtgggggcgcgngggggcccgacatggtcaagtgcaccgagtggtcaaagacgcggtcccaaaggaaaaactccggcgtcatggcacagagcgccgggacttccttcacacattaaaaaaaggcgcgggggcgcaaccgagtcgctcctgaaacaacctccagagggagtttcggaggccccatcacgcgggctcctcaaccacgagggggttccaaagcgagtcgaatataaataacgcccggcctcagggacaacgagaaaccgggagcaacaacaaaacagaaaaacggacaaagggaaccacaaaaaaaagaagaagataagaaccaagaaacgggagaggaaaccaagaacagctccgccgtagctaacaaacatcgcacacgagccaaaacgggcgcgataacggtccaaaggcacagtagaacaaacggaacaccaacgagcatggggcagacaaaccatcctgacccattagaacacggggacgggctactcaactacctgcaaaggcgacatcaggcaacacacacaaccgcgcactgaagagacagaacacaaacgaacggacatgcagccagagacaagaaagaaagaaagaaaccaagacaagatagaacaagatgacagaagacaaaagag

SEQ ID NO: 321827 - DNA, 3745 bp, Homo sapiens
agcgggggggcgcgcgccgcctctcgctccgcccaacccgcgcgcgagcctgggcggggagggggagccaggaagctgcgagcgcgctggggagcgcagctgcaggcgttggggcggcaggagccgcggagccggcgctgagaggggctgcggccggagcgggcggctgagacaaaggcgacgatagggccagatttgagtgtgtgaatttttgagtgaaacctggaacccaaatgagaagaaatctgcaaggaataactactgacagtgaatctgcggtcatctgtatgcataatatggaatgttcttaacccagaagtagctgaatgtgttactccattgctgaggagtgactatctgttatagtccctgggtcaagacaacaatttttataccttcgtcgtggttcagaaaggagtctctgtagaaccagaagcaaagaaaggaaacaatccaaatttttctttattaaatcgactgtgtaagatacttgacttccaggaacaaaaacacggtgaaataataaaatttcatcttggcatcactggacatcatcgtattgaggagcgtatttttggaacttcccgagttgagatttggaaccttcattggtgctcatttactgtggactgtaagcatgagtgaattctggttgtgtttcaactgctgtattgcagaacagcctcagcctaaaaggcgacggcggattgacagaagtatgattggagagcccacaaactttgtgcatacagctcatgttggatcaggagacctgttcagtggaatgaattcagttagctccattcagaaccaaatgcagtccaagggaggttatggaggtggaatgcctgccaatgtccagatgcagctcgtggatacgaaggcgggatagccctggtcctttctccaggttattgtgaatttctatattttctctgtccactattctgtaatttttttttgtcctgtgattgcttttattttgaattacaaaaaagaagtgtgatggcaccttgtccaccctgtcgtgattattccagtgagatgttactgttctgctctgaagaagatactgtcagacgaatcctgcatttccttcagctggcatgcatgcctttggactcatggacagagttctttggattgtcactgaattttcaatgtttaatcagtatggatctgatcttcgcatgatcttttttgtgaatgctaacaccattttgcagttttttttttctattttaaacatttttcttttcactgccgaccccctgccttacgattttattggaaagcaaggacctgctattatttgttaatttgccatcatttatgtatattttggaaggtatgagacccacaagcacaatgatcatttttatttgtttgtttgtttgaaacttcagcagaatagatatctgcatgctttatgaagttgttgcttcggtaagagcccatgggatgccagaaattaacatttctttgctgccatgggctgatgatgctgctattagataaagtttagctgtggcaccaagtcacatcattttcatagaaaaagattacttgtagcttattttagaagtatgaccttttggtctgtttgattgattgattagaattgcaataaaagaaaagcttgcattcataaggcattcattctgttgtaaatgttcaatatatttattttgagagcaaggacctgtggttgtaaacaggtgtggttacaggtgtggttatgtatctgagtgttgcggtcatactctcctccagtccaatcctgagcatcttcatcttattaattagctgttcgtttctttgtgcactcattcttttatttttacttctttttaatgttatggtatccagttgtttccagtagcagtttcttgaacttctggcctgtactactaactgcagacctccagagtcactggcctttctgtgctctacatattattttaggggccacatcagttgccaagagcaacatacataccgacctggctgaattattgccagtgaaaacaacctgtacgaagcctttgctcaggttctaaaatatgtttgtccttgcacgaattttgtatatttcaaatatttctgtaaaggtttcttcttttctgttagagtgtggtgttaagccagagtcagtggtttgtgttctcattaaaatgtttgtttaaatcctatgtccaattcaagcctatctaactacatttggtaggattaacatttcatataacaaatggggcttaattaaaaactttaacttggaataaaggaacagggatcactttatcttctgccttcatttaccttagtccaagattcttgcaaaacaggcaactgaacaaacattaggtttatgtaggtaaaatgtgaaagcatttctcctccactttttaaaatttaatttacccagtacagcggggcaccagattacttgatctttgtattttgcagttttgagcctttgtgtcaatcccaagcacagagaggatctgccaaggaaaaacatttgcatcttcggagtagacattttgcagtttgtttaataacaacttctaaagtaagttgaattcatccattgtcactgattcaccaagtggatgttgcattgtggaatttgcctgagtactgttgtcattctgctcagccaggcacggtcagtttcttggccagggacattgctatgtgctgtgtgcaagctctttagaagagagattggattttcttggcattatcagcactcatgctatttagtctacttctattttgactgactctttaaattagtacaatttttctacttgtcatataactcctggaacaatagtacgggaagccgtgatccttttccctgactcatgattttagtctttttccaaatcgctgttttttttttgtttttttttttttttgctgctccaacgaccagcatgtgttggagcagatctccatggtaagccaaaagtggacttgtcagcctataactactctgcagctgccactaactctacaggcacagtaactacactttatacaggagcacatgccaaagtgcctgggaggtgccaataaaatcaagaaataagaaaactacaaaaaaagatacggtattaaccttggacataattttttttagggaggcagctttcccacttttataaagggggttgtaaatctcaagaggtcatttgttccccatagcagcatatctcatttttaaattgaagcgaattaaataggattttactactcaacattcattatactgttaatctttgctgaaatatatgctaacaaatgttaagcaagggaaactgaagacttagtcatgtggattgttagcagtgatctgcattctgtaaaagaggtactttcccatgatgtaggcatgaagtggtgccagtaagcgtagagcggaaatgttgactttagttaacattgggtttagcatttccagtgcagcattatcagtgggcctttaaaaatacttcgtaagtacattagctttcactttgttgttaaattatagcagactcattatagagaacaagtttgccttgattttgtttaaaatgacttctgctaagcacccagaagataaaattgacatatttttataatataagcatactttttttgtacattgtgttcattctgtggagtgattggtgtgttggcccctcccatgccccattaatttaattcctccgggcaaaaaaaatataataaaaaa

SEQ ID NO: 321828 - DNA, 3751 bp, Homo sapiens
agcgggggggcgcgcgccgcctctcgctccgcccaacccgcgcgcgagcctgggcggggagggggagccaggaagctgcgagcgcgctggggagcgcagctgcaggcgttggggcggcaggagccgcggagccggcgctgagaggggctgcggccggagcgggcggctgagacaaaggcgacgatagggccagatttgagtgtgtgaatttttgagtgaaacctggaacccaaatgagaagaaatctgcaaggaataactactgacagtgaatctgcggtcatctgtatgcataatatggaatgttcttaacccagaagtagctgaatgtgttactccattgctgaggagtgactatctgttatagtccctgggtcaagacaacaatttttataccttcgtcgtggttcagaaaggagtctctgtagaaccagaagcaaagaaaggaaacaatccaaatttttctttattaaatcgactgtgtaagatacttgacttccaggaacaaaaacacggtgaaataataaaatttcatcttggcatcactggacatcatcgtattgaggagcgtatttttggaacttcccgagttgagatttggaaccttcattggtgctcatttactgtggactgtaagcatgagtgaattctggttgtgtttcaactgctgtattgcagaacagcctcagcctaaaaggcgacggcggattgacagaagtatgattggagagcccacaaactttgtgcatacagctcatgttggatcaggagacctgttcagtggaatgaattcagttagctccattcagaaccaaatgcagtccaagggaggttatggaggtggaatgcctgccaatgtccagatgcagctcgtggatacgaaggcgggatagccctggtcctttctccaggttattgtgaatttctatattttctctgtccactattctgtaatttttttttgtcctgtgattgcttttattttgaattacaaaaaagaagtgtgatggcaccttgtccaccctgtcgtgattattccagtgagatgttactgttctgctctgaagaagatactgtcagacgaatcctgcatttccttcagctggcatgcatgcctttggactcatggacagagttctttggattgtcactgaattttcaatgtttaatcagtatggatctgatcttcgcatgatcttttttgtgaatgctaacaccattttgcagttttttttttctattttaaacatttttcttttcactgccgaccccctgccttacgattttattggaaagcaaggacctgctattatttgttaatttgccatcatttatgtatattttggaaggtatgagacccacaagcacaatgatcatttttatttgtttgtttgtttgaaacttcagcagaatagatatctgcatgctttatgaagttgttgcttcggtaagagcccatgggatgccagaaattaacatttctttgctgccatgggctgatgatgctgctattagataaagtttagctgtggcaccaagtcacatcattttcatagaaaaagattacttgtagcttattttagaagtatgaccttttggtctgtttgattgattgattagaattgcaataaaagaaaagcttgcattcataaggcattcattctgttgtaaatgttcaatatatttattttgagagcaaggacctgtggttgtaaacaggtgtggttacaggtgtggttatgtatctgagtgttgcggtcatactctcctccagtccaatcctgagcatcttcatcttattaattagctgttcgtttctttgtgcactcattcttttatttttacttctttttaatgttatggtatccagttgtttccagtagcagtttcttgaacttctggcctgtactactaactgcagacctccagagtcactggcctttctgtgctctacatattattttaggggccacatcagttgccaagagcaacatacataccgacctggctgaattattgccagtgaaaacaacctgtacgaagcctttgctcaggttctaaaatatgtttgtccttgcacgaattttgtatatttcaaatatttctgtaaaggtttcttcttttctgttagagtgtggtgttaagccagagtcagtggtttgtgttctcattaaaatgtttgtttaaatcctatgtccaattcaagcctatctaactacatttggtaggattaacatttcatataacaaatggggcttaattaaaaactttaacttggaataaaggaacagggatcactttatcttctgccttcatttaccttagtccaagattcttgcaaaacaggcaactgaacaaacattaggtttatgtaggtaaaatgtgaaagcatttctcctccactttttaaaatttaatttacccagtacagcggggcaccagattacttgatctttgtattttgcagttttgagcctttgtgtcaatcccaagcacagagaggatctgccaaggaaaaacatttgcatcttcggagtagacattttgcagtttgtttaataacaacttctaaagtaagttgaattcatccattgtcactgattcaccaagtggatgttgcattgtggaatttgcctgagtactgttgtcattctgctcagccaggcacggtcagtttcttggccagggacattgctatgtgctgtgtgcaagctctttagaagagagattggattttcttggcattatcagcactcatgctatttagtctacttctattttgactgactctttaaattagtacaatttttctacttgtcatataactcctggaacaatagtacgggaagccgtgatccttttccctgactcatgattttagtctttttccaaatcgctgttttttttttgtttttttttttttttgctgctccaacgaccagcatgtgttggagcagatctccatggtaagccaaaagtggacttgtcagcctataactactctgcagctgccactaactctacaggcacagtaactacactttatacaggagcacatgccaaagtgcctgggaggtgccaataaaatcaagaaataagaaaactacaaaaaaagatacggtattaaccttggacataattttttttagggaggcagctttcccacttttataaagggggttgtaaatctcaagaggtcatttgttccccatagcagcatatctcatttttaaattgaagcgaattaaataggattttactactcaacattcattatactgttaatctttgctgaaatatatgctaacaaatgttaagcaagggaaactgaagacttagtcatgtggattgttagcagtgatctgcattctgtaaaagaggtactttcccatgatgtaggcatgaagtggtgccagtaagcgtagagcggaaatgttgactttagttaacattgggtttagcatttccagtgcagcattatcagtgggcctttaaaaatacttcgtaagtacattagctttcactttgttgttaaattatagcagactcattatagagaacaagtttgccttgattttgtttaaaatgacttctgctaagcacccagaagataaaattgacatatttttataatataagcatactttttttgtacattgtgttcattcatttataaatatttttttttctttattcgctttttttctcttttctctcccatttttttttttttcaataaaagttttctttca

SEQ ID NO: 321829 - DNA, 3847 bp, Homo sapiens
agcgggggggcgcgcgccgcctctcgctccgcccaacccgcgcgcgagcctgggcggggagggggagccaggaagctgcgagcgcgctggggagcgcagctgcaggcgttggggcggcaggagccgcggagccggcgctgagaggggctgcggccggagcgggcggctgagacaaaggcgacgatagggccagatttgagtgtgtgaatttttgagtgaaacctggaacccaaatgagaagaaatctgcaaggaataactactgacagtgaatctgcggtcatctgtatgcataatatggaatgttcttaacccagaagtagctgaatgtgttactccattgctgaggagtgactatctgttatagtccctgggtcaagacaacaatttttataccttcgtcgtggttcagaaaggagtctctgtagaaccagaagcaaagaaaggaaacaatccaaatttttctttattaaatcgactgtgtaagatacttgacttccaggaacaaaaacacggtgaaataataaaatttcatcttggcatcactggacatcatcgtattgaggagcgtatttttggaacttcccgagttgagatttggaaccttcattggtgctcatttactgtggactgtaagcatgagtgaattctggttgtgtttcaactgctgtattgcagaacagcctcagcctaaaaggcgacggcggattgacagaagtatgattggagagcccacaaactttgtgcatacagctcatgttggatcaggagacctgttcagtggaatgaattcagttagctccattcagaaccaaatgcagtccaagggaggttatggaggtggaatgcctgccaatgtccagatgcagctcgtggatacgaaggcgggatagccctggtcctttctccaggttattgtgaatttctatattttctctgtccactattctgtaatttttttttgtcctgtgattgcttttattttgaattacaaaaaagaagtgtgatggcaccttgtccaccctgtcgtgattattccagtgagatgttactgttctgctctgaagaagatactgtcagacgaatcctgcatttccttcagctggcatgcatgcctttggactcatggacagagttctttggattgtcactgaattttcaatgtttaatcagtatggatctgatcttcgcatgatcttttttgtgaatgctaacaccattttgcagttttttttttctattttaaacatttttcttttcactgccgaccccctgccttacgattttattggaaagcaaggacctgctattatttgttaatttgccatcatttatgtatattttggaaggtatgagacccacaagcacaatgatcatttttatttgtttgtttgtttgaaacttcagcagaatagatatctgcatgctttatgaagttgttgcttcggtaagagcccatgggatgccagaaattaacatttctttgctgccatgggctgatgatgctgctattagataaagtttagctgtggcaccaagtcacatcattttcatagaaaaagattacttgtagcttattttagaagtatgaccttttggtctgtttgattgattgattagaattgcaataaaagaaaagcttgcattcataaggcattcattctgttgtaaatgttcaatatatttattttgagagcaaggacctgtggttgtaaacaggtgtggttacaggtgtggttatgtatctgagtgttgcggtcatactctcctccagtccaatcctgagcatcttcatcttattaattagctgttcgtttctttgtgcactcattcttttatttttacttctttttaatgttatggtatccagttgtttccagtagcagtttcttgaacttctggcctgtactactaactgcagacctccagagtcactggcctttctgtgctctacatattattttaggggccacatcagttgccaagagcaacatacataccgacctggctgaattattgccagtgaaaacaacctgtacgaagcctttgctcaggttctaaaatatgtttgtccttgcacgaattttgtatatttcaaatatttctgtaaaggtttcttcttttctgttagagtgtggtgttaagccagagtcagtggtttgtgttctcattaaaatgtttgtttaaatcctatgtccaattcaagcctatctaactacatttggtaggattaacatttcatataacaaatggggcttaattaaaaactttaacttggaataaaggaacagggatcactttatcttctgccttcatttaccttagtccaagattcttgcaaaacaggcaactgaacaaacattaggtttatgtaggtaaaatgtgaaagcatttctcctccactttttaaaatttaatttacccagtacagcggggcaccagattacttgatctttgtattttgcagttttgagcctttgtgtcaatcccaagcacagagaggatctgccaaggaaaaacatttgcatcttcggagtagacattttgcagtttgtttaataacaacttctaaagtaagttgaattcatccattgtcactgattcaccaagtggatgttgcattgtggaatttgcctgagtactgttgtcattctgctcagccaggcacggtcagtttcttggccagggacattgctatgtgctgtgtgcaagctctttagaagagagattggattttcttggcattatcagcactcatgctatttagtctacttctattttgactgactctttaaattagtacaatttttctacttgtcatataactcctggaacaatagtacgggaagccgtgatccttttccctgactcatgattttagtctttttccaaatcgctgttttttttttgtttttttttttttttgctgctccaacgaccagcatgtgttggagcagatctccatggtaagccaaaagtggacttgtcagcctataactactctgcagctgccactaactctacaggcacagtaactacactttatacaggagcacatgccaaagtgcctgggaggtgccaataaaatcaagaaataagaaaactacaaaaaaagatacggtattaaccttggacataattttttttagggaggcagctttcccacttttataaagggggttgtaaatctcaagaggtcatttgttccccatagcagcatatctcatttttaaattgaagcgaattaaataggattttactactcaacattcattatactgttaatctttgctgaaatatatgctaacaaatgttaagcaagggaaactgaagacttagtcatgtggattgttagcagtgatctgcattctgtaaaagaggtactttcccatgatgtaggcatgaagtggtgccagtaagcgtagagcggaaatgttgactttagttaacattgggtttagcatttccagtgcagcattatcagtgggaaagtacctcttttacagaatgccgatcctgtaaagctcaaggtctgaaccccataaaaactctctattgtctctaagaattggaggtcggaactaaattgatcaatgtgcattgtcctttaactccaccctccaagcaatgataatataattatcgtagctaataattctttttagtcctgtaatatgtcagtgaactatatcatatatggttcaatgtggtagtgtgcaatttctgtgagaatatataatgcagttttactggactgttgtggacgtcaggtggaatttacgtaatacatggaaaagtaatagggattattttgaactccacagtaaataggtcttcctttcagaaag

SEQ ID NO: 321830 - DNA, 3587 bp, Homo sapiens
  misc_feature (3126)..(3126): n is a, c, g, or t
  misc_feature (3137)..(3137): n is a, c, g, or t
  misc_feature (3164)..(3164): n is a, c, g, or t
  misc_feature (3179)..(3180): n is a, c, g, or t
  misc_feature (3182)..(3182): n is a, c, g, or t
  misc_feature (3188)..(3189): n is a, c, g, or t
  misc_feature (3197)..(3197): n is a, c, g, or t
  misc_feature (3226)..(3226): n is a, c, g, or t
  misc_feature (3236)..(3236): n is a, c, g, or t
  misc_feature (3239)..(3240): n is a, c, g, or t
  misc_feature (3270)..(3270): n is a, c, g, or t
  misc_feature (3293)..(3293): n is a, c, g, or t
  misc_feature (3317)..(3317): n is a, c, g, or t
  misc_feature (3321)..(3321): n is a, c, g, or t
  misc_feature (3327)..(3327): n is a, c, g, or t
  misc_feature (3332)..(3332): n is a, c, g, or t
  misc_feature (3359)..(3359): n is a, c, g, or t
  misc_feature (3385)..(3385): n is a, c, g, or t
  misc_feature (3411)..(3411): n is a, c, g, or t
  misc_feature (3437)..(3437): n is a, c, g, or t
  misc_feature (3453)..(3455): n is a, c, g, or t
  misc_feature (3460)..(3460): n is a, c, g, or t
  misc_feature (3466)..(3466): n is a, c, g, or t
  misc_feature (3475)..(3475): n is a, c, g, or t
  misc_feature (3487)..(3487): n is a, c, g, or t
  misc_feature (3489)..(3489): n is a, c, g, or t
  misc_feature (3509)..(3509): n is a, c, g, or t
  misc_feature (3516)..(3516): n is a, c, g, or t
  misc_feature (3544)..(3544): n is a, c, g, or t
agcgggggggcgcgcgccgcctctcgctccgcccaacccgcgcgcgagcctgggcggggagggggagccaggaagctgcgagcgcgctggggagcgcagctgcaggcgttggggcggcaggagccgcggagccggcgctgagaggggctgcggccggagcgggcggctgagacaaaggcgacgatagggccagatttgagtgtgtgaatttttgagtgaaacctggaacccaaatgagaagaaatctgcaaggaataactactgacagtgaatctgcggtcatctgtatgcataatatggaatgttcttaacccagaagtagctgaatgtgttactccattgctgaggagtgactatctgttatagtccctgggtcaagacaacaatttttataccttcgtcgtggttcagaaaggagtctctgtagaaccagaagcaaagaaaggaaacaatccaaatttttctttattaaatcgactgtgtaagatacttgacttccaggaacaaaaacacggtgaaataataaaatttcatcttggcatcactggacatcatcgtattgaggagcgtatttttggaacttcccgagttgagatttggaaccttcattggtgctcatttactgtggactgtaagcatgagtgaattctggttgtgtttcaactgctgtattgcagaacagcctcagcctaaaaggcgacggcggattgacagaagtatgattggagagcccacaaactttgtgcatacagctcatgttggatcaggagacctgttcagtggaatgaattcagttagctccattcagaaccaaatgcagtccaagggaggttatggaggtggaatgcctgccaatgtccagatgcagctcgtggatacgaaggcgggatagccctggtcctttctccaggttattgtgaatttctatattttctctgtccactattctgtaatttttttttgtcctgtgattgcttttattttgaattacaaaaaagaagtgtgatggcaccttgtccaccctgtcgtgattattccagtgagatgttactgttctgctctgaagaagatactgtcagacgaatcctgcatttccttcagctggcatgcatgcctttggactcatggacagagttctttggattgtcactgaattttcaatgtttaatcagtatggatctgatcttcgcatgatcttttttgtgaatgctaacaccattttgcagttttttttttctattttaaacatttttcttttcactgccgaccccctgccttacgattttattggaaagcaaggacctgctattatttgttaatttgccatcatttatgtatattttggaaggtatgagacccacaagcacaatgatcatttttatttgtttgtttgtttgaaacttcagcagaatagatatctgcatgctttatgaagttgttgcttcggtaagagcccatgggatgccagaaattaacatttctttgctgccatgggctgatgatgctgctattagataaagtttagctgtggcaccaagtcacatcattttcatagaaaaagattacttgtagcttattttagaagtatgaccttttggtctgtttgattgattgattagaattgcaataaaagaaaagcttgcattcataaggcattcattctgttgtaaatgttcaatatatttattttgagagcaaggacctgtggttgtaaacaggtgtggttacaggtgtggttatgtatctgagtgttgcggtcatactctcctccagtccaatcctgagcatcttcatcttattaattagctgttcgtttctttgtgcactcattcttttatttttacttctttttaatgttatggtatccagttgtttccagtagcagtttcttgaacttctggcctgtactactaactgcagacctccagagtcactggcctttctgtgctctacatattattttaggggccacatcagttgccaagagcaacatacataccgacctggctgaattattgccagtgaaaacaacctgtacgaagcctttgctcaggttctaaaatatgtttgtccttgcacgaattttgtatatttcaaatatttctgtaaaggtttcttcttttctgttagagtgtggtgttaagccagagtcagtggtttgtgttctcattaaaatgtttgtttaaatcctatgtccaattcaagcctatctaactacatttggtaggattaacatttcatataacaaatggggcttaattaaaaactttaacttggaataaaggaacagggatcactttatcttctgccttcatttaccttagtccaagattcttgcaaaacaggcaactgaacaaacattaggtttatgtaggtaaaatgtgaaagcatttctcctccactttttaaaatttaatttacccagtacagcggggcaccagattacttgatctttgtattttgcagttttgagcctttgtgtcaatcccaagcacagagaggatctgccaaggaaaaacatttgcatcttcggagtagacattttgcagtttgtttaataacaacttctaaagtaagttgaattcatccattgtcactgattcaccaagtggatgttgcattgtggaatttgcctgagtactgttgtcattctgctcagccaggcacggtcagtttcttggccagggacattgctatgtgctgtgtgcaagctctttagaagagagattggattttcttggcattatcagcactcatgctatttagtctacttctattttgactgactctttaaattagtacaatttttctacttgtcatataactcctggaacaatagtacgggaagccgtgatccttttccctgactcatgattttagtctttttccaaatcgctgttttttttttgtttttttttttttttgctgctccaacgaccagcatgtgttggagcagatctccatggtaagccaaaagtggacttgtcagcctataactactctgcagctgccactaactctacaggcacagtaactacactttatacaggagcacatgccaaagtgcctgggaggtgccaataaaatcaagaaataagaaaactacaaaaaaagatacggaacaanccaaggacacnacccccctaagggaggcagcccccccnccccaaaaaaggggnnanaaaaanncaagagancaaacgccccccaaagcagcaaaccccanccaaaaaaanaannaaaaaaaaaaaaaaaaaacaacccaacaancaaaaaacagaaaaacaaagcanaaaaaaaagcaaacaaaaaaaaancaanggaaanagaanacaaagccatgaggaaagaaagcaganaacagcaaacagaaaaagaggaactnacccaagaagaaggcaagaagagganccagaaagcgaagagcggaaaagaanacaaaagaaaacaaannnaaaanaaaaancaaagcaanaaaaacagaggncnaaaaaaaaaacaccgaaagnacaatanccaacactatgaagaaaaaaaaaagcanacccaataaagagaacaagtttgcccagaattagtaaaaataa

SEQ ID NO: 321831 - DNA, 2878 bp, Homo sapiens
  misc_feature (2838)..(2839): n is a, c, g, or t
agcgggggggcgcgcgccgcctctcgctccgcccaacccgcgcgcgagcctgggcggggagggggagccaggaagctgcgagcgcgctggggagcgcagctgcaggcgttggggcggcaggagccgcggagccggcgctgagaggggctgcggccggagcgggcggctgagacaaaggcgacgatagggccagatttgagtgtgtgaatttttgagtgaaacctggaacccaaatgagaagaaatctgcaaggaataactactgacagtgaatctgcggtcatctgtatgcataatatggaatgttcttaacccagaagtagctgaatgtgttactccattgctgaggagtgactatctgttatagtccctgggtcaagacaacaatttttataccttcgtcgtggttcagaaaggagtctctgtagaaccagaagcaaagaaaggaaacaatccaaatttttctttattaaatcgactgtgtaagatacttgacttccaggaacaaaaacacggtgaaataataaaatttcatcttggcatcactggacatcatcgtattgaggagcgtatttttggaacttcccgagttgagatttggaaccttcattggtgctcatttactgtggactgtaagcatgagtgaattctggttgtgtttcaactgctgtattgcagaacagcctcagcctaaaaggcgacggcggattgacagaagtatgattggagagcccacaaactttgtgcatacagctcatgttggatcaggagacctgttcagtggaatgaattcagttagctccattcagaaccaaatgcagtccaagggaggttatggaggtggaatgcctgccaatgtccagatgcagctcgtggatacgaaggcgggatagccctggtcctttctccaggttattgtgaatttctatattttctctgtccactattctgtaatttttttttgtcctgtgattgcttttattttgaattacaaaaaagaagtgtgatggcaccttgtccaccctgtcgtgattattccagtgagatgttactgttctgctctgaagaagatactgtcagacgaatcctgcatttccttcagctggcatgcatgcctttggactcatggacagagttctttggattgtcactgaattttcaatgtttaatcagtatggatctgatcttcgcatgatcttttttgtgaatgctaacaccattttgcagttttttttttctattttaaacatttttcttttcactgccgaccccctgccttacgattttattggaaagcaaggacctgctattatttgttaatttgccatcatttatgtatattttggaaggtatgagacccacaagcacaatgatcatttttatttgtttgtttgtttgaaacttcagcagaatagatatctgcatgctttatgaagttgttgcttcggtaagagcccatgggatgccagaaattaacatttctttgctgccatgggctgatgatgctgctattagataaagtttagctgtggcaccaagtcacatcattttcatagaaaaagattacttgtagcttattttagaagtatgaccttttggtctgtttgattgattgattagaattgcaataaaagaaaagcttgcattcataaggcattcattctgttgtaaatgttcaatatatttattttgagagcaaggacctgtggttgtaaacaggtgtggttacaggtgtggttatgtatctgagtgttgcggtcatactctcctccagtccaatcctgagcatcttcatcttattaattagctgttcgtttctttgtgcactcattcttttatttttacttctttttaatgttatggtatccagttgtttccagtagcagtttcttgaacttctggcctgtactactaactgcagacctccagagtcactggcctttctgtgctctacatattattttaggggccacatcagttgccaagagcaacatacataccgacctggctgaattattgccagtgaaaacaacctgtacgaagcctttgctcaggttctaaaatatgtttgtccttgcacgaattttgtatatttcaaatatttctgtaaaggtttcttcttttctgttagagtgtggtgttaagccagagtcagtggtttgtgttctcattaaaatgtttgtttaaatcctatgtccaattcaagcctatctaactacatttggtaggattaacatttcatataacaaatggggcttaattaaaaactttaacttggaataaaggaacagggatcactttatcttctgccttcatttaccttagtccaagattcttgcaaaacaggcaactgaacaaacattaggtttatgtaggtaaaatgtgaaagcatttctcctccactttttaaaatttaatttacccagtacagcggggcaccagattacttgatctttgtattttgcagttttgagcctttgtgtcaatcccaagcacagagaggatctgccaaggaaaaacatttgcatcttcggagtagacattttgcagtttgtttaataacaacttctaaacctcaaggacgttttgttctgaagactctcatattcagctctgggaaataattatttctctgattatcccttcaacttttgaagattaccagatttctcaacagcaatactgtggtctggaataaaagggggcacttccctcagactttggagaagacattattttgaactagaattctgtctacagccatactctcaatgaagtaagatggcagaataaagatgtcatggcctcgttggcctcagcggtggagctctgcggccgnnaattaatattaatattaataatgagcaatggagcacaac

SEQ ID NO: 321832 - DNA, 3242 bp, Homo sapiens
  misc_feature (3202)..(3203): n is a, c, g, or t
agcgggggggcgcgcgccgcctctcgctccgcccaacccgcgcgcgagcctgggcggggagggggagccaggaagctgcgagcgcgctggggagcgcagctgcaggcgttggggcggcaggagccgcggagccggcgctgagaggggctgcggccggagcgggcggctgagacaaaggcgacgatagggccagatttgagtgtgtgaatttttgagtgaaacctggaacccaaatgagaagaaatctgcaaggaataactactgacagtgaatctgcggtcatctgtatgcataatatggaatgttcttaacccagaagtagctgaatgtgttactccattgctgaggagtgactatctgttatagtccctgggtcaagacaacaatttttataccttcgtcgtggttcagaaaggagtctctgtagaaccagaagcaaagaaaggaaacaatccaaatttttctttattaaatcgactgtgtaagatacttgacttccaggaacaaaaacacggtgaaataataaaatttcatcttggcatcactggacatcatcgtattgaggagcgtatttttggaacttcccgagttgagatttggaaccttcattggtgctcatttactgtggactgtaagcatgagtgaattctggttgtgtttcaactgctgtattgcagaacagcctcagcctaaaaggcgacggcggattgacagaagtatgattggagagcccacaaactttgtgcatacagctcatgttggatcaggagacctgttcagtggaatgaattcagttagctccattcagaaccaaatgcagtccaagggaggttatggaggtggaatgcctgccaatgtccagatgcagctcgtggatacgaaggcgggatagccctggtcctttctccaggttattgtgaatttctatattttctctgtccactattctgtaatttttttttgtcctgtgattgcttttattttgaattacaaaaaagaagtgtgatggcaccttgtccaccctgtcgtgattattccagtgagatgttactgttctgctctgaagaagatactgtcagacgaatcctgcatttccttcagctggcatgcatgcctttggactcatggacagagttctttggattgtcactgaattttcaatgtttaatcagtatggatctgatcttcgcatgatcttttttgtgaatgctaacaccattttgcagttttttttttctattttaaacatttttcttttcactgccgaccccctgccttacgattttattggaaagcaaggacctgctattatttgttaatttgccatcatttatgtatattttggaaggtatgagacccacaagcacaatgatcatttttatttgtttgtttgtttgaaacttcagcagaatagatatctgcatgctttatgaagttgttgcttcggtaagagcccatgggatgccagaaattaacatttctttgctgccatgggctgatgatgctgctattagataaagtttagctgtggcaccaagtcacatcattttcatagaaaaagattacttgtagcttattttagaagtatgaccttttggtctgtttgattgattgattagaattgcaataaaagaaaagcttgcattcataaggcattcattctgttgtaaatgttcaatatatttattttgagagcaaggacctgtggttgtaaacaggtgtggttacaggtgtggttatgtatctgagtgttgcggtcatactctcctccagtccaatcctgagcatcttcatcttattaattagctgttcgtttctttgtgcactcattcttttatttttacttctttttaatgttatggtatccagttgtttccagtagcagtttcttgaacttctggcctgtactactaactgcagacctccagagtcactggcctttctgtgctctacatattattttaggggccacatcagttgccaagagcaacatacataccgacctggctgaattattgccagtgaaaacaacctgtacgaagcctttgctcaggttctaaaatatgtttgtccttgcacgaattttgtatatttcaaatatttctgtaaaggtttcttcttttctgttagagtgtggtgttaagccagagtcagtggtttgtgttctcattaaaatgtttgtttaaatcctatgtccaattcaagcctatctaactacatttggtaggattaacatttcatataacaaatggggcttaattaaaaactttaacttggaataaaggaacagggatcactttatcttctgccttcatttaccttagtccaagattcttgcaaaacaggcaactgaacaaacattaggtttatgtaggtaaaatgtgaaagcatttctcctccactttttaaaatttaatttacccagtacagcggggcaccagattacttgatctttgtattttgcagttttgagcctttgtgtcaatcccaagcacagagaggatctgccaaggaaaaacatttgcatcttcggagtagacattttgcagtttgtttaataacaacttctaaacctcaaggacgttttgttctgaagactctcatattcagctctgggaaataattatttctctgattatcccttcaacttttgaagattaccagatttctcaacagcaatactgtggtctggaataaaagggggcacttccctcagactttggagaagacattattttgaactagaattctgtctacagccatactctcaatgaagtaagatggcagaataaagatgtcactagcagtgaatggctttactttccacacacccatcctgaaaacactctgcaagaatagagaacaaatccagtaataaaattaaatctcaggatttctaggtctgaagccaacctagaaggcattctatccaaattagaacaaacaatgagagatttttagaacaactgtttacaagaagcatgattaaatggataccattcaatagcaggaagataccatgcattcaaaacattttttatcgagcattatgtgcccaggtactgtttagacactgaggatacagcagtgaacaaatttcttaagcctccaagagtttttattctagtggggggatgcagaaagacattaagccaaataaagtgtggcctcgttggcctcagcggtggagctctgcggccgnnaattaatattaatattaataatgagcaatggagcacaac

SEQ ID NO: 321833 - DNA, 3084 bp, Homo sapiens
  misc_feature (3044)..(3045): n is a, c, g, or t
agcgggggggcgcgcgccgcctctcgctccgcccaacccgcgcgcgagcctgggcggggagggggagccaggaagctgcgagcgcgctggggagcgcagctgcaggcgttggggcggcaggagccgcggagccggcgctgagaggggctgcggccggagcgggcggctgagacaaaggcgacgatagggccagatttgagtgtgtgaatttttgagtgaaacctggaacccaaatgagaagaaatctgcaaggaataactactgacagtgaatctgcggtcatctgtatgcataatatggaatgttcttaacccagaagtagctgaatgtgttactccattgctgaggagtgactatctgttatagtccctgggtcaagacaacaatttttataccttcgtcgtggttcagaaaggagtctctgtagaaccagaagcaaagaaaggaaacaatccaaatttttctttattaaatcgactgtgtaagatacttgacttccaggaacaaaaacacggtgaaataataaaatttcatcttggcatcactggacatcatcgtattgaggagcgtatttttggaacttcccgagttgagatttggaaccttcattggtgctcatttactgtggactgtaagcatgagtgaattctggttgtgtttcaactgctgtattgcagaacagcctcagcctaaaaggcgacggcggattgacagaagtatgattggagagcccacaaactttgtgcatacagctcatgttggatcaggagacctgttcagtggaatgaattcagttagctccattcagaaccaaatgcagtccaagggaggttatggaggtggaatgcctgccaatgtccagatgcagctcgtggatacgaaggcgggatagccctggtcctttctccaggttattgtgaatttctatattttctctgtccactattctgtaatttttttttgtcctgtgattgcttttattttgaattacaaaaaagaagtgtgatggcaccttgtccaccctgtcgtgattattccagtgagatgttactgttctgctctgaagaagatactgtcagacgaatcctgcatttccttcagctggcatgcatgcctttggactcatggacagagttctttggattgtcactgaattttcaatgtttaatcagtatggatctgatcttcgcatgatcttttttgtgaatgctaacaccattttgcagttttttttttctattttaaacatttttcttttcactgccgaccccctgccttacgattttattggaaagcaaggacctgctattatttgttaatttgccatcatttatgtatattttggaaggtatgagacccacaagcacaatgatcatttttatttgtttgtttgtttgaaacttcagcagaatagatatctgcatgctttatgaagttgttgcttcggtaagagcccatgggatgccagaaattaacatttctttgctgccatgggctgatgatgctgctattagataaagtttagctgtggcaccaagtcacatcattttcatagaaaaagattacttgtagcttattttagaagtatgaccttttggtctgtttgattgattgattagaattgcaataaaagaaaagcttgcattcataaggcattcattctgttgtaaatgttcaatatatttattttgagagcaaggacctgtggttgtaaacaggtgtggttacaggtgtggttatgtatctgagtgttgcggtcatactctcctccagtccaatcctgagcatcttcatcttattaattagctgttcgtttctttgtgcactcattcttttatttttacttctttttaatgttatggtatccagttgtttccagtagcagtttcttgaacttctggcctgtactactaactgcagacctccagagtcactggcctttctgtgctctacatattattttaggggccacatcagttgccaagagcaacatacataccgacctggctgaattattgccagtgaaaacaacctgtacgaagcctttgctcaggttctaaaatatgtttgtccttgcacgaattttgtatatttcaaatatttctgtaaaggtttcttcttttctgttagagtgtggtgttaagccagagtcagtggtttgtgttctcattaaaatgtttgtttaaatcctatgtccaattcaagcctatctaactacatttggtaggattaacatttcatataacaaatggggcttaattaaaaactttaacttggaataaaggaacagggatcactttatcttctgccttcatttaccttagtccaagattcttgcaaaacaggcaactgaacaaacattaggtttatgtaggtaaaatgtgaaagcatttctcctccactttttaaaatttaatttacccagtacagcggggcaccagattacttgatctttgtattttgcagttttgagcctttgtgtcaatcccaagcacagagaggatctgccaaggaaaaacatttgcatcttcggagtagacattttgcagtttgtttaataacaacttctaaacctcaaggacgttttgttctgaagactctcatattcagctctgggaaataattatttctctgattatcccttcaacttttgaagattaccagatttctcaacagcaatactgtggtctggaataaaagggggcacttccctcagactttggagaagacattattttgaactagaattctgtctacagccatactctcaatgaagtaagatggcagaataaagatgtcactagcagtgaatggctttactttccacacacccatcctgaaaacactctgcaagaatagagaacaaatccagtaataaaattaaatctcaggatttctaggtctgaagccaacctagaaggcattctatccaaattagaacaaacaatgagagatttttagaacaactgtttacaagaagcatgattaaatggataccattcaatatggcctcgttggcctcagcggtggagctctgcggccgnnaattaatattaatattaataatgagcaatggagcacaac

SEQ ID NO: 321834 - DNA, 1180 bp, Homo sapiens
gcagtagtttaatacactcatatatcatccatgtcactgattcaccagtgatgtgatgcctgagtactgttgtcattctgctcagccaggcacggtcagtttcttggccagggacattgctatgtgctgtgtgcaagctctttagaagagagattggattttcttggcattatcagcactcatgctatttagtctacttctattttgactgactctttaaattagtacaatttttctacttgtcatataactcctggaacaatagtacgggaagccgtgatccttttccctgactcatgattttagtctttttccaaatcgctgttttttttttgtttttttttttttttgctgctccaacgaccagcatgtgttggagcagatctccatggtaagccaaaagtggacttgtcagcctataactactctgcagctgccactaactctacaggcacagtaactacactttatacaggagcacatgccaaagtgcctgggaggtgccaataaaatcaagaaataagaaaactacaaaaaaagatacggtattaaccttggacataattttttttagggaggcagctttcccacttttataaagggggttgtaaatctcaagaggtcatttgttccccatagcagcatatctcatttttaaattgaagcgaattaaataggattttactactcaacattcattatactgttaatctttgctgaaatatatgctaacaaatgttaagcaagggaaactgaagacttagtcatgtggattgttagcagtgatctgcattctgtaaaagaggtactttcccatgatgtaggcatgaagtggtgccagtaagcgtagagcggaaatgttgactttagttaacattgggtttagcatttccagtgcagcattatcagtgggcctttaaaaatacttcgtaagtacattagctttcactttgttgttaaattatagcagactcattatagagaacaagtttgccttgattttgtttaaaatgacttctgctaagcacccagaagataaaattgacatatttttataatataagcatactttttttgtacattgtgttcattcttgaataaaatgagttctgtgttggcttgtagatactaaaaagaaagtattgattttgattcaataaatgttttctttcaatcctgg

SEQ ID NO: 321835 - DNA, 2854 bp, Homo sapiens
  misc_feature (2814)..(2815): n is a, c, g, or t
agcgggggggcgcgcgccgcctctcgctccgcccaacccgcgcgcgagcctgggcggggagggggagccaggaagctgcgagcgcgctggggagcgcagctgcaggcgttggggcggcaggagccgcggagccggcgctgagaggggctgcggccggagcgggcggctgagacaaaggcgacgatagggccagatttgagtgtgtgaatttttgagtgaaacctggaacccaaatgagaagaaatctgcaaggaataactactgacagtgaatctgcggtcatctgtatgcataatatggaatgttcttaacccagaagtagctgaatgtgttactccattgctgaggagtgactatctgttatagtccctgggtcaagacaacaatttttataccttcgtcgtggttcagaaaggagtctctgtagaaccagaagcaaagaaaggaaacaatccaaatttttctttattaaatcgactgtgtaagatacttgacttccaggaacaaaaacacggtgaaataataaaatttcatcttggcatcactggacatcatcgtattgaggagcgtatttttggaacttcccgagttgagatttggaaccttcattggtgctcatttactgtggactgtaagcatgagtgaattctggttgtgtttcaactgctgtattgcagaacagcctcagcctaaaaggcgacggcggattgacagaagtatgattggagagcccacaaactttgtgcatacagctcatgttggatcaggagacctgttcagtggaatgaattcagttagctccattcagaaccaaatgcagtccaagggaggttatggaggtggaatgcctgccaatgtccagatgcagctcgtggatacgaaggcgggatagccctggtcctttctccaggttattgtgaatttctatattttctctgtccactattctgtaatttttttttgtcctgtgattgcttttattttgaattacaaaaaagaagtgtgatggcaccttgtccaccctgtcgtgattattccagtgagatgttactgttctgctctgaagaagatactgtcagacgaatcctgcatttccttcagctggcatgcatgcctttggactcatggacagagttctttggattgtcactgaattttcaatgtttaatcagtatggatctgatcttcgcatgatcttttttgtgaatgctaacaccattttgcagttttttttttctattttaaacatttttcttttcactgccgaccccctgccttacgattttattggaaagcaaggacctgctattatttgttaatttgccatcatttatgtatattttggaaggtatgagacccacaagcacaatgatcatttttatttgtttgtttgtttgaaacttcagcagaatagatatctgcatgctttatgaagttgttgcttcggtaagagcccatgggatgccagaaattaacatttctttgctgccatgggctgatgatgctgctattagataaagtttagctgtggcaccaagtcacatcattttcatagaaaaagattacttgtagcttattttagaagtatgaccttttggtctgtttgattgattgattagaattgcaataaaagaaaagcttgcattcataaggcattcattctgttgtaaatgttcaatatatttattttgagagcaaggacctgtggttgtaaacaggtgtggttacaggtgtggttatgtatctgagtgttgcggtcatactctcctccagtccaatcctgagcatcttcatcttattaattagctgttcgtttctttgtgcactcattcttttatttttacttctttttaatgttatggtatccagttgtttccagtagcagtttcttgaacttctggcctgtactactaactgcagacctccagagtcactggcctttctgtgctctacatattattttaggggccacatcagttgccaagagcaacatacataccgacctggctgaattattgccagtgaaaacaacctgtacgaagcctttgctcaggttctaaaatatgtttgtccttgcacgaattttgtatatttcaaatatttctgtaaaggtttcttcttttctgttagagtgtggtgttaagccagagtcagtggtttgtgttctcattaaaatgtttgtttaaatcctatgtccaattcaagcctatctaactacatttggtaggattaacatttcatataacaaatggggcttaattaaaaactttaacttggaataaaggaacagggatcactttatcttctgccttcatttaccttagtccaagattcttgcaaaacaggcaactgaacaaacattaggtttatgtaggtaaaatgtgaaagcatttctcctccactttttaaaatttaatttacccagtacagcggggcaccagattacttgatctttgtattttgcagttttgagcctttgtgtcaatcccaagcacagagaggatctgccaaggaaaaacatttgcatcttcggagtagacattttgcagtttgtttaataacaacttctaaacctcaaggacgttttgttctgaagactctcatattcagctctgggaaataattatttctctgattatcccttcaacttttgaagattaccagatttctcaacagcaatactgtggtctggaataaaagggggcacttccctcagactttggagaagacattattttgaactagaattctgtctacagccatactctcaatgaagtggcctcgttggcctcagcggtggagctctgcggccgnnaattaatattaatattaataatgagcaatggagcacaac

SEQ ID NO: 321836 - DNA, 2777 bp, Homo sapiens
  misc_feature (2737)..(2738): n is a, c, g, or t
agcgggggggcgcgcgccgcctctcgctccgcccaacccgcgcgcgagcctgggcggggagggggagccaggaagctgcgagcgcgctggggagcgcagctgcaggcgttggggcggcaggagccgcggagccggcgctgagaggggctgcggccggagcgggcggctgagacaaaggcgacgatagggccagatttgagtgtgtgaatttttgagtgaaacctggaacccaaatgagaagaaatctgcaaggaataactactgacagtgaatctgcggtcatctgtatgcataatatggaatgttcttaacccagaagtagctgaatgtgttactccattgctgaggagtgactatctgttatagtccctgggtcaagacaacaatttttataccttcgtcgtggttcagaaaggagtctctgtagaaccagaagcaaagaaaggaaacaatccaaatttttctttattaaatcgactgtgtaagatacttgacttccaggaacaaaaacacggtgaaataataaaatttcatcttggcatcactggacatcatcgtattgaggagcgtatttttggaacttcccgagttgagatttggaaccttcattggtgctcatttactgtggactgtaagcatgagtgaattctggttgtgtttcaactgctgtattgcagaacagcctcagcctaaaaggcgacggcggattgacagaagtatgattggagagcccacaaactttgtgcatacagctcatgttggatcaggagacctgttcagtggaatgaattcagttagctccattcagaaccaaatgcagtccaagggaggttatggaggtggaatgcctgccaatgtccagatgcagctcgtggatacgaaggcgggatagccctggtcctttctccaggttattgtgaatttctatattttctctgtccactattctgtaatttttttttgtcctgtgattgcttttattttgaattacaaaaaagaagtgtgatggcaccttgtccaccctgtcgtgattattccagtgagatgttactgttctgctctgaagaagatactgtcagacgaatcctgcatttccttcagctggcatgcatgcctttggactcatggacagagttctttggattgtcactgaattttcaatgtttaatcagtatggatctgatcttcgcatgatcttttttgtgaatgctaacaccattttgcagttttttttttctattttaaacatttttcttttcactgccgaccccctgccttacgattttattggaaagcaaggacctgctattatttgttaatttgccatcatttatgtatattttggaaggtatgagacccacaagcacaatgatcatttttatttgtttgtttgtttgaaacttcagcagaatagatatctgcatgctttatgaagttgttgcttcggtaagagcccatgggatgccagaaattaacatttctttgctgccatgggctgatgatgctgctattagataaagtttagctgtggcaccaagtcacatcattttcatagaaaaagattacttgtagcttattttagaagtatgaccttttggtctgtttgattgattgattagaattgcaataaaagaaaagcttgcattcataaggcattcattctgttgtaaatgttcaatatatttattttgagagcaaggacctgtggttgtaaacaggtgtggttacaggtgtggttatgtatctgagtgttgcggtcatactctcctccagtccaatcctgagcatcttcatcttattaattagctgttcgtttctttgtgcactcattcttttatttttacttctttttaatgttatggtatccagttgtttccagtagcagtttcttgaacttctggcctgtactactaactgcagacctccagagtcactggcctttctgtgctctacatattattttaggggccacatcagttgccaagagcaacatacataccgacctggctgaattattgccagtgaaaacaacctgtacgaagcctttgctcaggttctaaaatatgtttgtccttgcacgaattttgtatatttcaaatatttctgtaaaggtttcttcttttctgttagagtgtggtgttaagccagagtcagtggtttgtgttctcattaaaatgtttgtttaaatcctatgtccaattcaagcctatctaactacatttggtaggattaacatttcatataacaaatggggcttaattaaaaactttaacttggaataaaggaacagggatcactttatcttctgccttcatttaccttagtccaagattcttgcaaaacaggcaactgaacaaacattaggtttatgtaggtaaaatgtgaaagcatttctcctccactttttaaaatttaatttacccagtacagcggggcaccagattacttgatctttgtattttgcagttttgagcctttgtgtcaatcccaagcacagagaggatctgccaaggaaaaacatttgcatcttcggagtagacattttgcagtttgtttaataacaacttctaaacctcaaggacgttttgttctgaagactctcatattcagctctgggaaataattatttctctgattatcccttcaacttttgaagattaccagatttctcaacagcaatactgtggtctggaataaaatggcctcgttggcctcagcggtggagctctgcggccgnnaattaatattaatattaataatgagcaatggagcacaac

SEQ ID NO: 321837 - DNA, 1648 bp, Homo sapiens
agcgggggggcgcgcgccgcctctcgctccgcccaacccgcgcgcgagcctgggcggggagggggagccaggaagctgcgagcgcgctggggagcgcagctgcaggcgttggggcggcaggagccgcggagccggcgctgagaggggctgcggccggagcgggcggctgagacaaaggcgacgatagggccagatttgagtgtgtgaatttttgagtgaaacctggaacccaaatgagaagaaatctgcaaggaataactactgacagtgaatctgcggtcatctgtatgcataatatggaatgttcttaacccagaagtagctgaatgtgttactccattgctgaggagtgactatctgttatagtccctgggtcaagacaacaatttttataccttcgtcgtggttcagaaaggagtctctgtagaaccagaagcaaagaaaggaaacaatccaaatttttctttattaaatcgactgtgtaagatacttgacttccaggaacaaaaacacggtgaaataataaaatttcatcttggcatcactggacatcatcgtattgaggagcgtatttttggaacttcccgagttgagatttggaaccttcattggtgctcatttactgtggactgtaagcatgagtgaattctggttgtgtttcaactgctgtattgcagaacagcctcagcctaaaaggcgacggcggattgacagaagtatgattggagagcccacaaactttgtgcatacagctcatgttggatcaggagacctgttcagtggaatgaattcagttagctccattcagaaccaaatgcagtccaagggaggttatggaggtggaatgcctgccaatgtccagatgcagctcgtggatacgaaggcgggatagccctggtcctttctccaggttattgtgaatttctatattttctctgtccactattctgtaatttttttttgtcctgtgattgcttttattttgaattacaaaaaagaagtgtgatggcaccttgtccaccctgtcgtgattattccagtgagatgttactgttctgctctgaagaagatactgtcagacgaatcctgcatttccttcagctggcatgcatgcctttggactcatggacagagttctttggattgtcactgaattttcaatgtttaatcagtatggatctgatcttcgcatgatcttttttgtgaatgctaacaccattttgcagttttttttttctattttaaacatttttcttttcactgccgaccccctgccttacgattttattggaaagcaaggacctgctattatttgttaatttgccatcatttatgtatattttggaaggtatgagacccacaagcacaatgatcatttttatttgtttgtttgtttgaaacttcagcagaatagatatctgcatgctttatgaagttgttgcttcggtaagagcccatgggatgccagaaattaacatttctttgctgccatgggctgatgatgctgctattagataaagtttagctgtggcaccaagtcacatcattttcatagaaaaagattacttgtagcttattttagaagtatgaccttttggtctgtttgattgattgattagaattgcaataaaagaaaagcttgcattca

SEQ ID NO: 321838 - DNA, 2124 bp, Homo sapiens
  misc_feature (2084)..(2085): n is a, c, g, or t
agcgggggggcgcgcgccgcctctcgctccgcccaacccgcgcgcgagcctgggcggggagggggagccaggaagctgcgagcgcgctggggagcgcagctgcaggcgttggggcggcaggagccgcggagccggcgctgagaggggctgcggccggagcgggcggctgagacaaaggcgacgatagggccagatttgagtgtgtgaatttttgagtgaaacctggaacccaaatgagaagaaatctgcaaggaataactactgacagtgaatctgcggtcatctgtatgcataatatggaatgttcttaacccagaagtagctgaatgtgttactccattgctgaggagtgactatctgttatagtccctgggtcaagacaacaatttttataccttcgtcgtggttcagaaaggagtctctgtagaaccagaagcaaagaaaggaaacaatccaaatttttctttattaaatcgactgtgtaagatacttgacttccaggaacaaaaacacggtgaaataataaaatttcatcttggcatcactggacatcatcgtattgaggagcgtatttttggaacttcccgagttgagatttggaaccttcattggtgctcatttactgtggactgtaagcatgagtgaattctggttgtgtttcaactgctgtattgcagaacagcctcagcctaaaaggcgacggcggattgacagaagtatgattggagagcccacaaactttgtgcatacagctcatgttggatcaggagacctgttcagtggaatgaattcagttagctccattcagaaccaaatgcagtccaagggaggttatggaggtggaatgcctgccaatgtccagatgcagctcgtggatacgaaggcgggatagccctggtcctttctccaggttattgtgaatttctatattttctctgtccactattctgtaatttttttttgtcctgtgattgcttttattttgaattacaaaaaagaagtgtgatggcaccttgtccaccctgtcgtgattattccagtgagatgttactgttctgctctgaagaagatactgtcagacgaatcctgcatttccttcagctggcatgcatgcctttggactcatggacagagttctttggattgtcactgaattttcaatgtttaatcagtatggatctgatcttcgcatgatcttttttgtgaatgctaacaccattttgcagttttttttttctattttaaacatttttcttttcactgccgaccccctgccttacgattttattggaaagcaaggacctgctattatttgttaatttgccatcatttatgtatattttggaagttttgagcctttgtgtcaatcccaagcacagagaggatctgccaaggaaaaacatttgcatcttcggagtagacattttgcagtttgtttaataacaacttctaaacctcaaggacgttttgttctgaagactctcatattcagctctgggaaataattatttctctgattatcccttcaacttttgaagattaccagatttctcaacagcaatactgtggtctggaataaaagggggcacttccctcagactttggagaagacattattttgaactagaattctgtctacagccatactctcaatgaagtaagatggcagaataaagatgtcactagcagtgaatggctttactttccacacacccatcctgaaaacactctgcaagaatagagaacaaatccagtaataaaattaaatctcaggatttctaggtctgaagccaacctagaaggcattctatccaaattagaacaaacaatgagagatttttagaacaactgtttacaagaagcatgattaaatggataccattcaatagcaggaagataccatgcattcaaaacattttttatcgagcattatgtgcccaggtactgtttagacactgaggatacagcagtgaacaaatttcttaagcctccaagagtttttattctagtggggggatgcagaaagacattaagccaaataaagtgtggcctcgttggcctcagcggtggagctctgcggccgnnaattaatattaatattaataatgagcaatggagcacaac

SEQ ID NO: 321839 - DNA, 1099 bp, Homo sapiens
  misc_feature (1059)..(1060): n is a, c, g, or t
agcgggggggcgcgcgccgcctctcgctccgcccaacccgcgcgcgagcctgggcggggagggggagccaggaagctgcgagcgcgctggggagcgcagctgcaggcgttggggcggcaggagccgcggagccggcgctgagaggggctgcggccggagcgggcggctgagacaaaggcgacgatagggccagatttgagtgtgtgaatttttgagtgaaacctggaacccaaatgagaagaaatctgcaaggaataactactgacagtgaatctgcggtcatctgtatgcataatatggaatgttcttaacccagaagtagctgaatgtgttactccattgctgaggagtgactatctgttatagtccctgggtcaagacaacaatttttataccttcgtcgtggttcagaaaggagtctctgtagaaccagaagcaaagaaaggaaacaatccaaatttttctttattaaatcgactgtgtaagatacttgacttccaggaacaaaaacacggtgaaataataaaatttcatcttggcatcactggacatcatcgtattgaggagcgtatttttggaacttcccgagttgagatttggaaccttcattggtgctcatttactgtggactgtaagcatgagtgaattctggttgtgtttcaactgctgtattgcagaacagcctcagcctaaaaggcgacggcggattgacagaagtatgattggagagcccacaaactttgtgcatacagctcatgttggatcaggagacctgttcagtggaatgaattcacctcaaggacgttttgttctgaagactctcatattcagctctgggaaataattatttctctgattatcccttcaacttttgaagattaccagatttctcaacagcaatactgtggtctggaataaaagggggcacttccctcagactttggagaagacattattttgaactagaattctgtctacagccatactctcaatgaagtaagatggcagaataaagatgtcatggcctcgttggcctcagcggtggagctctgcggccgnnaattaatattaatattaataatgagcaatggagcacaac

SEQ ID NO: 321840 - DNA, 359 bp, Homo sapiens
  misc_feature (33)..(34): n is a, c, g, or t
  misc_feature (48)..(48): n is a, c, g, or t
  misc_feature (319)..(320): n is a, c, g, or t
aggtgtgagctggaaaagggaggaaaaggctgnncgagtcatctactncgaagcctcaaggacgttttgttctgaagactctcatattcagctctgggaaataattatttctctgattatcccttcaacttttgaagattaccagatttctcaacagcaatactgtggtctggaataaaagggggcacttccctcagactttggagaagacattattttgaactagaattctgtctacagccatactctcaatgaagtaagatggcagaataaagatgtcatggcctcgttggcctcagcggtggagctctgcggccgnnaattaatattaatattaataatgagcaatggagcacaac

SEQ ID NO: 321841 - DNA, 494 bp, Homo sapiens
  misc_feature (454)..(455): n is a, c, g, or t
aaagaatctaggaaatattcattctactgtgaaggacacagtagagggtcaggcagtccaatctgtgattaacgggagttttacaaaaagcaaggaaaatgctcttcagaggaaaaagattttaaaaaaaagtctcttgaaatttcaaaaaatttgtttttacatttatactttctcacttcacagcccctcaaggacgttttgttctgaagactctcatattcagctctgggaaataattatttctctgattatcccttcaacttttgaagattaccagatttctcaacagcaatactgtggtctggaataaaagggggcacttccctcagactttggagaagacattattttgaactagaattctgtctacagccatactctcaatgaagtaagatggcagaataaagatgtcatggcctcgttggcctcagcggtggagctctgcggccgnnaattaatattaatattaataatgagcaatggagcacaac

SEQ ID NO: 321842 - DNA, 925 bp, Homo sapiens
  misc_feature (885)..(886): n is a, c, g, or t
aaaaaaactttattgtagatatatgcaacctctaggctcattttgacccctacctcatctttttaatgcccatcatcttaatgttgtatctggtttgcctttgatgcctagaagaagaaaaaaatctttgcatttactaaagaaaacagttactccctgagtaagatcaagtgtttgatctgggaccttataaggaagttctcaaagaatggtgatcttggtattgaagaaagctgattttcatctcattagaagcctcaaggacgttttgttctgaagactctcatattcagctctgggaaataattatttctctgattatcccttcaacttttgaagattaccagatttctcaacagcaatactgtggtctggaataaaagggggcacttccctcagactttggagaagacattattttgaactagaattctgtctacagccatactctcaatgaagtaagatggcagaataaagatgtcactagcagtgaatggctttactttccacacacccatcctgaaaacactctgcaagaatagagaacaaatccagtaataaaattaaatctcaggatttctaggtctgaagccaacctagaaggcattctatccaaattagaacaaacaatgagagatttttagaacaactgtttacaagaagcatgattaaatggataccattcaatagcaggaagataccatgcattcaaaacattttttatcgagcattatgtgcccaggtactgtttagacactgaggatacagcagtgaacaaatttcttaagcctccaagagtttttattctagtggggggatgcagaaagacattaagccaaataaagtgtggcctcgttggcctcagcggtggagctctgcggccgnnaattaatattaatattaataatgagcaatggagcacaac

SEQ ID NO: 321843 - DNA, 469 bp, Homo sapiens
gctgtattgcagaacagcctcagcctgtaagtatgaagtatgtggacacatcaggtggggtgcttattaaactttccactggttctcaaactgaggattgggatcctagcagtaattgcaaagcagttgtagagaataccacagagaatagttcagtggaactccgaacatatgtttaaaaagaaataatgtttttaaagtaaatactgtatgtcaagaactctcctagaccattcatcgtacatgactgagaggaggtgttcttctgtcaaatagcttctggaggaatagtgagagaaaaaggagatagtaacctgaggtaaaacagataaatcagccttggaagtcagtgggtggaagatgtgacagccatattgccatcatattcctctcagcttaccatctcattttcctcagagcaaccctctgaggaagatatcattgtctttatttttcagttgaaacaggt

SEQ ID NO: 321844 - DNA, 468 bp, Homo sapiens
gtgtttttttgtctcttttgtgtgatgttgttctttgtttccctgaacttttctgcttctaagtttgttgccgtttccttccattttcccaaaattttgggcgctttccttttaatcaaacaccctctggccttctgccttgagctgggactgctttctgtctgtccggcctgcacccagcccctgcccacaaaaccccagggacagcggtctccccagcctgccctgctcaggccttgcccccaaacctgtactgtcccggaggaggttgggaggtggaggcccagcatcccgcgcagatgacaccatcaaccgccagagtcccagacaccggttttcctagaagcccctcacccccactggcccactggtggctaggtctccccttatccttctggtccagcgcaaggaggggctgcttctgaggtcggtggctgtctttccattaaagaaacaccgtgcaacgtg

SEQ ID NO: 321845 - DNA, 2300 bp, Homo sapiens
cagcctttagcctcccgcccgccgcctctgtctccctctctccacaaactgcccaggagtgagtagctgctttcggtccgccggacacaccggacagatagacgtgcggacggcccaccaccccagcccgccaactagtcagcctgcgcctggcgcctcccctctccaggtccatccgccatgtggcccctgtggcgcctcgtgtctctgctggccctgagccaggccctgccctttgagcagagaggcttctgggacttcaccctggacgatgggccattcatgatgaacgatgaggaagcttcgggcgctgacacctcaggcgtcctggacccggactctgtcacacccacctacagcgccatgtgtcctttcggctgccactgccacctgcgggtggttcagtgctccgacctgggtctgaagtctgtgcccaaagagatctcccctgacaccacgctgctggacctgcagaacaacgacatctccgagctccgcaaggatgacttcaagggtctccagcacctctacgccctcgtcctggtgaacaacaagatctccaagatccatgagaaggccttcagcccactgcggaagctgcagaagctctacatctccaagaaccacctggtggagatcccgcccaacctacccagctccctggtggagctccgcatccacgacaaccgcatccgcaaggtgcccaagggagtgttcagcgggctccggaacatgaactgcatcgagatgggcgggaacccactggagaacagtggctttgaacctggagccttcgatggcctgaagctcaactacctgcgcatctcagaggccaagctgactggcatccccaaagacctccctgagaccctgaatgaactccacctagaccacaacaaaatccaggccatcgaactggaggacctgcttcgctactccaagctgtacaggctgggcctaggccacaaccagatcaggatgatcgagaacgggagcctgagcttcctgcccaccctccgggagctccacttggacaacaacaagttggccagggtgccctcagggctcccagacctcaagctcctccaggtggtctatctgcactccaacaacatcaccaaagtgggtgtcaacgacttctgtcccatgggcttcggggtgaagcgggcctactacaacggcatcagcctcttcaacaaccccgtgccctactgggaggtgcagccggccactttccgctgcgtcactgaccgcctggccatccagtttggcaactacaaaaagtagaggcagctgcagccaccgcggggcctcagtgggggtctctggggaacacagccagacatcctgatggggaggcagagccaggaagctaagccagggcccagctgcgtccaacccagccccccacctcgggtccctgaccccagctcgatgccccatcaccgcctctccctggctcccaagggtgcaggtgggcgcaaggcccggcccccatcacatgttcccttggcctcagagctgcccctgctctcccaccacagccacccagaggcaccccatgaagcttttttctcgttcactcccaaacccaagtgtccaaggctccagtcctaggagaacagtccctgggtcagcagccaggaggcggtccataagaatggggacagtgggctctgccagggctgccgcacctgtccagacacacatgttctgttcctcctcctcatgcatttccagcctttcaaccctccccgactctgcggctcccctcagcccccttgcaagttcatggcctgtccctcccagacccctgctccactggcccttcgaccagtcctcccttctgttctctctttccccgtccttcctctctctctctctctctctctctctctctttctgtgtgtgtgtgtgtgtgtgtgtgtgtgtgtgtgtgtgtgtcttgtgcttcctcagacctttctcgcttctgagcttggtggcctgttccctccatctctccgaacctggcttcgcctgtccctttcactccacaccctctggccttctgccttgagctgggactgctttctgtctgtccggcctgcacccagcccctgcccacaaaaccccagggacagcggtctccccagcctgccctgctcaggccttgcccccaaacctgtactgtcccggaggaggttgggaggtggaggcccagcatcccgcgcagatgacaccatcaaccgccagagtcccagacacctgcttctgaggtcggtggctgtctttccattaaagaaacaccgtgcaacgtg

SEQ ID NO: 321846 - DNA, 2839 bp, Homo sapiens
cagcctttagcctcccgcccgccgcctctgtctccctctctccacaaactgcccaggagtgagtagctgctttcggtccgccggacacaccggacagatagacgtgcggacggcccaccaccccagcccgccaactagtcagcctgcgcctggcgcctcccctctccaggtccatccgccatgtggcccctgtggcgcctcgtgtctctgctggccctgagccaggccctgccctttgagcagagaggcttctgggacttcaccctggacgatgggccattcatgatgaacgatgaggaagcttcgggcgctgacacctcaggcgtcctggacccggactctgtcacacccacctacagcgccatgtgtcctttcggctgccactgccacctgcgggtggttcagtgctccgacctgggtctgaagtctgtgcccaaagagatctcccctgacaccacgctgctggacctgcagaacaacgacatctccgagctccgcaaggatgacttcaagggtctccagcacctctacgccctcgtcctggtgaacaacaagatctccaagatccatgagaaggccttcagcccactgcggaagctgcagaagctctacatctccaagaaccacctggtggagatcccgcccaacctacccagctccctggtggagctccgcatccacgacaaccgcatccgcaaggtgcccaagggagtgttcagcgggctccggaacatgaactgcatcgagatgggcgggaacccactggagaacagtggctttgaacctggagccttcgatggcctgaagctcaactacctgcgcatctcagaggccaagctgactggcatccccaaagacctccctgagaccctgaatgaactccacctagaccacaacaaaatccaggccatcgaactggaggacctgcttcgctactccaagctgtacaggctgggcctaggccacaaccagatcaggatgatcgagaacgggagcctgagcttcctgcccaccctccgggagctccacttggacaacaacaagttggccagggtgccctcagggctcccagacctcaagctcctccaggtggtctatctgcactccaacaacatcaccaaagtgggtgtcaacgacttctgtcccatgggcttcggggtgaagcgggcctactacaacggcatcagcctcttcaacaaccccgtgccctactgggaggtgcagccggccactttccgctgcgtcactgaccgcctggccatccagtttggcaactacaaaaagtagaggcagctgcagccaccgcggggcctcagtgggggtctctggggaacacagccagacatcctgatggggaggcagagccaggaagctaagccagggcccagctgcgtccaacccagccccccacctcgggtccctgaccccagctcgatgccccatcaccgcctctccctggctcccaagggtgcaggtgggcgcaaggcccggcccccatcacatgttcccttggcctcagagctgcccctgctctcccaccacagccacccagaggcaccccatgaagcttttttctcgttcactcccaaacccaagtgtccaaggctccagtcctaggagaacagtccctgggtcagcagccaggaggcggtccataagaatggggacagtgggctctgccagggctgccgcacctgtccagacacacatgttctgttcctcctcctcatgcatttccagcctttcaaccctccccgactctgcggctcccctcagcccccttgcaagttcatggcctgtccctcccagacccctgctccactggcccttcgaccagtcctcccttctgttctctctttccccgtccttcctctctctctctctctctctctctctctctttctgtgtgtgtgtgtgtgtgtgtgtgtgtgtgtgtgtgtgtgtgtgtgtgtgtgttggctcacagactctcgcgcgtggaggtgggggggtgtgccctcctctctccaaaggcgtgggtgcgccgtgtcaccttaacacttacacacatcatcgtggcgacttcggtcgcggtggaggcgggaggaagtgctgttcgtcgtcgtgtagggggcgagcacacacgccgccgtagcacaaaaaaccacaggaggaagagcgggcctccacgagacggtgcccgtgcagcaggggcagagcccacaaagacgtagtacgtcgacccaggaaggagagtaggaaggtgggaggagcacaagaatcagcgcagcagaatgaaccaccaatcaacgcggagagagtcacagagaagcggtttaccctaaaaagccaacatcacacacaagtgaccacagggggggaatagtcgtctaccccattatctattcgggggaaccagcgcaaaggagggggtgctatagagagggcggggtggtgtctcctccattaaaaaaacacacgcggcaagcgtgaaacaaaacaacacaaacacacaggggggggggagaacaaagaaatacacacctagagagaagcccaacagtcagacgcgaccccaagtctatctaaggaaagacgaggagaaccaaaagaagggagagcgaaaagaaaaagacaagagaggagctgcgacaaaaaaaaagaacgcgggacgcgggaccaacacaggcacacagatcgatcatgaggacaacgagcacaatcatgggggggcaggcaataatggagacagcccacacagcaaaattaacagcctagaggaataataacattagcactaatatggataacccagcgactattatgcgcaaaaacaatgacacgatagtaaacagatcag

SEQ ID NO: 321847 - DNA, 2358 bp, Homo sapiens
cagcctttagcctcccgcccgccgcctctgtctccctctctccacaaactgcccaggagtgagtagctgctttcggtccgccggacacaccggacagatagacgtgcggacggcccaccaccccagcccgccaactagtcagcctgcgcctggcgcctcccctctccaggtccatccgccatgtggcccctgtggcgcctccctgccctttgagcagagaggcttctgggacttcaccctggacgatgggccattcatgatgaacgatgaggaagcttcgggcgctgacacctcaggcgtcctggacccggactctgtcacacccacctacagcgccatgtgtcctttcggctgccactgccacctgcgggtggttcagtgctccgacctgggtctgaagtctgtgcccaaagagatctcccctgacaccacgctgctggacctgcagaacaacgacatctccgagctccgcaaggatgacttcaagggtctccagcacctctacgccctcgtcctggtgaacaacaagatctccaagatccatgagaaggccttcagcccactgcggaagctgcagaagctctacatctccaagaaccacctggtggagatcccgcccaacctacccagctccctggtggagctccgcatccacgacaaccgcatccgcaaggtgcccaagggagtgttcagcgggctccggaacatgaactgcatcgagatgggcgggaacccactggagaacagtggctttgaacctggagccttcgatggcctgaagctcaactacctgcgcatctcagaggccaagctgactggcatccccaaagacctccctgagaccctgaatgaactccacctagaccacaacaaaatccaggccatcgaactggaggacctgcttcgctactccaagctgtacaggctgggcctaggccacaaccagatcaggatgatcgagaacgggagcctgagcttcctgcccaccctccgggagctccacttggacaacaacaagttggccagggtgccctcagggctcccagacctcaagctcctccaggtggtctatctgcactccaacaacatcaccaaagtgggtgtcaacgacttctgtcccatgggcttcggggtgaagcgggcctactacaacggcatcagcctcttcaacaaccccgtgccctactgggaggtgcagccggccactttccgctgcgtcactgaccgcctggccatccagtttggcaactacaaaaagtagaggcagctgcagccaccgcggggcctcagtgggggtctctggggaacacagccagacatcctgatggggaggcagagccaggaagctaagccagggcccagctgcgtccaacccagccccccacctcgggtccctgaccccagctcgatgccccatcaccgcctctccctggctcccaagggtgcaggtgggcgcaaggcccggcccccatcacatgttcccttggcctcagagctgcccctgctctcccaccacagccacccagaggcaccccatgaagcttttttctcgttcactcccaaacccaagtgtccaaggctccagtcctaggagaacagtccctgggtcagcagccaggaggcggtccataagaatggggacagtgggctctgccagggctgccgcacctgtccagacacacatgttctgttcctcctcctcatgcatttccagcctttcaaccctccccgactctgcggctcccctcagcccccttgcaagttcatggcctgtccctcccagacccctgctccactggcccttcgaccagtcctcccttctgttctctctttccccgtccttcctctctctctctctctctctctctctctctttctgtgtgtgtgtgtgtgtgtgtgtgtgtgtgtgtgtgtgtgtcttgtgcttcctcagacctttctcgcttctgagcttggtggcctgttccctccatctctccgaacctggcttcgcctgtccctttcactccacaccctctggccttctgccttgagctgggactgctttctgtctgtccggcctgcacccagcccctgcccacaaaaccccagggacagcggtctccccagcctgccctgctcaggccttgcccccaaacctgtactgtcccggaggaggttgggaggtggaggcccagcatcccgcgcagatgacaccatcaaccgccagagtcccagacaccggttttcctagaagcccctcacccccactggcccactggtggctaggtctccccttatccttctggtccagcgcaaggaggggctgcttctgaggtcggtggctgtctttccattaaagaaacaccgtgcaacgtg

SEQ ID NO: 321848 - DNA, 2240 bp, Homo sapiens
cagcctttagcctcccgcccgccgcctctgtctccctctctccacaaactgcccaggagtgagtagctgctttcggtccgccggacacaccggacagatagacgtgcggacggcccaccaccccagcccgccaactagtcagcctgcgcctggcgcctcccctctccaggtccatccgccatgtggcccctgtggcgcctcgtgtctctgctggccctgagccaggccctgccctttgagcagagaggcttctgggacttcaccctggacgatgggccattcatgatgaacgatgaggaagcttcgggcgctgacacctcaggcgtcctggacccggactctgtcacacccacctacagcgccatgtgtcctttcggctgccactgccacctgcgggtggttcagtgctccgacctgggtctgaagtctgtgcccaaagagatctcccctgacaccacgctgctggacctgcagaacaacgacatctccgagctccgcaaggatgacttcaagggtctccagcacctctacgccctcgtcctggtgaacaacaagatctccaagatccatgagaaggccttcagcccactgcggaagctgcagaagctctacatctccaagaaccacctggtggagatcccgcccaacctacccagctccctggtggagctccgcatccacgacaaccgcatccgcaaggtgcccaagggagtgttcagcgggctccggaacatgaactgcatcgagatgggcgggaacccactggagaacagtggctttgaacctggagccttcgatggcctgaagctcaactacctgcgcatctcagaggccaagctgactggcatccccaaagacctccctgagaccctgaatgaactccacctagaccacaacaaaatccaggccatcgaactggaggacctgcttcgctactccaagctgtacaggctgggcctaggccacaaccagatcaggatgatcgagaacgggagcctgagcttcctgcccaccctccgggagctccacttggacaacaacaagttggccagggtgccctcagggctcccagacctcaagctcctccaggtggtctatctgcactccaacaacatcaccaaagtgggtgtcaacgacttctgtcccatgggcttcggggtgaagcgggcctactacaacggcatcagcctcttcaacaaccccgtgccctactgggaggtgcagccggccactttccgctgcgtcactgaccgcctggccatccagtttggcaactacaaaaagtagaggcagctgcagccaccgcggggcctcagtgggggtctctggggaacacagccagacatcctgatggggaggcagagccaggaagctaagccagggcccagctgcgtccaacccagccccccacctcgggtccctgaccccagctcgatgccccatcaccgcctctccctggctcccaagggtgcaggtgggcgcaaggcccggcccccatcacatgttcccttggcctcagagctgcccctgctctcccaccacagccacccagaggcaccccatgaagcttttttctcgttcactcccaaacccaagtgtccaaggctccagtcctaggagaacagtccctgggtcagcagccaggaggcggtccataagaatggggacagtgggctctgccagggctgccgcacctgtccagacacacatgttctgttcctcctcctcatgcatttccagcctttcaaccctccccgactctgcggctcccctcagcccccttgcaagttcatggcctgtccctcccagacccctgctccactggcccttcgaccagtcctcccttctgttctctctttccccgtccttcctctctctctctctctctctctctctctctttctgtgtgtgtgtgtgtgtgtgtgtgtgtgtgtgtgtgtgtgtgtgtgtcttgtgctcatctaaacacctcgctcggtcttctagagacgtggggaggaagcatgactcacctccatctctcctgaaatactcgagcataccgatcgtcgtcctcattttcacataccacaacctctcagtgtgctcttcgtacgctctaagaagcgatagggacgttgttcttagtcgtcgtgagcgggtcgtagcaccacgagccctgtgccgcacaaataccaccgagaaggagagaggtcctcccccacagcgtgccgcgctctcacgtcttcatgacgagccac

SEQ ID NO: 321849 - DNA, 2056 bp, Homo sapiens
cagcctttagcctcccgcccgccgcctctgtctccctctctccacaaactgcccaggagtgagtagctgctttcggtccgccggacacaccggacagatagacgtgcggacggcccaccaccccagcccgccaactagtcagcctgcgcctggcgcctcccctctccaggtccatccgccatgtggcccctgtggcgcctcgtgtctctgctggccctgagccaggccctgccctttgagcagagaggcttctgggacttcaccctggacgatgggccattcatgatgaacgatgaggaagcttcgggcgctgacacctcaggcgtcctggacccggactctgtcacacccacctacagcgccatgtgtcctttcggctgccactgccacctgcgggtggttcagtgctccgacctgggtctgaagtctgtgcccaaagagatctcccctgacaccacgctgctggacctgcagaacaacgacatctccgagctccgcaaggatgacttcaagggtctccagcacctctacgccctcgtcctggtgaacaacaagatctccaagatccatgagaaggccttcagcccactgcggaagctgcagaagctctacatctccaagaaccacctggtggagatcccgcccaacctacccagctccctggtggagctccgcatccacgacaaccgcatccgcaaggtgcccaagggagtgttcagcgggctccggaacatgaactgcatcgagatgggcgggaacccactggagaacagtggctttgaacctggagccttcgatggcctgaagctcaactacctgcgcatctcagaggccaagctgactggcatccccaaagacctccctgagaccctgaatgaactccacctagaccacaacaaaatccaggccatcgaactggaggacctgcttcgctactccaagctgtacaggctgggcctaggccacaaccagatcaggatgatcgagaacgggagcctgagcttcctgcccaccctccgggagctccacttggacaacaacaagttggccagggtgccctcagggctcccagacctcaagctcctccaggtggtctatctgcactccaacaacatcaccgcctctccctggctcccaagggtgcaggtgggcgcaaggcccggcccccatcacatgttcccttggcctcagagctgcccctgctctcccaccacagccacccagaggcaccccatgaagcttttttctcgttcactcccaaacccaagtgtccaaggctccagtcctaggagaacagtccctgggtcagcagccaggaggcggtccataagaatggggacagtgggctctgccagggctgccgcacctgtccagacacacatgttctgttcctcctcctcatgcatttccagcctttcaaccctccccgactctgcggctcccctcagcccccttgcaagttcatggcctgtccctcccagacccctgctccactggcccttcgaccagtcctcccttctgttctctctttccccgtccttcctctctctctctctctctctctctctctctttctgtgtgtgtgtgtgtgtgtgtgtgtgtgtgtgtgtgtgtgtcttgtgcttcctcagacctttctcgcttctgagcttggtggcctgttccctccatctctccgaacctggcttcgcctgtccctttcactccacaccctctggccttctgccttgagctgggactgctttctgtctgtccggcctgcacccagcccctgcccacaaaaccccagggacagcggtctccccagcctgccctgctcaggccttgcccccaaacctgtactgtcccggaggaggttgggaggtggaggcccagcatcccgcgcagatgacaccatcaaccgccagagtcccagacaccggttttcctagaagcccctcacccccactggcccactggtggctaggtctccccttatccttctggtccagcgcaaggaggggctgcttctgaggtcggtggctgtctttccattaaagaaacaccgtgcaacgtg

SEQ ID NO: 321850 - DNA, 2011 bp, Homo sapiens
cagcctttagcctcccgcccgccgcctctgtctccctctctccacaaactgcccaggagtgagtagctgctttcggtccgccggacacaccggacagatagacgtgcggacggcccaccaccccagcccgccaactagtcagcctgcgcctggcgcctcccctctccaggtccatccgccatgtggcccctgtggcgcctcgtgtctctgctggccctgagccaggccctgccctttgagcagagaggcttctgggacttcaccctggacgatgggccattcatgatgaacgatgaggaagcttcgggcgctgacacctcaggcgtcctggacccggactctgtcacacccacctacagcgccatgtgtcctttcggctgccactgccacctgcgggtggttcagtgctccgacctgggtctgaagtctgtgcccaaagagatctcccctgacaccacgctgctggacctgcagaacaacgacatctccgagctccgcaaggatgacttcaagggtctccagcacctctacgccctcgtcctggtgaacaacaagatctccaagatccatgagaaggccttcagcccactgcggaagctgcagaagctctacatctccaagaaccacctggtggagatcccgcccaacctacccagctccctggtggagctccgcatccacgacaaccgcatccgcaaggtgcccaagggagtgttcagcgggctccggaacatgaactgcatcgagatgggcgggaacccactggagaacagtggctttgaacctggagccttcgatggcctgaagctcaactacctgcgcatctcagaggccaagctgactggcatccccaaagacctccctgagaccctgaatgaactccacctagaccacaacaaaatccaggccatcgaactggaggacctgcttcgctactccaagctgtacagctctggggaacacagccagacatcctgatggggaggcagagccaggaagctaagccagggcccagctgcgtccaacccagccccccacctcgggtccctgaccccagctcgatgccccatcaccgcctctccctggctcccaagggtgcaggtgggcgcaaggcccggcccccatcacatgttcccttggcctcagagctgcccctgctctcccaccacagccacccagaggcaccccatgaagcttttttctcgttcactcccaaacccaagtgtccaaggctccagtcctaggagaacagtccctgggtcagcagccaggaggcggtccataagaatggggacagtgggctctgccagggctgccgcacctgtccagacacacatgttctgttcctcctcctcatgcatttccagcctttcaaccctccccgactctgcggctcccctcagcccccttgcaagttcatggcctgtccctcccagacccctgctccactggcccttcgaccagtcctcccttctgttctctctttccccgtccttcctctctctctctctctctctctctctctctttctgtgtgtgtgtgtgtgtgtgtgtgtgtgtgtgtgtgtgtgtcttgtgcttcctcagacctttctcgcttctgagcttggtggcctgttccctccatctctccgaacctggcttcgcctgtccctttcactccacaccctctggccttctgccttgagctgggactgctttctgtctgtccggcctgcacccagcccctgcccacaaaaccccagggacagcggtctccccagcctgccctgctcaggccttgcccccaaacctgtactgtcccggaggaggttgggaggtggaggcccagcatcccgcgcagatgacaccatcaaccgccagagtcccagacaccggttttcctagaagcccctcacccccactggcccactggtggctaggtctccccttatccttctggtccagcgcaaggaggggctgcttctgaggtcggtggctgtctttccattaaagaaacaccgtgcaacgtg

SEQ ID NO: 321851 - DNA, 1849 bp, Homo sapiens
cagcctttagcctcccgcccgccgcctctgtctccctctctccacaaactgcccaggagtgagtagctgctttcggtccgccggacacaccggacagatagacgtgcggacggcccaccaccccagcccgccaactagtcagcctgcgcctggcgcctcccctctccaggtccatccgccatgtggcccctgtggcgcctcgtgtctctgctggccctgagccaggccctgccctttgagcagagaggcttctgggacttcaccctggacgatgggccattcatgatgaacgatgaggaagcttcgggcgctgacacctcaggcgtcctggacccggactctgtcacacccacctacagcgccatgtgtcctttcggctgccactgccacctgcgggtggttcagtgctccgacctgggtctgaagtctgtgcccaaagagatctcccctgacaccacgctgctggacctgcagaacaacgacatctccgagctccgcaaggatgacttcaagggtctccagcacctctacgccctcgtcctggtgaacaacaagatctccaagatccatgagaaggccttcagcccactgcggaagctgcagaagctctacatctccaagaaccacctggtggagatcccgcccaacctacccagctccctggtggagctccgcatccacgacaaccgcatccgcaaggtgcccaagggagtgttcagcgggctccggaacatgaactgcatcgagatgggcgggaacccactggagaacagtggctttgaacctggagccttcgatggcctgaagctcaactacctgcgcatctcagaggccaagctgactggcatccccaaagacctccctgagaccctgaatgaactccacctagaccacaacaaaatccaggccatcgaactggaggacctgcttcgctactccaagctgtacaggctgggcctaggccacaaccagatcaggatgatcgagaacgggagcctgagcttcctgcccaccctccgggagctccacttggacaacaacaagttggccagggtgccctcagggctcccagacctcaagctcctccaggtggtctatctgcactccaacaacatcaccaaagtgggtgtcaacgacttctgtcccatgggcttcggggtgaagcgggcctactacaacggcatcagcctcttcaacaaccccgtgccctactgggaggtgcagccggccactttccgctgcgtcactgaccgcctggccatccagtttggcaactacaaaaagtagaggcagctgcagccaccgcggggcctcagtgggggtctctggggaacacagccagacatcctgatggggaggcagagccaggaagctaagccagggcccagctgcgtccaacccagccccccacctcgggtccctgaccccagctcgatgccccatcaccgcctctccctggctcccaagggtgcaggtgggcgcaaggcccggcccccatcacatgttcccttggcctcagagctgcccctgctctcccaccacagccacccagaggcaccccatgaagcttttttctcgttcactcccaaacccaagtgtccaaggctccagtcctaggagaacagtccctgggtcagcagccaggaggcggtccataagaatggggacagtgggctctgccagggctgccgcacctgtccagacacacatgttctgttcctcctcctcatgcatttccagcctttcaaccctccccgactctgcggctcccctcagcccccttgcaagttcatggcctgtccctcccagacccctgcccacagttcctgcctcccaagatcctctaata

SEQ ID NO: 321852 - DNA, 1410 bp, Homo sapiens
ctgccttgagattacccggggcccccccccgagtatggattcgcgaccacgccgtcgggacaacaacaagttggccagggtgccctcagggctcccagacctcaagctcctccaggtggtctatctgcactccaacaacatcaccaaagtgggtgtcaacgacttctgtcccatgggcttcggggtgaagcgggcctactacaacggcatcagcctcttcaacaaccccgtgccctactgggaggtgcagccggccactttccgctgcgtcactgaccgcctggccatccagtttggcaactacaaaaagtagaggcagctgcagccaccgcggggcctcagtgggggtctctggggaacacagccagacatcctgatggggaggcagagccaggaagctaagccagggcccagctgcgtccaacccagccccccacctcgggtccctgaccccagctcgatgccccatcaccgcctctccctggctcccaagggtgcaggtgggcgcaaggcccggcccccatcacatgttcccttggcctcagagctgcccctgctctcccaccacagccacccagaggcaccccatgaagcttttttctcgttcactcccaaacccaagtgtccaaggctccagtcctaggagaacagtccctgggtcagcagccaggaggcggtccataagaatggggacagtgggctctgccagggctgccgcacctgtccagacacacatgttctgttcctcctcctcatgcatttccagcctttcaaccctccccgactctgcggctcccctcagcccccttgcaagttcatggcctgtccctcccagacccctgctccactggcccttcgaccagtcctcccttctgttctctctttccccgtccttcctctctctctctctctctctctctctctctttctgtgtgtgtgtgtgtgtgtgtgtgtgtgtgtgtgtgtgtgtcttgtgcttcctcagacctttctcgcttctgagcttggtggcctgttccctccatctctccgaacctggcttcgcctgtccctttcactccacaccctctggccttctgccttgagctgggactgctttctgtctgtccggcctgcacccagcccctgcccacaaaaccccagggacagcggtctccccagcctgccctgctcaggccttgcccccaaacctgtactgtcccggaggaggttgggaggtggaggcccagcatcccgcgcagatgacaccatcaaccgccagagtcccagacaccggttttcctagaagcccctcacccccactggcccactggtggctaggtctccccttatccttctggtccagcgcaaggaggggctgcttctgaggtcggtggctgtctttccattaaagaaacaccgtgcaacgtg

SEQ ID NO: 321853 - DNA, 1694 bp, Homo sapiens
cagcctttagcctcccgcccgccgcctctgtctccctctctccacaaactgcccaggagtgagtagctgctttcggtccgccggacacaccggacagatagacgtgcggacggcccaccaccccagcccgccaactagtcagcctgcgcctggcgcctcccctctccaggtccatccgccatgtggcccctgtggcgcctcgtgtctctgctggccctgagccaggccctgccctttgagcagagaggcttctgggacttcaccctggacgatgggccattcatgatgaacgatgaggaagcttcgggcgctgacacctcaggcgtcctggacccggactctgtcacacccacctacagcgccatgtgtcctttcggctgccactgccacctgcgggtggttcagtgctccgacctgggtctgaagtctgtgcccaaagagatctcccctgacaccacgctgctggacctgcagaacaacgacatctccgagctccgcaaggatgacttcaagggtctccagcacctctacgccctcgtcctggtgaacaacaagatctccaagatccatgagaaggccttcagcccactgcggaagctgcagaagctctacatctccaagaaccacctggtggagatcccgcccaacctacccagctccctggtggagctccgcatccacgacaaccgcatccgcaaggtgcccaagggagtgttcagcgggctccggaacatgaactgcatcgagatgggcgggaacccactggagaacagtggctttgaacctggagccttcgatggcctgaagctcaactacctgcgcatctcagagctgcccctgctctcccaccacagccacccagaggcaccccatgaagcttttttctcgttcactcccaaacccaagtgtccaaggctccagtcctaggagaacagtccctgggtcagcagccaggaggcggtccataagaatggggacagtgggctctgccagggctgccgcacctgtccagacacacatgttctgttcctcctcctcatgcatttccagcctttcaaccctccccgactctgcggctcccctcagcccccttgcaagttcatggcctgtccctcccagacccctgctccactggcccttcgaccagtcctcccttctgttctctctttccccgtccttcctctctctctctctctctctctctctctctttctgtgtgtgtgtgtgtgtgtgtgtgtgtgtgtgtgtgtgtgtcttgtgcttcctcagacctttctcgcttctgagcttggtggcctgttccctccatctctccgaacctggcttcgcctgtccctttcactccacaccctctggccttctgccttgagctgggactgctttctgtctgtccggcctgcacccagcccctgcccacaaaaccccagggacagcggtctccccagcctgccctgctcaggccttgcccccaaacctgtactgtcccggaggaggttgggaggtggaggcccagcatcccgcgcagatgacaccatcaaccgccagagtcccagacaccggttttcctagaagcccctcacccccactggcccactggtggctaggtctccccttatccttctggtccagcgcaaggaggggctgcttctgaggtcggtggctgtctttccattaaagaaacaccgtgcaacgtg

SEQ ID NO: 321854 - DNA, 1581 bp, Homo sapiens
cagcctttagcctcccgcccgccgcctctgtctccctctctccacaaactgcccaggagtgagtagctgctttcggtccgccggacacaccggacagatagacgtgcggacggcccaccaccccagcccgccaactagtcagcctgcgcctggcgcctcccctctccaggtccatccgccatgtggcccctgtggcgcctcgtgtctctgctggccctgagccaggccctgccctttgagcagagaggcttctgggacttcaccctggacgatgggccattcatgatgaacgatgaggaagcttcgggcgctgacacctcaggcgtcctggacccggactctgtcacacccacctacagcgccatgtgtcctttcggctgccactgccacctgcgggtggttcagtgctccgacctgggtctgaagtctgtgcccaaagagatctcccctgacaccacgctgctggacctgcagaacaacgacatctccgagctccgcaaggatgacttcaagggtctccagcacctctacgccctcgtcctggtgaacaacaagatctccaagatccatgagaaggccttcagcccactgcggaagctgcagaagctctacatctccaagaaccacctggtggagatcccgcccaacctacccagctccctggtggagctccgcatccacgacaaccgcatccgcaaggtgcccaagggagtgttcagcgggctccggaacatgaactgcatcgagatgggcgggaacccactggagaacagtggctttgaacctggagccttcgatggcctgaagctcaactacctgcgcatctcagaggccaagctgactggcatccccaaagacctccctgagaccctgaatgaactccacctagaccacaacaaaatccaggccatcgaactggaggacctgcttcgctactccaagctgtacaggctgggcctaggccacaaccagatcaggatgatcgagaacgggagcctgagcttcctgcccaccctccgggagctccacttggacaacaacaagttggccagggtgccctcagggctcccagacctcaagctcctccaggtggtctatctgcactccaacaacatcaccaaagtgggtgtcaacgacttctgtcccatgggcttcggggtgaagcgggcctactacaacggcatcagcctcttcaacaaccccgtgccctactgggaggtgcagccggccactttccgctgcgtcactgaccgcctggccatccagtttggcaactacaaaaagtagaggcagctgcagccaccgcggggcctcagtgggggttctccccagcctgccctgctcaggccttgcccccaaacctgtactgtcccggaggaggttgggaggtggaggcccagcatcccgcgcagatgacaccatcaaccgccagagtcccagacaccggttttcctagaagcccctcacccccactggcccactggtggctaggtctccccttatccttctggtccagcgcaaggaggggctgcttctgaggtcggtggctgtctttccattaaagaaacaccgtgcaacgtg

SEQ ID NO: 321855 - DNA, 851 bp, Homo sapiens
gagagagaagaaggacggggaaagagagaacagaagggaggactggtcgaaggcaaacccaagtgtccaaggctccagtcctaggagaacagtccctgggtcagcagccaggaggcggtccataagaatggggacagtgggctctgccagggctgccgcacctgtccagacacacatgttctgttcctcctcctcatgcatttccagcctttcaaccctccccgactctgcggctcccctcagcccccttgcaagttcatggcctgtccctcccagacccctgctccactggcccttcgaccagtcctcccttctgttctctctttccccgtccttcctctctctctctctctctctctctctctctttctgtgtgtgtgtgtgtgtgtgtgtgtgtgtgtgtgtgtgtgtcttgtgcttcctcagacctttctcgcttctgagcttggtggcctgttccctccatctctccgaacctggcttcgcctgtccctttcactccacaccctctggccttctgccttgagctgggactgctttctgtctgtccggcctgcacccagcccctgcccacaaaaccccagggacagcggtctccccagcctgccctgctcaggccttgcccccaaacctgtactgtcccggaggaggttgggaggtggaggcccagcatcccgcgcagatgacaccatcaaccgccagagtcccagacaccggttttcctagaagcccctcacccccactggcccactggtggctaggtctccccttatccttctggtccagcgcaaggaggggctgcttctgaggtcggtggctgtctttccattaaagaaacaccgtgcaacgtg

SEQ ID NO: 321856 - DNA, 1195 bp, Homo sapiens
cagcctttagcctcccgcccgccgcctctgtctccctctctccacaaactgcccaggagtgagtagctgctttcggtccgccggacacaccggacagatagacgtgcggacggcccaccaccccagcccgccaactagtcagcctgcgcctggcgcctcccctctccaggtccatccgccatgtggcccctgtggcgcctcgtgtctctgctggccctgagccaggccctgccctttgagcagagaggcttctgggacttcaccctggacgatgggccattcatgatgaacgatgaggaagcttcgggcgctgacacctcaggcgtcctggacccggactctgtcacacccacctacagcgccatgtgtcctttcggctgccactgccacctgcgggtggttcagtgctccgacctgggtctgaagtctgtgcccaaagagatctcccctgacaccacgctgctggacctgcagaacaacgacatctccgagctccgcaaggatgacttcaagggtctccagcacctctacgccctcgtcctggtgaacaacaagatctccaagatccatgagaaggccttcagcccactgcggaagctgcagaagctctacatctccaagaaccacctggtggagatcccgcccaacctacccagctccctggtggagctccgcatccacgacaaccgcatccgcaaggtgcccaagggagtgttcagcgggctccggaacatgaactgcatcgagatgggcgggaacccactggagaacagtggctttgaacctggagccttcgatggcctgaagctcaactacctgcgcatctcagaggccaagctgactggcatccccaaagacctccctgagaccctgaatgaactccacctagaccacaacaaaatccaggccatcgaactggaggacctgcttcgctactccaagctgtacagtgggcctacggtcctctgccatcgccatctcaccgcatcgcaccaacagactgtggttcctagtgatgtggactcacctcggaggtatccgagctggacacagcccctggacagtgatccagacagctggccgtccctccaaggagcctgtcacctgctgcgagactccagttcctccccatcccgcagagacctcttgtgttcctgcctacatagtttcccagggtttaagtgtgcctggcatt

SEQ ID NO: 321857 - DNA, 978 bp, Homo sapiens
cagcctttagcctcccgcccgccgcctctgtctccctctctccacaaactgcccaggagtgagtagctgctttcggtccgccggacacaccggacagatagacgtgcggacggcccaccaccccagcccgccaactagtcagcctgcgcctggcgcctcccctctccaggtccatccgccatgtggcccctgtggcgcctcgtgtctctgctggccctgagccaggccctgccctttgagcagagaggcttctgggacttcaccctggacgatgggccattcatgatgaacgatgaggaagcttcgggcgctgacacctcaggcgtcctggacccggactctgtcacacccacctacagcgccatgtgtcctttcggctgccactgccacctgcgggtggttcagtgctccgacctgggtctgaagtctgtgcccaaagagatctcccctgacaccacgctgctggacctgcagaacaacgacatctccgagctccgcaaggatgacttcaagggtctccagcacctctacgccctcgtcctggtgaacaacaagatctccaagatccatgagaaggccttcagcccactgcggaagctgcagaagctctacatctccaagaaccacctggtggagatcccgcccaacctacccagctccctggtggagctccgcatccacgacaaccgcatccgcaaggtgcccaagggagtgttcagcgggctccggaacatgaactgcatcgagatgggcgggaacccactggagaacagtggctttgaacctggagccttcgatggcctgaagctcaactacctgcgcatctcagaggccaagctgactggcatccccaaagacctccctgagaccctgaatgaactccactaggtctccccttatccttctggtccagcgcaaggaggggctgcttctgaggtcggtggctgtctttccattaaagaaacaccgtgcaacgtg

SEQ ID NO: 321858 - DNA, 734 bp, Homo sapiens
aaaaacactctggcagggtgcggtgtcacatgcctgtaaaaacaacactctggcaggccaaggcaggaggatctcaaggtcaagagattgagagcatcctgggcaacatggtaaaagacactcactcctaaaaattcaaaaaaaagtttggcttggtggtgtgcgcctgtaaacacagcaaggttaaaagctccgggccgagagaccttaacagtccttcctctctctctctctctctctctctctctctttctgtgtgtgtgtgtgtgtgtgtgtgtgtgtgtgtgtgtgtgtcttgtgcttcctcagacctttctcgcttctgagcttggtggcctgttccctccatctctccgaacctggcttcgcctgtccctttcactccacaccctctggccttctgccttgagctgggactgctttctgtctgtccggcctgcacccagcccctgcccacaaaaccccagggacagcggtctccccagcctgccctgctcaggccttgcccccaaacctgtactgtcccggaggaggttgggaggtggaggcccagcatcccgcgcagatgacaccatcaaccgccagagtcccagacaccggttttcctagaagcccctcacccccactggcccactggtggctaggtctccccttatccttctggtccagcgcaaggaggggctgcttctgaggtcggtggctgtctttccattaaagaaacaccgtgcaacgtg

SEQ ID NO: 321859 - DNA, 575 bp, Homo sapiens
aacagtagatgctgatggtatcatagtacaaagtctcagacttcatacaggaatgctgaattcagtccaggaaaaaaatgtgcacgtatatgtgaattcatgtgtgtgtgtgtgtgtgtgtgtgtgtgtgtgtgtcttgtgcttcctcagacctttctcgcttctgagcttggtggcctgttccctccatctctccgaacctggcttcgcctgtccctttcactccacaccctctggccttctgccttgagctgggactgctttctgtctgtccggcctgcacccagcccctgcccacaaaaccccagggacagcggtctccccagcctgccctgctcaggccttgcccccaaacctgtactgtcccggaggaggttgggaggtggaggcccagcatcccgcgcagatgacaccatcaaccgccagagtcccagacaccggttttcctagaagcccctcacccccactggcccactggtggctaggtctccccttatccttctggtccagcgcaaggaggggctgcttctgaggtcggtggctgtctttccattaaagaaacaccgtgcaacgtg

SEQ ID NO: 321860 - DNA, 845 bp, Homo sapiens
  misc_feature (785)..(785): n is a, c, g, or t
  misc_feature (801)..(801): n is a, c, g, or t
  misc_feature (818)..(818): n is a, c, g, or t
cagcctttagcctcccgcccgccgcctctgtctccctctctccacaaactgcccaggagtgagtagctgctttcggtccgccggacacaccggacagatagacgtgcggacggcccaccaccccagcccgccaactagtcagcctgcgcctggcgcctcccctctccaggtccatccgccatgtggcccctgtggcgcctcgtgtctctgctggccctgagccaggccctgccctttgagcagagaggcttctgggacttcaccctggacgatgggccattcatgatgaacgatgaggaagcttcgggcgctgacacctcaggcgtcctggacccggactctgtcacacccacctacagcgccatgtgtcctttcggctgccactgccacctgcgggtggttcagtgctccgacctgggtctgaagtctgtgcccaaagagatctcccctgacaccacgctgctggacctgcagaacaacgacatctccgagctccgcaaggatgacttcaagggtctccagcacctctacgccctcgtcctggtgaacaacaagatctccaagatccatgagaaggccttcagcccactgcggaagctgcagaagctctacatctccaagaaccacctggtggagatcccgcccaacctacccagctccctggtggagctccgcatccacgacaaccgcatccgcaaggtgcccaagggagtgttcagcgggctccggaacatgaactgcatcgagatgggccgggaacccacttggaaaacaatggcttttgnaccctggaacccttcnaatgggcctgaagcttnaaattaccctggggcaatttttaaaaa

SEQ ID NO: 321861 - DNA, 2384 bp, Homo sapiens
cagcctttagcctcccgcccgccgcctctgtctccctctctccacaaactgcccaggagtgagtagctgctttcggtccgccggacacaccggacagatagacgtgcggacggcccaccaccccagcccgccaactagtcagcctgcgcctggcgcctcccctctccaggtccatccgccatgtggcccctgtggcgcctcgtgtctctgctggccctgagccaggccctgccctttgagcagagaggcttctgggacttcaccctggacgatgggccattcatgatgaacgatgaggaagcttcgggcgctgacacctcaggcgtcctggacccggactctgtcacacccacctacagcgccatgtgtcctttcggctgccactgccacctgcgggtggttcagtgctccgacctgggtctgaagtctgtgcccaaagagatctcccctgacaccacgctgctggacctgcagaacaacgacatctccgagctccgcaaggatgacttcaagggtctccagcacctctacgccctcgtcctggtgaacaacaagatctccaagatccatgagaaggccttcagcccactgcggaagctgcagaagctctacatctccaagaaccacctggtggagatcccgcccaacctacccagctccctggtggagctccgcatccacgacaaccgcatccgcaaggtgcccaagggagtgttcagcgggctccggaacatgaactgcatcgagatgggcgggaacccactggagaacagtggctttgaacctggagccttcgatggcctgaagctcaactacctgcgcatctcagaggccaagctgactggcatccccaaagacctccctgagaccctgaatgaactccacctagaccacaacaaaatccaggccatcgaactggaggacctgcttcgctactccaagctgtacaggctgggcctaggccacaaccagatcaggatgatcgagaacgggagcctgagcttcctgcccaccctccgggagctccacttggacaacaacaagttggccagggtgccctcagggctcccagacctcaagctcctccaggtggtctatctgcactccaacaacatcaccaaagtgggtgtcaacgacttctgtcccatgggcttcggggtgaagcgggcctactacaacggcatcagcctcttcaacaaccccgtgccctactgggaggtgcagccggccactttccgctgcgtcactgaccgcctggccatccagtttggcaactacaaaaagtagaggcagctgcagccaccgcggggcctcagtgggggtctctggggaacacagccagacatcctgatggggaggcagagccaggaagctaagccagggcccagctgcgtccaacccagccccccacctcgggtccctgaccccagctcgatgccccatcaccgcctctccctggctcccaagggtgcaggtgggcgcaaggcccggcccccatcacatgttcccttggcctcagagctgcccctgctctcccaccacagccacccagaggcaccccatgaagcttttttctcgttcactcccaaacccaagtgtccaaggctccagtcctaggagaacagtccctgggtcagcagccaggaggcggtccataagaatggggacagtgggctctgccagggctgccgcacctgtccagacacacatgttctgttcctcctcctcatgcatttccagcctttcaaccctccccgactctgcggctcccctcagcccccttgcaagttcatggcctgtccctcccagacccctgctccactggcccttcgaccagtcctcccttctgttctctctttccccgtccttcctctctctctctctctctctctctctctctttctgtgtgtgtgtgtgtgtgtgtgtgtgtgtgtgtgtgtgtgtcttgtgcttcctcagacctttctcgcttctgagcttggtggcctgttccctccatctctccgaacctggcttcgcctgtccctttcactccacaccctctggccttctgccttgagctgggactgctttctgtctgtccggcctgcacccagcccctgcccacaaaaccccagggacagcggtctccccagcctgccctgctcaggccttgcccccaaacctgtactgtcccggaggaggttgggaggtggaggcccagcatcccgcgcagatgacaccatcaaccgccagagtcccagacaccggttttcctagaagcccctcacccccactggcccactggtggctaggtctccccttatccttctggtccagcgcaaggaggggctgcttctgaggtcggtggctgtctttccattaaagaaacaccgtgcaacgtg

SEQ ID NO: 321862 - DNA, 2855 bp, Homo sapiens
cagcctttagcctcccgcccgccgcctctgtctccctctctccacaaactgcccaggagtgagtagctgctttcggtccgccggacacaccggacagatagacgtgcggacggcccaccaccccagcccgccaactagtcagcctgcgcctggcgcctcccctctccaggtccatccgccatgtggcccctgtggcgcctcgtgtctctgctggccctgagccaggccctgccctttgagcagagaggcttctgggacttcaccctggacgatgggccattcatgatgaacgatgaggaagcttcgggcgctgacacctcaggcgtcctggacccggactctgtcacacccacctacagcgccatgtgtcctttcggctgccactgccacctgcgggtggttcagtgctccgacctgggtctgaagtctgtgcccaaagagatctcccctgacaccacgctgctggacctgcagaacaacgacatctccgagctccgcaaggatgacttcaagggtctccagcacctctacgccctcgtcctggtgaacaacaagatctccaagatccatgagaaggccttcagcccactgcggaagctgcagaagctctacatctccaagaaccacctggtggagatcccgcccaacctacccagctccctggtggagctccgcatccacgacaaccgcatccgcaaggtgcccaagggagtgttcagcgggctccggaacatgaactgcatcgagatgggcgggaacccactggagaacagtggctttgaacctggagccttcgatggcctgaagctcaactacctgcgcatctcagaggccaagctgactggcatccccaaagacctccctgagaccctgaatgaactccacctagaccacaacaaaatccaggccatcgaactggaggacctgcttcgctactccaagctgtacaggctgggcctaggccacaaccagatcaggatgatcgagaacgggagcctgagcttcctgcccaccctccgggagctccacttggacaacaacaagttggccagggtgccctcagggctcccagacctcaagctcctccaggtggtctatctgcactccaacaacatcaccaaagtgggtgtcaacgacttctgtcccatgggcttcggggtgaagcgggcctactacaacggcatcagcctcttcaacaaccccgtgccctactgggaggtgcagccggccactttccgctgcgtcactgaccgcctggccatccagtttggcaactacaaaaagtagaggcagctgcagccaccgcggggcctcagtgggggtctctggggaacacagccagacatcctgatggggaggcagagccaggaagctaagccagggcccagctgcgtccaacccagccccccacctcgggtccctgaccccagctcgatgccccatcaccgcctctccctggctcccaagggtgcaggtgggcgcaaggcccggcccccatcacatgttcccttggcctcagagctgcccctgctctcccaccacagccacccagaggcaccccatgaagcttttttctcgttcactcccaaacccaagtgtccaaggctccagtcctaggagaacagtccctgggtcagcagccaggaggcggtccataagaatggggacagtgggctctgccagggctgccgcacctgtccagacacacatgttctgttcctcctcctcatgcatttccagcctttcaaccctccccgactctgcggctcccctcagcccccttgcaagttcatggcctgtccctcccagacccctgctccactggcccttcgaccagtcctcccttctgttctctctttccccgtccttcctctctctctctctctctctctctctctctttctgtgtgtgtgtgtgtgtgtgtgtgtgtgtgtgtgtgtgtgtcttgtgcttcctcagacctttctcgcttctgagcttggtggcctgttccctccatctctccgaacctggcttcgcctgtccctttcactccacaccctctggccttctgccttgagctgggactgctttctgtctgtccggcctgcacccagcccctgcccacaaaaccccagggacagcggtctccccagcctgccctgctcaggccttgcccccaaacctgtactgtcccggaggaggttgggaggtggaggcccagcatcccgcgcagatgacaccatcaaccgccagagtcccagacaccggttttcctagaagcccctcacccccactggcccactggtggctaggtctccccttatccttctggtccagcgcaaggaggggctgcttctgaggtcggtggctgtctttccattaaagaaacaccgtgcaacgtgaaaaaaaaaaaaaaaaacaaaaaaaaaaaaaaaaaaaaaaaaaaaaaaaaaaaaaggggggcccaaatcccctgaggggccccaatttaagcgtcacccagtttttttgaaaaaaggggccccccatagaggagctgctttataaacagcacacagaccggccccgcgctttaaaaaacaggcgctctaattgggaaagaacctgcgtacctgcaggtcgaactcttgtggagaaggaaccccccacaacctccggggggggacacaataatggtgggcaccaaccacccatcaggagaaattaaaagcccccggggcaaattaacaacttggaggtgtctaatggtggtgtcacccaacggcgcaattcttgcggcgtgaaacaacttcgcaccagagctatatgattgtacgagcacatttttctcgcgggacattcattgtaatacgagcactatcatcatactagct

SEQ ID NO: 321863 - DNA, 2355 bp, Homo sapiens
cagcctttagcctcccgcccgccgcctctgtctccctctctccacaaactgcccaggagtgagtagctgctttcggtccgccggacacaccggacagatagacgtgcggacggcccaccaccccagcccgccaactagtcagcctgcgcctggcgcctcccctctccaggtccatccgccatgtggcccctgtggcgcctcgtgtctctgctggccctgagccaggccctgccctttgagcagagaggcttctgggacttcaccctggacgatgggccattcatgatgaacgatgaggaagcttcgggcgctgacacctcaggcgtcctggacccggactctgtcacacccacctacagcgccatgtgtcctttcggctgccactgccacctgcgggtggttcagtgctccgacctgggtctgaagtctgtgcccaaagagatctcccctgacaccacgctgctggacctgcagaacaacgacatctccgagctccgcaaggatgacttcaagggtctccagcacctctacgccctcgtcctggtgaacaacaagatctccaagatccatgagaaggccttcagcccactgcggaagctgcagaagctctacatctccaagaaccacctggtggagatcccgcccaacctacccagctccctggtggagctccgcatccacgacaaccgcatccgcaaggtgcccaagggagtgttcagcgggctccggaacatgaactgcatcgagatgggcgggaacccactggagaacagtggctttgaacctggagccttcgatggcctgaagctcaactacctgcgcatctcagaggccaagctgactggcatccccaaagacctccctgagaccctgaatgaactccacctagaccacaacaaaatccaggccatcgaactggaggacctgcttcgctactccaagctgtacaggctgggcctaggccacaaccagatcaggatgatcgagaacgggagcctgagcttcctgcccaccctccgggagctccacttggacaacaacaagttggccagggtgccctcagggctcccagacctcaagctcctccaggtggtctatctgcactccaacaacatcaccaaagtgggtgtcaacgacttctgtcccatgggcttcggggtgaagcgggcctactacaacggcatcagcctcttcaacaaccccgtgccctactgggaggtgcagccggccactttccgctgcgtcactgaccgcctggccatccagtttggcaactacaaaaagtagaggcagctgcagccaccgcggggcctcagtgggggtctctggggaacacagccagacatcctgatggggaggcagagccaggaagctaagccagggcccagctgcgtccaacccagccccccacctcgggtccctgaccccagctcgatgccccatcaccgcctctccctggctcccaagggtgcaggtgggcgcaaggcccggcccccatcacatgttcccttggcctcagagctgcccctgctctcccaccacagccacccagaggcaccccatgaagcttttttctcgttcactcccaaacccaagtgtccaaggctccagtcctaggagaacagtccctgggtcagcagccaggaggcggtccataagaatggggacagtgggctctgccagggctgccgcacctgtccagacacacatgttctgttcctcctcctcatgcatttccagcctttcaaccctccccgactctgcggctcccctcagcccccttgcaagttcatggcctgtccctcccagacccctgctccactggcccttcgaccagtcctcccttctgttctctctttccccgtccttcctctctctctctctctctctctctctctctttctgtgtgtgtgtgtgtgtgtgtgtgtgtgtgtgtgtgtgtgtcttgtgcttcctcagacctttctcgcttctgagcttggtggcctgttccctccatctctccgaacctggcttcgcctgtccctttcactccacaccctctggccttctgccttgagctgggactgctttctgtctgtccggcctgcacccagcccctgcccacaaaaccccagggacagcggtctccccagcctgccctgctcaggccttgcccccaaacctgtactgtcccggaggaggttgggaggtggaggcccagcatcccgcgcagatgcggttttcctagaagcccctcacccccactggcccactggtggctaggtctccccttatccttctggtccagcgcaaggaggggctgcttctgaggtcggtggctgtctttccattaaagaaacaccgtgcaacgtg

SEQ ID NO: 321864 - DNA, 2331 bp, Homo sapiens
  misc_feature (2331)..(2331): n is a, c, g, or t
cagcctttagcctcccgcccgccgcctctgtctccctctctccacaaactgcccaggagtgagtagctgctttcggtccgccggacacaccggacagatagacgtgcggacggcccaccaccccagcccgccaactagtcagcctgcgcctggcgcctcccctctccaggtccatccgccatgtggcccctgtggcgcctcgtgtctctgctggccctgagccaggccctgccctttgagcagagaggcttctgggacttcaccctggacgatgggccattcatgatgaacgatgaggaagcttcgggcgctgacacctcaggcgtcctggacccggactctgtcacacccacctacagcgccatgtgtcctttcggctgccactgccacctgcgggtggttcagtgctccgacctgggtctgaagtctgtgcccaaagagatctcccctgacaccacgctgctggacctgcagaacaacgacatctccgagctccgcaaggatgacttcaagggtctccagcacctctacgccctcgtcctggtgaacaacaagatctccaagatccatgagaaggccttcagcccactgcggaagctgcagaagctctacatctccaagaaccacctggtggagatcccgcccaacctacccagctccctggtggagctccgcatccacgacaaccgcatccgcaaggtgcccaagggagtgttcagcgggctccggaacatgaactgcatcgagatgggcgggaacccactggagaacagtggctttgaacctggagccttcgatggcctgaagctcaactacctgcgcatctcagaggccaagctgactggcatccccaaagacctccctgagaccctgaatgaactccacctagaccacaacaaaatccaggccatcgaactggaggacctgcttcgctactccaagctgtacaggctgggcctaggccacaaccagatcaggatgatcgagaacgggagcctgagcttcctgcccaccctccgggagctccacttggacaacaacaagttggccagggtgccctcagggctcccagacctcaagctcctccaggtggtctatctgcactccaacaacatcaccaaagtgggtgtcaacgacttctgtcccatgggcttcggggtgaagcgggcctactacaacggcatcagcctcttcaacaaccccgtgccctactgggaggtgcagccggccactttccgctgcgtcactgaccgcctggccatccagtttggcaactacaaaaagtagaggcagctgcagccaccgcggggcctcagtgggggtctctggggaacacagccagacatcctgatggggaggcagagccaggaagctaagccagggcccagctgcgtccaacccagccccccacctcgggtccctgaccccagctcgatgccccatcaccgcctctccctggctcccaagggtgcaggtgggcgcaaggcccggcccccatcacatgttcccttggcctcagagctgcccctgctctcccaccacagccacccagaggcaccccatgaagcttttttctcgttcactcccaaacccaagtgtccaaggctccagtcctaggagaacagtccctgggtcagcagccaggaggcggtccataagaatggggacagtgggctctgccagggctgccgcacctgtccagacacacatgttctgttcctcctcctcatgcatttccagcctttcaaccctccccgactctgcggctcccctcagcccccttgcaagttcatggcctgtccctcccagacccctgctccactggcccttcgaccagtcctcccttctgttctctctttccccgtccttcctctctctctctctctctctctctctctctttctgtgtgtgtgtgtgtgtgtgtgtgtgtgtgtgtgtgtgtgtgtgtgtgtgtcgtggctccacagatctctcgcgcgtcagcgcggggggggtgctctctctatctctcgatgtggcgcgtgtgtctcttatcataccacaccactctctgtctgttcttgcgcagggcgtgggagtgtgtgtgtagtgtcgggcgctaccacccagccggtgcacacaaccccctgggaggcggtccccccgatgtctgtcttgttgtggctccccccactttgtcgggcccggaggcgtgggggcgtgggacgcgccatctccggggaggcaccatcccgcgagccccagcgcgggttttaagagccccccccgggcccggggtggcccccttcttgcgcccggggggcctccgcgggggtctccacacgcgcgaan

SEQ ID NO: 321865 - DNA, 2162 bp, Homo sapiens
  misc_feature (1952)..(1952): n is a, c, g, or t
cagcctttagcctcccgcccgccgcctctgtctccctctctccacaaactgcccaggagtgagtagctgctttcggtccgccggacacaccggacagatagacgtgcggacggcccaccaccccagcccgccaactagtcagcctgcgcctggcgcctcccctctccaggtccatccgccatgtggcccctgtggcgcctcgtgtctctgctggccctgagccaggccctgccctttgagcagagaggcttctgggacttcaccctggacgatgggccattcatgatgaacgatgaggaagcttcgggcgctgacacctcaggcgtcctggacccggactctgtcacacccacctacagcgccatgtgtcctttcggctgccactgccacctgcgggtggttcagtgctccgacctgggtctgaagtctgtgcccaaagagatctcccctgacaccacgctgctggacctgcagaacaacgacatctccgagctccgcaaggatgacttcaagggtctccagcacctctacgccctcgtcctggtgaacaacaagatctccaagatccatgagaaggccttcagcccactgcggaagctgcagaagctctacatctccaagaaccacctggtggagatcccgcccaacctacccagctccctggtggagctccgcatccacgacaaccgcatccgcaaggtgcccaagggagtgttcagcgggctccggaacatgaactgcatcgagatgggcgggaacccactggagaacagtggctttgaacctggagccttcgatggcctgaagctcaactacctgcgcatctcagaggccaagctgactggcatccccaaagacctccctgagaccctgaatgaactccacctagaccacaacaaaatccaggccatcgaactggaggacctgcttcgctactccaagctgtacaggctgggcctaggccacaaccagatcaggatgatcgagaacgggagcctgagcttcctgcccaccctccgggagctccacttggacaacaacaagttggccagggtgccctcagggctcccagacctcaagctcctccaggtggtctatctgcactccaacaacatcaccaaagtgggtgtcaacgacttctgtcccatgggcttcggggtgaagcgggcctactacaacggcatcagcctcttcaacaaccccgtgccctactgggaggtgcagccggccactttccgctgcgtcactgaccgcctggccatccagtttggcaactacaaaaagtagaggcagctgcagccaccgcggggcctcagtgggggtctctggggaacacagccagacatcctgatggggaggcagagccaggaagctaagccagggcccagctgcgtccaacccagccccccacctcgggtccctgaccccagctcgatgccccatcaccgcctctccctggctcccaagggtgcaggtgggcgcaaggcccggcccccatcacatgttcccttggcctcagagctgcccctgctctcccaccacagccacccagaggcaccccatgaagcttttttctcgttcactcccaaacccaagtgtccaaggctccagtcctaggagaacagtccctgggtcagcagccaggaggcggtccataagaatggggacagtgggctctgccagggctgccgcacctgtccagacacacatgttctgttcctcctcctcatgcatttccagcctttcaaccctccccgactctgcggctcccctcagcccccttgcaagttcatggcctgtccctcccagacccctgctccactggcccttcgaccagtcctcccttctgttctctctttccccgtccttcctctctctctctctctctctctctctctctttctgtgtgtgtgtgtgtgtgtgtgtgtgtgtgtgtgtgtgtgtgtgtcccnctctcccgctcctctctaccctttttgtttttgggctttggggcctggcccctccttttctctgtccctgtcgttgcctttcccttttctgttaatgtttggcctttctttttcattttgggtgtttttttttggtgtcttccttgtaccagaccttgccataaataacttaggaaaattatctacacaattttaacattataattataa

SEQ ID NO: 321866 - DNA, 2435 bp, Homo sapiens
cagcctttagcctcccgcccgccgcctctgtctccctctctccacaaactgcccaggagtgagtagctgctttcggtccgccggacacaccggacagatagacgtgcggacggcccaccaccccagcccgccaactagtcagcctgcgcctggcgcctcccctctccaggtccatccgccatgtggcccctgtggcgcctcgtgtctctgctggccctgagccaggccctgccctttgagcagagaggcttctgggacttcaccctggacgatgggccattcatgatgaacgatgaggaagcttcgggcgctgacacctcaggcgtcctggacccggactctgtcacacccacctacagcgccatgtgtcctttcggctgccactgccacctgcgggtggttcagtgctccgacctgggtctgaagtctgtgcccaaagagatctcccctgacaccacgctgctggacctgcagaacaacgacatctccgagctccgcaaggatgacttcaagggtctccagcacctctacgtaaggagctgggaggaaccagcaggcctacagcagagggcaggggtccgggccctcgtcctggtgaacaacaagatctccaagatccatgagaaggccttcagcccactgcggaagctgcagaagctctacatctccaagaaccacctggtggagatcccgcccaacctacccagctccctggtggagctccgcatccacgacaaccgcatccgcaaggtgcccaagggagtgttcagcgggctccggaacatgaactgcatcgagatgggcgggaacccactggagaacagtggctttgaacctggagccttcgatggcctgaagctcaactacctgcgcatctcagaggccaagctgactggcatccccaaagacctccctgagaccctgaatgaactccacctagaccacaacaaaatccaggccatcgaactggaggacctgcttcgctactccaagctgtacaggctgggcctaggccacaaccagatcaggatgatcgagaacgggagcctgagcttcctgcccaccctccgggagctccacttggacaacaacaagttggccagggtgccctcagggctcccagacctcaagctcctccaggtggtctatctgcactccaacaacatcaccaaagtgggtgtcaacgacttctgtcccatgggcttcggggtgaagcgggcctactacaacggcatcagcctcttcaacaaccccgtgccctactgggaggtgcagccggccactttccgctgcgtcactgaccgcctggccatccagtttggcaactacaaaaagtagaggcagctgcagccaccgcggggcctcagtgggggtctctggggaacacagccagacatcctgatggggaggcagagccaggaagctaagccagggcccagctgcgtccaacccagccccccacctcgggtccctgaccccagctcgatgccccatcaccgcctctccctggctcccaagggtgcaggtgggcgcaaggcccggcccccatcacatgttcccttggcctcagagctgcccctgctctcccaccacagccacccagaggcaccccatgaagcttttttctcgttcactcccaaacccaagtgtccaaggctccagtcctaggagaacagtccctgggtcagcagccaggaggcggtccataagaatggggacagtgggctctgccagggctgccgcacctgtccagacacacatgttctgttcctcctcctcatgcatttccagcctttcaaccctccccgactctgcggctcccctcagcccccttgcaagttcatggcctgtccctcccagacccctgctccactggcccttcgaccagtcctcccttctgttctctctttccccgtccttcctctctctctctctctctctctctctctctttctgtgtgtgtgtgtgtgtgtgtgtgtgtgtgtgtgtgtgtgtcttgtgcttcctcagacctttctcgcttctgagcttggtggcctgttccctccatctctccgaacctggcttcgcctgtccctttcactccacaccctctggccttctgccttgagctgggactgctttctgtctgtccggcctgcacccagcccctgcccacaaaaccccagggacagcggtctccccagcctgccctgctcaggccttgcccccaaacctgtactgtcccggaggaggttgggaggtggaggcccagcatcccgcgcagatgacaccatcaaccgccagagtcccagacaccggttttcctagaagcccctcacccccactggcccactggtggctaggtctccccttatccttctggtccagcgcaaggaggggctgcttctgaggtcggtggctgtctttccattaaagaaacaccgtgcaacgtg

SEQ ID NO: 321867 - DNA, 1815 bp, Homo sapiens
cagcctttagcctcccgcccgccgcctctgtctccctctctccacaaactgcccaggagtgagtagctgctttcggtccgccggacacaccggacagatagacgtgcggacggcccaccaccccagcccgccaactagtcagcctgcgcctggcgcctcccctctccaggtccatccgccatgtggcccctgtggcgcctcgtgtctctgctggccctgagccaggccctgccctttgagcagagaggcttctgggacttcaccctggacgatgggccattcatgatgaacgatgaggaagcttcgggcgctgacacctcaggcgtcctggacccggactctgtcacacccacctacagcgccatgtgtcctttcggctgccactgccacctgcgggtggttcagtgctccgacctgggtctgaagtctgtgcccaaagagatctcccctgacaccacgctgctggacctgcagaacaacgacatctccgagctccgcaaggatgacttcaagggtctccagcacctctacgccctcgtcctggtgaacaacaagatctccaagatccatgagaaggccttcagcccactgcggaagctgcagaagctctacatctccaagaaccacctggtggagatcccgcccaacctacccagctccctggtggagctccgcatccacgacaaccgcatccgcaaggtgcccaagggagtgttcagcgggctccggaacatgaactgcatcgagatgggcgggaacccactggagaacagtggctttgaacctggagccttcgatggcctgaagctcaactacctgcgcatctcagaggccaagctgactggcatccccaaagacctccctgagaccctgaatgaactccacctagaccacaacaaaatccaggccatcgaactggaggacctgcttcgctactccaagctgtacaggctgggcctaggccacaaccagatcaggatgatcgagaacgggagcctgagcttcctgcccaccctccgggagctccacttggacaacaacaagttggccagggtgccctcagggctcccagacctcaagctcctccaggtggtctatctgcactccaacaacatcaccaaagtgggtgtcaacgacttctgtcccatgggcttcggggtgaagcgggcctactacaacggcatcagcctcttcaacaaccccgtgccctactgggaggtgcagccggccactttccgctgcgtcactgaccgcctggccatccagtttggcaactacaaaaagtagaggcagctgcagccaccgcggggcctcagtgggggtctctggggaacacagccagacatcctgatggggaggcagagccaggaagctaagccagggcccagctgcgtccaacccagccccccacctcgggtccctgaccccagctcgatgccccatcaccgcctctccctggctcccaagggtgcaggtgggcgcaaggcccggcccccatcacatgttcccttggcctcagagctgcccctgctctcccaccacagccacccagaggcaccccatgaagcttttttctcgttcactcctctccccagcctgccctgctcaggccttgcccccaaacctgtactgtcccggaggaggttgggaggtggaggcccagcatcccgcgcagatgcggttttcctagaagcccctcacccccactggcccactggtggctaggtctccccttatccttctggtccagcgcaaggaggggctgcttctgaggtcggtggctgtctttccattaaagaaacaccgtgcaacgtg

SEQ ID NO: 321868 - DNA, 1663 bp, Homo sapiens
  misc_feature (1502)..(1502): n is a, c, g, or t
  misc_feature (1513)..(1513): n is a, c, g, or t
  misc_feature (1520)..(1520): n is a, c, g, or t
  misc_feature (1537)..(1537): n is a, c, g, or t
  misc_feature (1549)..(1549): n is a, c, g, or t
  misc_feature (1607)..(1607): n is a, c, g, or t
  misc_feature (1637)..(1637): n is a, c, g, or t
  misc_feature (1641)..(1641): n is a, c, g, or t
cagcctttagcctcccgcccgccgcctctgtctccctctctccacaaactgcccaggagtgagtagctgctttcggtccgccggacacaccggacagatagacgtgcggacggcccaccaccccagcccgccaactagtcagcctgcgcctggcgcctcccctctccaggtccatccgccatgtggcccctgtggcgcctcgtgtctctgctggccctgagccaggccctgccctttgagcagagaggcttctgggacttcaccctggacgatgggccattcatgatgaacgatgaggaagcttcgggcgctgacacctcaggcgtcctggacccggactctgtcacacccacctacagcgccatgtgtcctttcggctgccactgccacctgcgggtggttcagtgctccgacctgggtctgaagtctgtgcccaaagagatctcccctgacaccacgctgctggacctgcagaacaacgacatctccgagctccgcaaggatgacttcaagggtctccagcacctctacgccctcgtcctggtgaacaacaagatctccaagatccatgagaaggccttcagcccactgcggaagctgcagaagctctacatctccaagaaccacctggtggagatcccgcccaacctacccagctccctggtggagctccgcatccacgacaaccgcatccgcaaggtgcccaagggagtgttcagcgggctccggaacatgaactgcatcgagatgggcgggaacccactggagaacagtggctttgaacctggagccttcgatggcctgaagctcaactacctgcgcatctcagaggccaagctgactggcatccccaaagacctccctgagaccctgaatgaactccacctagaccacaacaaaatccaggccatcgaactggaggacctgcttcgctactccaagctgtacaggctgggcctaggccacaaccagatcaggatgatcgagaacgggagcctgagcttcctgcccaccctccgggagctccacttggacaacaacaagttggccagggtgccctcagggctcccagacctcaagctcctccaggtggtctatctgcactccaacaacatcaccaaagtgggtgtcaacgacttctgtcccatgggcttcggggtgaagcgggcctactacaacggcatcagcctcttcaacaaccccgtgccctactgggaggtgcagccggccactttccgctgcgtcactgaccgcctggccatccagtttggcaactacaaaaagtagaggcagctgcagccaccgcggggcctcagtgggggtctctggggaacacagccagacatcctgatggggaggcagagccaggaagctaagccagggcccagctgcgtccaacccagccccccacctcgggtccctgaccccagctcgatgccccatcaccgcctctccctggctcccaagggtgcaggtgggcgcaaggcccggccgtcgctgtnaggcgtaaggnacatganttctagggtctcctttntccttatttatncttgtggctacatcatccctggctgtggatagtgcttttttgtagcaaattctccctncttaaggttatagggctccttgagtttggnagtnttggaagtactactttaacttg

SEQ ID NO: 321869 - DNA, 1789 bp, Homo sapiens
  misc_feature (1579)..(1579): n is a, c, g, or t
cagcctttagcctcccgcccgccgcctctgtctccctctctccacaaactgcccaggagtgagtagctgctttcggtccgccggacacaccggacagatagacgtgcggacggcccaccaccccagcccgccaactagtcagcctgcgcctggcgcctcccctctccaggtccatccgccatgtggcccctgtggcgcctcgtgtctctgctggccctgagccaggccctgccctttgagcagagaggcttctgggacttcaccctggacgatgggccattcatgatgaacgatgaggaagcttcgggcgctgacacctcaggcgtcctggacccggactctgtcacacccacctacagcgccatgtgtcctttcggctgccactgccacctgcgggtggttcagtgctccgacctgggtctgaagtctgtgcccaaagagatctcccctgacaccacgctgctggacctgcagaacaacgacatctccgagctccgcaaggatgacttcaagggtctccagcacctctacgccctcgtcctggtgaacaacaagatctccaagatccatgagaaggccttcagcccactgcggaagctgcagaagctctacatctccaagaaccacctggtggagatcccgcccaacctacccagctccctggtggagctccgcatccacgacaaccgcatccgcaaggtgcccaagggagtgttcagcgggctccggaacatgaactgcatcgagatgggcgggaacccactggagaacagtggctttgaacctggagccttcgatggcctgaagctcaactacctgcgcatctcagaggccaagctgactggcatccccaaagacctccctgagaccctgaatgaactccacctagaccacaacaaaatccaggccatcgaactggaggacctgcttcgctactccaagctgtacagctctggggaacacagccagacatcctgatggggaggcagagccaggaagctaagccagggcccagctgcgtccaacccagccccccacctcgggtccctgaccccagctcgatgccccatcaccgcctctccctggctcccaagggtgcaggtgggcgcaaggcccggcccccatcacatgttcccttggcctcagagctgcccctgctctcccaccacagccacccagaggcaccccatgaagcttttttctcgttcactcccaaacccaagtgtccaaggctccagtcctaggagaacagtccctgggtcagcagccaggaggcggtccataagaatggggacagtgggctctgccagggctgccgcacctgtccagacacacatgttctgttcctcctcctcatgcatttccagcctttcaaccctccccgactctgcggctcccctcagcccccttgcaagttcatggcctgtccctcccagacccctgctccactggcccttcgaccagtcctcccttctgttctctctttccccgtccttcctctctctctctctctctctctctctctctttctgtgtgtgtgtgtgtgtgtgtgtgtgtgtgtgtgtgtgtgtgtgtcccnctctcccgctcctctctaccctttttgtttttgggctttggggcctggcccctccttttctctgtccctgtcgttgcctttcccttttctgttaatgtttggcctttctttttcattttgggtgtttttttttggtgtcttccttgtaccagaccttgccataaataacttaggaaaattatctacacaattttaacattataattataa

SEQ ID NO: 321870 - DNA, 658 bp, Homo sapiens
gcgcgcggcccccgcgagagcttataccccgactctgcggctcccctcagcccccttgcaagttcatggcctgtccctcccagacccctgctccactggcccttcgaccagtcctcccttctgttctctctttccccgtccttcctctctctctctctctctctctctctctctttctgtgtgtgtgtgtgtgtgtgtgtgtgtgtgtgtgtgtgtgtcttgtgcttcctcagacctttctcgcttctgagcttggtggcctgttccctccatctctccgaacctggcttcgcctgtccctttcactccacaccctctggccttctgccttgagctgggactgctttctgtctgtccggcctgcacccagcccctgcccacaaaaccccagggacagcggtctccccagcctgccctgctcaggccttgcccccaaacctgtactgtcccggaggaggttgggaggtggaggcccagcatcccgcgcagatgacaccatcaaccgccagagtcccagacaccggttttcctagaagcccctcacccccactggcccactggtggctaggtctccccttatccttctggtccagcgcaaggaggggctgcttctgaggtcggtggctgtctttccattaaagaaacaccgtgcaacgtg

SEQ ID NO: 321871 - DNA, 933 bp, Homo sapiens
cagcctttagcctcccgcccgccgcctctgtctccctctctccacaaactgcccaggagtgagtagctgctttcggtccgccggacacaccggacagatagacgtgcggacggcccaccaccccagcccgccaactagtcagcctgcgcctggcgcctcccctctccaggtccatccgccatgtggcccctgtggcgcctcgtgtctctgctggccctgagccaggccctgccctttgagcagagaggcttctgggacttcaccctggacgatgggccattcatgatgaacgatgaggaagcttcgggcgctgacacctcaggcgtcctggacccggactctgtcacacccacctacagcgccatgtgtcctttcggctgccactgccacctgcgggtggttcagtgctccgacctgggtctgaagtctgtgcccaaagagatctcccctgacaccacgctgctggacctgcagaacaacgacatctccgagctccgcaaggatgacttcaagggtctccagcacctctacgccctcgtcctggtgaacaacaagatctccaagatccatgagaaggccttcagcccactgcggaagctgcagaagctctacatctccaagaaccacctggtggagatcccgcccaacctacccagctccctggtggagctccgcatccacgacaaccgcatccgcaaggtgcccaagggagtgttcagcgggctccggaacatgaactgcatcgagatgggcgggaacccactggagaacagtggctttgaacctggagccttcgatggcctgaagctcaactacctgcgcatctcagaggccaagctgactggcatccccaaagaactccttaaaccttatgaatccactatacccaaaaaatccgggcttcaaatggggacgtggttcctatcccaagcg

SEQ ID NO: 321872 - DNA, 2994 bp, Homo sapiens
  misc_feature (514)..(514): n is a, c, g, or t
  misc_feature (531)..(531): n is a, c, g, or t
  misc_feature (688)..(688): n is a, c, g, or t
aggatatcctcgcttctcattctatcctgatgtcaattctggagtatttgccagatgattatatgttttgtggattatctatacattggacatgaatctttttcttttcaaagaagagaactttttggtcactaagtgcagtgtctctcatttgggagttaggctgagggagggtttatttccttgggaatatttcttgattttaatattaaatgcccacagtacagagatttattttgttctcttcgatgggatggaaaatgttgaagtgactttgtcttaaaataattaagtggattttaaccatgttacttttaaacttctgtttcactttagagaagatttttcaagagtctttgaacactttgaactattctgtatttaacatatcgttactcctctttaaataattatgcctgttgagaatgttctctcaaagaaagtactgcagtattttggtagtagtatagtctggtgttgcattaatattaagcatgcatactcggcagactanaatgttaataagccgtngaatatttcctttaatgttttaaattgttcaaagcattggtgtaacattgatggagtaattttagatagagcattttaacttaggtaatacagaagaaacactgcaaattttagacaggtataactgaaaacagtaatacttgaagacatcctttcngaaaatggtgtgtctgttaacaataaggcagaaaaggtattgtgggcagaagaacaaatcttagcctacctagctggcatgccagttaaaggcagtgagccttcacacaaactatgtggtcctttaaattataataaaaatagagacaagtcacttcacatagttcattctattttcttttcaatttattattacttgcccaaagctaaggagggaggaggagagagagagagagagagagagagagtgtgtgtgtgtgtgtgtgtgtgtgtgtgtgtgtgtcactatacactaggcttgacataaaagtagtttgggaccatcttaatttaaagagtaacataatttaggaagccatcatgtcaacttatttttcatatatgtgtatgtacacatacacacattcatatatatgtacgtatctatgtgcacatgtatgtatgtgtatatatgatatatttgaaggaaaatttttcttttatttcttttgtttgttttaggttgtttgcttttactcttttcttttgtgcatgagtgtgtgtttggatatgtttcttactattatttgtgaaggttccattaaacacttttactttattacctctagaatttatttttcccttccttttccacctcagccaccagtggtaaaaacagagatggtaacaatttctgatgcctcacaaaggacagaaatctccaccaaggaagtccccattgtccaaactgagaccaaaaccatcacatatgagtctccacagattgatggcggggctggtggtgattcgggcacgttactgaccgcacaaaccatcacatctgagtccgtgtcaacaacgacaaccacacacatcaccaagactgtaaaaggtggaatttctgaaacaagaattgagaaacgcattgtgatcacaggagatggagatattgatcatgaccaggcactggctcaggcgatcagggaagccagagagcagcaccctgacatgtcggtcacaagagtggtggtacacaaagaaacagagttggctgaggaaggggaagattaagtaagaaagtcattttttaaacaacactcaactttgtgaacccctgaagattttttgaccgttccaagtcttaatgccacaccactattccagcgaatttatgctacaactggtaacaatgaccagaagcctgaagaattaaaatgccaacaccaaacctttccttaccagctctggtctatattgctcccatgcatttaatatattattttgttttataaccacttctaaatattctcagttctttctttttgttgttgttaattaaggggttttggttttgttttctgtttactttgtgtgcaactacctgcttttaatgactcactttgatcaaatgacagtgaacaaagccagcccaagctggtaaggtgctgttcacttgaacaggtgctgttgcgcagaaaggaaactctgtgactaatttagatagtggctttccttcttctggattcttttcattgaattctcacagtaaatatttacggagttttcaaattgcagcaaatatactgtatgagaaaatattaatacagattaaaagcctttcttacatcttgaaaattttctaatatttgagaatttcacagggatgttttttatattggacccttttgactttccagtcctgtgactttctacttttagtagagagtcagaatctctggactggagaataatgaagaagttcactgactgtgcactgtgcttagagaccctgccgcaccacagtgccaatgcttgtcagacacatgcccttcggcagcattccagaacaggagggaagagaaagagaaaactttcttcccttctactaaaagattcaggcagcttaaaaccttagtgctttctttcttaacatacccaaatttcaattctttccattatttgaacacttgggtagaactcttgctttgtattaaacctctttgtctacacatgtaaaacttaccttttgttattgagcaggcctatctctttcagatagttttatgattcacacaggtttgaggatgctggggagagggggagggggctgtggtggtgttctgttggttacaagaaagttataccatttaaagctggcaccagagacccgatagggacttattaactatattgaacattttttcctttgcctttgaccctatgtatagttacgatgccagattagatttatagcagcctcaagttgtattaaatgatattttgcttcctgtaatactattataaaataaagtttgtttattctctaaa

SEQ ID NO: 321873 - DNA, 554 bp, Homo sapiens
ccctcagagtcctctgacggccccagtcagggaatttcaatttgaaacctagcggagggaggaggcaggcgcggctgccggcggctgggactgaagagggacgggtcccgcggcgagcgagctcctgagcataagctgtggccatgactactgaagtaggctctgtgtctgaagtgaagaaggactctagccagttaggaacagatgcaaccaaggaaaaacctctttgtctacacatgtaaaacttaccttttgttattgagcaggcctatctctttcagatagttttatgattcacacaggtttgaggatgctggggagagggggagggggctgtggtggtgttctgttggttacaagaaagttataccatttaaagctggcaccagagacccgatagggacttattaactatattgaacattttttcctttgcctttgaccctatgtatagttacgatgccagattagatttatagcagcctcaagttgtattaaatgatattttgcttcctgtaatactattataaaataaagtttgtttattctctaaa

SEQ ID NO: 321874 - DNA, 1391 bp, Homo sapiens
  misc_feature (878)..(878): n is a, c, g, or t
attgtttttagagatggggtcttgctgtgttgtctgggccggagtacactgggtactcacagatgtgatcattgcatactacagccttgaactcctgggctcaagtgatccttctgtctcagtttcctgagtacctgggactagaggtgtgtgccaccatgctggttatctataagcacttttacatttatttatttatttaattcttgtagtaactctttgtggtaggtactattatcctaagtatcctataagaaaactgaggcactgcagtttgaagtaacttgctcagggtcactcagccaattaatggtggagcagcggtttgaacccaggctgtctagttccagagcctatagccataactactgtcttatattatccctaagaatatgtaaacgacgtcaaaccccgatcctatttgcattcccctccccacgggtaactatcttgaatcagagccaatactacactattgcattagggtataatttaatcattaggggatagttttcatgcagaaactagaaagcactgatgagattctactcatgttcctttaccagctttagttataaaggggaagcgggaaaatggaagcacgtagaggataaggtgataacctccaccttaccatcttccttcttcccccttaaaaaagaaatggaatgttgagtctatctggaatgttgacaggttaaaaaggagctgttgaagcctgtcgttcacagtagcatcgaaaggtgaaaatttgtctccacttgagtaccttgaaatggcaggtgtgttattggaatattgggctattgttggtcagtactgctgagtatagacttttgtaggtgtttatcctgaatctgtagtgaccggaatttcancaaatgaggtatttaatactgttttttcccttttgtttctgaaaggagcagaggatagaaagacaattgttctagcctcaagtcccagtacactcattagttaagtgtgacggtggtcaagtgatgttgctttgtgtgtctgttttctcttaggtggttcaggtaccctgaaataaatcctaacttatatgtctgttgctcattcatctctgtgtgtggagaaagtgatttaaagtgtcctttctttaagaaggaaagagccagggcatagtggctcgtatctgtaatcctagcactttgggaggctgaggcaggaggattgcttcagtcaggaggttgagactggcctgggcaacatagtgaaaccatgtctctactaaaaaaaaaaaaaaaaaaaaattagcttcggagactgaggcgggaggatcccttgaactccagagatggaggctacagtgagctatgatcttgccactgcactccagccttggtgacagagtcacacactatctc

SEQ ID NO: 321875 - DNA, 920 bp, Homo sapiens
ccctcagagtcctctgacggccccagtcagggaatttcaatttgaaacctagcggagggaggaggcaggcgcggctgccggcggctgggactgaagagggacgggtcccgcggcgagcgagctcctgagcataagctgtggccatgactactgaagtaggctctgtgtctgaagtgaagaaggactctagccagttaggaacagatgcaaccaaggaaaaacctaaagaagtagcagaaaatcagcagaatcagtcttccgatccagaggaggaaaaaggttcccagccacctcctgcagctgaaagccaaagtagtctacgccgccagaagagagagaaggaaacatcggagagcaggggtatttctcggttcataccgccatggcttaagaagcaaaagtcatataccttagtagtggccaaagatggaggagataaaaaagagcctacccaagctgttgttgaagaacaggtcttagataaagaggaaccccttccagaagaacagagacaggctaagggtgatgctgaagaaatggctcagaagaaacaaaaaaaaaaaaaaaaaaaaaaattttggggggggtggggcgagaaaaggtttttcacacccctcctggtggggcgcgccgcggccccagcaggtaatgcggcacatggggcaccacggcgccccaaagaagacaccgtgcggctagaagatgcgggggagttctcccccccaaaaaaaaagggcgccggcggcacgcgaggtgcatggacacatcccagagggtgccggacggctacacgggtccaaccacaggtccagcggtcgctacccccgcgccggccgcggcgggaaaacacaaaccacacacaacacacacaaacagccgaccacaagaccacacgccgacaacagcgaacacagcaacgg

SEQ ID NO: 321876 - DNA, 512 bp, Homo sapiens
tctgtcagaattctcatcttttctttcattttatgctgttctgttgttctttcttgtgtaacctttcctttcttccaataggtcactgctgtctgttctgacttattgctaattctttgctcttccttttctgacctctctagagcctagaagaggagataacatcaattttgtttagtgaaaagggcttttctgatagcatgaaagccaccttcacttcagccaccacttggacagcagagggcgctgttgtgagcgctaatgcaccttctgaaaagctttcttcctcgcccttctcacacttgcttgaggtgcattttactttgtttcccctgttactaaaagccacatatgagagagattttcatttttttaaatattcaggcaccattccctccagtgctttcattggtgaaattaattcttcctgggagaaacattcaagaaacaatgactgaattggaacatgaagaaaagatatagattggatgtttctcctgcttctttggtca

SEQ ID NO: 321877 - DNA, 4350 bp, Homo sapiens
gctcggtacccggtgtttatcgatgccacagcttttgtttcaggaaagccctgagcagaaacataagctgtggccatgactactgaagtaggctctgtgtctgaagtgaagaaggactctagccagttaggaacagatgcaaccaaggaaaaacctaaagaagtagcagaaaatcagcagaatcagtcttccgatccagaggaggaaaaaggttcccagccacctcctgcagctgaaagccaaagtagtctacgccgccagaagagagagaaggaaacatcggagagcaggggtatttctcggttcataccgccatggcttaagaagcaaaagtcatataccttagtagtggccaaagatggaggagataaaaaagagcctacccaagctgttgttgaagaacaggtcttagataaagaggaaccccttccagaagaacagagacaggctaagggtgatgctgaagaaatggctcagaagaaacaagagattaaagttgaagtcaaggaagaaaaaccctcagtgagcaaggaagaaaaaccctcagtgagcaaagtggagatgcagcctactgaattagtaagtaaggagagagaagagaaggtaaaagaaacacaggaagacaaattagaaggaggagcagcaaaaagggagaccaaggaagtgcagaccaatgagctgaaagcagagaaggcatctcaaaaagtcaccaagaagaccaaaactgtccagtgtaaagtgaccctcttagatggcaccgaatacagctgtgacctggagaaacatgccaagggacaagtgttatttgacaaagtgtgtgaacacctcaatctcttggagaaagactactttggacttttgtttcaggaaagccctgagcagaaaaactggttagatcctgctaaagaaataaagagacaactgagaaaccttccatggctattcacttttaatgtgaagttttatcctcctgatccttctcaattgactgaagatatcaccagatacttcttgtgccttcagctccggcaggacattgcctctggccgcctgccctgctcttttgtgactcatgctctcctgggatcctacaccctgcaggctgaacttggtgactatgacccagaagaacatggcagcatcgacctcagtgaattccagtttgcccctactcagactaaggagctggaagagaaggtggcagagctgcacaaaacccacaggggcttatcgccagcacaagctgattcccagttcttagaaaatgcaaagaggctttccatgtatggtgttgacctacatcatgccaaggactcagaaggtgtggacatcaagctgggcgtgtgtgctaatggacttctcatttacaaagacagactgcgaatcaatcgttttgcttggccgaaaatcttaaaaatttcctataaacgcagtaacttctacattaaagtcagaccggcagagctggaacagtttgagagtaccattggattcaaactgccaaaccaccgggcagcgaaaagactatggaaagtgtgcgtggagcatcatactttctacaggcttgtttctccagagcagccaccaaaagccaagttcctgaccttggggtccaaatttcgctatagtggccgcacccaagcacagacccgccaggccagcaccctcatagataggccagcaccacactttgagcgcacttctagtaaacgggtctccaggagtctagatggagctccgattggtgtcatggaccaaagtcttatgaaggattttcctggcgctgctggggagatttcagcctatggacctggacttgtcagcattgccgtggtacaagatggggacggcaggagggaagtgagaagcccaactaaagccccacatttgcagctcattgaaggaaagaaaaattccttgagagtagaaggggataatatttatgtcagacatagcaatttaatgttggaggaactggataaggcccaggaggacatactgaaacatcaggctagcattagtgaactcaagcgcaattttatggaatccacacctgagccgcgccctaatgaatgggaaaaacgacgtatcacacctctgtccctacagacacaagggagttcacatgagactctgaatatagtggaggagaagaagcgggcagaggttgggaaagacgaaagagtaatcacagaagaaatgaatggtaaagagatatcacctgggagtggtcctggggagattcgtaaggtggagcctgtgacacaaaaagactccacctccctgtcttctgagagcagcagcagcagcagtgagagtgaggaggaagacgtgggagagtaccgtccccaccaccgagtgaccgagggcaccatcagggaggaacaggagtatgaagaagaggtggaggaagaaccccgcccggcagccaaggtagtagagagggaggaagcagtgcccgaagccagcccagtcacacaagcaggtgccagtgtaatcacagtagaaacagtgatccaggaaaatgtaggtgcccaaaagatacccggagagaagagtgtacacgaaggcgctcttaagcaagacatgggagaagaagcagaggaagagccacagaaagttaacggagaggtgtcccatgttgacattgatgttttgccacaaattatttgttgttcagagccaccagtggtaaaaacagagatggtaacaatttctgatgcctcacaaaggacagaaatctccaccaaggaagtccccattgtccaaactgagaccaaaaccatcacatatgagtctccacagattgatggcggggctggtggtgattcgggcacgttactgaccgcacaaaccatcacatctgagtccgtgtcaacaacgacaaccacacacatcaccaagactgtaaaaggtggaatttctgaaacaagaattgagaaacgcattgtgatcacaggagatggagatattgatcatgaccaggcactggctcaggcgatcagggaagccagagagcagcaccctgacatgtcggtcacaagagtggtggtacacaaagaaacagagttggctgaggaaggggaagattaagtaagaaagtcattttttaaacaacactcaactttgtgaacccctgaagattttttgaccgttccaagtcttaatgccacaccactattccagcgaatttatgctacaactggtaacaatgaccagaagcctgaagaattaaaatgccaacaccaaacctttccttaccagctctggtctatattgctcccatgcatttaatatattattttgttttataaccacttctaaatattctcagttctttctttttgttgttgttaattaaggggttttggttttgttttctgtttactttgtgtgcaactacctgcttttaatgactcactttgatcaaatgacagtgaacaaagccagcccaagctggtaaggtgctgttcacttgaacaggtgctgttgcgcagaaaggaaactctgtgactaatttagatagtggctttccttcttctggattcttttcattgaattctcacagtaaatatttacggagttttcaaattgcagcaaatatactgtatgagaaaatattaatacagattaaaagcctttcttacatcttgaaaattttctaatatttgagaatttcacagggatgttttttatattggacccttttgactttccagtcctgtgactttctacttttagtagagagtcagaatctctggactggagaataatgaagaagttcactgactgtgcactgtgcttagagaccctgccgcaccacagtgccaatgcttgtcagacacatgcccttcggcagcattccagaacaggagggaagagaaagagaaaactttcttcccttctactaaaagattcaggcagcttaaaaccttagtgctttctttcttaacatacccaaatttcaattctttccattatttgaacacttgggtagaactcttgctttgtattaaacctctttgtctacacatgtaaaacttaccttttgttattgagcaggcctatctctttcagatagttttatgattcacacaggtttgaggatgctggggagagggggagggggctgtggtggtgttctgttggttacaagaaagttataccatttaaagctggcaccagagacccgatagggacttattaactatattgaacattttttcctttgcctttgaccctatgtatagttacgatgccagattagatttatagcagcctcaagttgtattaaatgatattttgcttcctgtaatactattataaaataaagtttgtttattctctaaa

SEQ ID NO: 321878 - DNA, 4389 bp, Homo sapiens
aggattgtttgagcccaggaggtcgaggctgcagtgagccatgagtgtgccactgcactccagcctgggtgacagggtgagaccctgtctctgaaaataacataagctgtggccatgactactgaagtaggctctgtgtctgaagtgaagaaggactctagccagttaggaacagatgcaaccaaggaaaaacctaaagaagtagcagaaaatcagcagaatcagtcttccgatccagaggaggaaaaaggttcccagccacctcctgcagctgaaagccaaagtagtctacgccgccagaagagagagaaggaaacatcggagagcaggggtatttctcggttcataccgccatggcttaagaagcaaaagtcatataccttagtagtggccaaagatggaggagataaaaaagagcctacccaagctgttgttgaagaacaggtcttagataaagaggaaccccttccagaagaacagagacaggctaagggtgatgctgaagaaatggctcagaagaaacaagagattaaagttgaagtcaaggaagaaaaaccctcagtgagcaaggaagaaaaaccctcagtgagcaaagtggagatgcagcctactgaattagtaagtaaggagagagaagagaaggtaaaagaaacacaggaagacaaattagaaggaggagcagcaaaaagggagaccaaggaagtgcagaccaatgagctgaaagcagagaaggcatctcaaaaagtcaccaagaagaccaaaactgtccagtgtaaagtgaccctcttagatggcaccgaatacagctgtgacctggagaaacatgccaagggacaagtgttatttgacaaagtgtgtgaacacctcaatctcttggagaaagactactttggacttttgtttcaggaaagccctgagcagaaaaactggttagatcctgctaaagaaataaagagacaactgagaaaccttccatggctattcacttttaatgtgaagttttatcctcctgatccttctcaattgactgaagatatcaccagatacttcttgtgccttcagctccggcaggacattgcctctggccgcctgccctgctcttttgtgactcatgctctcctgggatcctacaccctgcaggctgaacttggtgactatgacccagaagaacatggcagcatcgacctcagtgaattccagtttgcccctactcagactaaggagctggaagagaaggtggcagagctgcacaaaacccacaggggcttatcgccagcacaagctgattcccagttcttagaaaatgcaaagaggctttccatgtatggtgttgacctacatcatgccaaggactcagaaggtgtggacatcaagctgggcgtgtgtgctaatggacttctcatttacaaagacagactgcgaatcaatcgttttgcttggccgaaaatcttaaaaatttcctataaacgcagtaacttctacattaaagtcagaccggcagagctggaacagtttgagagtaccattggattcaaactgccaaaccaccgggcagcgaaaagactatggaaagtgtgcgtggagcatcatactttctacaggcttgtttctccagagcagccaccaaaagccaagttcctgaccttggggtccaaatttcgctatagtggccgcacccaagcacagacccgccaggccagcaccctcatagataggccagcaccacactttgagcgcacttctagtaaacgggtctccaggagtctagatggagctccgattggtgtcatggaccaaagtcttatgaaggattttcctggcgctgctggggagatttcagcctatggacctggacttgtcagcattgccgtggtacaagatggggacggcaggagggaagtgagaagcccaactaaagccccacatttgcagctcattgaaggaaagaaaaattccttgagagtagaaggggataatatttatgtcagacatagcaatttaatgttggaggaactggataaggcccaggaggacatactgaaacatcaggctagcattagtgaactcaagcgcaattttatggaatccacacctgagccgcgccctaatgaatgggaaaaacgacgtatcacacctctgtccctacagacacaagggagttcacatgagactctgaatatagtggaggagaagaagcgggcagaggttgggaaagacgaaagagtaatcacagaagaaatgaatggtaaagagatatcacctgggagtggtcctggggagattcgtaaggtggagcctgtgacacaaaaagactccacctccctgtcttctgagagcagcagcagcagcagtgagagtgaggaggaagacgtgggagagtaccgtccccaccaccgagtgaccgagggcaccatcagggaggaacaggagtatgaagaagaggtggaggaagaaccccgcccggcagccaaggtagtagagagggaggaagcagtgcccgaagccagcccagtcacacaagcaggtgccagtgtaatcacagtagaaacagtgatccaggaaaatgtaggtgcccaaaagatacccggagagaagagtgtacacgaaggcgctcttaagcaagacatgggagaagaagcagaggaagagccacagaaagttaacggagaggtgtcccatgttgacattgatgttttgccacaaattatttgttgttcagagccaccagtggtaaaaacagagatggtaacaatttctgatgcctcacaaaggacagaaatctccaccaaggaagtccccattgtccaaactgagaccaaaaccatcacatatgagtctccacagattgatggcggggctggtggtgattcgggcacgttactgaccgcacaaaccatcacatctgagtccgtgtcaacaacgacaaccacacacatcaccaagactgtaaaaggtggaatttctgaaacaagaattgagaaacgcattgtgatcacaggagatggagatattgatcatgaccaggcactggctcaggcgatcagggaagccagagagcagcaccctgacatgtcggtcacaagagtggtggtacacaaagaaacagagttggctgaggaaggggaagattaagtaagaaagtcattttttaaacaacactcaactttgtgaacccctgaagattttttgaccgttccaagtcttaatgccacaccactattccagcgaatttatgctacaactggtaacaatgaccagaagcctgaagaattaaaatgccaacaccaaacctttccttaccagctctggtctatattgctcccatgcatttaatatattattttgttttataaccacttctaaatattctcagttctttctttttgttgttgttaattaaggggttttggttttgttttctgtttactttgtgtgcaactacctgcttttaatgactcactttgatcaaatgacagtgaacaaagccagcccaagctggtaaggtgctgttcacttgaacaggtgctgttgcgcagaaaggaaactctgtgactaatttagatagtggctttccttcttctggattcttttcattgaattctcacagtaaatatttacggagttttcaaattgcagcaaatatactgtatgagaaaatattaatacagattaaaagcctttcttacatcttgaaaattttctaatatttgagaatttcacagggatgttttttatattggacccttttgactttccagtcctgtgactttctacttttagtagagagtcagaatctctggactggagaataatgaagaagttcactgactgtgcactgtgcttagagaccctgccgcaccacagtgccaatgcttgtcagacacatgcccttcggcagcattccagaacaggagggaagagaaagagaaaactttcttcccttctactaaaagattcaggcagcttaaaaccttagtgctttctttcttaacatacccaaatttcaattctttccattatttgaacacttgggtagaactcttgctttgtattaaacctctttgtctacacatgtaaaacttaccttttgttattgagcaggcctatctctttcagatagttttatgattcacacaggtttgaggatgctggggagagggggagggggctgtggtggtgttctgttggttacaagaaagttataccatttaaagctggcaccagagacccgatagggacttattaactatattgaacattttttcctttgcctttgaccctatgtatagttacgatgccagattagatttatagcagcctcaagttgtattaaatgatattttgcttcctgtaatactattataaaataaagtttgtttattctctaaa

SEQ ID NO: 321879 - DNA, 4640 bp, Homo sapiens
ccctcagagtcctctgacggccccagtcagggaatttcaatttgaaacctagcggagggaggaggcaggcgcggctgccggcggctgggactgaagagggacgggtcccgcggcgagcgagctcctgagcataagctgtggccatgactactgaagtaggctctgtgtctgaagtgaagaaggactctagccagttaggaacagatgcaaccaaggaaaaacctaaagaagtagcagaaaatcagcagaatcagtcttccgatccagaggaggaaaaaggttcccagccacctcctgcagctgaaagccaaagtagtctacgccgccagaagagagagaaggaaacatcggagagcaggggtatttctcggttcataccgccatggcttaagaagcaaaagtcatataccttagtagtggccaaagatggaggagataaaaaagagcctacccaagctgttgttgaagaacaggtcttagataaagaggaaccccttccagaagaacagagacaggctaagggtgatgctgaagaaatggctcagaagaaacaagagattaaagttgaagtcaaggaagaaaaaccctcagtgagcaaggaagaaaaaccctcagtgagcaaagtggagatgcagcctactgaattagtaagtaaggagagagaagagaaggtaaaagaaacacaggaagacaaattagaaggaggagcagcaaaaagggagaccaaggaagtgcagaccaatgagctgaaagcagagaaggcatctcaaaaagtcaccaagaagaccaaaactgtccagtgtaaagtgaccctcttagatggcaccgaatacagctgtgacctggagaaacatgccaagggacaagtgttatttgacaaagtgtgtgaacacctcaatctcttggagaaagactactttggacttttgtttcaggaaagccctgagcagaaaaactggttagatcctgctaaagaaataaagagacaactgagaaaccttccatggctattcacttttaatgtgaagttttatcctcctgatccttctcaattgactgaagatatcaccagatacttcttgtgccttcagctccggcaggacattgcctctggccgcctgccctgctcttttgtgactcatgctctcctgggatcctacaccctgcaggctgaacttggtgactatgacccagaagaacatggcagcatcgacctcagtgaattccagtttgcccctactcagactaaggagctggaagagaaggtggcagagctgcacaaaacccacaggggcttatcgccagcacaagctgattcccagttcttagaaaatgcaaagaggctttccatgtatggtgttgacctacatcatgccaaggactcagaaggtgtggacatcaagctgggcgtgtgtgctaatggacttctcatttacaaagacagactgcgaatcaatcgttttgcttggccgaaaatcttaaaaatttcctataaacgcagtaacttctacattaaagtcagaccggcagagctggaacagtttgagagtaccattggattcaaactgccaaaccaccgggcagcgaaaagactatggaaagtgtgcgtggagcatcatactttctacaggcttgtttctccagagcagccaccaaaagccaagttcctgaccttggggtccaaatttcgctatagtggccgcacccaagcacagacccgccaggccagcaccctcatagataggccagcaccacactttgagcgcacttctagtaaacgggtctccaggagtctagatggagctccgattggtgtcatggaccaaagtcttatgaaggattttcctggcgctgctggggagatttcagcctatggacctggacttgtcagcattgccgtggtacaagatggggacggcaggagggaagtgagaagcccaactaaagccccacatttgcagctcattgaaggaaagaaaaattccttgagagtagaaggggataatatttatgtcagacatagcaatttaatgttggaggaactggataaggcccaggaggacatactgaaacatcaggctagcattagtgaactcaagcgcaattttatggaatccacacctgagccgcgccctaatgaatgggaaaaacgacgtatcacacctctgtccctacagacacaagggagcctagaagaggagataacatcaattttgtttagtgaaaagggcttttctgatagcatgaaagccaccttcacttcagccaccacttggacagcagagggcgctgttgtgagcgctaatgcaccttctgaaaagctttcttcctcgcccttctcacacttgcttgagacacgtgctcccgagtcagaagggccttgcactggagccagggatgctgttaagagttcacatgagactctgaatatagtggaggagaagaagcgggcagaggttgggaaagacgaaagagtaatcacagaagaaatgaatggtaaagagatatcacctgggagtggtcctggggagattcgtaaggtggagcctgtgacacaaaaagactccacctccctgtcttctgagagcagcagcagcagcagtgagagtgaggaggaagacgtgggagagtaccgtccccaccaccgagtgaccgagggcaccatcagggaggaacaggagtatgaagaagaggtggaggaagaaccccgcccggcagccaaggtagtagagagggaggaagcagtgcccgaagccagcccagtcacacaagcaggtgccagtgtaatcacagtagaaacagtgatccaggaaaatgtaggtgcccaaaagatacccggagagaagagtgtacacgaaggcgctcttaagcaagacatgggagaagaagcagaggaagagccacagaaagttaacggagaggtgtcccatgttgacattgatgttttgccacaaattatttgttgttcagagccaccagtggtaaaaacagagatggtaacaatttctgatgcctcacaaaggacagaaatctccaccaaggaagtccccattgtccaaactgagaccaaaaccatcacatatgagtctccacagattgatggcggggctggtggtgattcgggcacgttactgaccgcacaaaccatcacatctgagtccgtgtcaacaacgacaaccacacacatcaccaagactgtaaaaggtggaatttctgaaacaagaattgagaaacgcattgtgatcacaggagatggagatattgatcatgaccaggcactggctcaggcgatcagggaagccagagagcagcaccctgacatgtcggtcacaagagtggtggtacacaaagaaacagagttggctgaggaaggggaagattaagtaagaaagtcattttttaaacaacactcaactttgtgaacccctgaagattttttgaccgttccaagtcttaatgccacaccactattccagcgaatttatgctacaactggtaacaatgaccagaagcctgaagaattaaaatgccaacaccaaacctttccttaccagctctggtctatattgctcccatgcatttaatatattattttgttttataaccacttctaaatattctcagttctttctttttgttgttgttaattaaggggttttggttttgttttctgtttactttgtgtgcaactacctgcttttaatgactcactttgatcaaatgacagtgaacaaagccagcccaagctggtaaggtgctgttcacttgaacaggtgctgttgcgcagaaaggaaactctgtgactaatttagatagtggctttccttcttctggattcttttcattgaattctcacagtaaatatttacggagttttcaaattgcagcaaatatactgtatgagaaaatattaatacagattaaaagcctttcttacatcttgaaaattttctaatatttgagaatttcacagggatgttttttatattggacccttttgactttccagtcctgtgactttctacttttagtagagagtcagaatctctggactggagaataatgaagaagttcactgactgtgcactgtgcttagagaccctgccgcaccacagtgccaatgcttgtcagacacatgcccttcggcagcattccagaacaggagggaagagaaagagaaaactttcttcccttctactaaaagattcaggcagcttaaaaccttagtgctttctttcttaacatacccaaatttcaattctttccattatttgaacacttgggtagaactcttgctttgtattaaacctctttgtctacacatgtaaaacttaccttttgttattgagcaggcctatctctttcagatagttttatgattcacacaggtttgaggatgctggggagagggggagggggctgtggtggtgttctgttggttacaagaaagttataccatttaaagctggcaccagagacccgatagggacttattaactatattgaacattttttcctttgcctttgaccctatgtatagttacgatgccagattagatttatagcagcctcaagttgtattaaatgatattttgcttcctgtaatactattataaaataaagtttgtttattctctaaa

SEQ ID NO: 321880 - DNA, 4013 bp, Homo sapiens
ccctcagagtcctctgacggccccagtcagggaatttcaatttgaaacctagcggagggaggaggcaggcgcggctgccggcggctgggactgaagagggacgggtcccgcggcgagcgagctcctgagcataagctgtggccatgactactgaagtaggctctgtgtctgaagtgaagaaggactctagccagttaggaacagatgcaaccaaggaaaaacctaaagaagtagcagaaaatcagcagaatcagtcttccgatccagaggaggaaaaaggttcccagccacctcctgcagctgaaagccaaagtagtctacgccgccagaagagagagaaggaaacatcggagagcaggggtatttctcggttcataccgccatggcttaagaagcaaaagtcatataccttagtagtggccaaagatggaggagataaaaaagagcctacccaagctgttgttgaagaacaggtcttagataaagaggaaccccttccagaagaacagagacaggctaagggtgatgctgaagaaatggctcagaagaaacaagagattaaagttgaagtcaaggaagaaaaaccctcagtgagcaaggaagaaaaaccctcagtgagcaaagtggagatgcagcctactgaattagtaagtaaggagagagaagagaaggtaaaagaaacacaggaagacaaattagaaggaggagcagcaaaaagggagaccaaggaagtgcagaccaatgagctgaaagcagagaaggcatctcaaaaagtcaccaagaagaccaaaactgtccagtgtaaagtgaccctcttagatggcaccgaatacagctgtgacctggagaaacatgccaagggacaagtgttatttgacaaagtgtgtgaacacctcaatctcttggagaaagactactttggacttttgtttcaggaaagccctgagcagaaaaactggttagatcctgctaaagaaataaagagacaactgagaaaccttccatggctattcacttttaatgtgaagttttatcctcctgatccttctcaattgactgaagatatcaccagatacttcttgtgccttcagctccggcaggacattgcctctggccgcctgccctgctcttttgtgactcatgctctcctgggatcctacaccctgcaggctgaacttggtgactatgacccagaagaacatggcagcatcgacctcagtgaattccagtttgcccctactcagactaaggagctggaagagaaggtggcagagctgcacaaaacccacaggggcttatcgccagcacaagctgattcccagttcttagaaaatgcaaagaggctttccatgtatggtgttgacctacatcatgccaaggactcagaaggtgtggacatcaagctgggcgtgtgtgctaatggacttctcatttacaaagacagactgcgaatcaatcgttttgcttggccgaaaatcttaaaaatttcctataaacgcagtaacttctacattaaagtcagaccggcagagctggaacagtttgagagtaccattggattcaaactgccaaaccaccgggcagcgaaaagactatggaaagtgtgcgtggagcatcatactttctacaggcttgtttctccagagcagccaccaaaagccaagttcctgaccttggggtccaaatttcgctatagtggccgcacccaagcacagacccgccaggccagcaccctcatagataggccagcaccacactttgagcgcacttctagtaaacgggtctccaggagtctagatggagctccgattggtgtcatggaccaaagtcttatgaaggattttcctggcgctgctggggagatttcagcctatggacctggacttgtcagcattgccgtggtacaagatggggacggcaggagggaagtgagaagcccaactaaagccccacatttgcagctcattgaaggaaagagttcacatgagactctgaatatagtggaggagaagaagcgggcagaggttgggaaagacgaaagagtaatcacagaagaaatgaatggtaaagagatatcacctgggagtggtcctggggagattcgtaaggtggagcctgtgacacaaaaagactccacctccctgtcttctgagagcagcagcagcagcagtgagagtgaggaggaagacgtgggagagtaccgtccccaccaccgagtgaccgagggcaccatcagggaggaacaggagtatgaagaagaggtggaggaagaaccacagaaagttaacggagaggtgtcccatgttgacattgatgttttgccacaaattatttgttgttcagagccaccagtggtaaaaacagagatggtaacaatttctgatgcctcacaaaggacagaaatctccaccaaggaagtccccattgtccaaactgagaccaaaaccatcacatatgagtctccacagattgatggcggggctggtggtgattcgggcacgttactgaccgcacaaaccatcacatctgagtccgtgtcaacaacgacaaccacacacatcaccaagactgtaaaaggtggaatttctgaaacaagaattgagaaacgcattgtgatcacaggagatggagatattgatcatgaccaggcactggctcaggcgatcagggaagccagagagcagcaccctgacatgtcggtcacaagagtggtggtacacaaagaaacagagttggctgaggaaggggaagattaagtaagaaagtcattttttaaacaacactcaactttgtgaacccctgaagattttttgaccgttccaagtcttaatgccacaccactattccagcgaatttatgctacaactggtaacaatgaccagaagcctgaagaattaaaatgccaacaccaaacctttccttaccagctctggtctatattgctcccatgcatttaatatattattttgttttataaccacttctaaatattctcagttctttctttttgttgttgttaattaaggggttttggttttgttttctgtttactttgtgtgcaactacctgcttttaatgactcactttgatcaaatgacagtgaacaaagccagcccaagctggtaaggtgctgttcacttgaacaggtgctgttgcgcagaaaggaaactctgtgactaatttagatagtggctttccttcttctggattcttttcattgaattctcacagtaaatatttacggagttttcaaattgcagcaaatatactgtatgagaaaatattaatacagattaaaagcctttcttacatcttgaaaattttctaatatttgagaatttcacagggatgttttttatattggacccttttgactttccagtcctgtgactttctacttttagtagagagtcagaatctctggactggagaataatgaagaagttcactgactgtgcactgtgcttagagaccctgccgcaccacagtgccaatgcttgtcagacacatgcccttcggcagcattccagaacaggagggaagagaaagagaaaactttcttcccttctactaaaagattcaggcagcttaaaaccttagtgctttctttcttaacatacccaaatttcaattctttccattatttgaacacttgggtagaactcttgctttgtattaaacctctttgtctacacatgtaaaacttaccttttgttattgagcaggcctatctctttcagatagttttatgattcacacaggtttgaggatgctggggagagggggagggggctgtggtggtgttctgttggttacaagaaagttataccatttaaagctggcaccagagacccgatagggacttattaactatattgaacattttttcctttgcctttgaccctatgtatagttacgatgccagattagatttatagcagcctcaagttgtattaaatgatattttgcttcctgtaatactattataaaataaagtttgtttattctctaaa

SEQ ID NO: 321881 - DNA, 3201 bp, Homo sapiens
agcttttggacgctggatttccatcagctttccacagttttccaatgacaggaaatagcagacagcgggcttgatgtgcttaaaagctgcaaacatgccaagggacaagtgttatttgacaaagtgtgtgaacacctcaatctcttggagaaagactactttggacttttgtttcaggaaagccctgagcagaaaaactggttagatcctgctaaagaaataaagagacaactgagaaaccttccatggctattcacttttaatgtgaagttttatcctcctgatccttctcaattgactgaagatatcaccagatacttcttgtgccttcagctccggcaggacattgcctctggccgcctgccctgctcttttgtgactcatgctctcctgggatcctacaccctgcaggctgaacttggtgactatgacccagaagaacatggcagcatcgacctcagtgaattccagtttgcccctactcagactaaggagctggaagagaaggtggcagagctgcacaaaacccacaggggcttatcgccagcacaagctgattcccagttcttagaaaatgcaaagaggctttccatgtatggtgttgacctacatcatgccaaggactcagaaggtgtggacatcaagctgggcgtgtgtgctaatggacttctcatttacaaagacagactgcgaatcaatcgttttgcttggccgaaaatcttaaaaatttcctataaacgcagtaacttctacattaaagtcagaccggcagagctggaacagtttgagagtaccattggattcaaactgccaaaccaccgggcagcgaaaagactatggaaagtgtgcgtggagcatcatactttctacaggcttgtttctccagagcagccaccaaaagccaagttcctgaccttggggtccaaatttcgctatagtggccgcacccaagcacagacccgccaggccagcaccctcatagataggccagcaccacactttgagcgcacttctagtaaacgggtctccaggagtctagatggagctccgattggtgtcatggaccaaagtcttatgaaggattttcctggcgctgctggggagatttcagcctatggacctggacttgtcagcattgccgtggtacaagatggggacggcaggagggaagtgagaagcccaactaaagccccacatttgcagctcattgaaggaaagagttcacatgagactctgaatatagtggaggagaagaagcgggcagaggttgggaaagacgaaagagtaatcacagaagaaatgaatggtaaagagatatcacctgggagtggtcctggggagattcgtaaggtggagcctgtgacacaaaaagactccacctccctgtcttctgagagcagcagcagcagcagtgagagtgaggaggaagacgtgggagagtaccgtccccaccaccgagtgaccgagggcaccatcagggaggaacaggagtatgaagaagaggtggaggaagaaccccgcccggcagccaagccaccagtggtaaaaacagagatggtaacaatttctgatgcctcacaaaggacagaaatctccaccaaggaagtccccattgtccaaactgagaccaaaaccatcacatatgagtctccacagattgatggcggggctggtggtgattcgggcacgttactgaccgcacaaaccatcacatctgagtccgtgtcaacaacgacaaccacacacatcaccaagactgtaaaaggtggaatttctgaaacaagaattgagaaacgcattgtgatcacaggagatggagatattgatcatgaccaggcactggctcaggcgatcagggaagccagagagcagcaccctgacatgtcggtcacaagagtggtggtacacaaagaaacagagttggctgaggaaggggaagattaagtaagaaagtcattttttaaacaacactcaactttgtgaacccctgaagattttttgaccgttccaagtcttaatgccacaccactattccagcgaatttatgctacaactggtaacaatgaccagaagcctgaagaattaaaatgccaacaccaaacctttccttaccagctctggtctatattgctcccatgcatttaatatattattttgttttataaccacttctaaatattctcagttctttctttttgttgttgttaattaaggggttttggttttgttttctgtttactttgtgtgcaactacctgcttttaatgactcactttgatcaaatgacagtgaacaaagccagcccaagctggtaaggtgctgttcacttgaacaggtgctgttgcgcagaaaggaaactctgtgactaatttagatagtggctttccttcttctggattcttttcattgaattctcacagtaaatatttacggagttttcaaattgcagcaaatatactgtatgagaaaatattaatacagattaaaagcctttcttacatcttgaaaattttctaatatttgagaatttcacagggatgttttttatattggacccttttgactttccagtcctgtgactttctacttttagtagagagtcagaatctctggactggagaataatgaagaagttcactgactgtgcactgtgcttagagaccctgccgcaccacagtgccaatgcttgtcagacacatgcccttcggcagcattccagaacaggagggaagagaaagagaaaactttcttcccttctactaaaagattcaggcagcttaaaaccttagtgctttctttcttaacatacccaaatttcaattctttccattatttgaacacttgggtagaactcttgctttgtattaaacctctttgtctacacatgtaaaacttaccttttgttattgagcaggcctatctctttcagatagttttatgattcacacaggtttgaggatgctggggagagggggagggggctgtggtggtgttctgttggttacaagaaagttataccatttaaagctggcaccagagacccgatagggacttattaactatattgaacattttttcctttgcctttgaccctatgtatagttacgatgccagattagatttatagcagcctcaagttgtattaaatgatattttgcttcctgtaatactattataaaataaagtttgtttattctctaaa

SEQ ID NO: 321882 - DNA, 2984 bp, Homo sapiens
cgttcgaccttgtggctctgcgtcgaccttctgctctgcgtcgaccttctgctctgcgtcgaccttctgctctgcgtcgaccttctgctctgcgtcgaccttctgctctgcgtcgaccttctgctctgcgtcgaccttctgctctgcgtcgaccttttgtgactcatgctctcctgggatcctacaccctgcaggctgaacttggtgactatgacccagaagaacatggcagcatcgacctcagtgaattccagtttgcccctactcagactaaggagctggaagagaaggtggcagagctgcacaaaacccacaggggcttatcgccagcacaagctgattcccagttcttagaaaatgcaaagaggctttccatgtatggtgttgacctacatcatgccaaggactcagaaggtgtggacatcaagctgggcgtgtgtgctaatggacttctcatttacaaagacagactgcgaatcaatcgttttgcttggccgaaaatcttaaaaatttcctataaacgcagtaacttctacattaaagtcagaccggcagagctggaacagtttgagagtaccattggattcaaactgccaaaccaccgggcagcgaaaagactatggaaagtgtgcgtggagcatcatactttctacaggcttgtttctccagagcagccaccaaaagccaagttcctgaccttggggtccaaatttcgctatagtggccgcacccaagcacagacccgccaggccagcaccctcatagataggccagcaccacactttgagcgcacttctagtaaacgggtctccaggagtctagatggagctccgattggtgtcatggaccaaagtcttatgaaggattttcctggcgctgctggggagatttcagcctatggacctggacttgtcagcattgccgtggtacaagatggggacggcaggagggaagtgagaagcccaactaaagccccacatttgcagctcattgaaggaaagagttcacatgagactctgaatatagtggaggagaagaagcgggcagaggttgggaaagacgaaagagtaatcacagaagaaatgaatggtaaagagatatcacctgggagtggtcctggggagattcgtaaggtggagcctgtgacacaaaaagactccacctccctgtcttctgagagcagcagcagcagcagtgagagtgaggaggaagacgtgggagagtaccgtccccaccaccgagtgaccgagggcaccatcagggaggaacaggagtatgaagaagaggtggaggaagaaccccgcccggcagccaagccaccagtggtaaaaacagagatggtaacaatttctgatgcctcacaaaggacagaaatctccaccaaggaagtccccattgtccaaactgagaccaaaaccatcacatatgagtctccacagattgatggcggggctggtggtgattcgggcacgttactgaccgcacaaaccatcacatctgagtccgtgtcaacaacgacaaccacacacatcaccaagactgtaaaaggtggaatttctgaaacaagaattgagaaacgcattgtgatcacaggagatggagatattgatcatgaccaggcactggctcaggcgatcagggaagccagagagcagcaccctgacatgtcggtcacaagagtggtggtacacaaagaaacagagttggctgaggaaggggaagattaagtaagaaagtcattttttaaacaacactcaactttgtgaacccctgaagattttttgaccgttccaagtcttaatgccacaccactattccagcgaatttatgctacaactggtaacaatgaccagaagcctgaagaattaaaatgccaacaccaaacctttccttaccagctctggtctatattgctcccatgcatttaatatattattttgttttataaccacttctaaatattctcagttctttctttttgttgttgttaattaaggggttttggttttgttttctgtttactttgtgtgcaactacctgcttttaatgactcactttgatcaaatgacagtgaacaaagccagcccaagctggtaaggtgctgttcacttgaacaggtgctgttgcgcagaaaggaaactctgtgactaatttagatagtggctttccttcttctggattcttttcattgaattctcacagtaaatatttacggagttttcaaattgcagcaaatatactgtatgagaaaatattaatacagattaaaagcctttcttacatcttgaaaattttctaatatttgagaatttcacagggatgttttttatattggacccttttgactttccagtcctgtgactttctacttttagtagagagtcagaatctctggactggagaataatgaagaagttcactgactgtgcactgtgcttagagaccctgccgcaccacagtgccaatgcttgtcagacacatgcccttcggcagcattccagaacaggagggaagagaaagagaaaactttcttcccttctactaaaagattcaggcagcttaaaaccttagtgctttctttcttaacatacccaaatttcaattctttccattatttgaacacttgggtagaactcttgctttgtattaaacctctttgtctacacatgtaaaacttaccttttgttattgagcaggcctatctctttcagatagttttatgattcacacaggtttgaggatgctggggagagggggagggggctgtggtggtgttctgttggttacaagaaagttataccatttaaagctggcaccagagacccgatagggacttattaactatattgaacattttttcctttgcctttgaccctatgtatagttacgatgccagattagatttatagcagcctcaagttgtattaaatgatattttgcttcctgtaatactattataaaataaagtttgtttattctctaaa

SEQ ID NO: 321883 - DNA, 2477 bp, Homo sapiens
aaagaaaaccagcaaaaaataaaagtgccatctccttggtgctgtgttcatttaagaatcagcgttccaggctagactttatagtctgattaaaaccaaaactgttactaggttttaaaagttaaatttttttctttaaaatgatgagtcagctttggtataattcaatttttgtaaactgttttaactacataggtagagcttataggtatatctataataaaagcattttacttctttgggaggatgctggctgtttttgtgtctttttgtaagctttttggcatttgtcttgattgtcctctatgtgaccttgagcagaggtttctgtagatgttgattcttgctgttttgtctttgcagtgtcagatgtttgtttcagtggttgttgaggtaaaactgtattgattttgtgtcctcggttgctttttgttctgcagacacgtgctcccgagtcagaagggccttgcactggagccagggatgctgttaagagttcacatgagactctgaatatagtggaggagaagaagcgggcagaggttgggaaagacgaaagagtaatcacagaagaaatgaatggtaaagagatatcacctgggagtggtcctggggagattcgtaaggtggagcctgtgacacaaaaagactccacctccctgtcttctgagagcagcagcagcagcagtgagagtgaggaggaagacgtgggagagtaccgtccccaccaccgagtgaccgagggcaccatcagggaggaacaggagtatgaagaagaggtggaggaagaaccccgcccggcagccaagccaccagtggtaaaaacagagatggtaacaatttctgatgcctcacaaaggacagaaatctccaccaaggaagtccccattgtccaaactgagaccaaaaccatcacatatgagtctccacagattgatggcggggctggtggtgattcgggcacgttactgaccgcacaaaccatcacatctgagtccgtgtcaacaacgacaaccacacacatcaccaagactgtaaaaggtggaatttctgaaacaagaattgagaaacgcattgtgatcacaggagatggagatattgatcatgaccaggcactggctcaggcgatcagggaagccagagagcagcaccctgacatgtcggtcacaagagtggtggtacacaaagaaacagagttggctgaggaaggggaagattaagtaagaaagtcattttttaaacaacactcaactttgtgaacccctgaagattttttgaccgttccaagtcttaatgccacaccactattccagcgaatttatgctacaactggtaacaatgaccagaagcctgaagaattaaaatgccaacaccaaacctttccttaccagctctggtctatattgctcccatgcatttaatatattattttgttttataaccacttctaaatattctcagttctttctttttgttgttgttaattaaggggttttggttttgttttctgtttactttgtgtgcaactacctgcttttaatgactcactttgatcaaatgacagtgaacaaagccagcccaagctggtaaggtgctgttcacttgaacaggtgctgttgcgcagaaaggaaactctgtgactaatttagatagtggctttccttcttctggattcttttcattgaattctcacagtaaatatttacggagttttcaaattgcagcaaatatactgtatgagaaaatattaatacagattaaaagcctttcttacatcttgaaaattttctaatatttgagaatttcacagggatgttttttatattggacccttttgactttccagtcctgtgactttctacttttagtagagagtcagaatctctggactggagaataatgaagaagttcactgactgtgcactgtgcttagagaccctgccgcaccacagtgccaatgcttgtcagacacatgcccttcggcagcattccagaacaggagggaagagaaagagaaaactttcttcccttctactaaaagattcaggcagcttaaaaccttagtgctttctttcttaacatacccaaatttcaattctttccattatttgaacacttgggtagaactcttgctttgtattaaacctctttgtctacacatgtaaaacttaccttttgttattgagcaggcctatctctttcagatagttttatgattcacacaggtttgaggatgctggggagagggggagggggctgtggtggtgttctgttggttacaagaaagttataccatttaaagctggcaccagagacccgatagggacttattaactatattgaacattttttcctttgcctttgaccctatgtatagttacgatgccagattagatttatagcagcctcaagttgtattaaatgatattttgcttcctgtaatactattataaaataaagtttgtttattctctaaa

SEQ ID NO: 321884 - DNA, 2404 bp, Homo sapiens
  misc_feature (1)..(1): n is a, c, g, or t
  misc_feature (5)..(5): n is a, c, g, or t
  misc_feature (14)..(15): n is a, c, g, or t
ntgtntaaaacaanngagaaaaggagaccatcttttcaaggatattttatccgtgaaggagaagtacctgatgccgacaatatggacagttgaagaaaaagctcaggagacggacaagacacgtgctcccgagtcagaagggccttgcactggagccagggatgctgttaagagttcacatgagactctgaatatagtggaggagaagaagcgggcagaggttgggaaagacgaaagagtaatcacagaagaaatgaatggtaaagagatatcacctgggagtggtcctggggagattcgtaaggtggagcctgtgacacaaaaagactccacctccctgtcttctgagagcagcagcagcagcagtgagagtgaggaggaagacgtgggagagtaccgtccccaccaccgagtgaccgagggcaccatcagggaggaacaggagtatgaagaagaggtggaggaagaaccccgcccggcagccaaggtagtagagagggaggaagcagtgcccgaagccagcccagtcacacaagcaggtgccagtgtaatcacagtagaaacagtgatccaggaaaatgtaggtgcccaaaagatacccggagagaagagtgtacacgaaggcgctcttaagcaagacatgggagaagaagcagaggaagagccacagaaagttaacggagaggtgtcccatgttgacattgatgttttgccacaaattatttgttgttcagagccaccagtggtaaaaacagagatggtaacaatttctgatgcctcacaaaggacagaaatctccaccaaggaagtccccattgtccaaactgagaccaaaaccatcacatatgagtctccacagattgatggcggggctggtggtgattcgggcacgttactgaccgcacaaaccatcacatctgagtccgtgtcaacaacgacaaccacacacatcaccaagactgtaaaaggtggaatttctgaaacaagaattgagaaacgcattgtgatcacaggagatggagatattgatcatgaccaggcactggctcaggcgatcagggaagccagagagcagcaccctgacatgtcggtcacaagagtggtggtacacaaagaaacagagttggctgaggaaggggaagattaagtaagaaagtcattttttaaacaacactcaactttgtgaacccctgaagattttttgaccgttccaagtcttaatgccacaccactattccagcgaatttatgctacaactggtaacaatgaccagaagcctgaagaattaaaatgccaacaccaaacctttccttaccagctctggtctatattgctcccatgcatttaatatattattttgttttataaccacttctaaatattctcagttctttctttttgttgttgttaattaaggggttttggttttgttttctgtttactttgtgtgcaactacctgcttttaatgactcactttgatcaaatgacagtgaacaaagccagcccaagctggtaaggtgctgttcacttgaacaggtgctgttgcgcagaaaggaaactctgtgactaatttagatagtggctttccttcttctggattcttttcattgaattctcacagtaaatatttacggagttttcaaattgcagcaaatatactgtatgagaaaatattaatacagattaaaagcctttcttacatcttgaaaattttctaatatttgagaatttcacagggatgttttttatattggacccttttgactttccagtcctgtgactttctacttttagtagagagtcagaatctctggactggagaataatgaagaagttcactgactgtgcactgtgcttagagaccctgccgcaccacagtgccaatgcttgtcagacacatgcccttcggcagcattccagaacaggagggaagagaaagagaaaactttcttcccttctactaaaagattcaggcagcttaaaaccttagtgctttctttcttaacatacccaaatttcaattctttccattatttgaacacttgggtagaactcttgctttgtattaaacctctttgtctacacatgtaaaacttaccttttgttattgagcaggcctatctctttcagatagttttatgattcacacaggtttgaggatgctggggagagggggagggggctgtggtggtgttctgttggttacaagaaagttataccatttaaagctggcaccagagacccgatagggacttattaactatattgaacattttttcctttgcctttgaccctatgtatagttacgatgccagattagatttatagcagcctcaagttgtattaaatgatattttgcttcctgtaatactattataaaataaagtttgtttattctctaaa

SEQ ID NO: 321885 - DNA, 4454 bp, Homo sapiens
ccctcagagtcctctgacggccccagtcagggaatttcaatttgaaacctagcggagggaggaggcaggcgcggctgccggcggctgggactgaagagggacgggtcccgcggcgagcgagctcctgagcataagctgtggccatgactactgaagtaggctctgtgtctgaagtgaagaaggactctagccagttaggaacagatgcaaccaaggaaaaacctaaagaagtagcagaaaatcagcagaatcagtcttccgatccagaggaggaaaaaggttcccagccacctcctgcagctgaaagccaaagtagtctacgccgccagaagagagagaaggaaacatcggagagcaggggtatttctcggttcataccgccatggcttaagaagcaaaagtcatataccttagtagtggccaaagatggaggagataaaaaagagcctacccaagctgttgttgaagaacaggtcttagataaagaggaaccccttccagaagaacagagacaggctaagggtgatgctgaagaaatggctcagaagaaacaagagattaaagttgaagtcaaggaagaaaaaccctcagtgagcaaggaagaaaaaccctcagtgagcaaagtggagatgcagcctactgaattagtaagtaaggagagagaagagaaggtaaaagaaacacaggaagacaaattagaaggaggagcagcaaaaagggagaccaaggaagtgcagaccaatgagctgaaagcagagaaggcatctcaaaaagtcaccaagaagaccaaaactgtccagtgtaaagtgaccctcttagatggcaccgaatacagctgtgacctggagaaacatgccaagggacaagtgttatttgacaaagtgtgtgaacacctcaatctcttggagaaagactactttggacttttgtttcaggaaagccctgagcagaaaaactggttagatcctgctaaagaaataaagagacaactgagaaaccttccatggctattcacttttaatgtgaagttttatcctcctgatccttctcaattgactgaagatatcaccagatacttcttgtgccttcagctccggcaggacattgcctctggccgcctgccctgctcttttgtgactcatgctctcctgggatcctacaccctgcaggctgaacttggtgactatgacccagaagaacatggcagcatcgacctcagtgaattccagtttgcccctactcagactaaggagctggaagagaaggtggcagagctgcacaaaacccacaggggcttatcgccagcacaagctgattcccagttcttagaaaatgcaaagaggctttccatgtatggtgttgacctacatcatgccaaggactcagaaggtgtggacatcaagctgggcgtgtgtgctaatggacttctcatttacaaagacagactgcgaatcaatcgttttgcttggccgaaaatcttaaaaatttcctataaacgcagtaacttctacattaaagtcagaccggcagagctggaacagtttgagagtaccattggattcaaactgccaaaccaccgggcagcgaaaagactatggaaagtgtgcgtggagcatcatactttctacaggcttgtttctccagagcagccaccaaaagccaagttcctgaccttggggtccaaatttcgctatagtggccgcacccaagcacagacccgccaggccagcaccctcatagataggccagcaccacactttgagcgcacttctagtaaacgggtctccaggagtctagatggagctccgattggtgtcatggaccaaagtcttatgaaggattttcctggcgctgctggggagatttcagcctatggacctggacttgtcagcattgccgtggtacaagatggggacggcaggagggaagtgagaagcccaactaaagccccacatttgcagctcattgaaggaaagaaaaattccttgagagtagaaggggataatatttatgtcagacatagcaatttaatgttggaggaactggataaggcccaggaggacatactgaaacatcaggctagcattagtgaactcaagcgcaattttatggaatccacacctgagccgcgccctaatgaatgggaaaaacgacgtatcacacctctgtccctacagacacaagggagttcacatgagactctgaatatagtggaggagaagaagcgggcagaggttgggaaagacgaaagagtaatcacagaagaaatgaatggtaaagagatatcacctgggagtggtcctggggagattcgtaaggtggagcctgtgacacaaaaagactccacctccctgtcttctgagagcagcagcagcagcagtgagagtgaggaggaagacgtgggagagtaccgtccccaccaccgagtgaccgagggcaccatcagggaggaacaggagtatgaagaagaggtggaggaagaaccccgcccggcagccaaggtagtagagagggaggaagcagtgcccgaagccagcccagtcacacaagcaggtgccagtgtaatcacagtagaaacagtgatccaggaaaatgtaggtgcccaaaagatacccggagagaagagtgtacacgaaggcgctcttaagcaagacatgggagaagaagcagaggaagagccacagaaagttaacggagaggtgtcccatgttgacattgatgttttgccacaaattatttgttgttcagagccaccagtggtaaaaacagagatggtaacaatttctgatgcctcacaaaggacagaaatctccaccaaggaagtccccattgtccaaactgagaccaaaaccatcacatatgagtctccacagattgatggcggggctggtggtgattcgggcacgttactgaccgcacaaaccatcacatctgagtccgtgtcaacaacgacaaccacacacatcaccaagactgtaaaaggtggaatttctgaaacaagaattgagaaacgcattgtgatcacaggagatggagatattgatcatgaccaggcactggctcaggcgatcagggaagccagagagcagcaccctgacatgtcggtcacaagagtggtggtacacaaagaaacagagttggctgaggaaggggaagattaagtaagaaagtcattttttaaacaacactcaactttgtgaacccctgaagattttttgaccgttccaagtcttaatgccacaccactattccagcgaatttatgctacaactggtaacaatgaccagaagcctgaagaattaaaatgccaacaccaaacctttccttaccagctctggtctatattgctcccatgcatttaatatattattttgttttataaccacttctaaatattctcagttctttctttttgttgttgttaattaaggggttttggttttgttttctgtttactttgtgtgcaactacctgcttttaatgactcactttgatcaaatgacagtgaacaaagccagcccaagctggtaaggtgctgttcacttgaacaggtgctgttgcgcagaaaggaaactctgtgactaatttagatagtggctttccttcttctggattcttttcattgaattctcacagtaaatatttacggagttttcaaattgcagcaaatatactgtatgagaaaatattaatacagattaaaagcctttcttacatcttgaaaattttctaatatttgagaatttcacagggatgttttttatattggacccttttgactttccagtcctgtgactttctacttttagtagagagtcagaatctctggactggagaataatgaagaagttcactgactgtgcactgtgcttagagaccctgccgcaccacagtgccaatgcttgtcagacacatgcccttcggcagcattccagaacaggagggaagagaaagagaaaactttcttcccttctactaaaagattcaggcagcttaaaaccttagtgctttctttcttaacatacccaaatttcaattctttccattatttgaacacttgggtagaactcttgctttgtattaaacctctttgtctacacatgtaaaacttaccttttgttattgagcaggcctatctctttcagatagttttatgattcacacaggtttgaggatgctggggagagggggagggggctgtggtggtgttctgttggttacaagaaagttataccatttaaagctggcaccagagacccgatagggacttattaactatattgaacattttttcctttgcctttgaccctatgtatagttacgatgccagattagatttatagcagcctcaagttgtattaaatgatattttgcttcctgtaatactattataaaataaagtttgtttattctctaaatttattctctaaactaaaaacttctctttttctaaa

SEQ ID NO: 321886 - DNA, 2074 bp, Homo sapiens
ggcgaagatggaagaagaggaaacgcagctggaagaggaactggataaggcccaggaggacatactgaaacatcaggctagcattagtgaactcaagcgcaattttatggaatccacacctgagccgcgccctaatgaatgggaaaaacgacgtatcacacctctgtccctacagacacaagggagcctagaagaggagataacatcaattttgtttagtgaaaagggcttttctgatagcatgaaagccaccttcacttcagccaccacttggacagcagagggcgctgttgtgagcgctaatgcaccttctgaaaagctttcttcctcgcccttctcacacttgcttgagacacgtgctcccgagtcagaagggccttgcactggagccagggatgctgttaagccaccagtggtaaaaacagagatggtaacaatttctgatgcctcacaaaggacagaaatctccaccaaggaagtccccattgtccaaactgagaccaaaaccatcacatatgagtctccacagattgatggcggggctggtggtgattcgggcacgttactgaccgcacaaaccatcacatctgagtccgtgtcaacaacgacaaccacacacatcaccaagactgtaaaaggtggaatttctgaaacaagaattgagaaacgcattgtgatcacaggagatggagatattgatcatgaccaggcactggctcaggcgatcagggaagccagagagcagcaccctgacatgtcggtcacaagagtggtggtacacaaagaaacagagttggctgaggaaggggaagattaagtaagaaagtcattttttaaacaacactcaactttgtgaacccctgaagattttttgaccgttccaagtcttaatgccacaccactattccagcgaatttatgctacaactggtaacaatgaccagaagcctgaagaattaaaatgccaacaccaaacctttccttaccagctctggtctatattgctcccatgcatttaatatattattttgttttataaccacttctaaatattctcagttctttctttttgttgttgttaattaaggggttttggttttgttttctgtttactttgtgtgcaactacctgcttttaatgactcactttgatcaaatgacagtgaacaaagccagcccaagctggtaaggtgctgttcacttgaacaggtgctgttgcgcagaaaggaaactctgtgactaatttagatagtggctttccttcttctggattcttttcattgaattctcacagtaaatatttacggagttttcaaattgcagcaaatatactgtatgagaaaatattaatacagattaaaagcctttcttacatcttgaaaattttctaatatttgagaatttcacagggatgttttttatattggacccttttgactttccagtcctgtgactttctacttttagtagagagtcagaatctctggactggagaataatgaagaagttcactgactgtgcactgtgcttagagaccctgccgcaccacagtgccaatgcttgtcagacacatgcccttcggcagcattccagaacaggagggaagagaaagagaaaactttcttcccttctactaaaagattcaggcagcttaaaaccttagtgctttctttcttaacatacccaaatttcaattctttccattatttgaacacttgggtagaactcttgctttgtattaaacctctttgtctacacatgtaaaacttaccttttgttattgagcaggcctatctctttcagatagttttatgattcacacaggtttgaggatgctggggagagggggagggggctgtggtggtgttctgttggttacaagaaagttataccatttaaagctggcaccagagacccgatagggacttattaactatattgaacattttttcctttgcctttgaccctatgtatagttacgatgccagattagatttatagcagcctcaagttgtattaaatgatattttgcttcctgtaatactattataaaataaagtttgtttattctctaaa

SEQ ID NO: 321887 - DNA, 4362 bp, Homo sapiens
  misc_feature (4218)..(4218): n is a, c, g, or t
  misc_feature (4224)..(4224): n is a, c, g, or t
ccctcagagtcctctgacggccccagtcagggaatttcaatttgaaacctagcggagggaggaggcaggcgcggctgccggcggctgggactgaagagggacgggtcccgcggcgagcgagctcctgagcataagctgtggccatgactactgaagtaggctctgtgtctgaagtgaagaaggactctagccagttaggaacagatgcaaccaaggaaaaacctaaagaagtagcagaaaatcagcagaatcagtcttccgatccagaggaggaaaaaggttcccagccacctcctgcagctgaaagccaaagtagtctacgccgccagaagagagagaaggaaacatcggagagcaggggtatttctcggttcataccgccatggcttaagaagcaaaagtcatataccttagtagtggccaaagatggaggagataaaaaagagcctacccaagctgttgttgaagaacaggtcttagataaagaggaaccccttccagaagaacagagacaggctaagggtgatgctgaagaaatggctcagaagaaacaagagattaaagttgaagtcaaggaagaaaaaccctcagtgagcaaggaagaaaaaccctcagtgagcaaagtggagatgcagcctactgaattagtaagtaaggagagagaagagaaggtaaaagaaacacaggaagacaaattagaaggaggagcagcaaaaagggagaccaaggaagtgcagaccaatgagctgaaagcagagaaggcatctcaaaaagtcaccaagaagaccaaaactgtccagtgtaaagtgaccctcttagatggcaccgaatacagctgtgacctggagaaacatgccaagggacaagtgttatttgacaaagtgtgtgaacacctcaatctcttggagaaagactactttggacttttgtttcaggaaagccctgagcagaaaaactggttagatcctgctaaagaaataaagagacaactgagaaaccttccatggctattcacttttaatgtgaagttttatcctcctgatccttctcaattgactgaagatatcaccagatacttcttgtgccttcagctccggcaggacattgcctctggccgcctgccctgctcttttgtgactcatgctctcctgggatcctacaccctgcaggctgaacttggtgactatgacccagaagaacatggcagcatcgacctcagtgaattccagtttgcccctactcagactaaggagctggaagagaaggtggcagagctgcacaaaacccacaggggcttatcgccagcacaagctgattcccagttcttagaaaatgcaaagaggctttccatgtatggtgttgacctacatcatgccaaggactcagaaggtgtggacatcaagctgggcgtgtgtgctaatggacttctcatttacaaagacagactgcgaatcaatcgttttgcttggccgaaaatcttaaaaatttcctataaacgcagtaacttctacattaaagtcagaccggcagagctggaacagtttgagagtaccattggattcaaactgccaaaccaccgggcagcgaaaagactatggaaagtgtgcgtggagcatcatactttctacaggcttgtttctccagagcagccaccaaaagccaagttcctgaccttggggtccaaatttcgctatagtggccgcacccaagcacagacccgccaggccagcaccctcatagataggccagcaccacactttgagcgcacttctagtaaacgggtctccaggagtctagatggagctccgattggtgtcatggaccaaagtcttatgaaggattttcctggcgctgctggggagatttcagcctatggacctggacttgtcagcattgccgtggtacaagatggggacggcaggagggaagtgagaagcccaactaaagccccacatttgcagctcattgaaggaaagaaaaattccttgagagtagaaggggataatatttatgtcagacatagcaatttaatgttggaggaactggataaggcccaggaggacatactgaaacatcaggctagcattagtgaactcaagcgcaattttatggaatccacacctgagccgcgccctaatgaatgggaaaaacgacgtatcacacctctgtccctacagacacaagggagttcacatgagactctgaatatagtggaggagaagaagcgggcagaggttgggaaagacgaaagagtaatcacagaagaaatgaatggtaaagagatatcacctgggagtggtcctggggagattcgtaaggtggagcctgtgacacaaaaagactccacctccctgtcttctgagagcagcagcagcagcagtgagagtgaggaggaagacgtgggagagtaccgtccccaccaccgagtgaccgagggcaccatcagggaggaacaggagtatgaagaagaggtggaggaagaaccccgcccggcagccaaggtagtagagagggaggaagcagtgcccgaagccagcccagtcacacaagcaggtgccagtgtaatcacagtagaaacagtgatccaggaaaatgtaggtgcccaaaagatacccggagagaagagtgtacacgaaggcgctcttaagcaagacatgggagaagaagcagaggaagagccacagaaagttaacggagaggtgtcccatgttgacattgatgttttgccacaaattatttgttgttcagagccaccagtggtaaaaacagagatggtaacaatttctgatgcctcacaaaggacagaaatctccaccaaggaagtccccattgtccaaactgagaccaaaaccatcacatatgagtctccacagattgatggcggggctggtggtgattcgggcacgttactgaccgcacaaaccatcacatctgagtccgtgtcaacaacgacaaccacacacatcaccaagactgtaaaaggtggaatttctgaaacaagaattgagaaacgcattgtgatcacaggagatggagatattgatcatgaccaggcactggctcaggcgatcagggaagccagagagcagcaccctgacatgtcggtcacaagagtggtggtacacaaagaaacagagttggctgaggaaggggaagattaagtaagaaagtcattttttaaacaacactcaactttgtgaacccctgaagattttttgaccgttccaagtcttaatgccacaccactattccagcgaatttatgctacaactggtaacaatgaccagaagcctgaagaattaaaatgccaacaccaaacctttccttaccagctctggtctatattgctcccatgcatttaatatattattttgttttataaccacttctaaatattctcagttctttctttttgttgttgttaattaaggggttttggttttgttttctgtttactttgtgtgcaactacctgcttttaatgactcactttgatcaaatgacagtgaacaaagccagcccaagctggtaaggtgctgttcacttgaacaggtgctgttgcgcagaaaggaaactctgtgactaatttagatagtggctttccttcttctggattcttttcattgaattctcacagtaaatatttacggagttttcaaattgcagcaaatatactgtatgagaaaatattaatacagattaaaagcctttcttacatcttgaaaattttctaatatttgagaatttcacagggatgttttttatattggacccttttgactttccagtcctgtgactttctacttttagtagagagtcagaatctctggactggagaataatgaagaagttcactgactgtgcactgtgcttagagaccctgccgcaccacagtgccaatgcttgtcagacacatgcccttcggcagcattccagaacaggagggaagagaaagagaaaactttcttcccttctactaaaagattcaggcagcttaaaaccttagtgctttctttcttaacatacccaaatttcaattctttccattatttgaacacttgggtagaactcttgctttgtattaaacctctttgtctacacatgtaaaacttaccttttgttattgagcaggcctatctctttcagatagttttatgattcacacaggtttgaggatgctggggagagggggagggggctgtggtggtgttctgttttntttccntatatttttccccgttgaggccggccccagaagccccaaaggggcttataactttttggaacatttttaccatttacttggccccattttttgttcctttttttttacattttggggcccctaaatttaaataaatga

SEQ ID NO: 321888 - DNA, 1450 bp, Homo sapiens
aggtgatcagtgtgtgtgtgttttgccattgtgaggtggaggctgttccccagctcacagccgttctctgtcctgaccctggcaggcactggctcaggcgatcagggaagccagagagcagcaccctgacatgtcggtcacaagagtggtggtacacaaagaaacagagttggctgaggaaggggaagattaagtaagaaagtcattttttaaacaacactcaactttgtgaacccctgaagattttttgaccgttccaagtcttaatgccacaccactattccagcgaatttatgctacaactggtaacaatgaccagaagcctgaagaattaaaatgccaacaccaaacctttccttaccagctctggtctatattgctcccatgcatttaatatattattttgttttataaccacttctaaatattctcagttctttctttttgttgttgttaattaaggggttttggttttgttttctgtttactttgtgtgcaactacctgcttttaatgactcactttgatcaaatgacagtgaacaaagccagcccaagctggtaaggtgctgttcacttgaacaggtgctgttgcgcagaaaggaaactctgtgactaatttagatagtggctttccttcttctggattcttttcattgaattctcacagtaaatatttacggagttttcaaattgcagcaaatatactgtatgagaaaatattaatacagattaaaagcctttcttacatcttgaaaattttctaatatttgagaatttcacagggatgttttttatattggacccttttgactttccagtcctgtgactttctacttttagtagagagtcagaatctctggactggagaataatgaagaagttcactgactgtgcactgtgcttagagaccctgccgcaccacagtgccaatgcttgtcagacacatgcccttcggcagcattccagaacaggagggaagagaaagagaaaactttcttcccttctactaaaagattcaggcagcttaaaaccttagtgctttctttcttaacatacccaaatttcaattctttccattatttgaacacttgggtagaactcttgctttgtattaaacctctttgtctacacatgtaaaacttaccttttgttattgagcaggcctatctctttcagatagttttatgattcacacaggtttgaggatgctggggagagggggagggggctgtggtggtgttctgttggttacaagaaagttataccatttaaagctggcaccagagacccgatagggacttattaactatattgaacattttttcctttgcctttgaccctatgtatagttacgatgccagattagatttatagcagcctcaagttgtattaaatgatattttgcttcctgtaatactattataaaataaagtttgtttattctctaaa

SEQ ID NO: 321889 - DNA, 1344 bp, Homo sapiens
gttcgcctgctggtcagtgtggatgaggctgactatgaggctggccggcgccgcctgttgctgatggaggaggaaggggaagattaagtaagaaagtcattttttaaacaacactcaactttgtgaacccctgaagattttttgaccgttccaagtcttaatgccacaccactattccagcgaatttatgctacaactggtaacaatgaccagaagcctgaagaattaaaatgccaacaccaaacctttccttaccagctctggtctatattgctcccatgcatttaatatattattttgttttataaccacttctaaatattctcagttctttctttttgttgttgttaattaaggggttttggttttgttttctgtttactttgtgtgcaactacctgcttttaatgactcactttgatcaaatgacagtgaacaaagccagcccaagctggtaaggtgctgttcacttgaacaggtgctgttgcgcagaaaggaaactctgtgactaatttagatagtggctttccttcttctggattcttttcattgaattctcacagtaaatatttacggagttttcaaattgcagcaaatatactgtatgagaaaatattaatacagattaaaagcctttcttacatcttgaaaattttctaatatttgagaatttcacagggatgttttttatattggacccttttgactttccagtcctgtgactttctacttttagtagagagtcagaatctctggactggagaataatgaagaagttcactgactgtgcactgtgcttagagaccctgccgcaccacagtgccaatgcttgtcagacacatgcccttcggcagcattccagaacaggagggaagagaaagagaaaactttcttcccttctactaaaagattcaggcagcttaaaaccttagtgctttctttcttaacatacccaaatttcaattctttccattatttgaacacttgggtagaactcttgctttgtattaaacctctttgtctacacatgtaaaacttaccttttgttattgagcaggcctatctctttcagatagttttatgattcacacaggtttgaggatgctggggagagggggagggggctgtggtggtgttctgttggttacaagaaagttataccatttaaagctggcaccagagacccgatagggacttattaactatattgaacattttttcctttgcctttgaccctatgtatagttacgatgccagattagatttatagcagcctcaagttgtattaaatgatattttgcttcctgtaatactattataaaataaagtttgtttattctctaaa

SEQ ID NO: 321890 - DNA, 1439 bp, Homo sapiens
aaagccaacatgtttcctctacgtgtcattatttgaaagtggactgaagaattgggagatttaggaaatgagaagcagtctgtaaaatgacagtgaacccatttcaaatcttcctgctttctcaaatacagaagcactggctcaggcgatcagggaagccagagagcagcaccctgacatgtcggtcacaagagtggtggtacacaaagaaacagagttggctgaggaaggggaagattaagtaagcaagtcttaatgccacaccactattccagcgaatttatgctacaactggtaacaatgaccagaagcctgaagaattaaaatgccaacaccaaacctttccttaccagctctggtctatattgctcccatgcatttaatatattattttgttttataaccacttctaaatattctcagttctttctttttgttgttgttaattaaggggttttggttttgttttctgtttactttgtgtgcaactacctgcttttaatgactcactttgatcaaatgacagtgaacaaagccagcccaagctggtaaggtgctgttcacttgaacaggtgctgttgcgcagaaaggaaactctgtgactaatttagatagtggctttccttcttctggattcttttcattgaattctcacagtaaatatttacggagttttcaaattgcagcaaatatactgtatgagaaaatattaatacagattaaaagcctttcttacatcttgaaaattttctaatatttgagaatttcacagggatgttttttatattggacccttttgactttccagtcctgtgactttctacttttagtagagagtcagaatctctggactggagaataatgaagaagttcactgactgtgcactgtgcttagagaccctgccgcaccacagtgccaatgcttgtcagacacatgcccttcggcagcattccagaacaggagggaagagaaagagaaaactttcttcccttctactaaaagattcaggcagcttaaaaccttagtgctttctttcttaacatacccaaatttcaattctttccattatttgaacacttgggtagaactcttgctttgtattaaacctctttgtctacacatgtaaaacttaccttttgttattgagcaggcctatctctttcagatagttttatgattcacacaggtttgaggatgctggggagagggggagggggctgtggtggtgttctgttggttacaagaaagttataccatttaaagctggcaccagagacccgatagggacttattaactatattgaacattttttcctttgcctttgaccctatgtatagttacgatgccagattagatttatagcagcctcaagttgtattaaatgatattttgcttcctgtaatactattataaaataaagtttgtttattctctaaa

SEQ ID NO: 321891 - DNA, 2741 bp, Homo sapiens
ccctcagagtcctctgacggccccagtcagggaatttcaatttgaaacctagcggagggaggaggcaggcgcggctgccggcggctgggactgaagagggacgggtcccgcggcgagcgagctcctgagcataagctgtggccatgactactgaagtaggctctgtgtctgaagtgaagaaggactctagccagttaggaacagatgcaaccaaggaaaaacctaaagaagtagcagaaaatcagcagaatcagtcttccgatccagaggaggaaaaaggttcccagccacctcctgcagctgaaagccaaagtagtctacgccgccagaagagagagaaggaaacatcggagagcaggggtatttctcggttcataccgccatggcttaagaagcaaaagtcatataccttagtagtggccaaagatggaggagataaaaaagagcctacccaagctgttgttgaagaacaggtcttagataaagaggaaccccttccagaagaacagagacaggctaagggtgatgctgaagaaatggctcagaagaaacaagagattaaagttgaagtcaaggaagaaaaaccctcagtgagcaaggaagaaaaaccctcagtgagcaaagtggagatgcagcctactgaattagtaagtaaggagagagaagagaaggtaaaagaaacacaggaagacaaattagaaggaggagcagcaaaaagggagaccaaggaagtgcagaccaatgagctgaaagcagagaaggcatctcaaaaagtcaccaagaagaccaaaactgtccagtgtaaagtgaccctcttagatggcaccgaatacagctgtgacctggagaaacatgccaagggacaagtgttatttgacaaagtgtgtgaacacctcaatctcttggagaaagactactttggacttttgtttcaggaaagccctgagcagaaaaactggttagatcctgctaaagaaataaagagacaactgagaaaccttccatggctattcacttttaatgtgaagttttatcctcctgatccttctcaattgactgaagatatcaccagatacttcttgtgccttcagctccggcaggacattgcctctggccgcctgccctgctcttttgtgactcatgctctcctgggatcctacaccctgcaggctgaacttggtgactatgacccagaagaacatggcagcatcgacctcagtgaattccagtttgcccctactcagactaaggagctggaagagaaggtggcagagctgcacaaaacccacaggggcttatcgccagcacaagctgattcccagttcttagaaaatgcaaagaggctttccatgtatggtgttgacctacatcatgccaaggactcagaaggtgtggacatcaagctgggcgtgtgtgctaatggacttctcatttacaaagacagactgcgaatcaatcgttttgcttggccgaaaatcttaaaaatttcctataaacgcagtaacttctacattaaagtcagaccggcagagctggaacagtttgagagtaccattggattcaaactgccaaaccaccgggcagcgaaaagactatggaaagtgtgcgtggagcatcatactttctacaggcttgtttctccagagcagccaccaaaagccaagttcctgaccttggggtccaaatttcgctatagtggccgcacccaagcacagacccgccaggccagcaccctcatagataggccagcaccacactttgagcgcacttctagtaaacgggtctccaggagtctagatggagctccgattggtgtcatggaccaaagtcttatgaaggattttcctggcgctgctggggagatttcagcctatggacctggacttgtcagcattgccgtggtacaagatggggacggcaggagggaagtgagaagcccaactaaagccccacatttgcagctcattgaaggaaagagttcacatgagactctgaatatagtggaggagaagaagcgggcagaggttgggaaagacgaaagagtaatcacagaagaaatgaatggtaaagagatatcacctgggagtggtcctggggagattcgtaaggtggagcctgtgacacaaaaagactccacctccctgtcttctgagagcagcagcagcagcagtgagagtgaggaggaagacgtgggagagtaccgtccccaccaccgagtgaccgagggcaccatcagggaggaacaggagtatgaagaagaggtggaggaagaaccacagaaagttaacggagaggtgtcccatgttgacattgatgttttgccacaaattatttgttgttcagaggtaaatgggagtcccaggtgggagccaaactctagagctgcttctcagatggggaactcctgcctttcttctcctgtcctcccagttcttcagcttttttcaacaagaatctgatttttctctctcatgggaggaagggggaagcactgctttgtggattttctgcccgcccagttcatgggttccagcttctctgcggccactggacacctgtagggtaaactttcctagaagcaccacatcaatttttccttcccttttcacatttaaatttttctttgcatgttttgggtgttttcaactgttttgtcttcagttgcactgcttcctcacactaaatgcctttttttccccttttggtttaattagaaaaatgtatatgtaatgttgaaaaaa

SEQ ID NO: 321892 - DNA, 1737 bp, Homo sapiens
ccctcagagtcctctgacggccccagtcagggaatttcaatttgaaacctagcggagggaggaggcaggcgcggctgccggcggctgggactgaagagggacgggtcccgcggcgagcgagctcctgagcataagctgtggccatgactactgaagtaggctctgtgtctgaagtgaagaaggactctagccagttaggaacagatgcaaccaaggaaaaacctaaagaagtagcagaaaatcagcagaatcagtcttccgatccagaggaggaaaaaggttcccagccacctcctgcagctgaaagccaaagtagtctacgccgccagaagagagagaaggaaacatcggagagcaggggtatttctcggttcataccgccatggcttaagaagcaaaagtcatataccttagtagtggccaaagatggaggagataaaaaagagcctacccaagctgttgttgaagaacaggtcttagataaagaggaaccccttccagaagaacagagacaggctaagggtgatgctgaagaaatggctcagaagaaacaagagattaaagttgaagtcaaggaagaaaaaccctcagtgagcaaggaagaaaaaccctcagtgagcaaagtggagatgcagcctactgaattagtaagtaaggagagagaagagaaggtaaaagaaacacaggaagacaaattagaaggaggagcagcaaaaagggagaccaaggaagtgcagaccaatgagctgaaagcagagaaggcatctcaaaaagtcaccaagaagaccaaaactgtccagtgtaaagtgaccctcttagatggcaccgaatacagctgtgacctggagaaacatgccaagggacaagtgttatttgacaaagtgtgtgaacacctcaatctcttggagaaagactactttggacttttgtttcaggaaagccctgagcagaaaaactggttagatcctgctaaagaaataaagagacaactgagaaaccttccatggctattcacttttaatgtgaagttttatcctcctgatccttctcaattgactgaagatatcaccagatacttcttgtgccttcagctccggcaggacattgcctctggccgcctgccctgctcttttgtgactcatgctctcctgggatcctacaccctgcaggctgaacttggtgactatgacccagaagaacatggcagcatcgacctcagtgaattccagtttgcccctactcagactaaggagctggaagagaaggtggcagagctgcacaaaacccacaggggcttatcgccagcacaagctgattcccagttcttagaaaatgcaaagaggctttccatgtatggtgttgacctacatcatgccaaggactcagaaggtgtggacatcaagctgggcgtgtgtgctaatggacttctcatttacaaagacagactgcgaatcaatcgttttgcttggccgaaaatcttaaaaatttcctataaacgcagtaacttctacattaaagtcagaccggcagagttggttacaagaaagttataccatttaaagctggcaccagagacccgatagggacttattaactatattgaacattttttcctttgcctttgaccctatgtatagttacgatgccagattagatttatagcagcctcaagttgtattaaatgatattttgcttcctgtaatactattataaaataaagtttgtttattctctaaa

SEQ ID NO: 321893 - DNA, 720 bp, Homo sapiens
gctcggtacccggtgtttatcgatgccacagcttttgtttcaggaaagccctgagcagaaacataagctgtggccatgactactgaagtaggctctgtgtctgaagtgaagaaggactctagccagttaggaacagatgcaaccaaggaaaaacctaaagaagtagcagaaaatcagcagaatcagtcttccgatccagaggaggaaaaaggttcccagccacctcctgcagctgaaagccaaagtagtctacgccgccagaagagagagaaggaaacatcggagagcaggggtatttctcggttcataccgccatggcttaagaagcaaaagtcatataccttagtagtggccaaagatggaggagaactcttgctttgtattaaacctctttgtctacacatgtaaaacttaccttttgttattgagcaggcctatctctttcagatagttttatgattcacacaggtttgaggatgctggggagagggggagggggctgtggtggtgttctgttggttacaagaaagttataccatttaaagctggcaccagagacccgatagggacttattaactatattgaacattttttcctttgcctttgaccctatgtatagttacgatgccagattagatttatagcagcctcaagttgtattaaatgatattttgcttcctgtaatactattataaaataaagtttgtttattctctaaa

SEQ ID NO: 321894 - DNA, 1073 bp, Homo sapiens
ccctcagagtcctctgacggccccagtcagggaatttcaatttgaaacctagcggagggaggaggcaggcgcggctgccggcggctgggactgaagagggacgggtcccgcggcgagcgagctcctgagcataagctgtggccatgactactgaagtaggctctgtgtctgaagtgaagaaggactctagccagttaggaacagatgcaaccaaggaaaaacctaaagaagtagcagaaaatcagcagaatcagtcttccgatccagaggaggaaaaaggttcccagccacctcctgcagctgaaagccaaagtagtctacgccgccagaagagagagaaggaaacatcggagagcaggggtatttctcggttcataccgccatggcttaagaagcaaaagtcatataccttagtagtggccaaagatggaggagataaaaaagagcctacccaagctgttgttgaagaacaggtcttagataaagaggaaccccttccagaagaacagagacaggctaagggtgatgctgaagaaatggctcagaagaaacaagagattaaagttgaagtcaaggaagaaaaaccctcagtgagcaaggaagaaaaaccctcagtgagcaaagtggagatgcaggtatgtttgggaataattgcctggaaatgaaaacctgatagcgtaaccacataataaaaagggtttgtttgttttggatcatttccagatttcttgtactgagatactgctttagcttaatgtatacggaatgggtcttagattggtctaccatagcctttccctgttactccttgaaaaaaaagtcccctatatataccaattactaaaaaattcatgtctgtaacctgtttaggtgaggtagatactccgagccctgccatctcttttttaaacagaatgctcttttatgcctctttaagttttcactggacagtaagtagtagatttgtgtgtgcgcattttagttgcctaacaaagcctaggttttgccatggtataagattttaattggaaatgttattatttgagatgatacttaaattgtagttgctggga

SEQ ID NO: 321895 - DNA, 372 bp, Homo sapiens
ggcacgttactgaccgcacaaaccatcacatctgagtccgtgtcaacaacgacaaccacacacatcaccaaggtaaagcaatgcaggggatcatatggagaggatggtacattacagacagaatcttttctgaattgtttctctcttcctgtacacacttccaagtaagatacagacagtgccagcggaatcaaaatgccttggtttaaagtatccaagaaattaggctccattgacaaatgcattcaagccaaattgcaattttgtgaagtacaagggggtaaaaatatgttacgaatagctatatgtaagatagctacaaaaccataaataatttaataaaatttataatttataaaaacaaacttgtgc

SEQ ID NO: 321896 - DNA, 4418 bp, Homo sapiens
ccctcagagtcctctgacggccccagtcagggaatttcaatttgaaacctagcggagggaggaggcaggcgcggctgccggcggctgggactgaagagggacgggtcccgcggcgagcgagctcctgagcataagctgtggccatgactactgaagtaggctctgtgtctgaagtgaagaaggactctagccagttaggaacagatgcaaccaaggaaaaacctaaagaagtagcagaaaatcagcagaatcagtcttccgatccagaggaggaaaaaggttcccagccacctcctgcagctgaaagccaaagtagtctacgccgccagaagagagagaaggaaacatcggagagcaggggtatttctcggttcataccgccatggcttaagaagcaaaagtcatataccttagtagtggccaaagatggaggagataaaaaagagcctacccaagctgttgttgaagaacaggtcttagataaagaggaaccccttccagaagaacagagacaggctaagggtgatgctgaagaaatggctcagaagaaacaagagattaaagttgaagtcaaggaagaaaaaccctcagtgagcaaggaagaaaaaccctcagtgagcaaagtggagatgcagcctactgaattagtaagtaaggagagagaagagaaggtaaaagaaacacaggaagacaaattagaaggaggagcagcaaaaagggagaccaaggaagtgcagaccaatgagctgaaagcagagaaggcatctcaaaaagtcaccaagaagaccaaaactgtccagtgtaaagtgaccctcttagatggcaccgaatacagctgtgacctggagaaacatgccaagggacaagtgttatttgacaaagtgtgtgaacacctcaatctcttggagaaagactactttggacttttgtttcaggaaagccctgagcagaaaaactggttagatcctgctaaagaaataaagagacaactgagaaaccttccatggctattcacttttaatgtgaagttttatcctcctgatccttctcaattgactgaagatatcaccagatacttcttgtgccttcagctccggcaggacattgcctctggccgcctgccctgctcttttgtgactcatgctctcctgggatcctacaccctgcaggctgaacttggtgactatgacccagaagaacatggcagcatcgacctcagtgaattccagtttgcccctactcagactaaggagctggaagagaaggtggcagagctgcacaaaacccacaggggcttatcgccagcacaagctgattcccagttcttagaaaatgcaaagaggctttccatgtatggtgttgacctacatcatgccaaggactcagaaggtgtggacatcaagctgggcgtgtgtgctaatggacttctcatttacaaagacagactgcgaatcaatcgttttgcttggccgaaaatcttaaaaatttcctataaacgcagtaacttctacattaaagtcagaccggcagagctggaacagtttgagagtaccattggattcaaactgccaaaccaccgggcagcgaaaagactatggaaagtgtgcgtggagcatcatactttctacaggcttgtttctccagagcagccaccaaaagccaagttcctgaccttggggtccaaatttcgctatagtggccgcacccaagcacagacccgccaggccagcaccctcatagataggccagcaccacactttgagcgcacttctagtaaacgggtctccaggagtctagatggagctccgattggtgtcatggaccaaagtcttatgaaggattttcctggcgctgctggggagatttcagcctatggacctggacttgtcagcattgccgtggtacaagatggggacggcaggagggaagtgagaagcccaactaaagccccacatttgcagctcattgaaggaaagaaaaattccttgagagtagaaggggataatatttatgtcagacatagcaatttaatgttggaggaactggataaggcccaggaggacatactgaaacatcaggctagcattagtgaactcaagcgcaattttatggaatccacacctgagccgcgccctaatgaatgggaaaaacgacgtatcacacctctgtccctacagacacaagggagttcacatgagactctgaatatagtggaggagaagaagcgggcagaggttgggaaagacgaaagagtaatcacagaagaaatgaatggtaaagagatatcacctgggagtggtcctggggagattcgtaaggtggagcctgtgacacaaaaagactccacctccctgtcttctgagagcagcagcagcagcagtgagagtgaggaggaagacgtgggagagtaccgtccccaccaccgagtgaccgagggcaccatcagggaggaacaggagtatgaagaagaggtggaggaagaaccccgcccggcagccaaggtagtagagagggaggaagcagtgcccgaagccagcccagtcacacaagcaggtgccagtgtaatcacagtagaaacagtgatccaggaaaatgtaggtgcccaaaagatacccggagagaagagtgtacacgaaggcgctcttaagcaagacatgggagaagaagcagaggaagagccacagaaagttaacggagaggtgtcccatgttgacattgatgttttgccacaaattatttgttgttcagagccaccagtggtaaaaacagagatggtaacaatttctgatgcctcacaaaggacagaaatctccaccaaggaagtccccattgtccaaactgagaccaaaaccatcacatatgagtctccacagattgatggcggggctggtggtgattcgggcacgttactgaccgcacaaaccatcacatctgagtccgtgtcaacaacgacaaccacacacatcaccaagactgtaaaaggtggaatttctgaaacaagaattgagaaacgcattgtgatcacaggagatggagatattgatcatgaccaggcactggctcaggcgatcagggaagccagagagcagcaccctgacatgtcggtcacaagagtggtggtacacaaagaaacagagttggctgaggaaggggaagattaagtaagaaagtcattttttaaacaacactcaactttgtgaacccctgaagattttttgaccgttccaagtcttaatgccacaccactattccagcgaatttatgctacaactggtaacaatgaccagaagcctgaagaattaaaatgccaacaccaaacctttccttaccagctctggtctatattgctcccatgcatttaatatattattttgttttataaccacttctaaatattctcagttctttctttttgttgttgttaattaaggggttttggttttgttttctgtttactttgtgtgcaactacctgcttttaatgactcactttgatcaaatgacagtgaacaaagccagcccaagctggtaaggtgctgttcacttgaacaggtgctgttgcgcagaaaggaaactctgtgactaatttagatagtggctttccttcttctggattcttttcattgaattctcacagtaaatatttacggagttttcaaattgcagcaaatatactgtatgagaaaatattaatacagattaaaagcctttcttacatcttgaaaattttctaatatttgagaatttcacagggatgttttttatattggacccttttgactttccagtcctgtgactttctacttttagtagagagtcagaatctctggactggagaataatgaagaagttcactgactgtgcactgtgcttagagaccctgccgcaccacagtgccaatgcttgtcagacacatgcccttcggcagcattccagaacaggagggaagagaaagagaaaactttcttcccttctactaaaagattcaggcagcttaaaaccttagtgctttctttcttaacatacccaaatttcaattctttccattatttgaacacttgggtagaactcttgctttgtattaaacctctttgtctacacatgtaaaacttaccttttgttattgagcaggcctatctctttcagatagttttatgattcacacaggtttgaggatgctggggagagggggagggggctgtggtggtgttctgttggttacaagaaagttataccatttaaagctggcaccagagacccgatagggacttattaactatattgaacattttttcctttgcctttgaccctatgtatagttacgatgccagattagatttatagcagcctcaagttgtattaaatgatattttgcttcctgtaatactattataaaataaagtttgtttattctctaaa

SEQ ID NO: 321897 - DNA, 4896 bp, Homo sapiens
gcattggaacagtgatggtgaattacgggatttaatattggaacacagaataatacatttttgttattttaccttcttggctgttacacaccatacacttaaaactgttttttctaatacctaacattttgatagattttgggtttaatgtatgaaattgtagtgaaatgtgtctcattgctttctagcactgttgataacatcttcctgttacagaataaagaataccaagtacagataaaagtaatttttcttaaaaaacttggattttagatatcaattattgtttataacaagttgaaaccaaataaaagtaatccctgtttcttgagttcttgatgattttaagttctagctatatggaactcagaacacacagagttctattgtgatgctagttttgggtctgtgatgctgatagagaattctaaaagttcgagcaacagtctccattttgtcttgtgcttttgaatcttctttcttgatgtgctttctccctgtcatctgttactcttcttctcatctttccttaccatgcccctcgcaaccaaactaaatttgagagaacttacaaaatgacattttatgatttttgttttgattacagcataagctgtggccatgactactgaagtaggctctgtgtctgaagtgaagaaggactctagccagttaggaacagatgcaaccaaggaaaaacctaaagaagtagcagaaaatcagcagaatcagtcttccgatccagaggaggaaaaaggttcccagccacctcctgcagctgaaagccaaagtagtctacgccgccagaagagagagaaggaaacatcggagagcaggggtatttctcggttcataccgccatggcttaagaagcaaaagtcatataccttagtagtggccaaagatggaggagataaaaaagagcctacccaagctgttgttgaagaacaggtcttagataaagaggaaccccttccagaagaacagagacaggctaagggtgatgctgaagaaatggctcagaagaaacaagagattaaagttgaagtcaaggaagaaaaaccctcagtgagcaaggaagaaaaaccctcagtgagcaaagtggagatgcagcctactgaattagtaagtaaggagagagaagagaaggtaaaagaaacacaggaagacaaattagaaggaggagcagcaaaaagggagaccaaggaagtgcagaccaatgagctgaaagcagagaaggcatctcaaaaagtcaccaagaagaccaaaactgtccagtgtaaagtgaccctcttagatggcaccgaatacagctgtgacctggagaaacatgccaagggacaagtgttatttgacaaagtgtgtgaacacctcaatctcttggagaaagactactttggacttttgtttcaggaaagccctgagcagaaaaactggttagatcctgctaaagaaataaagagacaactgagaaaccttccatggctattcacttttaatgtgaagttttatcctcctgatccttctcaattgactgaagatatcaccagatacttcttgtgccttcagctccggcaggacattgcctctggccgcctgccctgctcttttgtgactcatgctctcctgggatcctacaccctgcaggctgaacttggtgactatgacccagaagaacatggcagcatcgacctcagtgaattccagtttgcccctactcagactaaggagctggaagagaaggtggcagagctgcacaaaacccacaggggcttatcgccagcacaagctgattcccagttcttagaaaatgcaaagaggctttccatgtatggtgttgacctacatcatgccaaggactcagaaggtgtggacatcaagctgggcgtgtgtgctaatggacttctcatttacaaagacagactgcgaatcaatcgttttgcttggccgaaaatcttaaaaatttcctataaacgcagtaacttctacattaaagtcagaccggcagagctggaacagtttgagagtaccattggattcaaactgccaaaccaccgggcagcgaaaagactatggaaagtgtgcgtggagcatcatactttctacaggcttgtttctccagagcagccaccaaaagccaagttcctgaccttggggtccaaatttcgctatagtggccgcacccaagcacagacccgccaggccagcaccctcatagataggccagcaccacactttgagcgcacttctagtaaacgggtctccaggagtctagatggagctccgattggtgtcatggaccaaagtcttatgaaggattttcctggcgctgctggggagatttcagcctatggacctggacttgtcagcattgccgtggtacaagatggggacggcaggagggaagtgagaagcccaactaaagccccacatttgcagctcattgaaggaaagaaaaattccttgagagtagaaggggataatatttatgtcagacatagcaatttaatgttggaggaactggataaggcccaggaggacatactgaaacatcaggctagcattagtgaactcaagcgcaattttatggaatccacacctgagccgcgccctaatgaatgggaaaaacgacgtatcacacctctgtccctacagacacaagggagttcacatgagactctgaatatagtggaggagaagaagcgggcagaggttgggaaagacgaaagagtaatcacagaagaaatgaatggtaaagagatatcacctgggagtggtcctggggagattcgtaaggtggagcctgtgacacaaaaagactccacctccctgtcttctgagagcagcagcagcagcagtgagagtgaggaggaagacgtgggagagtaccgtccccaccaccgagtgaccgagggcaccatcagggaggaacaggagtatgaagaagaggtggaggaagaaccccgcccggcagccaaggtagtagagagggaggaagcagtgcccgaagccagcccagtcacacaagcaggtgccagtgtaatcacagtagaaacagtgatccaggaaaatgtaggtgcccaaaagatacccggagagaagagtgtacacgaaggcgctcttaagcaagacatgggagaagaagcagaggaagagccacagaaagttaacggagaggtgtcccatgttgacattgatgttttgccacaaattatttgttgttcagagccaccagtggtaaaaacagagatggtaacaatttctgatgcctcacaaaggacagaaatctccaccaaggaagtccccattgtccaaactgagaccaaaaccatcacatatgagtctccacagattgatggcggggctggtggtgattcgggcacgttactgaccgcacaaaccatcacatctgagtccgtgtcaacaacgacaaccacacacatcaccaagactgtaaaaggtggaatttctgaaacaagaattgagaaacgcattgtgatcacaggagatggagatattgatcatgaccaggcactggctcaggcgatcagggaagccagagagcagcaccctgacatgtcggtcacaagagtggtggtacacaaagaaacagagttggctgaggaaggggaagattaagtaagaaagtcattttttaaacaacactcaactttgtgaacccctgaagattttttgaccgttccaagtcttaatgccacaccactattccagcgaatttatgctacaactggtaacaatgaccagaagcctgaagaattaaaatgccaacaccaaacctttccttaccagctctggtctatattgctcccatgcatttaatatattattttgttttataaccacttctaaatattctcagttctttctttttgttgttgttaattaaggggttttggttttgttttctgtttactttgtgtgcaactacctgcttttaatgactcactttgatcaaatgacagtgaacaaagccagcccaagctggtaaggtgctgttcacttgaacaggtgctgttgcgcagaaaggaaactctgtgactaatttagatagtggctttccttcttctggattcttttcattgaattctcacagtaaatatttacggagttttcaaattgcagcaaatatactgtatgagaaaatattaatacagattaaaagcctttcttacatcttgaaaattttctaatatttgagaatttcacagggatgttttttatattggacccttttgactttccagtcctgtgactttctacttttagtagagagtcagaatctctggactggagaataatgaagaagttcactgactgtgcactgtgcttagagaccctgccgcaccacagtgccaatgcttgtcagacacatgcccttcggcagcattccagaacaggagggaagagaaagagaaaactttcttcccttctactaaaagattcaggcagcttaaaaccttagtgctttctttcttaacatacccaaatttcaattctttccattatttgaacacttgggtagaactcttgctttgtattaaacctctttgtctacacatgtaaaacttaccttttgttattgagcaggcctatctctttcagatagttttatgattcacacaggtttgaggatgctggggagagggggagggggctgtggtggtgttctgttggttacaagaaagttataccatttaaagctggcaccagagacccgatagggacttattaactatattgaacattttttcctttgcctttgaccctatgtatagttacgatgccagattagatttatagcagcctcaagttgtattaaatgatattttgcttcctgtaatactattataaaataaagtttgtttattctctaaa

SEQ ID NO: 321898 - DNA, 5071 bp, Homo sapiens
attgtttttagagatggggtcttgctgtgttgtctgggccggagtacactgggtactcacagatgtgatcattgcatactacagccttgaactcctgggctcaagtgatccttctgtctcagtttcctgagtacctgggactagaggtgtgtgccaccatgctggttatctataagcacttttacatttatttatttatttaattcttgtagtaactctttgtggtaggtactattatcctaagtatcctataagaaaactgaggcactgcagtttgaagtaacttgctcagggtcactcagccaattaatggtggagcagcggtttgaacccaggctgtctagttccagagcctatagccataactactgtcttatattatccctaagaatatgtaaacgacgtcaaaccccgatcctatttgcattcccctccccacgggtaactatcttgaatcagagccaatactacactattgcattagggtataatttaatcattaggggatagttttcatgcagaaactagaaagcactgatgagattctactcatgttcctttaccagctttagttataaaggggaagcgggaaaatggaagcacgtagaggataaggtgataacctccaccttaccatcttccttcttcccccttaaaaaagaaatggaatgttgagtctatctggaatgttgacaggttaaaaaggagctgttgaagcctgtcgttcacagtagcatcgaaaggtgaaaatttgtctccacttgagtaccttgaaatggcagcataagctgtggccatgactactgaagtaggctctgtgtctgaagtgaagaaggactctagccagttaggaacagatgcaaccaaggaaaaacctaaagaagtagcagaaaatcagcagaatcagtcttccgatccagaggaggaaaaaggttcccagccacctcctgcagctgaaagccaaagtagtctacgccgccagaagagagagaaggaaacatcggagagcaggggtatttctcggttcataccgccatggcttaagaagcaaaagtcatataccttagtagtggccaaagatggaggagataaaaaagagcctacccaagctgttgttgaagaacaggtcttagataaagaggaaccccttccagaagaacagagacaggctaagggtgatgctgaagaaatggctcagaagaaacaagagattaaagttgaagtcaaggaagaaaaaccctcagtgagcaaggaagaaaaaccctcagtgagcaaagtggagatgcagcctactgaattagtaagtaaggagagagaagagaaggtaaaagaaacacaggaagacaaattagaaggaggagcagcaaaaagggagaccaaggaagtgcagaccaatgagctgaaagcagagaaggcatctcaaaaagtcaccaagaagaccaaaactgtccagtgtaaagtgaccctcttagatggcaccgaatacagctgtgacctggagaaacatgccaagggacaagtgttatttgacaaagtgtgtgaacacctcaatctcttggagaaagactactttggacttttgtttcaggaaagccctgagcagaaaaactggttagatcctgctaaagaaataaagagacaactgagaaaccttccatggctattcacttttaatgtgaagttttatcctcctgatccttctcaattgactgaagatatcaccagatacttcttgtgccttcagctccggcaggacattgcctctggccgcctgccctgctcttttgtgactcatgctctcctgggatcctacaccctgcaggctgaacttggtgactatgacccagaagaacatggcagcatcgacctcagtgaattccagtttgcccctactcagactaaggagctggaagagaaggtggcagagctgcacaaaacccacaggggcttatcgccagcacaagctgattcccagttcttagaaaatgcaaagaggctttccatgtatggtgttgacctacatcatgccaaggactcagaaggtgtggacatcaagctgggcgtgtgtgctaatggacttctcatttacaaagacagactgcgaatcaatcgttttgcttggccgaaaatcttaaaaatttcctataaacgcagtaacttctacattaaagtcagaccggcagagctggaacagtttgagagtaccattggattcaaactgccaaaccaccgggcagcgaaaagactatggaaagtgtgcgtggagcatcatactttctacaggcttgtttctccagagcagccaccaaaagccaagttcctgaccttggggtccaaatttcgctatagtggccgcacccaagcacagacccgccaggccagcaccctcatagataggccagcaccacactttgagcgcacttctagtaaacgggtctccaggagtctagatggagctccgattggtgtcatggaccaaagtcttatgaaggattttcctggcgctgctggggagatttcagcctatggacctggacttgtcagcattgccgtggtacaagatggggacggcaggagggaagtgagaagcccaactaaagccccacatttgcagctcattgaaggaaagaaaaattccttgagagtagaaggggataatatttatgtcagacatagcaatttaatgttggaggaactggataaggcccaggaggacatactgaaacatcaggctagcattagtgaactcaagcgcaattttatggaatccacacctgagccgcgccctaatgaatgggaaaaacgacgtatcacacctctgtccctacagacacaagggagttcacatgagactctgaatatagtggaggagaagaagcgggcagaggttgggaaagacgaaagagtaatcacagaagaaatgaatggtaaagagatatcacctgggagtggtcctggggagattcgtaaggtggagcctgtgacacaaaaagactccacctccctgtcttctgagagcagcagcagcagcagtgagagtgaggaggaagacgtgggagagtaccgtccccaccaccgagtgaccgagggcaccatcagggaggaacaggagtatgaagaagaggtggaggaagaaccccgcccggcagccaaggtagtagagagggaggaagcagtgcccgaagccagcccagtcacacaagcaggtgccagtgtaatcacagtagaaacagtgatccaggaaaatgtaggtgcccaaaagatacccggagagaagagtgtacacgaaggcgctcttaagcaagacatgggagaagaagcagaggaagagccacagaaagttaacggagaggtgtcccatgttgacattgatgttttgccacaaattatttgttgttcagagccaccagtggtaaaaacagagatggtaacaatttctgatgcctcacaaaggacagaaatctccaccaaggaagtccccattgtccaaactgagaccaaaaccatcacatatgagtctccacagattgatggcggggctggtggtgattcgggcacgttactgaccgcacaaaccatcacatctgagtccgtgtcaacaacgacaaccacacacatcaccaagactgtaaaaggtggaatttctgaaacaagaattgagaaacgcattgtgatcacaggagatggagatattgatcatgaccaggcactggctcaggcgatcagggaagccagagagcagcaccctgacatgtcggtcacaagagtggtggtacacaaagaaacagagttggctgaggaaggggaagattaagtaagaaagtcattttttaaacaacactcaactttgtgaacccctgaagattttttgaccgttccaagtcttaatgccacaccactattccagcgaatttatgctacaactggtaacaatgaccagaagcctgaagaattaaaatgccaacaccaaacctttccttaccagctctggtctatattgctcccatgcatttaatatattattttgttttataaccacttctaaatattctcagttctttctttttgttgttgttaattaaggggttttggttttgttttctgtttactttgtgtgcaactacctgcttttaatgactcactttgatcaaatgacagtgaacaaagccagcccaagctggtaaggtgctgttcacttgaacaggtgctgttgcgcagaaaggaaactctgtgactaatttagatagtggctttccttcttctggattcttttcattgaattctcacagtaaatatttacggagttttcaaattgcagcaaatatactgtatgagaaaatattaatacagattaaaagcctttcttacatcttgaaaattttctaatatttgagaatttcacagggatgttttttatattggacccttttgactttccagtcctgtgactttctacttttagtagagagtcagaatctctggactggagaataatgaagaagttcactgactgtgcactgtgcttagagaccctgccgcaccacagtgccaatgcttgtcagacacatgcccttcggcagcattccagaacaggagggaagagaaagagaaaactttcttcccttctactaaaagattcaggcagcttaaaaccttagtgctttctttcttaacatacccaaatttcaattctttccattatttgaacacttgggtagaactcttgctttgtattaaacctctttgtctacacatgtaaaacttaccttttgttattgagcaggcctatctctttcagatagttttatgattcacacaggtttgaggatgctggggagagggggagggggctgtggtggtgttctgttggttacaagaaagttataccatttaaagctggcaccagagacccgatagggacttattaactatattgaacattttttcctttgcctttgaccctatgtatagttacgatgccagattagatttatagcagcctcaagttgtattaaatgatattttgcttcctgtaatactattataaaataaagtttgtttattctctaaa

SEQ ID NO: 321899 - DNA, 3959 bp, Homo sapiens
ccctcagagtcctctgacggccccagtcagggaatttcaatttgaaacctagcggagggaggaggcaggcgcggctgccggcggctgggactgaagagggacgggtcccgcggcgagcgagctcctgagcataagctgtggccatgactactgaagtaggctctgtgtctgaagtgaagaaggactctagccagttaggaacagatgcaaccaaggaaaaacctaaagaagtagcagaaaatcagcagaatcagtcttccgatccagaggaggaaaaaggttcccagccacctcctgcagctgaaagccaaagtagtctacgccgccagaagagagagaaggaaacatcggagagcaggggtatttctcggttcataccgccatggcttaagaagcaaaagtcatataccttagtagtggccaaagatggaggagataaaaaagagcctacccaagctgttgttgaagaacaggtcttagataaagaggaaccccttccagaagaacagagacaggctaagggtgatgctgaagaaatggctcagaagaaacaagagattaaagttgaagtcaaggaagaaaaaccctcagtgagcaaggaagaaaaaccctcagtgagcaaagtggagatgcagcctactgaattagtaagtaaggagagagaagagaaggtaaaagaaacacaggaagacaaattagaaggaggagcagcaaaaagggagaccaaggaagtgcagaccaatgagctgaaagcagagaaggcatctcaaaaagtcaccaagaagaccaaaactgtccagtgtaaagtgaccctcttagatggcaccgaatacagctgtgacctggagaaacatgccaagggacaagtgttatttgacaaagtgtgtgaacacctcaatctcttggagaaagactactttggacttttgtttcaggaaagccctgagcagaaaaactggttagatcctgctaaagaaataaagagacaactgagaaaccttccatggctattcacttttaatgtgaagttttatcctcctgatccttctcaattgactgaagatatcaccagatacttcttgtgccttcagctccggcaggacattgcctctggccgcctgccctgctcttttgtgactcatgctctcctgggatcctacaccctgcaggctgaacttggtgactatgacccagaagaacatggcagcatcgacctcagtgaattccagtttgcccctactcagactaaggagctggaagagaaggtggcagagctgcacaaaacccacaggggcttatcgccagcacaagctgattcccagttcttagaaaatgcaaagaggctttccatgtatggtgttgacctacatcatgccaaggactcagaaggtgtggacatcaagctgggcgtgtgtgctaatggacttctcatttacaaagacagactgcgaatcaatcgttttgcttggccgaaaatcttaaaaatttcctataaacgcagtaacttctacattaaagtcagaccggcagagctggaacagtttgagagtaccattggattcaaactgccaaaccaccgggcagcgaaaagactatggaaagtgtgcgtggagcatcatactttctacaggcttgtttctccagagcagccaccaaaagccaagttcctgaccttggggtccaaatttcgctatagtggccgcacccaagcacagacccgccaggccagcaccctcatagataggccagcaccacactttgagcgcacttctagtaaacgggtctccaggagtctagatggagctccgattggtgtcatggaccaaagtcttatgaaggattttcctggcgctgctggggagatttcagcctatggacctggacttgtcagcattgccgtggtacaagatggggacggcaggagggaagtgagaagcccaactaaagccccacatttgcagctcattgaaggaaagagttcacatgagactctgaatatagtggaggagaagaagcgggcagaggttgggaaagacgaaagagtaatcacagaagaaatgaatggtaaagagatatcacctgggagtggtcctggggagattcgtaaggtggagcctgtgacacaaaaagactccacctccctgtcttctgagagcagcagcagcagcagtgagagtgaggaggaagacgtgggagagtaccgtccccaccaccgagtgaccgagggcaccatcagggaggaacaggagtatgaagaagaggtggaggaagaaccccgcccggcagccaagccaccagtggtaaaaacagagatggtaacaatttctgatgcctcacaaaggacagaaatctccaccaaggaagtccccattgtccaaactgagaccaaaaccatcacatatgagtctccacagattgatggcggggctggtggtgattcgggcacgttactgaccgcacaaaccatcacatctgagtccgtgtcaacaacgacaaccacacacatcaccaagactgtaaaaggtggaatttctgaaacaagaattgagaaacgcattgtgatcacaggagatggagatattgatcatgaccaggcactggctcaggcgatcagggaagccagagagcagcaccctgacatgtcggtcacaagagtggtggtacacaaagaaacagagttggctgaggaaggggaagattaagtaagaaagtcattttttaaacaacactcaactttgtgaacccctgaagattttttgaccgttccaagtcttaatgccacaccactattccagcgaatttatgctacaactggtaacaatgaccagaagcctgaagaattaaaatgccaacaccaaacctttccttaccagctctggtctatattgctcccatgcatttaatatattattttgttttataaccacttctaaatattctcagttctttctttttgttgttgttaattaaggggttttggttttgttttctgtttactttgtgtgcaactacctgcttttaatgactcactttgatcaaatgacagtgaacaaagccagcccaagctggtaaggtgctgttcacttgaacaggtgctgttgcgcagaaaggaaactctgtgactaatttagatagtggctttccttcttctggattcttttcattgaattctcacagtaaatatttacggagttttcaaattgcagcaaatatactgtatgagaaaatattaatacagattaaaagcctttcttacatcttgaaaattttctaatatttgagaatttcacagggatgttttttatattggacccttttgactttccagtcctgtgactttctacttttagtagagagtcagaatctctggactggagaataatgaagaagttcactgactgtgcactgtgcttagagaccctgccgcaccacagtgccaatgcttgtcagacacatgcccttcggcagcattccagaacaggagggaagagaaagagaaaactttcttcccttctactaaaagattcaggcagcttaaaaccttagtgctttctttcttaacatacccaaatttcaattctttccattatttgaacacttgggtagaactcttgctttgtattaaacctctttgtctacacatgtaaaacttaccttttgttattgagcaggcctatctctttcagatagttttatgattcacacaggtttgaggatgctggggagagggggagggggctgtggtggtgttctgttggttacaagaaagttataccatttaaagctggcaccagagacccgatagggacttattaactatattgaacattttttcctttgcctttgaccctatgtatagttacgatgccagattagatttatagcagcctcaagttgtattaaatgatattttgcttcctgtaatactattataaaataaagtttgtttattctctaaa

SEQ ID NO: 321900 - DNA, 4619 bp, Homo sapiens
ccctcagagtcctctgacggccccagtcagggaatttcaatttgaaacctagcggagggaggaggcaggcgcggctgccggcggctgggactgaagagggacgggtcccgcggcgagcgagctcctgagcataagctgtggccatgactactgaagtaggctctgtgtctgaagtgaagaaggactctagccagttaggaacagatgcaaccaaggaaaaacctaaagaagtagcagaaaatcagcagaatcagtcttccgatccagaggaggaaaaaggttcccagccacctcctgcagctgaaagccaaagtagtctacgccgccagaagagagagaaggaaacatcggagagcaggggtatttctcggttcataccgccatggcttaagaagcaaaagtcatataccttagtagtggccaaagatggaggagataaaaaagagcctacccaagctgttgttgaagaacaggtcttagataaagaggaaccccttccagaagaacagagacaggctaagggtgatgctgaagaaatggctcagaagaaacaagagattaaagttgaagtcaaggaagaaaaaccctcagtgagcaaggaagaaaaaccctcagtgagcaaagtggagatgcagcctactgaattagtaagtaaggagagagaagagaaggtaaaagaaacacaggaagacaaattagaaggaggagcagcaaaaagggagaccaaggaagtgcagaccaatgagctgaaagcagagaaggcatctcaaaaagtcaccaagaagaccaaaactgtccagtgtaaagtgaccctcttagatggcaccgaatacagctgtgacctggagaaacatgccaagggacaagtgttatttgacaaagtgtgtgaacacctcaatctcttggagaaagactactttggacttttgtttcaggaaagccctgagcagaaaaactggttagatcctgctaaagaaataaagagacaactgagaaaccttccatggctattcacttttaatgtgaagttttatcctcctgatccttctcaattgactgaagatatcaccagatacttcttgtgccttcagctccggcaggacattgcctctggccgcctgccctgctcttttgtgactcatgctctcctgggatcctacaccctgcaggctgaacttggtgactatgacccagaagaacatggcagcatcgacctcagtgaattccagtttgcccctactcagactaaggagctggaagagaaggtggcagagctgcacaaaacccacaggggcttatcgccagcacaagctgattcccagttcttagaaaatgcaaagaggctttccatgtatggtgttgacctacatcatgccaaggactcagaaggtgtggacatcaagctgggcgtgtgtgctaatggacttctcatttacaaagacagactgcgaatcaatcgttttgcttggccgaaaatcttaaaaatttcctataaacgcagtaacttctacattaaagtcagaccggcagagctggaacagtttgagagtaccattggattcaaactgccaaaccaccgggcagcgaaaagactatggaaagtgtgcgtggagcatcatactttctacaggcttgtttctccagagcagccaccaaaagccaagttcctgaccttggggtccaaatttcgctatagtggccgcacccaagcacagacccgccaggccagcaccctcatagataggccagcaccacactttgagcgcacttctagtaaacgggtctccaggagtctagatggagctccgattggtgtcatggaccaaagtcttatgaaggattttcctggcgctgctggggagatttcagcctatggacctggacttgtcagcattgccgtggtacaagatggggacggcaggagggaagtgagaagcccaactaaagccccacatttgcagctcattgaaggaaagaaaaattccttgagagtagaaggggataatatttatgtcagacatagcaatttaatgttggaggaactggataaggcccaggaggacatactgaaacatcaggctagcattagtgaactcaagcgcaattttatggaatccacacctgagccgcgccctaatgaatgggaaaaacgacgtatcacacctctgtccctacagacacaagggagcctagaagaggagataacatcaattttgtttagtgaaaagggcttttctgatagcatgaaagccaccttcacttcagccaccacttggacagcagagggcgctgttgtgagcgctaatgcaccttctgaaaagctttcttcctcgcccttctcacacttgcttgagacacgtgctcccgagtcagaagggccttgcactggagccagggatgctgttaagagttcacatgagactctgaatatagtggaggagaagaagcgggcagaggttgggaaagacgaaagagtaatcacagaagaaatgaatggtaaagagatatcacctgggagtggtcctggggagattcgtaaggtggagcctgtgacacaaaaagactccacctccctgtcttctgagagcagcagcagcagcagtgagagtgaggaggaagacgtgggagagtaccgtccccaccaccgagtgaccgagggcaccatcagggaggaacaggagtatgaagaagaggtggaggaagaaccccgcccggcagccaaggtagtagagagggaggaagcagtgcccgaagccagcccagtcacacaagcaggtgccagtgtaatcacagtagaaacagtgatccaggaaaatgtaggtgcccaaaagatacccggagagaagagtgtacacgaaggcgctcttaagcaagacatgggagaagaagcagaggaagagccacagaaagttaacggagaggtgtcccatgttgacattgatgttttgccacaaattatttgttgttcagagatggtaacaatttctgatgcctcacaaaggacagaaatctccaccaaggaagtccccattgtccaaactgagaccaaaaccatcacatatgagtctccacagattgatggcggggctggtggtgattcgggcacgttactgaccgcacaaaccatcacatctgagtccgtgtcaacaacgacaaccacacacatcaccaagactgtaaaaggtggaatttctgaaacaagaattgagaaacgcattgtgatcacaggagatggagatattgatcatgaccaggcactggctcaggcgatcagggaagccagagagcagcaccctgacatgtcggtcacaagagtggtggtacacaaagaaacagagttggctgaggaaggggaagattaagtaagaaagtcattttttaaacaacactcaactttgtgaacccctgaagattttttgaccgttccaagtcttaatgccacaccactattccagcgaatttatgctacaactggtaacaatgaccagaagcctgaagaattaaaatgccaacaccaaacctttccttaccagctctggtctatattgctcccatgcatttaatatattattttgttttataaccacttctaaatattctcagttctttctttttgttgttgttaattaaggggttttggttttgttttctgtttactttgtgtgcaactacctgcttttaatgactcactttgatcaaatgacagtgaacaaagccagcccaagctggtaaggtgctgttcacttgaacaggtgctgttgcgcagaaaggaaactctgtgactaatttagatagtggctttccttcttctggattcttttcattgaattctcacagtaaatatttacggagttttcaaattgcagcaaatatactgtatgagaaaatattaatacagattaaaagcctttcttacatcttgaaaattttctaatatttgagaatttcacagggatgttttttatattggacccttttgactttccagtcctgtgactttctacttttagtagagagtcagaatctctggactggagaataatgaagaagttcactgactgtgcactgtgcttagagaccctgccgcaccacagtgccaatgcttgtcagacacatgcccttcggcagcattccagaacaggagggaagagaaagagaaaactttcttcccttctactaaaagattcaggcagcttaaaaccttagtgctttctttcttaacatacccaaatttcaattctttccattatttgaacacttgggtagaactcttgctttgtattaaacctctttgtctacacatgtaaaacttaccttttgttattgagcaggcctatctctttcagatagttttatgattcacacaggtttgaggatgctggggagagggggagggggctgtggtggtgttctgttggttacaagaaagttataccatttaaagctggcaccagagacccgatagggacttattaactatattgaacattttttcctttgcctttgaccctatgtatagttacgatgccagattagatttatagcagcctcaagttgtattaaatgatattttgcttcctgtaatactattataaaataaagtttgtttattctctaaa

SEQ ID NO: 321901 - DNA, 2393 bp, Homo sapiens
tcctaaatagagaagaaatcagaaccctttaaaatgtaaatcattgaagaagtacgcattgactttattttcaaattttgatgaattcatgaacttactcatagataataatatggctttagagacttggcatttttcttgctttactatggttttttttttaatcgtaagtttgctttgtcttattttttggttttatttttgtcctactgggttttttccttttggatttttcccccctttgttacgttacatattgctaggaactggataaggcccaggaggacatactgaaacatcaggctagcattagtgaactcaagcgcaattttatggaatccacacctgagccgcgccctaatgaatgggaaaaacgacgtatcacacctctgtccctacagacacaagggagttcacatgagactctgaatatagtggaggagaagaagcgggcagaggttgggaaagacgaaagagtaatcacagaagaaatgaatggtaaagagatatcacctgggagtggtcctggggagattcgtaaggtggagcctgtgacacaaaaagactccacctccctgtcttctgagagcagcagcagcagcagtgagagtgaggaggaagacgtgggagagtaccgtccccaccaccgagtgaccgagggcaccatcagggaggaacaggagtatgaagaagaggtggaggaagaaccccgcccggcagccaagccaccagtggtaaaaacagagatggtaacaatttctgatgcctcacaaaggacagaaatctccaccaaggaagtccccattgtccaaactgagaccaaaaccatcacatatgagtctccacagattgatggcggggctggtggtgattcgggcacgttactgaccgcacaaaccatcacatctgagtccgtgtcaacaacgacaaccacacacatcaccaagactgtaaaaggtggaatttctgaaacaagaattgagaaacgcattgtgatcacaggagatggagatattgatcatgaccaggcactggctcaggcgatcagggaagccagagagcagcaccctgacatgtcggtcacaagagtggtggtacacaaagaaacagagttggctgaggaaggggaagattaagtaagaaagtcattttttaaacaacactcaactttgtgaacccctgaagattttttgaccgttccaagtcttaatgccacaccactattccagcgaatttatgctacaactggtaacaatgaccagaagcctgaagaattaaaatgccaacaccaaacctttccttaccagctctggtctatattgctcccatgcatttaatatattattttgttttataaccacttctaaatattctcagttctttctttttgttgttgttaattaaggggttttggttttgttttctgtttactttgtgtgcaactacctgcttttaatgactcactttgatcaaatgacagtgaacaaagccagcccaagctggtaaggtgctgttcacttgaacaggtgctgttgcgcagaaaggaaactctgtgactaatttagatagtggctttccttcttctggattcttttcattgaattctcacagtaaatatttacggagttttcaaattgcagcaaatatactgtatgagaaaatattaatacagattaaaagcctttcttacatcttgaaaattttctaatatttgagaatttcacagggatgttttttatattggacccttttgactttccagtcctgtgactttctacttttagtagagagtcagaatctctggactggagaataatgaagaagttcactgactgtgcactgtgcttagagaccctgccgcaccacagtgccaatgcttgtcagacacatgcccttcggcagcattccagaacaggagggaagagaaagagaaaactttcttcccttctactaaaagattcaggcagcttaaaaccttagtgctttctttcttaacatacccaaatttcaattctttccattatttgaacacttgggtagaactcttgctttgtattaaacctctttgtctacacatgtaaaacttaccttttgttattgagcaggcctatctctttcagatagttttatgattcacacaggtttgaggatgctggggagagggggagggggctgtggtggtgttctgttggttacaagaaagttataccatttaaagctggcaccagagacccgatagggacttattaactatattgaacattttttcctttgcctttgaccctatgtatagttacgatgccagattagatttatagcagcctcaagttgtattaaatgatattttgcttcctgtaatactattataaaataaagtttgtttattctctaaa

SEQ ID NO: 321902 - DNA, 2348 bp, Homo sapiens
tctgtcagaattctcatcttttctttcattttatgctgttctgttgttctttcttgtgtaacctttcctttcttccaataggtcactgctgtctgttctgacttattgctaattctttgctcttccttttctgacctctctagagcctagaagaggagataacatcaattttgtttagtgaaaagggcttttctgatagcatgaaagccaccttcacttcagccaccacttggacagcagagggcgctgttgtgagcgctaatgcaccttctgaaaagctttcttcctcgcccttctcacacttgcttgagacacgtgctcccgagtcagaagggccttgcactggagccagggatgctgttaagagttcacatgagactctgaatatagtggaggagaagaagcgggcagaggttgggaaagacgaaagagtaatcacagaagaaatgaatggtaaagagatatcacctgggagtggtcctggggagattcgtaaggtggagcctgtgacacaaaaagactccacctccctgtcttctgagagcagcagcagcagcagtgagagtgaggaggaagacgtgggagagtaccgtccccaccaccgagtgaccgagggcaccatcagggaggaacaggagtatgaagaagaggtggaggaagaaccccgcccggcagccaagccaccagtggtaaaaacagagatggtaacaatttctgatgcctcacaaaggacagaaatctccaccaaggaagtccccattgtccaaactgagaccaaaaccatcacatatgagtctccacagattgatggcggggctggtggtgattcgggcacgttactgaccgcacaaaccatcacatctgagtccgtgtcaacaacgacaaccacacacatcaccaagactgtaaaaggtggaatttctgaaacaagaattgagaaacgcattgtgatcacaggagatggagatattgatcatgaccaggcactggctcaggcgatcagggaagccagagagcagcaccctgacatgtcggtcacaagagtggtggtacacaaagaaacagagttggctgaggaaggggaagattaagtaagaaagtcattttttaaacaacactcaactttgtgaacccctgaagattttttgaccgttccaagtcttaatgccacaccactattccagcgaatttatgctacaactggtaacaatgaccagaagcctgaagaattaaaatgccaacaccaaacctttccttaccagctctggtctatattgctcccatgcatttaatatattattttgttttataaccacttctaaatattctcagttctttctttttgttgttgttaattaaggggttttggttttgttttctgtttactttgtgtgcaactacctgcttttaatgactcactttgatcaaatgacagtgaacaaagccagcccaagctggtaaggtgctgttcacttgaacaggtgctgttgcgcagaaaggaaactctgtgactaatttagatagtggctttccttcttctggattcttttcattgaattctcacagtaaatatttacggagttttcaaattgcagcaaatatactgtatgagaaaatattaatacagattaaaagcctttcttacatcttgaaaattttctaatatttgagaatttcacagggatgttttttatattggacccttttgactttccagtcctgtgactttctacttttagtagagagtcagaatctctggactggagaataatgaagaagttcactgactgtgcactgtgcttagagaccctgccgcaccacagtgccaatgcttgtcagacacatgcccttcggcagcattccagaacaggagggaagagaaagagaaaactttcttcccttctactaaaagattcaggcagcttaaaaccttagtgctttctttcttaacatacccaaatttcaattctttccattatttgaacacttgggtagaactcttgctttgtattaaacctctttgtctacacatgtaaaacttaccttttgttattgagcaggcctatctctttcagatagttttatgattcacacaggtttgaggatgctggggagagggggagggggctgtggtggtgttctgttggttacaagaaagttataccatttaaagctggcaccagagacccgatagggacttattaactatattgaacattttttcctttgcctttgaccctatgtatagttacgatgccagattagatttatagcagcctcaagttgtattaaatgatattttgcttcctgtaatactattataaaataaagtttgtttattctctaaa

SEQ ID NO: 321903 - DNA, 4364 bp, Homo sapiens
ccctcagagtcctctgacggccccagtcagggaatttcaatttgaaacctagcggagggaggaggcaggcgcggctgccggcggctgggactgaagagggacgggtcccgcggcgagcgagctcctgagcataagctgtggccatgactactgaagtaggctctgtgtctgaagtgaagaaggactctagccagttaggaacagatgcaaccaaggaaaaacctaaagaagtagcagaaaatcagcagaatcagtcttccgatccagaggaggaaaaaggttcccagccacctcctgcagctgaaagccaaagtagtctacgccgccagaagagagagaaggaaacatcggagagcaggggtatttctcggttcataccgccatggcttaagaagcaaaagtcatataccttagtagtggccaaagatggaggagataaaaaagagcctacccaagctgttgttgaagaacaggtcttagataaagaggaaccccttccagaagaacagagacaggctaagggtgatgctgaagaaatggctcagaagaaacaagagattaaagttgaagtcaaggaagaaaaaccctcagtgagcaaggaagaaaaaccctcagtgagcaaagtggagatgcagcctactgaattagtaagtaaggagagagaagagaaggtaaaagaaacacaggaagacaaattagaaggaggagcagcaaaaagggagaccaaggaagtgcagaccaatgagctgaaagcagagaaggcatctcaaaaagtcaccaagaagaccaaaactgtccagtgtaaagtgaccctcttagatggcaccgaatacagctgtgacctggagaaacatgccaagggacaagtgttatttgacaaagtgtgtgaacacctcaatctcttggagaaagactactttggacttttgtttcaggaaagccctgagcagaaaaactggttagatcctgctaaagaaataaagagacaactgagaaaccttccatggctattcacttttaatgtgaagttttatcctcctgatccttctcaattgactgaagatatcaccagatacttcttgtgccttcagctccggcaggacattgcctctggccgcctgccctgctcttttgtgactcatgctctcctgggatcctacaccctgcaggctgaacttggtgactatgacccagaagaacatggcagcatcgacctcagtgaattccagtttgcccctactcagactaaggagctggaagagaaggtggcagagctgcacaaaacccacaggggcttatcgccagcacaagctgattcccagttcttagaaaatgcaaagaggctttccatgtatggtgttgacctacatcatgccaaggactcagaaggtgtggacatcaagctgggcgtgtgtgctaatggacttctcatttacaaagacagactgcgaatcaatcgttttgcttggccgaaaatcttaaaaatttcctataaacgcagtaacttctacattaaagtcagaccggcagagctggaacagtttgagagtaccattggattcaaactgccaaaccaccgggcagcgaaaagactatggaaagtgtgcgtggagcatcatactttctacaggcttgtttctccagagcagccaccaaaagccaagttcctgaccttggggtccaaatttcgctatagtggccgcacccaagcacagacccgccaggccagcaccctcatagataggccagcaccacactttgagcgcacttctagtaaacgggtctccaggagtctagatggagctccgattggtgtcatggaccaaagtcttatgaaggattttcctggcgctgctggggagatttcagcctatggacctggacttgtcagcattgccgtggtacaagatggggacggcaggagggaagtgagaagcccaactaaagccccacatttgcagctcattgaaggaaagaaaaattccttgagagtagaaggggataatatttatgtcagacatagcaatttaatgttggaggaactggataaggcccaggaggacatactgaaacatcaggctagcattagtgaactcaagcgcaattttatggaatccacacctgagccgcgccctaatgaatgggaaaaacgacgtatcacacctctgtccctacagacacaagggagttcacatgagactctgaatatagtggaggagaagaagcgggcagaggttgggaaagacgaaagagtaatcacagaagaaatgaatggtaaagagatatcacctgggagtggtcctggggagattcgtaaggtggagcctgtgacacaaaaagactccacctccctgtcttctgagagcagcagcagcagcagtgagagtgaggaggaagacgtgggagagtaccgtccccaccaccgagtgaccgagggcaccatcagggaggaacaggagtatgaagaagaggtggaggaagaaccccgcccggcagccaaggtagtagagagggaggaagcagtgcccgaagccagcccagtcacacaagcaggtgccagtgtaatcacagtagaaacagtgatccaggaaaatgtaggtgcccaaaagatacccggagagaagagtgtacacgaaggcgctcttaagcaagacatgggagaagaagcagaggaagagccacagaaagttaacggagaggtgtcccatgttgacattgatgttttgccacaaattatttgttgttcagagccaccagtggtaaaaacagagatggtaacaatttctgatgcctcacaaaggacagaaatctccaccaaggaagtccccattgtccaaactgagaccaaaaccatcacatatgagtctccacagattgatggcggggctggtggtgattcgggcacgttactgaccgcacaaaccatcacatctgagtccgtgtcaacaacgacaaccacacacatcaccaagagccgttctctgtcctgaccctggcaggcactggctcaggcgatcagggaagccagagagcagcaccctgacatgtcggtcacaagagtggtggtacacaaagaaacagagttggctgaggaaggggaagattaagtaagaaagtcattttttaaacaacactcaactttgtgaacccctgaagattttttgaccgttccaagtcttaatgccacaccactattccagcgaatttatgctacaactggtaacaatgaccagaagcctgaagaattaaaatgccaacaccaaacctttccttaccagctctggtctatattgctcccatgcatttaatatattattttgttttataaccacttctaaatattctcagttctttctttttgttgttgttaattaaggggttttggttttgttttctgtttactttgtgtgcaactacctgcttttaatgactcactttgatcaaatgacagtgaacaaagccagcccaagctggtaaggtgctgttcacttgaacaggtgctgttgcgcagaaaggaaactctgtgactaatttagatagtggctttccttcttctggattcttttcattgaattctcacagtaaatatttacggagttttcaaattgcagcaaatatactgtatgagaaaatattaatacagattaaaagcctttcttacatcttgaaaattttctaatatttgagaatttcacagggatgttttttatattggacccttttgactttccagtcctgtgactttctacttttagtagagagtcagaatctctggactggagaataatgaagaagttcactgactgtgcactgtgcttagagaccctgccgcaccacagtgccaatgcttgtcagacacatgcccttcggcagcattccagaacaggagggaagagaaagagaaaactttcttcccttctactaaaagattcaggcagcttaaaaccttagtgctttctttcttaacatacccaaatttcaattctttccattatttgaacacttgggtagaactcttgctttgtattaaacctctttgtctacacatgtaaaacttaccttttgttattgagcaggcctatctctttcagatagttttatgattcacacaggtttgaggatgctggggagagggggagggggctgtggtggtgttctgttggttacaagaaagttataccatttaaagctggcaccagagacccgatagggacttattaactatattgaacattttttcctttgcctttgaccctatgtatagttacgatgccagattagatttatagcagcctcaagttgtattaaatgatattttgcttcctgtaatactattataaaataaagtttgtttattctctaaa

SEQ ID NO: 321904 - DNA, 4520 bp, Homo sapiens
ccctcagagtcctctgacggccccagtcagggaatttcaatttgaaacctagcggagggaggaggcaggcgcggctgccggcggctgggactgaagagggacgggtcccgcggcgagcgagctcctgagcataagctgtggccatgactactgaagtaggctctgtgtctgaagtgaagaaggactctagccagttaggaacagatgcaaccaaggaaaaacctaaagaagtagcagaaaatcagcagaatcagtcttccgatccagaggaggaaaaaggttcccagccacctcctgcagctgaaagccaaagtagtctacgccgccagaagagagagaaggaaacatcggagagcaggggtatttctcggttcataccgccatggcttaagaagcaaaagtcatataccttagtagtggccaaagatggaggagataaaaaagagcctacccaagctgttgttgaagaacaggtcttagataaagaggaaccccttccagaagaacagagacaggctaagggtgatgctgaagaaatggctcagaagaaacaagagattaaagttgaagtcaaggaagaaaaaccctcagtgagcaaggaagaaaaaccctcagtgagcaaagtggagatgcagcctactgaattagtaagtaaggagagagaagagaaggtaaaagaaacacaggaagacaaattagaaggaggagcagcaaaaagggagaccaaggaagtgcagaccaatgagctgaaagcagagaaggcatctcaaaaagtcaccaagaagaccaaaactgtccagtgtaaagtgaccctcttagatggcaccgaatacagctgtgacctggagaaacatgccaagggacaagtgttatttgacaaagtgtgtgaacacctcaatctcttggagaaagactactttggacttttgtttcaggaaagccctgagcagaaaaactggttagatcctgctaaagaaataaagagacaactgagaaaccttccatggctattcacttttaatgtgaagttttatcctcctgatccttctcaattgactgaagatatcaccagatacttcttgtgccttcagctccggcaggacattgcctctggccgcctgccctgctcttttgtgactcatgctctcctgggatcctacaccctgcaggctgaacttggtgactatgacccagaagaacatggcagcatcgacctcagtgaattccagtttgcccctactcagactaaggagctggaagagaaggtggcagagctgcacaaaacccacaggggcttatcgccagcacaagctgattcccagttcttagaaaatgcaaagaggctttccatgtatggtgttgacctacatcatgccaaggactcagaaggtgtggacatcaagctgggcgtgtgtgctaatggacttctcatttacaaagacagactgcgaatcaatcgttttgcttggccgaaaatcttaaaaatttcctataaacgcagtaacttctacattaaagtcagaccggcagagctggaacagtttgagagtaccattggattcaaactgccaaaccaccgggcagcgaaaagactatggaaagtgtgcgtggagcatcatactttctacaggcttgtttctccagagcagccaccaaaagccaagttcctgaccttggggtccaaatttcgctatagtggccgcacccaagcacagacccgccaggccagcaccctcatagataggccagcaccacactttgagcgcacttctagtaaacgggtctccaggagtctagatggagctccgattggtgtcatggaccaaagtcttatgaaggattttcctggcgctgctggggagatttcagcctatggacctggacttgtcagcattgccgtggtacaagatggggacggcaggagggaagtgagaagcccaactaaagccccacatttgcagctcattgaaggaaagaaaaattccttgagagtagaaggggataatatttatgtcagacatagcaatttaatgttggaggaactggataaggcccaggaggacatactgaaacatcaggctagcattagtgaactcaagcgcaattttatggaatccacacctgagccgcgccctaatgaatgggaaaaacgacgtatcacacctctgtccctacagacacaagggagttcacatgagactctgaatatagtggaggagaagaagcgggcagaggttgggaaagacgaaagagtaatcacagaagaaatgaatggtaaagagatatcacctgggagtggtcctggggagattcgtaaggtggagcctgtgacacaaaaagactccacctccctgtcttctgagagcagcagcagcagcagtgagagtgaggaggaagacgtgggagagtaccgtccccaccaccgagtgaccgagggcaccatcagggaggaacaggagtatgaagaagaggtggaggaagaaccccgcccggcagccaaggtagtagagagggaggaagcagtgcccgaagccagcccagtcacacaagcaggtgccagtgtaatcacagtagaaacagtgatccaggaaaatgtaggtgcccaaaagatacccggagagaagagtgtacacgaaggcgctcttaagcaagacatgggagaagaagcagaggaagagccacagaaagttaacggagaggtgtcccatgttgacattgatgttttgccacaaattatttgttgttcagagccaccagtggtaaaaacagagatggtaacaatttctgatgcctcacaaaggacagaaatctccaccaaggaagtccccattgtccaaactgagaccaaaaccatcacatatgagtctccacagattgatggcggggctggtggtgattcgggcacgttactgaccgcacaaaccatcacatctgagtccgtgtcaacaacgacaaccacacacatcaccaagactgtaaaaggtggaatttctgaaacaagaattgagaaacgcattgtgatcacaggagatggagatattgatcatgaccaggcactggctcaggcgatcagggaagccagagagcagcaccctgacatgtcggtcacaagagtggtggtacacaaagaaacagagttggctgaggaaggggaagattaagtaagaaagtcattttttaaacaacactcaactttgtgaacccctgaagattttttgaccgttccaagtcttaatgccacaccactattccagcgaatttatgctacaactggtaacaatgaccagaagcctgaagaattaaaatgccaacaccaaacctttccttaccagctctggtctatattgctcccatgcatttaatatattattttgttttataaccacttctaaatattctcagttctttctttttgttgttgttaattaaggggttttggttttgttttctgtttactttgtgtgcaactacctgcttttaatgactcactttgatcaaatgacagtgaacaaagccagcccaagctggtaaggtgctgttcacttgaacaggtgctgttgcgcagaaaggaaactctgtgactaatttagatagtggctttccttcttctggattcttttcattgaattctcacagtaaatatttacggagttttcaaattgcagcaaatatactgtatgagaaaatattaatacagattaaaagcctttcttacatcttgaaaattttctaatatttgagaatttcacagggatgttttttatattggacccttttgactttccagtcctgtgactttctacttttagtagagagtcagaatctctggactggagaataatgaagaagttcactgactgtgcactgtgcttagagaccctgccgcaccacagtgccaatgcttgtcagacacatgcccttcggcagcattccagaacaggagggaagagaaagagaaaactttcttcccttctactaaaagattcaggcagcttaaaaccttagtgctttctttcttaacatacccaaatttcaattctttccattatttgaacacttgggtagaactcttgctttgtattaaacctctttgtctacacatgtaaaacttaccttttgttattgagcaggcctatctctttcagatagttttatgattcacacaggtttgaggatgctggggagagggggagggggctgtggtggtgttctgttggttacaagaaagttataccatttaaagctggcaccagagacccgatagggacttattaactatattgaacattttttcctttgcctttgaccctatgtatagttacgatgccagattagatttatagcagcctcaagttgtattaaatgatattttgcttcctgtaatactattataaaataaagtttgtttattctctaaagctggcaccagagacccgatagggacttattaactatattgaacattttttcctttgcctttgaccctatgtatagttacgatgccagattagatttatagg

SEQ ID NO: 321905 - DNA, 4433 bp, Homo sapiens
  misc_feature (4215)..(4216): n is a, c, g, or t
  misc_feature (4432)..(4432): n is a, c, g, or t
ccctcagagtcctctgacggccccagtcagggaatttcaatttgaaacctagcggagggaggaggcaggcgcggctgccggcggctgggactgaagagggacgggtcccgcggcgagcgagctcctgagcataagctgtggccatgactactgaagtaggctctgtgtctgaagtgaagaaggactctagccagttaggaacagatgcaaccaaggaaaaacctaaagaagtagcagaaaatcagcagaatcagtcttccgatccagaggaggaaaaaggttcccagccacctcctgcagctgaaagccaaagtagtctacgccgccagaagagagagaaggaaacatcggagagcaggggtatttctcggttcataccgccatggcttaagaagcaaaagtcatataccttagtagtggccaaagatggaggagataaaaaagagcctacccaagctgttgttgaagaacaggtcttagataaagaggaaccccttccagaagaacagagacaggctaagggtgatgctgaagaaatggctcagaagaaacaagagattaaagttgaagtcaaggaagaaaaaccctcagtgagcaaggaagaaaaaccctcagtgagcaaagtggagatgcagcctactgaattagtaagtaaggagagagaagagaaggtaaaagaaacacaggaagacaaattagaaggaggagcagcaaaaagggagaccaaggaagtgcagaccaatgagctgaaagcagagaaggcatctcaaaaagtcaccaagaagaccaaaactgtccagtgtaaagtgaccctcttagatggcaccgaatacagctgtgacctggagaaacatgccaagggacaagtgttatttgacaaagtgtgtgaacacctcaatctcttggagaaagactactttggacttttgtttcaggaaagccctgagcagaaaaactggttagatcctgctaaagaaataaagagacaactgagaaaccttccatggctattcacttttaatgtgaagttttatcctcctgatccttctcaattgactgaagatatcaccagatacttcttgtgccttcagctccggcaggacattgcctctggccgcctgccctgctcttttgtgactcatgctctcctgggatcctacaccctgcaggctgaacttggtgactatgacccagaagaacatggcagcatcgacctcagtgaattccagtttgcccctactcagactaaggagctggaagagaaggtggcagagctgcacaaaacccacaggggcttatcgccagcacaagctgattcccagttcttagaaaatgcaaagaggctttccatgtatggtgttgacctacatcatgccaaggactcagaaggtgtggacatcaagctgggcgtgtgtgctaatggacttctcatttacaaagacagactgcgaatcaatcgttttgcttggccgaaaatcttaaaaatttcctataaacgcagtaacttctacattaaagtcagaccggcagagctggaacagtttgagagtaccattggattcaaactgccaaaccaccgggcagcgaaaagactatggaaagtgtgcgtggagcatcatactttctacaggcttgtttctccagagcagccaccaaaagccaagttcctgaccttggggtccaaatttcgctatagtggccgcacccaagcacagacccgccaggccagcaccctcatagataggccagcaccacactttgagcgcacttctagtaaacgggtctccaggagtctagatggagctccgattggtgtcatggaccaaagtcttatgaaggattttcctggcgctgctggggagatttcagcctatggacctggacttgtcagcattgccgtggtacaagatggggacggcaggagggaagtgagaagcccaactaaagccccacatttgcagctcattgaaggaaagaaaaattccttgagagtagaaggggataatatttatgtcagacatagcaatttaatgttggaggaactggataaggcccaggaggacatactgaaacatcaggctagcattagtgaactcaagcgcaattttatggaatccacacctgagccgcgccctaatgaatgggaaaaacgacgtatcacacctctgtccctacagacacaagggagttcacatgagactctgaatatagtggaggagaagaagcgggcagaggttgggaaagacgaaagagtaatcacagaagaaatgaatggtaaagagatatcacctgggagtggtcctggggagattcgtaaggtggagcctgtgacacaaaaagactccacctccctgtcttctgagagcagcagcagcagcagtgagagtgaggaggaagacgtgggagagtaccgtccccaccaccgagtgaccgagggcaccatcagggaggaacaggagtatgaagaagaggtggaggaagaaccccgcccggcagccaaggtagtagagagggaggaagcagtgcccgaagccagcccagtcacacaagcaggtgccagtgtaatcacagtagaaacagtgatccaggaaaatgtaggtgcccaaaagatacccggagagaagagtgtacacgaaggcgctcttaagcaagacatgggagaagaagcagaggaagagccacagaaagttaacggagaggtgtcccatgttgacattgatgttttgccacaaattatttgttgttcagagccaccagtggtaaaaacagagatggtaacaatttctgatgcctcacaaaggacagaaatctccaccaaggaagtccccattgtccaaactgagaccaaaaccatcacatatgagtctccacagattgatggcggggctggtggtgattcgggcacgttactgaccgcacaaaccatcacatctgagtccgtgtcaacaacgacaaccacacacatcaccaagactgtaaaaggtggaatttctgaaacaagaattgagaaacgcattgtgatcacaggagatggagatattgatcatgaccaggcactggctcaggcgatcagggaagccagagagcagcaccctgacatgtcggtcacaagagtggtggtacacaaagaaacagagttggctgaggaaggggaagattaagtaagaaagtcattttttaaacaacactcaactttgtgaacccctgaagattttttgaccgttccaagtcttaatgccacaccactattccagcgaatttatgctacaactggtaacaatgaccagaagcctgaagaattaaaatgccaacaccaaacctttccttaccagctctggtctatattgctcccatgcatttaatatattattttgttttataaccacttctaaatattctcagttctttctttttgttgttgttaattaaggggttttggttttgttttctgtttactttgtgtgcaactacctgcttttaatgactcactttgatcaaatgacagtgaacaaagccagcccaagctggtaaggtgctgttcacttgaacaggtgctgttgcgcagaaaggaaactctgtgactaatttagatagtggctttccttcttctggattcttttcattgaattctcacagtaaatatttacggagttttcaaattgcagcaaatatactgtatgagaaaatattaatacagattaaaagcctttcttacatcttgaaaattttctaatatttgagaatttcacagggatgttttttatattggacccttttgactttccagtcctgtgactttctacttttagtagagagtcagaatctctggactggagaataatgaagaagttcactgactgtgcactgtgcttagagaccctgccgcaccacagtgccaatgcttgtcagacacatgcccttcggcagcattccagaacaggagggaagagaaagagaaaactttcttcccttctactaaaagattcaggcagcttaaaaccttagtgctttctttcttaacatacccaaatttcaattctttccattatttgaacacttgggtagaactcttgctttgtattaaacctctttgtctacacatgtaaaacttaccttttgttattgagcaggcctatctctttcagatagttttatgattcacacaggtttgaggatgctggggagagggggagggggctgtggtggtgttctgtnntgcgattaccaattccacacaggcctaggacgcccggaagtgataaagactctatgcccctgaggtggcccaatatagttaggcttaacttccctctaaattggcgcagggcctccaccgccccgctttttccaaacctgggaaaacctgtttgttgcccaccttcatttcaaggcaaacagaccacactctctggggatggaggagagcgaactna

SEQ ID NO: 321906 - DNA, 2555 bp, Homo sapiens
ccctcagagtcctctgacggccccagtcagggaatttcaatttgaaacctagcggagggaggaggcaggcgcggctgccggcggctgggactgaagagggacgggtcccgcggcgagcgagctcctgagcataagctgtggccatgactactgaagtaggctctgtgtctgaagtgaagaaggactctagccagttaggaacagatgcaaccaaggaaaaacctaaagaagtagcagaaaatcagcagaatcagtcttccgatccagaggaggaaaaaggttcccagccacctcctgcagctgaaagccaaagtagtctacgccgccagaagagagagaaggaaacatcggagagcaggggtatttctcggttcataccgccatggcttaagaagcaaaagtcatataccttagtagtggccaaagatggaggagataaaaaagagcctacccaagctgttgttgaagaacaggtcttagataaagaggaaccccttccagaagaacagagacaggctaagggtgatgctgaagaaatggctcagaagaaacaagagattaaagttgaagtcaaggaagaaaaaccctcagtgagcaaggaagaaaaaccctcagtgagcaaagtggagatgcagcctactgaattagtaagtaaggagagagaagagaaggtaaaagaaacacaggaagacaaattagaaggaggagcagcaaaaagggagaccaaggaagtgcagaccaatgagctgaaagcagagaaggcatctcaaaaagtcaccaagaagaccaaaactgtccagtgtaaagtgaccctcttagatggcaccgaatacagctgtgacctggagaaacatgccaagggacaagtgttatttgacaaagtgtgtgaacacctcaatctcttggagaaagactactttggacttttgtttcaggaaagccctgagcagaaaaactggttagatcctgctaaagaaataaagagacaactgagaaaccttccatggctattcacttttaatgtgaagttttatcctcctgatccttctcaattgactgaagatatcaccagatacttcttgtgccttcagctccggcaggacattgcctctggccgcctgccctgctcttttgtgactcatgctctcctgggatcctacaccctgcaggctgaacttggtgactatgacccagaagaacatggcagcatcgacctcagtgaattccagtttgcccctactcagactaaggagctggaagagaaggtggcagagctgcacaaaacccacaggggcttatcgccagcacaagctgattcccagttcttagaaaatgcaaagaggctttccatgtatggtgttgacctacatcatgccaaggactcagaaggtgtggacatcaagctgggcgtgtgtgctaatggacttctcatttacaaagacagactgcgaatcaatcgttttgcttggccgaaaatcttaaaaatttcctataaacgcagtaacttctacattaaagtcagaccggcagagctggaacagtttgagagtaccattggattcaaactgccaaaccaccgggcagcgaaaagactatggaaagtgtgcgtggagcatcatactttctacaggcttgtttctccagagcagccaccaaaagccaagttcctgaccttggggtccaaatttcgctatagtggccgcacccaagcacagacccgccaggccagcaccctcatagataggccagcaccacactttgagcgcacttctagtaaacgggtctccaggagtctagatggagctccgattggtgtcatggaccaaagtcttatgaaggattttcctggcgctgctggggagatttcagcctatggacctggacttgtcagcattgccgtggtacaagatggggacggcaggagggaagtgagaagcccaactaaagccccacatttgcagctcattgaaggaaagaaaaattccttgagagtagaaggggataatatttatgtcagacatagcaatttaatgttggaggaactggataaggcccaggaggacatactgaaacatcaggctagcattagtgaactcaagcgcaattttatggaatccacacctgagccgcgccctaatgaatgggaaaaacgacgtatcacacctctgtccctacagacacaagggagcctagaagaggagataacatcaattttgtttagtgaaaagggcttttctgatagcatgaaagccaccttcacttcagccaccacttggacagcagagggcgctgttgtgagcgctaatgcaccttctgaaaagctttcttcctcgcccttctcacacttgcttgaggtgcattttactttgtttcccctgttactaaaagccacatatgagagagattttcatttttttaaatattcaggcaccattccctccagtgctttcattggtgaaattaattcttcctgggagaaacattcaagaaacaatgactgaattggaacatgaagaaaagatatagattggatgtttctcctgcttctttggtca

SEQ ID NO: 321907 - DNA, 980 bp, Homo sapiens
  misc_feature (932)..(932): n is a, c, g, or t
ccctcagagtcctctgacggccccagtcagggaatttcaatttgaaacctagcggagggaggaggcaggcgcggctgccggcggctgggactgaagagggacgggtcccgcggcgagcgagctcctgagcataagctgtggccatgactactgaagtaggctctgtgtctgaagtgaagaaggactctagccagttaggaacagatgcaaccaaggaaaaacctaaagaagtagcagaaaatcagcagaatcagtcttccgatccagaggaggaaaaaggttcccagccacctcctgcagctgaaagccaaagtagtctacgccgccagaagagagagaaggaaacatcggagagcaggggtatttctcggttcataccgccatggcttaagaagcaaaagtcatataccttagtagtggccaaagatggaggagataaaaaagagcctacccaagctgttgttgaagaacaggtcttagataaagaggaaccccttccagaagaacagagacaggctaagggtgatgctgaagaaatggctcagaagaaacaagagattaaagttgaagtcaaggaagaaaaaccctcagtgagcaaggaagaaaaaccctcagtgagcaaagtggagatgcagcctactgaattagtaagtaaggagagagaagagaaggtaaaagaaacacaggaagacaaattagaaggaggagcagcaaaaagggagaccaaggaagtgcagaccaatgagctgaaagcagagaaggcatctcaaaaagtcaccaagaagaccaaaactgtccagtgtaaagtgaccctcttagatggcaccgaatacagctgtgacctggagcataagctgtgggcatgactactgaagtagactctgtgtctgaagtgaagaaggactctagccagttaggaacagatgcaaccnaggaaaaacctaaagaagttgcgggatgtggcgggtacagagctcgaa

SEQ ID NO: 321908 - DNA, 771 bp, Homo sapiens
aacggctaggtacgaggctggcgcgtatatcggccgaggcttctgtttagtggcgacacaggcacccagctttggggtggtgctgacgctcccaggggtgccaggagccactgggacagggtgaggctcccagacgctcctcgaggtgcccagctctccagggagcttctggcccaaggccgtctgagggatctgctccttaaccccccagtgccttggcgagggcaggttccaagccacagacgcctgccccgagtggactctgcggccagtccctggtgccctcctggccctgctgcccagtgagggctcctacgggtgggttcattggcctgggcccagcgagcccccacctgcattgaccttaggcccatagagagggcctgtcccggtgctgccccagccaggatctggtcgctgccccagggggactgatgggcagagtcgcccctgtggctggactgtgaccatccctgatggggcctgaccgcgggagctgaggaagcgccgctccaccgtctgccctccaaggacccgcatggaggcagtgggctggcagcttcctgctgctccctgtcagagtcaaagcacaaatcctcaggacgggctcaagggccagggcagccgagggaagctccaggtggggaccacgtcttcctgaggttggtgcccactggctgggaccctttgcagtggggtggctccttgttgctgtgaggaacgtgacgtggacatatgataagcacatgtggaaacaaaaaacaaaaaaaa

SEQ ID NO: 321909 - DNA, 568 bp, Homo sapiens
gccgtggggaccctgagtgtccccgtgtgcctgcgtgcttcccgtctccccacgatgctgctggggttttgaaacagaaacagccagggcaaggggacccatcgtcggagcagtatgaaccgtttcacccgcgtcctgggttcagggcgagccaggcaccccttggaggaatgttcttgaaaagagtgtggtcctttgagtccgtgaggactggctatgctgggtgctgggctccatgttgggccctggagacggagggacagggcaggccaggagtctctgccttcagggagatggctctgggtgcctgctgaggggcagttctgatgtgcagagcctcggaacgaacagcagggaacacggccgctcagaaacaggcaacagtcaggtgaggctgagcagcccaggggtgagcggccctcctgcggggcctcagggccgaacccacttccagtgtgcagagtggacgcaaggccgcctggtgacggaggcgcctgcaggaaactctggaagtgctggagcgaagacgggacctttcacgttcagtgcagcacacggcttaggtcag

SEQ ID NO: 321910 - DNA, 317 bp, Homo sapiens
gtagctgggaccacaggtatgcagcgtgacacctggctaatttttgaattattttgtagagacaggagtctcactgtgttgtccaggctggtctcaaactcctaagctcaatcagtcctcccacctcgccctcccaagatgctgggattacaggcgggagtcgccacgcctggcctaacttgcttttttttctgttatgaatgtagtaacacaagcgggagagggaatttagaaatggaacccaagttggggttccttccaagaaggtggcagctcccattcttggggcatttccgtggcctgtctgggccacagct

SEQ ID NO: 321911 - DNA, 2398 bp, Homo sapiens
ggcccgcgggccggaacagccgcggcaagtggcggcggcggcagcggcagcggaggcagctgaggcggcggcggcgagtgggggtccgggcggcggcggcgggcccggcggcgggccgaggagccgggcgcaatggagcggaagagcccgagcgggaagaagttccgcagcaagccgcagctggcgcgctacctgggcggctccatggacctgagcaccttcgacttccgcacgggcaagatgctgatgagcaagatgaacaagagccgccagcgcgtgcgctacgactcctccaaccaggtcaagggcaagcccgacctgaacacggcgctgcccgtgcgccagacggcgtccatcttcaagcagccggtgaccaagattaccaaccaccccagcaacaaggtcaagagcgacccgcagaaggcggtggaccagccgcgccagctcttctgggagaagaagctgagcggcctgaacgccttcgacattgctgaggagctggtcaagaccatggacctccccaagggcctgcagggggtgggacctggctgcacggatgagacgctgctgtcggccatcgccagcgccctgcacactagcaccatgcccatcacgggacagctctcggccgccgtggagaagaaccccggcgtatggctcaacaccacgcagcccctgtgcaaagccttcatggtgaccgacgaggacatcaggaagcaggaagagctggtgcagcaggtgcggaagcggctggaggaggcgctgatggccgacatgctggcgcacgtggaggagctggcccgtgacggggaggcgccgctggacaaggcctgcgctgaggacgacgacgaggaagacgaggaggaggaggaggaggagcccgacccggacccggagatggagcacgtctagggcagaggccctgccgagagcccgtgctgcctgctggagccgcctgcagacgcggtcctcggccccacgtgaaccaggctcggcggcgaagcccagccttggagacacccaggaggaaggccgtgctcctggctccctcctcggcccgtccccacttcccggggcctcggggcacacagctggggctgcccccacccgaaagaccctccacgctcgtcctctacagagtccggcttcgggaagtgccgggtgctcctgggccctgcctggctccctacgacctttgggctcgaggccagctcctccccatgcccgctgtcccagctccttgagactggagagcagccagcaggtgcccggcagctcggcgccacggcttgctgacagctgggagggtttctcggtctggaggcgtagttttgaaactcacatcacccactgtgcagcgtgaggacgggactctggtctgctgtggggggcatgcaggacggcgccactctctgccctgccatgcggctggtggtgccacagagcctcaccgtgcctgagtggcgtgcccaggaggccgctctccttcagtaaatgtaacacagtcgaggcacgtcatcgggcagccttccctgtgtgccaacgccagccttcgcttctgaaaaccaaactccagccgctgccagtcgggacttggtcgcccggcgctgccagaatgctccactgccagccggcccccctgcctcggtttcccttctgtttagtggcgacacaggcacccagctttggggtggtgctgacgctcccaggggtgccaggagccactgggacagggtgaggctcccagacgctcctcgaggtgcccagctctccagggagcttctggcccaaggccgtctgagggatctgctccttaaccccccagtgccttggcgagggcaggttccaagccacagacgcctgccccgagtggactctgcggccagtccctggtgccctcctggccctgctgcccagtgagggctcctacgggtgggttcattggcctgggcccagcgagcccccacctgcattgaccttaggcccatagagagggcctgtcccggtgctgccccagccaggatctggtcgctgccccagggggactgatgggcagagtcgcccctgtggctggactgtgaccatccctgatggggcctgaccgcgggagctgaggaagcgccgctccaccgtctgccctccaaggacccgcatggaggcagtgggctggcagcttcctgctgctccctgtcagagtcaaagcacaaatcctcaggacgggctcaagggccagggcagccgagggaagctccaggtggggaccacgtcttcctgaggttggtgcccactggctgggaccctttgcagtggggtggcctcccctctgtctgcctggtggagggagccgtgggcgtggggacgtgactgaataaagccaccatgggtggatgtgcttgga

SEQ ID NO: 321912 - DNA, 2517 bp, Homo sapiens
ggtgctctgggtctggctggcgcccagatctaggggccagttgtggggtgctggggtctgggatgaaggtctggggtcacgccagggttggggtctggggctggggccagggcctgcctgggtttggggtcagggccgtgttggggtctggggctggggtcgcgacctgaagctggggctgggactgggtttgggtctgcggccgaggcctgggtttggggtctggggtccgcccggggcgccgaccgtcccgcctccccgcagccccgagcgggaagaagttccgcagcaagccgcagctggcgcgctacctgggcggctccatggacctgagcaccttcgacttccgcacgggcaagatgctgatgagcaagatgaacaagagccgccagcgcgtgcgctacgactcctccaaccaggtcaagggcaagcccgacctgaacacggcgctgcccgtgcgccagacggcgtccatcttcaagcagccggtgaccaagattaccaaccaccccagcaacaaggtcaagagcgacccgcagaaggcggtggaccagccgcgccagctcttctgggagaagaagctgagcggcctgaacgccttcgacattgctgaggagctggtcaagaccatggacctccccaagggcctgcagggggtgggacctggctgcacggatgagacgctgctgtcggccatcgccagcgccctgcacactagcaccatgcccatcacgggacagctctcggccgccgtggagaagaaccccggcgtatggctcaacaccacgcagcccctgtgcaaagccttcatggtgaccgacgaggacatcaggaagcaggaagagctggtgcagcaggtgcggaagcggctggaggaggcgctgatggccgacatgctggcgcacgtggaggagctggcccgtgacggggaggcgccgctggacaaggcctgcgctgaggacgacgacgaggaagacgaggaggaggaggaggaggagcccgacccggacccggagatggagcacgtctagggcagaggccctgccgagagcccgtgctgcctgctggagccgcctgcagacgcggtcctcggccccacgtgaaccaggctcggcggcgaagcccagccttggagacacccaggaggaaggccgtgctcctggctccctcctcggcccgtccccacttcccggggcctcggggcacacagctggggctgcccccacccgaaagaccctccacgctcgtcctctacagagtccggcttcgggaagtgccgggtgctcctgggccctgcctggctccctacgacctttgggctcgaggccagctcctccccatgcccgctgtcccagctccttgagactggagagcagccagcaggtgcccggcagctcggcgccacggcttgctgacagctgggagggtttctcggtctggaggcgtagttttgaaactcacatcacccactgtgcagcgtgaggacgggactctggtctgctgtggggggcatgcaggacggcgccactctctgccctgccatgcggctggtggtgccacagagcctcaccgtgcctgagtggcgtgcccaggaggccgctctccttcagtaaatgtaacacagtcgaggcacgtcatcgggcagccttccctgtgtgccaacgccagccttcgcttctgaaaaccaaactccagccgctgccagtcgggacttggtcgcccggcgctgccagaatgctccactgccagccggcccccctgcctcggtttcccttctgtttagtggcgacacaggcacccagctttggggtggtgctgacgctcccaggggtgccaggagccactgggacagggtgaggctcccagacgctcctcgaggtgcccagctctccagggagcttctggcccaaggccgtctgagggatctgctccttaaccccccagtgccttggcgagggcaggttccaagccacagacgcctgccccgagtggactctgcggccagtccctggtgccctcctggccctgctgcccagtgagggctcctacgggtgggttcattggcctgggcccagcgagcccccacctgcattgaccttaggcccatagagagggcctgtcccggtgctgccccagccaggatctggtcgctgccccagggggactgatgggcagagtcgcccctgtggctggactgtgaccatccctgatggggcctgaccgcgggagctgaggaagcgccgctccaccgtctgccctccaaggacccgcatggaggcagtgggctggcagcttcctgctgctccctgtcagagtcaaagcacaaatcctcaggacgggctcaagggccagggcagccgagggaagctccaggtggggaccacgtcttcctgaggttggtgcccactggctgggaccctttgcagtggggtggcctcccctctgtctgcctggtggagggagccgtgggcgtggggacgtgactgaataaagccaccatgggtggatgtgcttgga

SEQ ID NO: 321913 - DNA, 2293 bp, Homo sapiens
tggtcaacctatcgcgcatcgagtgaagaggcccccgagaccccgagcgggaagaagttccgcagcaagccgcagctggcgcgctacctgggcggctccatggacctgagcaccttcgacttccgcacgggcaagatgctgatgagcaagatgaacaagagccgccagcgcgtgcgctacgactcctccaaccaggtcaagggcaagcccgacctgaacacggcgctgcccgtgcgccagacggcgtccatcttcaagcagccggtgaccaagattaccaaccaccccagcaacaaggtcaagagcgacccgcagaaggcggtggaccagccgcgccagctcttctgggagaagaagctgagcggcctgaacgccttcgacattgctgaggagctggtcaagaccatggacctccccaagggcctgcagggggtgggacctggctgcacggatgagacgctgctgtcggccatcgccagcgccctgcacactagcaccatgcccatcacgggacagctctcggccgccgtggagaagaaccccggcgtatggctcaacaccacgcagcccctgtgcaaagccttcatggtgaccgacgaggacatcaggaagcaggaagagctggtgcagcaggtgcggaagcggctggaggaggcgctgatggccgacatgctggcgcacgtggaggagctggcccgtgacggggaggcgccgctggacaaggcctgcgctgaggacgacgacgaggaagacgaggaggaggaggaggaggagcccgacccggacccggagatggagcacgtctagggcagaggccctgccgagagcccgtgctgcctgctggagccgcctgcagacgcggtcctcggccccacgtgaaccaggctcggcggcgaagcccagccttggagacacccaggaggaaggccgtgctcctggctccctcctcggcccgtccccacttcccggggcctcggggcacacagctggggctgcccccacccgaaagaccctccacgctcgtcctctacagagtccggcttcgggaagtgccgggtgctcctgggccctgcctggctccctacgacctttgggctcgaggccagctcctccccatgcccgctgtcccagctccttgagactggagagcagccagcaggtgcccggcagctcggcgccacggcttgctgacagctgggagggtttctcggtctggaggcgtagttttgaaactcacatcacccactgtgcagcgtgaggacgggactctggtctgctgtggggggcatgcaggacggcgccactctctgccctgccatgcggctggtggtgccacagagcctcaccgtgcctgagtggcgtgcccaggaggccgctctccttcagtaaatgtaacacagtcgaggcacgtcatcgggcagccttccctgtgtgccaacgccagccttcgcttctgaaaaccaaactccagccgctgccagtcgggacttggtcgcccggcgctgccagaatgctccactgccagccggcccccctgcctcggtttcccttctgtttagtggcgacacaggcacccagctttggggtggtgctgacgctcccaggggtgccaggagccactgggacagggtgaggctcccagacgctcctcgaggtgcccagctctccagggagcttctggcccaaggccgtctgagggatctgctccttaaccccccagtgccttggcgagggcaggttccaagccacagacgcctgccccgagtggactctgcggccagtccctggtgccctcctggccctgctgcccagtgagggctcctacgggtgggttcattggcctgggcccagcgagcccccacctgcattgaccttaggcccatagagagggcctgtcccggtgctgccccagccaggatctggtcgctgccccagggggactgatgggcagagtcgcccctgtggctggactgtgaccatccctgatggggcctgaccgcgggagctgaggaagcgccgctccaccgtctgccctccaaggacccgcatggaggcagtgggctggcagcttcctgctgctccctgtcagagtcaaagcacaaatcctcaggacgggctcaagggccagggcagccgagggaagctccaggtggggaccacgtcttcctgaggttggtgcccactggctgggaccctttgcagtggggtggcctcccctctgtctgcctggtggagggagccgtgggcgtggggacgtgactgaataaagccaccatgggtggatgtgcttgga

SEQ ID NO: 321914 - DNA, 2634 bp, Homo sapiens
  misc_feature (1)..(1): n is a, c, g, or t
naacgatacgtctaggtacgaggctggttatggctggcggagtgggggtccgggcggcggcggcgggcccggcggcgggccgaggagccgggcgcaatggagcggaagaggtgggagtgcccggcgctcccgcagggctgggagagggaagaagtgcccagaaggtcggggctgtcggccggccacagggatgtcttttactatagcccgagcgggaagaagttccgcagcaagccgcagctggcgcgctacctgggcggctccatggacctgagcaccttcgacttccgcacgggcaagatgctgatgagcaagatgaacaagagccgccagcgcgtgcgctacgactcctccaaccaggtcaagggcaagcccgacctgaacacggcgctgcccgtgcgccagacggcgtccatcttcaagcagccggtgaccaagattaccaaccaccccagcaacaaggtcaagagcgacccgcagaaggcggtggaccagccgcgccagctcttctgggagaagaagctgagcggcctgaacgccttcgacattgctgaggagctggtcaagaccatggacctccccaagggcctgcagggggtgggacctggctgcacggatgagacgctgctgtcggccatcgccagcgccctgcacactagcaccatgcccatcacgggacagctctcggccgccgtggagaagaaccccggcgtatggctcaacaccacgcagcccctgtgcaaagccttcatggtgaccgacgaggacatcaggaagcaggaagagctggtgcagcaggtgcggaagcggctggaggaggcgctgatggccgacatgctggcgcacgtggaggagctggcccgtgacggggaggcgccgctggacaaggcctgcgctgaggacgacgacgaggaagacgaggaggaggaggaggaggagcccgacccggacccggagatggagcacgtctagggcaggtgctgcggggccacgggggctccctggagtcgggtcctggcagtggggactgcctggtgaacacagatgtgcttgggatgacgggtgcctcccaagagcttcccatctccctagaagagcccaagcgtccccgtcccgtggagtcgctaaagccagccctccctgtcctttccagaggccctgccgagagcccgtgctgcctgctggagccgcctgcagacgcggtcctcggccccacgtgaaccaggctcggcggcgaagcccagccttggagacacccaggaggaaggccgtgctcctggctccctcctcggcccgtccccacttcccggggcctcggggcacacagctggggctgcccccacccgaaagaccctccacgctcgtcctctacagagtccggcttcgggaagtgccgggtgctcctgggccctgcctggctccctacgacctttgggctcgaggccagctcctccccatgcccgctgtcccagctccttgagactggagagcagccagcaggtgcccggcagctcggcgccacggcttgctgacagctgggagggtttctcggtctggaggcgtagttttgaaactcacatcacccactgtgcagcgtgaggacgggactctggtctgctgtggggggcatgcaggacggcgccactctctgccctgccatgcggctggtggtgccacagagcctcaccgtgcctgagtggcgtgcccaggaggccgctctccttcagtaaatgtaacacagtcgaggcacgtcatcgggcagccttccctgtgtgccaacgccagccttcgcttctgaaaaccaaactccagccgctgccagtcgggacttggtcgcccggcgctgccagaatgctccactgccagccggcccccctgcctcggtttcccttctgtttagtggcgacacaggcacccagctttggggtggtgctgacgctcccaggggtgccaggagccactgggacagggtgaggctcccagacgctcctcgaggtgcccagctctccagggagcttctggcccaaggccgtctgagggatctgctccttaaccccccagtgccttggcgagggcaggttccaagccacagacgcctgccccgagtggactctgcggccagtccctggtgccctcctggccctgctgcccagtgagggctcctacgggtgggttcattggcctgggcccagcgagcccccacctgcattgaccttaggcccatagagagggcctgtcccggtgctgccccagccaggatctggtcgctgccccagggggactgatgggcagagtcgcccctgtggctggactgtgaccatccctgatggggcctgaccgcgggagctgaggaagcgccgctccaccgtctgccctccaaggacccgcatggaggcagtgggctggcagcttcctgctgctccctgtcagagtcaaagcacaaatcctcaggacgggctcaagggccagggcagccgagggaagctccaggtggggaccacgtcttcctgaggttggtgcccactggctgggaccctttgcagtggggtggcctcccctctgtctgcctggtggagggagccgtgggcgtggggacgtgactgaataaagccaccatgggtggatgtgcttgga

SEQ ID NO: 321915 - DNA, 2444 bp, Homo sapiens
ggcccgcgggccggaacagccgcggcaagtggcggcggcggcagcggcagcggaggcagctgaggcggcggcggcgagtgggggtccgggcggcggcggcgggcccggcggcgggccgaggagccgggcgcaatggagcggaagagcccgagcgggaagaagttccgcagcaagccgcagctggcgcgctacctgggcggctccatggacctgagcaccttcgacttccgcacgggcaagatgctgatgagcaagatgaacaagagccgccagcgcgtgcgctacgactcctccaaccaggtcaagggcaagcccgacctgaacacggcgctgcccgtgcgccagacggcgtccatcttcaagcagccggtgaccaagattaccaaccaccccagcaacaaggtcaagagcgacccgcagaaggcggtggaccagccgcgccagctcttctgggagaagaagctgagcggcctgaacgccttcgacattgctgaggagctggtcaagaccatggacctccccaagggcctgcagggggtgggacctggctgcacggatgagacgctgctgtcggccatcgccagcgccctgcacactagcaccatgcccatcacgggacagctctcggccgccgtggagaagaaccccggcgtatggctcaacaccacgcagcccctgtgcaaagccttcatggtgaccgacgaggacatcaggaagcaggaagagctggtgcagcaggtgcggaagcggctggaggaggcgctgatggccgacatgctggcgcacgtggaggagctggcccgtgacggggaggcgccgctggacaaggcctgcgctgaggacgacgacgaggaagacgaggaggaggaggaggaggagcccgacccggacccggagatggagcacgtctagggcagaggccctgccgagagcccgtgctgcctgctggagccgcctgcagacgcggtcctcggccccacgtgaaccaggctcggcggcgaagcccagccttggagacacccaggaggaaggccgtgctcctggctccctcctcggcccgtccccacttcccggggcctcggggcacacagctggggctgcccccacccgaaagaccctccacgctcgtcctctacagagtccggcttcgggaagtgccgggtgctcctgggccctgcctggctccctacgacctttgggctcgaggccagctcctccccatgcccgctgtcccagctccttgagactggagagcagccagcaggtgcccggcagctcggcgccacggcttgctgacagctgggagggtttctcggtctggaggcgtagttttgaaactcacatcacccactgtgcagcgtgaggacgggactctggtctgctgtggggggcatgcaggacggcgccactctctgccctgccatgcggctggtggtgccacagagcctcaccgtgcctgagtggcgtgcccaggaggccgctctccttcagtaaatgtaacacagtcgaggcacgtcatcgggcagccttccctgtgtgccaacgccagccttcgcttctgaaaaccaaactccagccgctgccagtcgggacttggtcgcccggcgctgccagaatgctccactgccagccggcccccctgcctcggtttcccttctgtttagtggcgacacaggcacccagctttggggtggtgctgacgctcccaggggtgccaggagccactgggacagggtgaggctcccagacgctcctcgaggtgcccagctctccagggagcttctggcccaaggccgtctgagggatctgctccttaaccccccagtgccttggcgagggcaggttccaagccacagacgcctgccccgagtggactctgcggccagtccctggtgccctcctggccctgctgcccagtgagggctcctacgggtgggttcattggcctgggcccagcgagcccccacctgcattgaccttaggcccatagagagggcctgtcccggtgctgccccagccaggatctggtcgctgccccagggggactgatgggcagagtcgcccctgtggctggactgtgaccatccctgatggggcctgaccgcgggagctgaggaagcgccgctccaccgtctgccctccaaggacccgcatggaggcagtgggctggcagcttcctgctgctccctgtcagagtcaaagcacaaatcctcaggacgggctcaagggccagggcagccgagggaagctccaggtggggaccacgtcttcctgaggttggtgcccactggctgggaccctttgcagtggggtggcctcccctctgtctgcctggtggagggagccgtgggcgtggggacgtgactgaataaagccaccatgggtggatgtgcttggaaaaaaaaaacaaaccaagcaacaaaaaaccagcaccaaaaacaaag

SEQ ID NO: 321916 - DNA, 2224 bp, Homo sapiens
ggtgctctgggtctggctggcgcccagatctaggggccagttgtggggtgctggggtctgggatgaaggtctggggtcacgccagggttggggtctggggctggggccagggcctgcctgggtttggggtcagggccgtgttggggtctggggctggggtcgcgacctgaagctggggctgggactgggtttgggtctgcggccgaggcctgggtttggggtctggggtccgcccggggcgccgaccgtcccgcctccccgcagccccgagcgggaagaagttccgcagcaagccgcagctggcgcgctacctgggcggctccatggacctgagcaccttcgacttccgcacgggcaagatgctgatgagcaagatgaacaagagccgccagcgcgtgcgctacgactcctccaaccaggtcaagggcaagcccgacctgaacacggcgctgcccgtgcgccagacggcgtccatcttcaagcagccggtgaccaagattaccaaccaccccagcaacaaggtcaagagcgacccgcagaaggcggtggaccagccgcgccagctcttctgggagaagaagctgagcggcctgaacgccttcgacattgctgaggagctggtcaagaccatggacctccccaagggcctgcagggggtgggacctggctgcacggatgagacgctgctgtcggccatcgccagcgccctgcacactagcaccatgcccatcacgggacagctctcggccgccgtggagaagaaccccggcgtatggctcaacaccacgcagcccctgtgcaaagccttcatggtgaccgacgaggacatcaggaagcaggaagagctggtgcagcaggtgcggaagcggctggaggaggcgctgatggccgacatgctggcgcacgtggaggagctggcccgtgacggggaggcgccgctggacaaggcctgcgctgaggacgacgacgaggaagacgaggaggaggaggaggaggagccctgcctggctccctacgacctttgggctcgaggccagctcctccccatgcccgctgtcccagctccttgagactggagagcagccagcaggtgcccggcagctcggcgccacggcttgctgacagctgggagggtttctcggtctggaggcgtagttttgaaactcacatcacccactgtgcagcgtgaggacgggactctggtctgctgtggggggcatgcaggacggcgccactctctgccctgccatgcggctggtggtgccacagagcctcaccgtgcctgagtggcgtgcccaggaggccgctctccttcagtaaatgtaacacagtcgaggcacgtcatcgggcagccttccctgtgtgccaacgccagccttcgcttctgaaaaccaaactccagccgctgccagtcgggacttggtcgcccggcgctgccagaatgctccactgccagccggcccccctgcctcggtttcccttctgtttagtggcgacacaggcacccagctttggggtggtgctgacgctcccaggggtgccaggagccactgggacagggtgaggctcccagacgctcctcgaggtgcccagctctccagggagcttctggcccaaggccgtctgagggatctgctccttaaccccccagtgccttggcgagggcaggttccaagccacagacgcctgccccgagtggactctgcggccagtccctggtgccctcctggccctgctgcccagtgagggctcctacgggtgggttcattggcctgggcccagcgagcccccacctgcattgaccttaggcccatagagagggcctgtcccggtgctgccccagccaggatctggtcgctgccccagggggactgatgggcagagtcgcccctgtggctggactgtgaccatccctgatggggcctgaccgcgggagctgaggaagcgccgctccaccgtctgccctccaaggacccgcatggaggcagtgggctggcagcttcctgctgctccctgtcagagtcaaagcacaaatcctcaggacgggctcaagggccagggcagccgagggaagctccaggtggggaccacgtcttcctgaggttggtgcccactggctgggaccctttgcagtggggtggcctcccctctgtctgcctggtggagggagccgtgggcgtggggacgtgactgaataaagccaccatgggtggatgtgcttgga

SEQ ID NO: 321917 - DNA, 2294 bp, Homo sapiens
ggcccgcgggccggaacagccgcggcaagtggcggcggcggcagcggcagcggaggcagctgaggcggcggcggcgagtgggggtccgggcggcggcggcgggcccggcggcgggccgaggagccgggcgcaatggagcggaagagcccgagcgggaagaagttccgcagcaagccgcagctggcgcgctacctgggcggctccatggacctgagcaccttcgacttccgcacgggcaagatgctgatgagcaagatgaacaagagccgccagcgcgtgcgctacgactcctccaaccaggtcaagggcaagcccgacctgaacacggcgctgcccgtgcgccagacggcgtccatcttcaagcagccggtgaccaagattaccaaccaccccagcaacaaggtcaagagcgacccgcagaaggcggtggaccagccgcgccagctcttctgggagaagaagctgagcggcctgaacgccttcgacattgctgaggagctggtcaagaccatggacctccccaagggcctgcagggggtgggacctggctgcacggatgagacgctgctgtcggccatcgccagcgccctgcacactagcaccatgcccatcacgggacagctctcggccgccgtggagaagaaccccggcgtatggctcaacaccacgcagcccctgtgcaaagccttcatggtgaccgacgaggacatcaggaagcaggaagagctggtgcagcaggtgcggaagcggctggaggaggcgctgatggccgacatgctggcgcacgtggaggagctggcccgtgacggggaggcgccgctggacaaggcctgcgctgaggacgacgacgaggaagacgaggaggaggaggaggaggagcccgacccggacccggagatggagcacgtctagggcagaggccctgccgagagcccgtgctgcctgctggagccgcctgcagacgcggtcctcggccccacgtgaaccaggctcggcggcgaagcccagccttggagacacccaggaggaaggccgtgctcctggctccctcctcggcccgtccccacttcccggggcctcggggcacacagctggggctgcccccacccgaaagaccctccacgctcgtcctctacagagtccggcttcgggaagtgccgggtgctcctgggccctgcctggctccctacgacctttgggctcgaggccagctcctccccatgcccgctgtcccagctccttgagactggagagcagccagcaggtgcccggcagctcggcgccacggcttgctgacagctgggagggtttctcggtctggaggcgtagttttgaaactcacatcaccgtgcctgagtggcgtgcccaggaggccgctctccttcagtaaatgtaacacagtcgaggcacgtcatcgggcagccttccctgtgtgccaacgccagccttcgcttctgaaaaccaaactccagccgctgccagtcgggacttggtcgcccggcgctgccagaatgctccactgccagccggcccccctgcctcggtttcccttctgtttagtggcgacacaggcacccagctttggggtggtgctgacgctcccaggggtgccaggagccactgggacagggtgaggctcccagacgctcctcgaggtgcccagctctccagggagcttctggcccaaggccgtctgagggatctgctccttaaccccccagtgccttggcgagggcaggttccaagccacagacgcctgccccgagtggactctgcggccagtccctggtgccctcctggccctgctgcccagtgagggctcctacgggtgggttcattggcctgggcccagcgagcccccacctgcattgaccttaggcccatagagagggcctgtcccggtgctgccccagccaggatctggtcgctgccccagggggactgatgggcagagtcgcccctgtggctggactgtgaccatccctgatggggcctgaccgcgggagctgaggaagcgccgctccaccgtctgccctccaaggacccgcatggaggcagtgggctggcagcttcctgctgctccctgtcagagtcaaagcacaaatcctcaggacgggctcaagggccagggcagccgagggaagctccaggtggggaccacgtcttcctgaggttggtgcccactggctgggaccctttgcagtggggtggcctcccctctgtctgcctggtggagggagccgtgggcgtggggacgtgactgaataaagccaccatgggtggatgtgcttgga

SEQ ID NO: 321918 - DNA, 1499 bp, Homo sapiens
ggcccgcgggccggaacagccgcggcaagtggcggcggcggcagcggcagcggagcctgcagacgcggtcctcggccccacgtgaaccaggctcggcggcgaagcccagccttggagacacccaggaggaaggccgtgctcctggctccctcctcggcccgtccccacttcccggggcctcggggcacacagctggggctgcccccacccgaaagaccctccacgctcgtcctctacagagtccggcttcgggaagtgccgggtgctcctgggccctgcctggctccctacgacctttgggctcgaggccagctcctccccatgcccgctgtcccagctccttgagactggagagcagccagcaggtgcccggcagctcggcgccacggcttgctgacagctgggagggtttctcggtctggaggcgtagttttgaaactcacatcacccactgtgcagcgtgaggacgggactctggtctgctgtggggggcatgcaggacggcgccactctctgccctgccatgcggctggtggtgccacagagcctcaccgtgcctgagtggcgtgcccaggaggccgctctccttcagtaaatgtaacacagtcgaggcacgtcatcgggcagccttccctgtgtgccaacgccagccttcgcttctgaaaaccaaactccagccgctgccagtcgggacttggtcgcccggcgctgccagaatgctccactgccagccggcccccctgcctcggtttcccttctgtttagtggcgacacaggcacccagctttggggtggtgctgacgctcccaggggtgccaggagccactgggacagggtgaggctcccagacgctcctcgaggtgcccagctctccagggagcttctggcccaaggccgtctgagggatctgctccttaaccccccagtgccttggcgagggcaggttccaagccacagacgcctgccccgagtggactctgcggccagtccctggtgccctcctggccctgctgcccagtgagggctcctacgggtgggttcattggcctgggcccagcgagcccccacctgcattgaccttaggcccatagagagggcctgtcccggtgctgccccagccaggatctggtcgctgccccagggggactgatgggcagagtcgcccctgtggctggactgtgaccatccctgatggggcctgaccgcgggagctgaggaagcgccgctccaccgtctgccctccaaggacccgcatggaggcagtgggctggcagcttcctgctgctccctgtcagagtcaaagcacaaatcctcaggacgggctcaagggccagggcagccgagggaagctccaggtggggaccacgtcttcctgaggttggtgcccactggctgggaccctttgcagtggggtggcctcccctctgtctgcctggtggagggagccgtgggcgtggggacgtgactgaataaagccaccatgggtggatgtgcttgga

SEQ ID NO: 321919 - DNA, 1374 bp, Homo sapiens
taggctaggtacgaggctggtttgaatcggcagaggctcgtgcttcccggggcctcggggcacacagctggggctgcccccacccgaaagaccctccacgctcgtcctctacagagtccggcttcgggaagtgccgggtgctcctgggccctgcctggctccctacgacctttgggctcgaggccagctcctccccatgcccgctgtcccagctccttgagactggagagcagccagcaggtgcccggcagctcggcgccacggcttgctgacagctgggagggtttctcggtctggaggcgtagttttgaaactcacatcacccactgtgcagcgtgaggacgggactctggtctgctgtggggggcatgcaggacggcgccactctctgccctgccatgcggctggtggtgccacagagcctcaccgtgcctgagtggcgtgcccaggaggccgctctccttcagtaaatgtaacacagtcgaggcacgtcatcgggcagccttccctgtgtgccaacgccagccttcgcttctgaaaaccaaactccagccgctgccagtcgggacttggtcgcccggcgctgccagaatgctccactgccagccggcccccctgcctcggtttcccttctgtttagtggcgacacaggcacccagctttggggtggtgctgacgctcccaggggtgccaggagccactgggacagggtgaggctcccagacgctcctcgaggtgcccagctctccagggagcttctggcccaaggccgtctgagggatctgctccttaaccccccagtgccttggcgagggcaggttccaagccacagacgcctgccccgagtggactctgcggccagtccctggtgccctcctggccctgctgcccagtgagggctcctacgggtgggttcattggcctgggcccagcgagcccccacctgcattgaccttaggcccatagagagggcctgtcccggtgctgccccagccaggatctggtcgctgccccagggggactgatgggcagagtcgcccctgtggctggactgtgaccatccctgatggggcctgaccgcgggagctgaggaagcgccgctccaccgtctgccctccaaggacccgcatggaggcagtgggctggcagcttcctgctgctccctgtcagagtcaaagcacaaatcctcaggacgggctcaagggccagggcagccgagggaagctccaggtggggaccacgtcttcctgaggttggtgcccactggctgggaccctttgcagtggggtggcctcccctctgtctgcctggtggagggagccgtgggcgtggggacgtgactgaataaagccaccatgggtggatgtgcttgga

SEQ ID NO: 321920 - DNA, 2962 bp, Homo sapiens
ggcccgcgggccggaacagccgcggcaagtggcggcggcggcagcggcagcggaggcagctgaggcggcggcggcgagtgggggtccgggcggcggcggcgggcccggcggcgggccgaggagccgggcgcaatggagcggaagagcccgagcgggaagaagttccgcagcaagccgcagctggcgcgctacctgggcggctccatggacctgagcaccttcgacttccgcacgggcaagatgctgatgagcaagatgaacaagagccgccagcgcgtgcgctacgactcctccaaccaggtcaagggcaagcccgacctgaacacggcgctgcccgtgcgccagacggcgtccatcttcaagcagccggtgaccaagattaccaaccaccccagcaacaaggtcaagagcgacccgcagaaggcggtggaccagccgcgccagctcttctgggagaagaagctgagcggcctgaacgccttcgacattgctgaggagctggtcaagaccatggacctccccaagggcctgcagggggtgggacctggctgcacggatgagacgctgctgtcggccatcgccagcgccctgcacactagcaccatgcccatcacgggacagctctcggccgccgtggagaagaaccccggcgtatggctcaacaccacgcagcccctgtgcaaagccttcatggtgaccgacgaggacatcaggaagcaggaagagctggtgcagcaggtgcggaagcggctggaggaggcgctgatggccgacatgctggcgcacgtggaggagctggcccgtgacggggaggcgccgctggacaaggcctgcgctgaggacgacgacgaggaagacgaggaggaggaggaggaggagcccgacccggacccggagatggagcacgtctagggcagaggccctgccgagagcccgtgctgcctgctggagccgcctgcagacgcggtcctcggccccacgtgaaccaggctcggcggcgaagcccagccttggagacacccaggaggaaggccgtgctcctggctccctcctcggcccgtccccacttcccggggcctcggggcacacagctggggctgcccccacccgaaagaccctccacgctcgtcctctacagagtccggcttcgggaagtgccgggtgctcctgggccctgcctggctccctacgacctttgggctcgaggccagctcctccccatgcccgctgtcccagctccttgagactggagagcagccagcaggtgcccggcagctcggcgccacggcttgctgacagctgggagggtttctcggtctggaggcgtagttttgaaactcacatcacccactgtgcagcgtgaggacgggactctggtctgctgtggggggcatgcaggacggcgccactctctgccctgccatgcggctggtggtgccacagagcctcaccgtgcctgagtggcgtgcccaggaggccgctctccttcagtaaatgtaacacagtcgaggcacgtcatcgggcagccttccctgtgtgccaacgccagccttcgcttctgaaaaccaaactccagccgctgccagtcgggacttggtcgcccggcgctgccagaatgctccactgccagccggcccccctgcctcggtttcccttctgtttagtggcgacacaggcacccagctttggggtggtgctgacgctcccaggggtgccaggagccactgggacagggtgaggctcccagacgctcctcgaggtgcccagctctccagggagcttctggcccaaggccgtctgagggatctgctccttaaccccccagtgccttggcgagggcaggttccaagccacagacgcctgccccgagtggactctgcggccagtccctggtgccctcctggccctgctgcccagtgagggctcctacgggtgggttcattggcctgggcccagcgagcccccacctgcattgaccttaggcccatagagagggcctgtcccggtgctgccccagccaggatctggtcgctgccccagggggactgatgggcagagtcgcccctgtggctggactgtgaccatccctgatggggcctgaccgcgggagctgaggaagcgccgctccaccgtctgccctccaaggacccgcatggaggcagtgggctggcagcttcctgctgctccctgtcagagtcaaagcacaaatcctcaggacgggctcaagggccagggcagccgagggaagctccaggtggggaccacgtcttcctgaggttggtgcccactggctgggaccctttgcagtggggtggcctcccctctgtctgcctggtggagggagccgtgggcgtggggacgtgactgaataaagccaccatgggtggatgtgcttggaaaaaaaaaaaaaaaaaaaaaaaaaaacaaaaaaaaaaaaaaaaaaaaaaaagggggcgcaaagaaagattctcccacgggggcccacaatatttactgtgtaaccccacgttatttttgtaacaagcaggggcccccatataagggaggccttcgcctaaacatagcagtcgagagacttggcaggcactaatttaaaacacacgacgtgagatggggaaccacggtagcctaggtcgagaggaccatcggagagaggcaccataaccttcgttgcggggtgggaacaatctggcgccacccagcctcaccgcgcgaagatatattaaagctccgacaggaaacaatacacacccatgcggcggcattcatcgtgtagtaacaacacggcgaccatatcgtctgggacagaaaaattggtccccggcgatattattggacaaaatttcgccgcaccgatcaaaaaagacgaacaagcgccgcacagaaccacaaaacgagacgcgcacaccgaacacaaaacgaagccaggctgagagtgcaccaacgacaataacaaacgaac

SEQ ID NO: 321921 - DNA, 1204 bp, Homo sapiens
aaggcttagtacgaggctggtgttgaatcggcaccgaggcagctccttgagactggagagcagccagcaggtgcccggcagctcggcgccacggcttgctgacagctgggagggtttctcggtctggaggcgtagttttgaaactcacatcacccactgtgcagcgtgaggacgggactctggtctgctgtggggggcatgcaggacggcgccactctctgccctgccatgcggctggtggtgccacagagcctcaccgtgcctgagtggcgtgcccaggaggccgctctccttcagtaaatgtaacacagtcgaggcacgtcatcgggcagccttccctgtgtgccaacgccagccttcgcttctgaaaaccaaactccagccgctgccagtcgggacttggtcgcccggcgctgccagaatgctccactgccagccggcccccctgcctcggtttcccttctgtttagtggcgacacaggcacccagctttggggtggtgctgacgctcccaggggtgccaggagccactgggacagggtgaggctcccagacgctcctcgaggtgcccagctctccagggagcttctggcccaaggccgtctgagggatctgctccttaaccccccagtgccttggcgagggcaggttccaagccacagacgcctgccccgagtggactctgcggccagtccctggtgccctcctggccctgctgcccagtgagggctcctacgggtgggttcattggcctgggcccagcgagcccccacctgcattgaccttaggcccatagagagggcctgtcccggtgctgccccagccaggatctggtcgctgccccagggggactgatgggcagagtcgcccctgtggctggactgtgaccatccctgatggggcctgaccgcgggagctgaggaagcgccgctccaccgtctgccctccaaggacccgcatggaggcagtgggctggcagcttcctgctgctccctgtcagagtcaaagcacaaatcctcaggacgggctcaagggccagggcagccgagggaagctccaggtggggaccacgtcttcctgaggttggtgcccactggctgggaccctttgcagtggggtggcctcccctctgtctgcctggtggagggagccgtgggcgtggggacgtgactgaataaagccaccatgggtggatgtgcttgga

SEQ ID NO: 321922 - DNA, 1530 bp, Homo sapiens
ggcccgcgggccggaacagccgcggcaagtggcggcggcggcagcggcagcggaggcagctgaggcggcggcggcgagtgggggtccgggcggcggcggcgggcccggcggcgggccgaggagccgggcgcaatggagcggaagagcccgagcgggaagaagttccgcagcaagccgcagctggcgcgctacctgggcggctccatggacctgagcaccttcgacttccgcacgggcaagatgctgatgagcaagatgaacaagagccgccagcgcgtgcgctacgactcctccaaccaggtcaagggcaagcccgacctgaacacggcgctgcccgtgcgccagacggcgtccatcttcaagcagccggtgaccaagattaccaaccaccccagcaacaaggtcaagagcgacccgcagaaggcggtggaccagccgcgccagctcttctgggagaagaagctgagcggcctgaacgccttcgacattgctgaggagctggtcaagaccatggacctccccaagggcctgcagggggtgggacctggctgcacggatgagacgctgctgtcggccatcgccagcgccctgcacactagcaccatgcccatcacgggacagctctcggccgccgtggagaagaaccccggcgtatggctcaacaccacgcagcccctgtgcaaagccttcatggtgaccgacgaggacatcaggaagcaggaagagctggtgcagcaggtgcggaagcggctggaggaggcgctgatggccgacatgctggcgcacgtggaggagctggcccgtgacggggaggcgccgctggacaaggcctgcgctgaggacgacgacgaggaagacgaggaggaggaggaggaggagcccgacccggacccggagatggagcacgtctagggcagaggccctgccgagagcccgtgctgcctgctggagccgcctgcagacgcggtcctcggccccacgtgaaccaggctcggcggcgaagcccagccttggagacacccaggaggaaggccgtgctcctggctccctcctcggcccgtccccacttcccggggcctcggggcacacagctggggctgcccccacccgaaagaccctccacgctcgtcctctacagagtccggcttcgggaagtgccgggtgctcctgggccctgcctggctccctacgacctttgggctcgaggccagctcctccccatgcccgctgtcccagctccttgagactggagagcagccagcaggtgcccggcagctcggcgccacggcttgctgacagctgggagggtttctcggtctggaggcgtagttttgaaactcacatcacccactgtgcagcgtgaggacgggactctggtctgctgtggggggcatgcaggacggcgccactctctgccctgccatgcggctggtggtgccacagagcctcaccgtgcctgagtggcgtgcccaggagccgtgggcgtggggacgtgactgaataaagccaccatgggtggatgtgcttgga

SEQ ID NO: 321923 - DNA, 389 bp, Homo sapiens
cccaagttggggttccttccaagaaggtggcagctcccattcttggggcatttccgtggcctgtctgggccacagctgccccgtggtgacctctccacttgcggctgtttgtccactgcctggcaggggtgggacctggctgcacggatgagacgctgctgtcggccatcgccagcgccctgcacactagcaccatgcccatcacgggacagctctcggccgccgtggagaagaaccccggcgtatggctcaacaccacgcagcccctgtgcaaagccttcatggtgaccgacgaggacatcaggtagccccttggcctggtcccctgctgctccaccctgtctcttgtggccgtggggaccctgagtgtccccgtgtgcctgcgtgct

SEQ ID NO: 321924 - DNA, 346 bp, Homo sapiens
atggggcctgaccgcgggagctgaggaagcgccgctccaccgtctgccctccaaggacccgcatggaggcagtgggctggcagcttcctgctgctccctgtcagagtcaaagcacaaatcctcaggacgggctcaagggccagggcagccgagggaagctccaggtggggaccacgtcttcctgaggttggtgcccactggctgggaccctttgcagtggggtggcctcccctctgtctgcctggtggagggagccgtgggcgtggggacgtgactgaataaagccaccatgggtggatgtgcttggagcctggagttcggtgcgtccgctagactttggtgccca

SEQ ID NO: 321925 - DNA, 2458 bp, Homo sapiens
  misc_feature (1)..(1): n is a, c, g, or t
naacgatacgtctaggtacgaggctggttatggctggcggagtgggggtccgggcggcggcggcgggcccggcggcgggccgaggagccgggcgcaatggagcggaagaggtgggagtgcccggcgctcccgcagggctgggagagggaagaagtgcccagaaggtcggggctgtcggccggccacagggatgtcttttactatagcccgagcgggaagaagttccgcagcaagccgcagctggcgcgctacctgggcggctccatggacctgagcaccttcgacttccgcacgggcaagatgctgatgagcaagatgaacaagagccgccagcgcgtgcgctacgactcctccaaccaggtcaagggcaagcccgacctgaacacggcgctgcccgtgcgccagacggcgtccatcttcaagcagccggtgaccaagattaccaaccaccccagcaacaaggtcaagagcgacccgcagaaggcggtggaccagccgcgccagctcttctgggagaagaagctgagcggcctgaacgccttcgacattgctgaggagctggtcaagaccatggacctccccaagggcctgcagggggtgggacctggctgcacggatgagacgctgctgtcggccatcgccagcgccctgcacactagcaccatgcccatcacgggacagctctcggccgccgtggagaagaaccccggcgtatggctcaacaccacgcagcccctgtgcaaagccttcatggtgaccgacgaggacatcaggaagcaggaagagctggtgcagcaggtgcggaagcggctggaggaggcgctgatggccgacatgctggcgcacgtggaggagctggcccgtgacggggaggcgccgctggacaaggcctgcgctgaggacgacgacgaggaagacgaggaggaggaggaggaggagcccgacccggacccggagatggagcacgtctagggcagaggccctgccgagagcccgtgctgcctgctggagccgcctgcagacgcggtcctcggccccacgtgaaccaggctcggcggcgaagcccagccttggagacacccaggaggaaggccgtgctcctggctccctcctcggcccgtccccacttcccggggcctcggggcacacagctggggctgcccccacccgaaagaccctccacgctcgtcctctacagagtccggcttcgggaagtgccgggtgctcctgggccctgcctggctccctacgacctttgggctcgaggccagctcctccccatgcccgctgtcccagctccttgagactggagagcagccagcaggtgcccggcagctcggcgccacggcttgctgacagctgggagggtttctcggtctggaggcgtagttttgaaactcacatcacccactgtgcagcgtgaggacgggactctggtctgctgtggggggcatgcaggacggcgccactctctgccctgccatgcggctggtggtgccacagagcctcaccgtgcctgagtggcgtgcccaggaggccgctctccttcagtaaatgtaacacagtcgaggcacgtcatcgggcagccttccctgtgtgccaacgccagccttcgcttctgaaaaccaaactccagccgctgccagtcgggacttggtcgcccggcgctgccagaatgctccactgccagccggcccccctgcctcggtttcccttctgtttagtggcgacacaggcacccagctttggggtggtgctgacgctcccaggggtgccaggagccactgggacagggtgaggctcccagacgctcctcgaggtgcccagctctccagggagcttctggcccaaggccgtctgagggatctgctccttaaccccccagtgccttggcgagggcaggttccaagccacagacgcctgccccgagtggactctgcggccagtccctggtgccctcctggccctgctgcccagtgagggctcctacgggtgggttcattggcctgggcccagcgagcccccacctgcattgaccttaggcccatagagagggcctgtcccggtgctgccccagccaggatctggtcgctgccccagggggactgatgggcagagtcgcccctgtggctggactgtgaccatccctgatggggcctgaccgcgggagctgaggaagcgccgctccaccgtctgccctccaaggacccgcatggaggcagtgggctggcagcttcctgctgctccctgtcagagtcaaagcacaaatcctcaggacgggctcaagggccagggcagccgagggaagctccaggtggggaccacgtcttcctgaggttggtgcccactggctgggaccctttgcagtggggtggcctcccctctgtctgcctggtggagggagccgtgggcgtggggacgtgactgaataaagccaccatgggtggatgtgcttgga

SEQ ID NO: 321926 - DNA, 2418 bp, Homo sapiens
  misc_feature (42)..(42): n is a, c, g, or t
  misc_feature (64)..(64): n is a, c, g, or t
  misc_feature (69)..(69): n is a, c, g, or t
gtgaatatagaaaagtttgtaaaaaaaaaggctggtaaggtncggaattcccgggatgcggcanggcangaaagggcagctgaggcggcggcggcgagtgggggtccgggcggcggcggcgggcccggcggcgggccgaggagccgggcgcaatggagcggaagagcccgagcgggaagaagttccgcagcaagccgcagctggcgcgctacctgggcggctccatggacctgagcaccttcgacttccgcacgggcaagatgctgatgagcaagatgaacaagagccgccagcgcgtgcgctacgactcctccaaccaggtcaagggcaagcccgacctgaacacggcgctgcccgtgcgccagacggcgtccatcttcaagcagccggtgaccaagattaccaaccaccccagcaacaaggtcaagagcgacccgcagaaggcggtggaccagccgcgccagctcttctgggagaagaagctgagcggcctgaacgccttcgacattgctgaggagctggtcaagaccatggacctccccaagggcctgcagggggtgggacctggctgcacggatgagacgctgctgtcggccatcgccagcgccctgcacactagcaccatgcccatcacgggacagctctcggccgccgtggagaagaaccccggcgtatggctcaacaccacgcagcccctgtgcaaagccttcatggtgaccgacgaggacatcaggaagcaggaagagctggtgcagcaggtgcggaagcggctggaggaggcgctgatggccgacatgctggcgcacgtggaggagctggcccgtgacggggaggcgccgctggacaaggcctgcgctgaggacgacgacgaggaagacgaggaggaggaggaggaggagcccgacccggacccggagatggagcacgtctagggcagaggccctgccgagagcccgtgctgcctgctggagccgcctgcagacgcggtcctcggccccacgtgaaccaggctcggcggcgaagcccagccttggagacacccaggaggaaggccgtgctcctggctccctcctcggcccgtccccacttcccggggcctcggggcacacagctggggctgcccccacccgaaagaccctccacgctcgtcctctacagagtccggcttcgggaagtgccgggtgctcctgggccctgcctggctccctacgacctttgggctcgaggccagctcctccccatgcccgctgtcccagctccttgagactggagagcagccagcaggtgcccggcagctcggcgccacggcttgctgacagctgggagggtttctcggtctggaggcgtagttttgaaactcacatcacccactgtgcagcgtgaggacgggactctggtctgctgtggggggcatgcaggacggcgccactctctgccctgccatgcggctggtggtgccacagagcctcaccgtgcctgagtggcgtgcccaggaggccgctctccttcagtaaatgtaacacagtcgaggcacgtcatcgggcagccttccctgtgtgccaacgccagccttcgcttctgaaaaccaaactccagccgctgccagtcgggacttggtcgcccggcgctgccagaatgctccactgccagccggcccccctgcctcggtttcccttctgtttagtggcgacacaggcacccagctttggggtggtgctgacgctcccaggggtgccaggagccactgggacagggtgaggctcccagacgctcctcgaggtgcccagctctccagggagcttctggcccaaggccgtctgagggatctgctccttaaccccccagtgccttggcgagggcaggttccaagccacagacgcctgccccgagtggactctgcggccagtccctggtgccctcctggccctgctgcccagtgagggctcctacgggtgggttcattggcctgggcccagcgagcccccacctgcattgaccttaggcccatagagagggcctgtcccggtgctgccccagccaggatctggtcgctgccccagggggactgatgggcagagtcgcccctgtggctggactgtgaccatccctgatggggcctgaccgcgggagctgaggaagcgccgctccaccgtctgccctccaaggacccgcatggaggcagtgggctggcagcttcctgctgctccctgtcagagtcaaagcacaaatcctcaggacgggctcaagggccagggcagccgagggaagctccaggtggggaccacgtcttcctgaggttggtgcccactggctgggaccctttgcagtggggtggcctcccctctgtctgcctggtggagggagccgtgggcgtggggacgtgactgaataaagccaccatgggtggatgtgcttgga

SEQ ID NO: 321927 - DNA, 2362 bp, Homo sapiens
  misc_feature (1)..(1): n is a, c, g, or t
naacgatacgtctaggtacgaggctggttatggctggcggagtgggggtccgggcggcggcggcgggcccggcggcgggccgaggagccgggcgcaatggagcggaagagcccgagcgggaagaagttccgcagcaagccgcagctggcgcgctacctgggcggctccatggacctgagcaccttcgacttccgcacgggcaagatgctgatgagcaagatgaacaagagccgccagcgcgtgcgctacgactcctccaaccaggtcaagggcaagcccgacctgaacacggcgctgcccgtgcgccagacggcgtccatcttcaagcagccggtgaccaagattaccaaccaccccagcaacaaggtcaagagcgacccgcagaaggcggtggaccagccgcgccagctcttctgggagaagaagctgagcggcctgaacgccttcgacattgctgaggagctggtcaagaccatggacctccccaagggcctgcagggggtgggacctggctgcacggatgagacgctgctgtcggccatcgccagcgccctgcacactagcaccatgcccatcacgggacagctctcggccgccgtggagaagaaccccggcgtatggctcaacaccacgcagcccctgtgcaaagccttcatggtgaccgacgaggacatcaggaagcaggaagagctggtgcagcaggtgcggaagcggctggaggaggcgctgatggccgacatgctggcgcacgtggaggagctggcccgtgacggggaggcgccgctggacaaggcctgcgctgaggacgacgacgaggaagacgaggaggaggaggaggaggagcccgacccggacccggagatggagcacgtctagggcagaggccctgccgagagcccgtgctgcctgctggagccgcctgcagacgcggtcctcggccccacgtgaaccaggctcggcggcgaagcccagccttggagacacccaggaggaaggccgtgctcctggctccctcctcggcccgtccccacttcccggggcctcggggcacacagctggggctgcccccacccgaaagaccctccacgctcgtcctctacagagtccggcttcgggaagtgccgggtgctcctgggccctgcctggctccctacgacctttgggctcgaggccagctcctccccatgcccgctgtcccagctccttgagactggagagcagccagcaggtgcccggcagctcggcgccacggcttgctgacagctgggagggtttctcggtctggaggcgtagttttgaaactcacatcacccactgtgcagcgtgaggacgggactctggtctgctgtggggggcatgcaggacggcgccactctctgccctgccatgcggctggtggtgccacagagcctcaccgtgcctgagtggcgtgcccaggaggccgctctccttcagtaaatgtaacacagtcgaggcacgtcatcgggcagccttccctgtgtgccaacgccagccttcgcttctgaaaaccaaactccagccgctgccagtcgggacttggtcgcccggcgctgccagaatgctccactgccagccggcccccctgcctcggtttcccttctgtttagtggcgacacaggcacccagctttggggtggtgctgacgctcccaggggtgccaggagccactgggacagggtgaggctcccagacgctcctcgaggtgcccagctctccagggagcttctggcccaaggccgtctgagggatctgctccttaaccccccagtgccttggcgagggcaggttccaagccacagacgcctgccccgagtggactctgcggccagtccctggtgccctcctggccctgctgcccagtgagggctcctacgggtgggttcattggcctgggcccagcgagcccccacctgcattgaccttaggcccatagagagggcctgtcccggtgctgccccagccaggatctggtcgctgccccagggggactgatgggcagagtcgcccctgtggctggactgtgaccatccctgatggggcctgaccgcgggagctgaggaagcgccgctccaccgtctgccctccaaggacccgcatggaggcagtgggctggcagcttcctgctgctccctgtcagagtcaaagcacaaatcctcaggacgggctcaagggccagggcagccgagggaagctccaggtggggaccacgtcttcctgaggttggtgcccactggctgggaccctttgcagtggggtggcctcccctctgtctgcctggtggagggagccgtgggcgtggggacgtgactgaataaagccaccatgggtggatgtgcttgga

SEQ ID NO: 321928 - DNA, 2645 bp, Homo sapiens
ggtgctctgggtctggctggcgcccagatctaggggccagttgtggggtgctggggtctgggatgaaggtctggggtcacgccagggttggggtctggggctggggccagggcctgcctgggtttggggtcagggccgtgttggggtctggggctggggtcgcgacctgaagctggggctgggactgggtttgggtctgcggccgaggcctgggtttggggtctggggtccgcccggggcgccgaccgtcccgcctccccgcagccccgagcgggaagaagttccgcagcaagccgcagctggcgcgctacctgggcggctccatggacctgagcaccttcgacttccgcacgggcaagatgctgatgagcaagatgaacaagagccgccagcgcgtgcgctacgactcctccaaccaggtcaagggcaagcccgacctgaacacggcgctgcccgtgcgccagacggcgtccatcttcaagcagccggtgaccaagattaccaaccaccccagcaacaaggtcaagagcgacccgcagaaggcggtggaccagccgcgccagagtctcgctctgtcacccaggctggagtgcagtggcaggatcttaactcactacaacctctgcctcctggtttcaactgggttcaagtgatccttccacctcagcctcacaagtagctgggatttcagctcttctgggagaagaagctgagcggcctgaacgccttcgacattgctgaggagctggtcaagaccatggacctccccaagggcctgcagggggtgggacctggctgcacggatgagacgctgctgtcggccatcgccagcgccctgcacactagcaccatgcccatcacgggacagctctcggccgccgtggagaagaaccccggcgtatggctcaacaccacgcagcccctgtgcaaagccttcatggtgaccgacgaggacatcaggaagcaggaagagctggtgcagcaggtgcggaagcggctggaggaggcgctgatggccgacatgctggcgcacgtggaggagctggcccgtgacggggaggcgccgctggacaaggcctgcgctgaggacgacgacgaggaagacgaggaggaggaggaggaggagcccgacccggacccggagatggagcacgtctagggcagaggccctgccgagagcccgtgctgcctgctggagccgcctgcagacgcggtcctcggccccacgtgaaccaggctcggcggcgaagcccagccttggagacacccaggaggaaggccgtgctcctggctccctcctcggcccgtccccacttcccggggcctcggggcacacagctggggctgcccccacccgaaagaccctccacgctcgtcctctacagagtccggcttcgggaagtgccgggtgctcctgggccctgcctggctccctacgacctttgggctcgaggccagctcctccccatgcccgctgtcccagctccttgagactggagagcagccagcaggtgcccggcagctcggcgccacggcttgctgacagctgggagggtttctcggtctggaggcgtagttttgaaactcacatcacccactgtgcagcgtgaggacgggactctggtctgctgtggggggcatgcaggacggcgccactctctgccctgccatgcggctggtggtgccacagagcctcaccgtgcctgagtggcgtgcccaggaggccgctctccttcagtaaatgtaacacagtcgaggcacgtcatcgggcagccttccctgtgtgccaacgccagccttcgcttctgaaaaccaaactccagccgctgccagtcgggacttggtcgcccggcgctgccagaatgctccactgccagccggcccccctgcctcggtttcccttctgtttagtggcgacacaggcacccagctttggggtggtgctgacgctcccaggggtgccaggagccactgggacagggtgaggctcccagacgctcctcgaggtgcccagctctccagggagcttctggcccaaggccgtctgagggatctgctccttaaccccccagtgccttggcgagggcaggttccaagccacagacgcctgccccgagtggactctgcggccagtccctggtgccctcctggccctgctgcccagtgagggctcctacgggtgggttcattggcctgggcccagcgagcccccacctgcattgaccttaggcccatagagagggcctgtcccggtgctgccccagccaggatctggtcgctgccccagggggactgatgggcagagtcgcccctgtggctggactgtgaccatccctgatggggcctgaccgcgggagctgaggaagcgccgctccaccgtctgccctccaaggacccgcatggaggcagtgggctggcagcttcctgctgctccctgtcagagtcaaagcacaaatcctcaggacgggctcaagggccagggcagccgagggaagctccaggtggggaccacgtcttcctgaggttggtgcccactggctgggaccctttgcagtggggtggcctcccctctgtctgcctggtggagggagccgtgggcgtggggacgtgactgaataaagccaccatgggtggatgtgcttgga

SEQ ID NO: 321929 - DNA, 2236 bp, Homo sapiens
  misc_feature (13)..(13): n is a, c, g, or t
  misc_feature (16)..(16): n is a, c, g, or t
  misc_feature (19)..(19): n is a, c, g, or t
  misc_feature (28)..(28): n is a, c, g, or t
aggcgtcccaacnagnatnggctaggtnaggccgggtgttaatcggccgaggcccagcaacaaggtcaagagcgacccgcagaaggcggtggaccagccgcgccagctcttctgggagaagaagctgagcggcctgaacgccttcgacattgctgaggagctggtcaagaccatggacctccccaagggcctgcagggggtgggacctggctgcacggatgagacgctgctgtcggccatcgccagcgccctgcacactagcaccatgcccatcacgggacagctctcggccgccgtggagaagaaccccggcgtatggctcaacaccacgcagcccctgtgcaaagccttcatggtgaccgacgaggacatcaggaagcaggaagagctggtgcagcaggtgcggaagcggctggaggaggcgctgatggccgacatgctggcgcacgtggaggagctggcccgtgacggggaggcgccgctggacaaggcctgcgctgaggacgacgacgaggaagacgaggaggaggaggaggaggagcccgacccggacccggagatggagcacgtctagggcaggtgctgcggggccacgggggctccctggagtcgggtcctggcagtggggactgcctggtgaacacagatgtgcttgggatgacgggtgcctcccaagagcttcccatctccctagaagagcccaagcgtccccgtcccgtggagtcgctaaagccagccctccctgtcctttccagaggccctgccgagagcccgtgctgcctgctggagccgcctgcagacgcggtcctcggccccacgtgaaccaggctcggcggcgaagcccagccttggagacacccaggaggaaggccgtgctcctggctccctcctcggcccgtccccacttcccggggcctcggggcacacagctggggctgcccccacccgaaagaccctccacgctcgtcctctacagagtccggcttcgggaagtgccgggtgctcctgggccctgcctggctccctacgacctttgggctcgaggccagctcctccccatgcccgctgtcccagctccttgagactggagagcagccagcaggtgcccggcagctcggcgccacggcttgctgacagctgggagggtttctcggtctggaggcgtagttttgaaactcacatcacccactgtgcagcgtgaggacgggactctggtctgctgtggggggcatgcaggacggcgccactctctgccctgccatgcggctggtggtgccacagagcctcaccgtgcctgagtggcgtgcccaggaggccgctctccttcagtaaatgtaacacagtcgaggcacgtcatcgggcagccttccctgtgtgccaacgccagccttcgcttctgaaaaccaaactccagccgctgccagtcgggacttggtcgcccggcgctgccagaatgctccactgccagccggcccccctgcctcggtttcccttctgtttagtggcgacacaggcacccagctttggggtggtgctgacgctcccaggggtgccaggagccactgggacagggtgaggctcccagacgctcctcgaggtgcccagctctccagggagcttctggcccaaggccgtctgagggatctgctccttaaccccccagtgccttggcgagggcaggttccaagccacagacgcctgccccgagtggactctgcggccagtccctggtgccctcctggccctgctgcccagtgagggctcctacgggtgggttcattggcctgggcccagcgagcccccacctgcattgaccttaggcccatagagagggcctgtcccggtgctgccccagccaggatctggtcgctgccccagggggactgatgggcagagtcgcccctgtggctggactgtgaccatccctgatggggcctgaccgcgggagctgaggaagcgccgctccaccgtctgccctccaaggacccgcatggaggcagtgggctggcagcttcctgctgctccctgtcagagtcaaagcacaaatcctcaggacgggctcaagggccagggcagccgagggaagctccaggtggggaccacgtcttcctgaggttggtgcccactggctgggaccctttgcagtggggtggcctcccctctgtctgcctggtggagggagccgtgggcgtggggacgtgactgaataaagccaccatgggtggatgtgcttgga

SEQ ID NO: 321930 - DNA, 2072 bp, Homo sapiens
  misc_feature (13)..(13): n is a, c, g, or t
  misc_feature (16)..(16): n is a, c, g, or t
  misc_feature (19)..(19): n is a, c, g, or t
  misc_feature (28)..(28): n is a, c, g, or t
aggcgtcccaacnagnatnggctaggtnaggccgggtgttaatcggccgaggggatgagacgctgctgtcggccatcgccagcgccctgcacactagcaccatgcccatcacgggacagctctcggccgccgtggagaagaaccccggcgtatggctcaacaccacgcagcccctgtgcaaagccttcatggtgaccgacgaggacatcaggaagcaggaagagctggtgcagcaggtgcggaagcggctggaggaggcgctgatggccgacatgctggcgcacgtggaggagctggcccgtgacggggaggcgccgctggacaaggcctgcgctgaggacgacgacgaggaagacgaggaggaggaggaggaggagcccgacccggacccggagatggagcacgtctagggcaggtgctgcggggccacgggggctccctggagtcgggtcctggcagtggggactgcctggtgaacacagatgtgcttgggatgacgggtgcctcccaagagcttcccatctccctagaagagcccaagcgtccccgtcccgtggagtcgctaaagccagccctccctgtcctttccagaggccctgccgagagcccgtgctgcctgctggagccgcctgcagacgcggtcctcggccccacgtgaaccaggctcggcggcgaagcccagccttggagacacccaggaggaaggccgtgctcctggctccctcctcggcccgtccccacttcccggggcctcggggcacacagctggggctgcccccacccgaaagaccctccacgctcgtcctctacagagtccggcttcgggaagtgccgggtgctcctgggccctgcctggctccctacgacctttgggctcgaggccagctcctccccatgcccgctgtcccagctccttgagactggagagcagccagcaggtgcccggcagctcggcgccacggcttgctgacagctgggagggtttctcggtctggaggcgtagttttgaaactcacatcacccactgtgcagcgtgaggacgggactctggtctgctgtggggggcatgcaggacggcgccactctctgccctgccatgcggctggtggtgccacagagcctcaccgtgcctgagtggcgtgcccaggaggccgctctccttcagtaaatgtaacacagtcgaggcacgtcatcgggcagccttccctgtgtgccaacgccagccttcgcttctgaaaaccaaactccagccgctgccagtcgggacttggtcgcccggcgctgccagaatgctccactgccagccggcccccctgcctcggtttcccttctgtttagtggcgacacaggcacccagctttggggtggtgctgacgctcccaggggtgccaggagccactgggacagggtgaggctcccagacgctcctcgaggtgcccagctctccagggagcttctggcccaaggccgtctgagggatctgctccttaaccccccagtgccttggcgagggcaggttccaagccacagacgcctgccccgagtggactctgcggccagtccctggtgccctcctggccctgctgcccagtgagggctcctacgggtgggttcattggcctgggcccagcgagcccccacctgcattgaccttaggcccatagagagggcctgtcccggtgctgccccagccaggatctggtcgctgccccagggggactgatgggcagagtcgcccctgtggctggactgtgaccatccctgatggggcctgaccgcgggagctgaggaagcgccgctccaccgtctgccctccaaggacccgcatggaggcagtgggctggcagcttcctgctgctccctgtcagagtcaaagcacaaatcctcaggacgggctcaagggccagggcagccgagggaagctccaggtggggaccacgtcttcctgaggttggtgcccactggctgggaccctttgcagtggggtggcctcccctctgtctgcctggtggagggagccgtgggcgtggggacgtgactgaataaagccaccatgggtggatgtgcttgga

SEQ ID NO: 321931 - DNA, 1646 bp, Homo sapiens
aacttaggctagtacgagctcgcgtctaattcggccgagggagctggcccgtgacggggaggcgccgctggacaaggcctgcgctgaggacgacgacgaggaagacgaggaggaggaggaggaggagcccgacccggacccggagatggagcacgtctagggcagaggccctgccgagagcccgtgctgcctgctggagccgcctgcagacgcggtcctcggccccacgtgaaccaggctcggcggcgaagcccagccttggagacacccaggaggaaggccgtgctcctggctccctcctcggcccgtccccacttcccggggcctcggggcacacagctggggctgcccccacccgaaagaccctccacgctcgtcctctacagagtccggcttcgggaagtgccgggtgctcctgggccctgcctggctccctacgacctttgggctcgaggccagctcctccccatgcccgctgtcccagctccttgagactggagagcagccagcaggtgcccggcagctcggcgccacggcttgctgacagctgggagggtttctcggtctggaggcgtagttttgaaactcacatcacccactgtgcagcgtgaggacgggactctggtctgctgtggggggcatgcaggacggcgccactctctgccctgccatgcggctggtggtgccacagagcctcaccgtgcctgagtggcgtgcccaggaggccgctctccttcagtaaatgtaacacagtcgaggcacgtcatcgggcagccttccctgtgtgccaacgccagccttcgcttctgaaaaccaaactccagccgctgccagtcgggacttggtcgcccggcgctgccagaatgctccactgccagccggcccccctgcctcggtttcccttctgtttagtggcgacacaggcacccagctttggggtggtgctgacgctcccaggggtgccaggagccactgggacagggtgaggctcccagacgctcctcgaggtgcccagctctccagggagcttctggcccaaggccgtctgagggatctgctccttaaccccccagtgccttggcgagggcaggttccaagccacagacgcctgccccgagtggactctgcggccagtccctggtgccctcctggccctgctgcccagtgagggctcctacgggtgggttcattggcctgggcccagcgagcccccacctgcattgaccttaggcccatagagagggcctgtcccggtgctgccccagccaggatctggtcgctgccccagggggactgatgggcagagtcgcccctgtggctggactgtgaccatccctgatggggcctgaccgcgggagctgaggaagcgccgctccaccgtctgccctccaaggacccgcatggaggcagtgggctggcagcttcctgctgctccctgtcagagtcaaagcacaaatcctcaggacgggctcaagggccagggcagccgagggaagctccaggtggggaccacgtcttcctgaggttggtgcccactggctgggaccctttgcagtggggtggcctcccctctgtctgcctggtggagggagccgtgggcgtggggacgtgactgaataaagccaccatgggtggatgtgcttgga

SEQ ID NO: 321932 - DNA, 2055 bp, Homo sapiens
ggtgctctgggtctggctggcgcccagatctaggggccagttgtggggtgctggggtctgggatgaaggtctggggtcacgccagggttggggtctggggctggggccagggcctgcctgggtttggggtcagggccgtgttggggtctggggctggggtcgcgacctgaagctggggctgggactgggtttgggtctgcggccgaggcctgggtttggggtctggggtccgcccggggcgccgaccgtcccgcctccccgcagccccgagcgggaagaagttccgcagcaagccgcagctggcgcgctacctgggcggctccatggacctgagcaccttcgacttccgcacgggcaagatgctgatgagcaagatgaacaagagccgccagcgcgtgcgctacgactcctccaaccaggtcaagggcaagcccgacctgaacacggcgctgcccgtgcgccagacggcgtccatcttcaagcagccggtgaccaagattaccaaccaccccagcaacaaggtcaagagcgacccgcagaaggcggtggaccagccgcgccagctcttctgggagaagaagctgagcggcctgaacgccttcgacattgctgaggagctggtcaagaccatggacctccccaagggcctgcagggggtgggacctggctgcacggatgagacgctgctgtcggccatcgccagcgccctgcacactagcaccatgcccatcacgggacagctctcggccgccgtggagaagaaccccggcgtatggctcaacaccacgcagcccctgtgcaaagccttcatggtgaccgacgaggacatcaggaagcaggaagagctggtgcagcaggtgcggaagcgctcctccccatgcccgctgtcccagctccttgagactggagagcagccagcaggtgcccggcagctcggcgccacggcttgctgacagctgggagggtttctcggtctggaggcgtagttttgaaactcacatcacccactgtgcagcgtgaggacgggactctggtctgctgtggggggcatgcaggacggcgccactctctgccctgccatgcggctggtggtgccacagagcctcaccgtgcctgagtggcgtgcccaggaggccgctctccttcagtaaatgtaacacagtcgaggcacgtcatcgggcagccttccctgtgtgccaacgccagccttcgcttctgaaaaccaaactccagccgctgccagtcgggacttggtcgcccggcgctgccagaatgctccactgccagccggcccccctgcctcggtttcccttctgtttagtggcgacacaggcacccagctttggggtggtgctgacgctcccaggggtgccaggagccactgggacagggtgaggctcccagacgctcctcgaggtgcccagctctccagggagcttctggcccaaggccgtctgagggatctgctccttaaccccccagtgccttggcgagggcaggttccaagccacagacgcctgccccgagtggactctgcggccagtccctggtgccctcctggccctgctgcccagtgagggctcctacgggtgggttcattggcctgggcccagcgagcccccacctgcattgaccttaggcccatagagagggcctgtcccggtgctgccccagccaggatctggtcgctgccccagggggactgatgggcagagtcgcccctgtggctggactgtgaccatccctgatggggcctgaccgcgggagctgaggaagcgccgctccaccgtctgccctccaaggacccgcatggaggcagtgggctggcagcttcctgctgctccctgtcagagtcaaagcacaaatcctcaggacgggctcaagggccagggcagccgagggaagctccaggtggggaccacgtcttcctgaggttggtgcccactggctgggaccctttgcagtggggtggcctcccctctgtctgcctggtggagggagccgtgggcgtggggacgtgactgaataaagccaccatgggtggatgtgcttgga

SEQ ID NO: 321933 - DNA, 1819 bp, Homo sapiens
ggcccgcgggccggaacagccgcggcaagtggcggcggcggcagcggcagcggaggcagctgaggcggcggcggcgagtgggggtccgggcggcggcggcgggcccggcggcgggccgaggagccgggcgcaatggagcggaagagcccgagcgggaagaagttccgcagcaagccgcagctggcgcgctacctgggcggctccatggacctgagcaccttcgacttccgcacgggcaagatgctgatgagcaagatgaacaagagccgccagcgcgtgcgctacgactcctccaaccaggtcaagggcaagcccgacctgaacacggcgctgcccgtgcgccagacggcgtccatcttcaagcagccggtgaccaagattaccaaccaccccagcaacaaggtcaagagcgacccgcagaaggcggtggaccagccgcgccagctcttctgggagaagaagctgagcggcctgaacgccttcgacattgctgaggagctggtcaagaccatggacctccccaagggcctgcagggggtgggacctggctgcacggatgagacgctgctgtcggccatcgccagcgccctgcacactagcaccatgcccatcacgggacagctctcggccgccgtggagaagaaccccggcgtatggctcaacaccacgcagcccctgtgcaaagccttcatggtgaccgacgaggacatcaggaagcaggaagagctggtgcagcaggtgcggaagcggctggaggaggcgctgatggccgacatgctggcgcacgtggaggagctggcccgtgacggggaggcgccgctggacaaggcctgcgctgaggacgacgacgaggaagacgaggaggaggaggaggaggagcccgacccggacccggagatggagcacgtctagggcagaggccctgccgagagcccgtgctgcctgctggagccgcctgcagacgcggtcctcggccccacgtgaaccaggctcggcggcgaagcccagccttggagacacccaggaggaaggccgtgctcctggctccctcctcggcccgtccccacttcccggggcctcggggcacacagctggggctgcccccacccgaaagaccctccacgctcgtcctctacagagtccggcttcgggaagtgccgggtgctcctgggccctgcctggctccctacgacctttgggctcgaggccagctcctccccatgcccgctgtcccagctccttgagactggagagcagccagcaggtgcccggcagctcggcgccacggcttgctgacagctgggagggtttctcggtctggaggcgtagttttgaaactcacatcacccactgtgcagcgtgaggacgggactctggtctgctgtggggggcatgcaggacggcgccactctctgccctgccatgcggctggtggtgccacagagcctcaccgtgcctgagtggcgtgcccaggaggccgctctccttcagtaaatgtaacacagtcgaggcacgtcatcgggcagccttccctgtgtgccaacgccagccttcgcttctgaaaaccaaactccagccgctgccagtcgggacttggtcgcccggcgctgccagaatgctccactgccagccggcccccctgcctcggtttcccttctgtttagtggcgacacaggcacccggcaggggtgttccaatcacgaacgtggtaaacagcacgaccacgggaacgagaagggaaagacctgccagtcgattctacgaggatccccaattcctcagagaacacgagcggaagatgcaacgtagagaaggcagc

SEQ ID NO: 321934 - DNA, 1173 bp, Homo sapiens
ggtgctctgggtctggctggcgcccagatctaggggccagttgtggggtgctggggtctgggatgaaggtctggggtcacgccagggttggggtctggggctggggccagggcctgcctgggtttggggtcagggccgtgttggggtctggggctggggtcgcgacctgaagctggggctgggactgggtttgggtctgcggccgaggcctgggtttggggtctggggtccgcccggggcgccgaccgtcccgcctccccgcagccccgagcgggaagaagttccgcagcaagccgcagctggcgcgctacctgggcggctccatggacctgagcaccttcgacttccgcacgggcaagatgctgatgagcaagatgaacaagagccgccagcgcgtgcgctacgactcctccaaccaggtcaagggcaagcccgacctgaacacggcgctgcccgtgcgccagacggcgtccatcttcaagcagccggtgaccaagattaccaaccaccccagcaacaaggtcaagagcgacccgcagaaggcggtggaccagccgcgccagctcttctgggagaagaagctgagcggcctgaacgccttcgacattgctgaggagctggtcaagaccatggacctccccaagggcctgcagggggtgggacctggctgcacggatgagacgctgctgtcggccatcgccagcgccctgcacactagcaccatgcccatcacgggacagctctcggccgccgtggagaagaaccccggcgtatggctcaacaccacgcagcccctgtgcaaagccttcatggtgaccgacgaggacatcaggaagcaggaagagctggtgcagcaggtgcggaagcggctggaggaggcgctgatggccgacatgctggcgcacgtggaggagctggcccgtgacggggaggcgccgctggacaaggcctgcgctgaggacgacgacgaggaagacgaggaggaggaggaggaggagcccgacccggacccggagatggagcacgtctagggcagaggccctgccgagagcccgtgctgcctgctggagccgtagtcagatcgagccgcgtagtcagatcgagccgcgtagtcagatcgatccgcgtagtcagatagagccgcgtagtcagatcgaccgctataagatgggg

SEQ ID NO: 321935 - DNA, 4058 bp, Homo sapiens
  misc_feature (2610)..(2610): n is a, c, g, or t
  misc_feature (2653)..(2653): n is a, c, g, or t
  misc_feature (3653)..(3653): n is a, c, g, or t
  misc_feature (3945)..(3945): n is a, c, g, or t
ttttttttaaatagactatttttctagaacagttttaggttcacagcaaaattgagagtaagatatagagatttcccatatatcccctatccccatacatgcatagcctcctccactatcaacatctcccacgagggtgggaaatttttacaactgatgaacctacattgacaaattatcttaacataaagtccacagtttacattagggttcatgcttagtgttgtacattctatgggtttggacaaacgtatgatgacatgataacatgtatcaacccttacagtatcacacagtgaattttcactgcaaaaatcccttatgctatgcctgtttatctctccctccaccaccaacccctggcaaccactgatctctttattgtctccatagttttaccttttttcatacagtatgtagccttttcagattggtttctttcaattaataatatgcatttaaggttctttcatggcttgatagctcattttgtttttggcatttgtttggatttgccagtttatccattcacccactgaacgacaccttacttgctttaaagttttgacagttgtgcataaagctgctgtaacattcatgtactgtaatgttttaatctttaataatattaattaaatttaacagataaaacttatttcagacctgcccttgttccaggtctgattgaagccagcttgctgaggcaccttcagtaggtcatagctcaactgctgctgtggacttcagggggactcaaaagcattaatcaaaatcttccctctctagagtattttacactttaaaaaaatttataccctattttgtcccccaaaacagataattgacttaaagcaattaaaaaaaagaaaaccaaaaacttcccctttcaactgttcttcagctctctgggattgctcagacctaagctgcctttccattgcatcctgtggtcttttactgatttcattggaaggcaggccttttcctaatggtttactttgacacagcaagcttcctcctaagataaattcctctttttctggttgtatttaaaaatgaagtgtattaaattcttcattctgatagttttcctgagggtatgggactaatattttacgtggtggcatataaataaaacctttttacttttttattggagacaagagtcttgctctgttgcccaggctggagtgcaatggcgtgatcttggctcgctgcagcctctgtctcctgggttcaagaaatccttgtgcctcagcctgccaagcagctgggattatcggtatgcaccaccacacccagctaagttttgtatttttagtagagacagggttttaccatgttggtcaggctggtcttgaactcctggtctcaagtgatctgcctgtttcagcctcccaaaatgctgggattataggcatgagccactacacccgatctttcccaggcatttctcttttgttcatttttggtggttgtatgctagagatttagagggaagaatggtgagatagtgtagaaaattatacttgtgtctaaattaatttgtgcattacattacatatgcatttaacacagaaaataatgtaggaagatgagacagtccaaggaagaaagctaaaaaaaaagttacatctctttatgtaggtaataaacaactatgactattttattcttctagcttttctcctacacatatgctcatgtcaccaccaccaccaattatgacaaatcggaatcattccatattattttatattattgctggctgctaagaacaattaacacactaacattttagttaaatttgcatgtgatatttgaagatcatatatttgataaataacttgtatccagaatacatgtagaactcttataataaaagacttaatagcatcttacaataactcaacaataaagagacaactcagttgaaaagataggcaaaggattttgcagagaagatctacaaaaggccaataagcacaggaaaagaagaataacattactagccgtcaaggacatgcaagtcacaccaacaatgagataaccatttcacatgttctaggatggctatcaaaaagacagacaaggatgtggagaaatcggagccctcatacttgctggtgagaatgtaaaatggtacagctgctgtaagaaaacagcctggcagttccccaaaatattcaacatatagttaccatatgactcagcaaatatactcctaggtatatatacccatgagacatgaaaacacacttctaacacagaaacttgtacacagattatcattcataatgtctagaaagtagaatcaactcaaatgtctatcagctaatgaatggattaacaaatatgcctatacattagaatgttaattattcagcagtaaaaagcaatgaagtacagatacgtgctacaacataggtgaaccttgacgacatgctcagagaaagaagccagtcacaaagtactgcacattgtatgatttcatttatgtgaaatgcccagaataggcaaatccatagggacaggaagtagactaacggttgggggatgggaaggttaggggagtagaactcctaatggctgctacgtttctttgaggantgatgaaaatcacttttgattgtgctgatggttgcacaactcnttggatatactaaaaccattgacctacacacttaaatgggtgaattgtatggtatttaaattctatcttaataaagctctttaacaataatatatatttacaaataaaggctgagaatccctaaatctacattttccggttccagtttttaaaacttcaaacaaaatgttaatgtcagcagcactggattggctgtccagaggttctagccctaggacttttcattagccagttgtgtccctggaagcaagacactcatttgtgaaatgagaataatgtatataatttaatcccataatttttaaggtccttttcctgaattttaatatagggcaaaataatgtaacttttttttttttttgagatggagtctcactttgtcgcccaggctggaatacagtggcacaatcttggctcactgcaacctctacattccaggttcaagctagtctcctgcctcagcctcctgagtagctgggattacaggcacacgccaccacgtccagctaattttttgtatttttagtagagacggggtgtcgccatgttggtcaggctggtctcgaactgctgacctgatgatccgcctgccttggcctcccaaagtgctgggattacaggcgtgagccactgcacctagccccaaaataacgtaacttttaaaaaacttgatatttaagtcttaaaagttgtagacatttcggagatactgttacggtcagaggcttagaaatcattgccaggttactttggctgcttattagaatcaccatgggagcttttaaaacatacctgtgcccgggtcataccgccagagagcctgatttaactggtctccagtggtcttccagcatctcactgctctccttcccttgctctccttatcccttgtcttttgcttacatcatgattttaatgtgcaggcaaagttgagagccactggctttgctaatgagcaatgctgtattggcagcatcaaaagtcagtcattttgtttcantttttattacttgataccatatttatcaacttgtgggttggggatggagagggtatataaaacaacaggtagacatataatagaaaatgtctataaaacatttcacaatttaagttgtgcctgcttataacgatttcttacatcagttttagatataaattactggttatataggttcagctttcagcatgtcttaatttgccactggttttatgaattttcctagacttatcattgtaatagaacataatatttcttattattttataatatctatattactaaagtgttntcatttcatttccataggtcataggttttggatctgttaaaattgcagcattcatagctatggtaggaattctgtctattgtggctcaggtgagtatcattttatctatactt

SEQ ID NO: 321936 - DNA, 679 bp, Homo sapiens
ctccatgttttttagtggcttggtagctcatttctttttagtgatagtctggtatgtaccacagtttgtttgtttatttttttgaattttgttgatattttataatttttcattgcaggactcatttatgtagcatgccactaaaagaggcagaaaatttttcctttaacttaaatttgaatttgtcttgatgtttgtttgctttttgtaggttctacatgaaacattttctcaacacacattcctcatgaatggtctcattcaaggtgtaaaggtaagaaaaaatttttatgtggtttgtaatgaaccaaagtcaggaatccttggtagtttaactctggaagttttagtgggactttgggaaacaaatactatttgttctggaggctgaaatctaaatttttagctgggttattaaaagtcactttaaaatacaacacaaatacataaggcatagaatggtttactggcaaatagcagtgtgaatactctataggcctaacttcatttttacttattttttgttttcaagggctcatggaatcagtcttccatgtgacagctttttaaatattttaagacaaaaactgagtcttctaatcttaattgtgttctagcagtagtcattgtaattatagatatttttataatttatttgtttagtggatatctgccactg

SEQ ID NO: 321937 - DNA, 636 bp, Homo sapiens
agtttgacctgtagcggctggagcgtacttatttgtctaccagatataaaagttgaacatgatcactttgaagaatagagtgaatttacctatacggatacgctctgtactgaatatggctttaaagaagttacattatgaattgagagaagtgattttcttaaaaggttctgtaggaatatatttccaggttctgtttataggaagttcgggatctgttcagggattttaatcagtgtgttaacaaagatgagtaagtgtgttttgtgggtttatttttttgcttttttttttagctatatgatttgaaatatatacctctgaaattaagacttgtaacttcctcagaaagatggtgatagaacttccttttattaaccatttgacttttgttattcatcttaatagatcaaaataatgaagctgatgtcccagaacattggcaacattaatgtgtattggcattttaagtgtgttctttctgcttattctcagtcgttgaagaaagttggaaaagattctactgtcttactaatctgcatcaccgtgtttctttcataccttcctgaagctggacagtattcaagtttttttctctatctcaggcaggtgagtagtgagtggctagtagccttt

SEQ ID NO: 321938 - DNA, 2964 bp, Homo sapiens
aggctggtaccggccggagtgtaaggatcaagggccagtcgcgagctacaaggctttggccgaccaagtgtgtaccatgctgctattgtcatcttccttgaattctttgcgtggggcctgttgacaactccaatgttgactgttctacatgaaacattttctcaacacacattcctcatgaatggtctcattcaaggtgtaaagggcctgctctcttttttgagtgccccactcattggtgccctgtctgatgtgtgggggaggaagccctttctcctcggcactgtattctttacctgcttcccaatcccactgatgaggatcagcccatggtggtattttgcgatgatttctgtgtctggagtcttctcggtcacgttttctgttatatttgcctatgtagctgatgtcactcaggagcacgagcgaagtacagcttatggatgggtctcagccacctttgcggctagtcttgtcagcagcccggccattggagcatatctttctgccagttacggagacagcctcgttgtgctggtggccacagtggtggctcttctggacatctgcttcatcttagtggctgttccagaatctctgcctgagaaaatgagaccggtttcctggggagctcagatttcttggaaacaagcagacccttttgcgtcgttgaagaaagttggaaaagattctactgtcttactaatctgcatcaccgtgtttctttcataccttcctgaagctggacagtattcaagtttttttctctatctcaggcaggtcataggttttggatctgttaaaattgcagcattcatagctatggtaggaattctgtctattgtggctcagacggcctttcttagcatcttgatgagatcattaggaaataagaatactgtcctccttggcttgggcttccagatgctccagttagcctggtacggttttggatcacaggcctggatgatgtgggcagcagggaccgtggctgccatgtccagcatcacgtttccggcaatcagtgccctcgtctctcggaatgcagagtcagatcagcaaggagttgcccaggggatcataactggaataagaggactatgcaatggcctggggccagcactgtatggcttcatattctacatgttccatgtggaactgactgagttgggcccgaaattgaattctaacaacgttcccctgcagggagctgtcatcccaggcccgccgtttttatttggggcatgtatagtccttatgtcttttctggttgccttattcattcctgaatacagtaaagccagtggagttcaaaaacacagtaacagcagcagcggcagcctgaccaacaccccagaacggggcagtgatgaggacattgagccactactgcaagacagcagcatctgggagctctcttcatttgaggagcctgggaatcagtgcactgagctgtaaactcggcagaaagtgggattctgcatacgccatctctgagagccatggagggagccacacccctggtgacttcatggtgctggatgggagacgctagcggcatccttcagggccaagtttgataaataccaccgccatcattctgctcatcctcctcctgtttttttttttctcttacattctttttttttttcctgtttatacattagaacaagataagatttgaaatacttccttgcaaataatgtgcaactcccaaggtgaaactcaaatagaaaaagtcatctctctggtagaaaggatggctttcctgtaatgactatagagtaagagtggcagcaatctttccatgcccttttcagcagaaggcacagaacagtagcgggactgccatctctggcaagatttcaggtaaagaatctcttcttaatttctaccttcctgtttctctgaatcagcccataggtgttgatgagtggccactcttaaagagtcactcagtatcagggatctactgtctttgttcaaaggtcaaataaaaacctagtctccttttattctactttctattcttagctagaatgaaactcagcatatatacacttctggacataataatattgaatagtaattacctttactagatgaaagaaattttcattacaaacttaaatcatgtaaaactcaacaactcagattcctggacctggtgtcctggttgggtccaaggtgattttacagaagaaaaaaacaactcaagcattctggtggcaacatagagattgtaggctgcttctaagaaagttattaacaatttggaaattcctaagtaggatgagagttagtaactggatacgagtgaagtttatatccaagttcagactcaaaggcattattatgatttgcttcttcccatgtcttccatgtcctgcttctcaaagtttttctcatccatcacactcctgccttaactgctctgagtatgcatttgttttcaattcatctttatttcaatctgtttaacttttgaatcgcatgggaatacgcacattaagttcctttctaaaataaggttttatgaagctgagtttcacgataagtgtcttgctattttttgagatgttttatggacaaagaaaactttacagatttatatgtattttgctgcaccagtaaatggaccattaactagggcccacctttaacagagcacccctttgaaagttttataggtatgaaatatatgtagatatttgtaaagggttttaatttttttttttgatggggtgctgtgtaaatcttgtatttataaatgtaatgaaggtattgacagaaaaaaatatatacaacttttataaaggattgtgtactgactgaatacatttaaaagaaaatatattttgaaacctgttctgctatgaacagagataacatatctttttactatgctattggtttttaggttaagcttcctaatgcataataaatttacagtggttactttta

SEQ ID NO: 321939 - DNA, 3021 bp, Homo sapiens
ggagccgccgcggagctggaggagaaggcggcgtcggagcccgatggcgggagccatgccggagaagcgcgcgggcgcgcaggccgcggggatgcacctggtctacaaggctttggccgaccaagtgtgtaccatgctgctattgtcatcttccttgaattctttgcgtggggcctgttgacaactccaatgttgactgttctacatgaaacattttctcaacacacattcctcatgaatggtctcattcaaggtgtaaagggcctgctctcttttttgagtgccccactcattggtgccctgtctgatgtgtgggggaggaagccctttctcctcggcactgtattctttacctgcttcccaatcccactgatgaggatcagcccatggtggtattttgcgatgatttctgtgtctggagtcttctcggtcacgttttctgttatatttgcctatgtagctgatgtcactcaggagcacgagcgaagtacagcttatggatgggtctcagccacctttgcggctagtcttgtcagcagcccggccattggagcatatctttctgccagttacggagacagcctcgttgtgctggtggccacagtggtggctcttctggacatctgcttcatcttagtggctgttccagaatctctgcctgagaaaatgagaccggtttcctggggagctcagatttcttggaaacaagcagacccttttgcgtcgttgaagaaagttggaaaagattctactgtcttactaatctgcatcaccgtgtttctttcataccttcctgaagctggacagtattcaagtttttttctctatctcaggcaggtcataggttttggatctgttaaaattgcagcattcatagctatggtaggaattctgtctattgtggctcagacggcctttcttagcatcttgatgagatcattaggaaataagaatactgtcctccttggcttgggcttccagatgctccagttagcctggtacggttttggatcacaggcctggatgatgtgggcagcagggaccgtggctgccatgtccagcatcacgtttccggcaatcagtgccctcgtctctcggaatgcagagtcagatcagcaaggagttgcccaggggatcataactggaataagaggactatgcaatggcctggggccagcactgtatggcttcatattctacatgttccatgtggaactgactgagttgggcccgaaattgaattctaacaacgttcccctgcagggagctgtcatcccaggcccgccgtttttatttggggcatgtatagtccttatgtcttttctggttgccttattcattcctgaatacagtaaagccagtggagttcaaaaacacagtaacagcagcagcggcagcctgaccaacaccccagaacggggcagtgatgaggacattgagccactactgcaagacagcagcatctgggagctctcttcatttgaggagcctgggaatcagtgcactgagctgtaaactcggcagaaagtgggattctgcatacgccatctctgagagccatggagggagccacacccctggtgacttcatggtgctggatgggagacgctagcggcatccttcagggccaagtttgataaataccaccgccatcattctgctcatcctcctcctgtttttttttttctcttacattctttttttttttcctgtttatacattagaacaagataagatttgaaatacttccttgcaaataatgtgcaactcccaaggtgaaactcaaatagaaaaagtcatctctctggtagaaaggatggctttcctgtaatgactatagagtaagagtggcagcaatctttccatgcccttttcagcagaaggcacagaacagtagcgggactgccatctctggcaagatttcaggtaaagaatctcttcttaatttctaccttcctgtttctctgaatcagcccataggtgttgatgagtggccactcttaaagagtcactcagtatcagggatctactgtctttgttcaaaggtcaaataaaaacctagtctccttttattctactttctattcttagctagaatgaaactcagcatatatacacttctggacataataatattgaatagtaattacctttactagatgaaagaaattttcattacaaacttaaatcatgtaaaactcaacaactcagattcctggacctggtgtcctggttgggtccaaggtgattttacagaagaaaaaaacaactcaagcattctggtggcaacatagagattgtaggctgcttctaagaaagttattaacaatttggaaattcctaagtaggatgagagttagtaactggatacgagtgaagtttatatccaagttcagactcaaaggcattattatgatttgcttcttcccatgtcttccatgtcctgcttctcaaagtttttctcatccatcacactcctgccttaactgctctgagtatgcatttgttttcaattcatctttatttcaatctgtttaacttttgaatcgcatgggaatacgcacattaagttcctttctaaaataaggttttatgaagctgagtttcacgataagtgtcttgctattttttgagatgttttatggacaaagaaaactttacagatttatatgtattttgctgcaccagtaaatggaccattaactagggcccacctttaacagagcacccctttgaaagttttataggtatgaaatatatgtagatatttgtaaagggttttaatttttttttttgatggggtgctgtgtaaatcttgtatttataaatgtaatgaaggtattgacagaaaaaaatatatacaacttttataaaggattgtgtactgactgaatacatttaaaagaaaatatattttgaaacctgttctgctatgaacagagataacatatctttttactatgctattggtttttaggttaagcttcctaatgcataataaatttacagtggttactttta

SEQ ID NO: 321940 - DNA, 2566 bp, Homo sapiens
gcagagtatatatttgttaaaatcaaacttacatcccaattccaactttgtaaacttccagcagaagctctcatattctgtaaatgttcagcaggagtttgctattcacagatatttaagtgattagtatttctccagagactgaggctgtccctctcagtcatggtaactggtgaacagttgtgatatcctttcaggaagtgccagcagagcaccaggtagacaggcttcttagggaggaggctgaaagcattgagccccaggtcaggctgggagcccccaacactccacccctgtagaaggtcatcagtactgtccagactctgaggttgcaggtcaggcagtgtgcccttagaggtctctggtcatcagggaagggtcttcacacacagagcttgtattttaattctgtgtgttgatgtggtttttcagagttgtctcctttactttgcagacggcctttcttagcatcttgatgagatcattaggaaataagaatactgtcctccttggcttgggcttccagatgctccagttagcctggtacggttttggatcacaggcctggatgatgtgggcagcagggaccgtggctgccatgtccagcatcacgtttccggcaatcagtgccctcgtctctcggaatgcagagtcagatcagcaaggagttgcccaggggatcataactggaataagaggactatgcaatggcctggggccagcactgtatggcttcatattctacatgttccatgtggaactgactgagttgggcccgaaattgaattctaacaacgttcccctgcagggagctgtcatcccaggcccgccgtttttatttggggcatgtatagtccttatgtcttttctggttgccttattcattcctgaatacagtaaagccagtggagttcaaaaacacagtaacagcagcagcggcagcctgaccaacaccccagaacggggcagtgatgaggacattgagccactactgcaagacagcagcatctgggagctctcttcatttgaggagcctgggaatcagtgcactgagctgtaaactcggcagaaagtgggattctgcatacgccatctctgagagccatggagggagccacacccctggtgacttcatggtgctggatgggagacgctagcggcatccttcagggccaagtttgataaataccaccgccatcattctgctcatcctcctcctgtttttttttttctcttacattctttttttttttcctgtttatacattagaacaagataagatttgaaatacttccttgcaaataatgtgcaactcccaaggtgaaactcaaatagaaaaagtcatctctctggtagaaaggatggctttcctgtaatgactatagagtaagagtggcagcaatctttccatgcccttttcagcagaaggcacagaacagtagcgggactgccatctctggcaagatttcaggtaaagaatctcttcttaatttctaccttcctgtttctctgaatcagcccataggtgttgatgagtggccactcttaaagagtcactcagtatcagggatctactgtctttgttcaaaggtcaaataaaaacctagtctccttttattctactttctattcttagctagaatgaaactcagcatatatacacttctggacataataatattgaatagtaattacctttactagatgaaagaaattttcattacaaacttaaatcatgtaaaactcaacaactcagattcctggacctggtgtcctggttgggtccaaggtgattttacagaagaaaaaaacaactcaagcattctggtggcaacatagagattgtaggctgcttctaagaaagttattaacaatttggaaattcctaagtaggatgagagttagtaactggatacgagtgaagtttatatccaagttcagactcaaaggcattattatgatttgcttcttcccatgtcttccatgtcctgcttctcaaagtttttctcatccatcacactcctgccttaactgctctgagtatgcatttgttttcaattcatctttatttcaatctgtttaacttttgaatcgcatgggaatacgcacattaagttcctttctaaaataaggttttatgaagctgagtttcacgataagtgtcttgctattttttgagatgttttatggacaaagaaaactttacagatttatatgtattttgctgcaccagtaaatggaccattaactagggcccacctttaacagagcacccctttgaaagttttataggtatgaaatatatgtagatatttgtaaagggttttaatttttttttttgatggggtgctgtgtaaatcttgtatttataaatgtaatgaaggtattgacagaaaaaaatatatacaacttttataaaggattgtgtactgactgaatacatttaaaagaaaatatattttgaaacctgttctgctatgaacagagataacatatctttttactatgctattggtttttaggttaagcttcctaatgcataataaatttacagtggttactttta

SEQ ID NO: 321941 - DNA, 2910 bp, Homo sapiens
aggctggtaccggccggagtgtaaggatcaagggccagtcgcgagctacaaggctttggccgaccaagtgtgtaccatgctgctattgtcatcttccttgaattctttgcgtggggcctgttgacaactccaatgttgactgttctacatgaaacattttctcaacacacattcctcatgaatggtctcattcaaggtgtaaagggcctgctctcttttttgagtgccccactcattggtgccctgtctgatgtgtgggggaggaagccctttctcctcggcactgtattctttacctgcttcccaatcccactgatgaggatcagcccatggtggtattttgcgatgatttctgtgtctggagtcttctcggtcacgttttctgttatatttgcctatgtagctgatgtcactcaggagcacgagcgaagtacagcttatggatgggtctcagccacctttgcggctagtcttgtcagcagcccggccattggagcatatctttctgccagttacggagacagcctcgttgtgctggtggccacagtggtggctcttctggacatctgcttcatcttagtggctgttccagaatctctgcctgagaaaatgagaccggtttcctggggagctcagatttcttggaaacaagcagacccttttgcgtcgttgaagaaagttggaaaagattctactgtcttactaatctgcatcaccgtgtttctttcataccttcctgaagctggacagtattcaagtttttttctctatctcaggcaggtcataggttttggatctgttaaaattgcagcattcatagctatggtaggaattctgtctattgtggctcagacggcctttcttagcatcttgatgagatcattaggaaataagaatactgtcctccttggcttgggcttccagatgctccagttagcctggtacggttttggatcacaggcctggatgatgtgggcagcagggaccgtggctgccatgtccagcatcacgtttccggcaatcagtgccctcgtctctcggaatgcagagtcagatcagcaaggagttgcccaggggatcataactggaataagaggactatgcaatggcctggggccagcactgtatggcttcatattctacatgttccatgtggaactgactgagttgggcccgaaattgaattctaacaacgttcccctgcagggagctgtcatcccaggcccgccgtttttatttggggcatgtatagtccttatgtcttttctggttgccttattcattcctgaatacagtaaagccagtggagttcaaaaacacagtaacagcagcagcggcagcctgaccaacaccccagaacggggcagtgatgaggacattgagccactactgcaagacagcagcatctgggagctctcttcatttgaggagcctgggaatcagtgcactgagctgtaaactcggcagaaagtgggattctgcatacgccatctctgagagccatggagggagccacacccctggtgacttcatggtgctggatgggagacgctagcggcatccttcagggccaagtttgataaataccaccgccatcattctgctcatcctcctcctgtttttttttttctcttacattctttttttttttcctgtttatacattagaacaagataagatttgaaatacttccttgcaaataatgtgcaactcccaaggtgaaactcaaatagaaagtggcagcaatctttccatgcccttttcagcagaaggcacagaacagtagcgggactgccatctctggcaagatttcaggtaaagaatctcttcttaatttctaccttcctgtttctctgaatcagcccataggtgttgatgagtggccactcttaaagagtcactcagtatcagggatctactgtctttgttcaaaggtcaaataaaaacctagtctccttttattctactttctattcttagctagaatgaaactcagcatatatacacttctggacataataatattgaatagtaattacctttactagatgaaagaaattttcattacaaacttaaatcatgtaaaactcaacaactcagattcctggacctggtgtcctggttgggtccaaggtgattttacagaagaaaaaaacaactcaagcattctggtggcaacatagagattgtaggctgcttctaagaaagttattaacaatttggaaattcctaagtaggatgagagttagtaactggatacgagtgaagtttatatccaagttcagactcaaaggcattattatgatttgcttcttcccatgtcttccatgtcctgcttctcaaagtttttctcatccatcacactcctgccttaactgctctgagtatgcatttgttttcaattcatctttatttcaatctgtttaacttttgaatcgcatgggaatacgcacattaagttcctttctaaaataaggttttatgaagctgagtttcacgataagtgtcttgctattttttgagatgttttatggacaaagaaaactttacagatttatatgtattttgctgcaccagtaaatggaccattaactagggcccacctttaacagagcacccctttgaaagttttataggtatgaaatatatgtagatatttgtaaagggttttaatttttttttttgatggggtgctgtgtaaatcttgtatttataaatgtaatgaaggtattgacagaaaaaaatatatacaacttttataaaggattgtgtactgactgaatacatttaaaagaaaatatattttgaaacctgttctgctatgaacagagataacatatctttttactatgctattggtttttaggttaagcttcctaatgcataataaatttacagtggttactttta

SEQ ID NO: 321942 - DNA, 2917 bp, Homo sapiens
aggctggtaccggccggagtgtaaggatcaagggccagtcgcgagctacaaggctttggccgaccaagtgtgtaccatgctgctattgtcatcttccttgaattctttgcgtggggcctgttgacaactccaatgttgactgttctacatgaaacattttctcaacacacattcctcatgaatggtctcattcaaggtgtaaagggcctgctctcttttttgagtgccccactcattggtgccctgtctgatgtgtgggggaggaagccctttctcctcggcactgtattctttacctgcttcccaatcccactgatgaggatcagcccatggtggtattttgcgatgatttctgtgtctggagtcttctcggtcacgttttctgttatatttgcctatgtagctgatgtcactcaggagcacgagcgaagtacagcttatggatgggtctcagccacctttgcggctagtcttgtcagcagcccggccattggagcatatctttctgccagttacggagacagcctcgttgtgctggtggccacagtggtggctcttctggacatctgcttcatcttagtggctgttccagaatctctgcctgagaaaatgagaccggtttcctggggagctcagatttcttggaaacaagcagacccttttgcgtcgttgaagaaagttggaaaagattctactgtcttactaatctgcatcaccgtgtttctttcataccttcctgaagctggacagtattcaagtttttttctctatctcaggcaggtcataggttttggatctgttaaaattgcagcattcatagctatggtaggaattctgtctattgtggctcagacggcctttcttagcatcttgatgagatcattaggaaataagaatactgtcctccttggcttgggcttccagatgctccagttagcctggtacggttttggatcacaggcctggatgatgtgggcagcagggaccgtggctgccatgtccagcatcacgtttccggcaatcagtgccctcgtctctcggaatgcagagtcagatcagcaaggagttgcccaggggatcataactggaataagaggactatgcaatggcctggggccagcactgtatggcttcatattctacatgttccatgtggaactgactgagttgggcccgaaattgaattctaacaacgttcccctgcagggagctgtcatcccaggcccgccgtttttatttggggcatgtatagtccttatgtcttttctggttgccttattcattcctgaatacagtaaagccagtggagttcaaaaacacagtaacagcagcagcggcagcctgaccaacaccccagaacggggcagtgatgaggacattgagccactactgcaagacagcagcatctgggagctctcttcatttgaggagcctgggaatcagtgcactgagctgtaaactcggcagaaagtgggattctgcatacgccatctctgagagccatggagggagccacacccctggtgacttcatggtgctggatgggagacgctagcggcatccttcagggccaagtttgataaataccaccgccatcattctgctcatcctcctcctgtttttttttttctcttacattctttttttttttcctgtttatacattagaacaagataagatttgaaatacttccttgcaaataatgtgcaactcccaaggtgaaactcaaatagaaaaagtcatctctctggtagaaaggatggctttcctgtaatgactatagagtaagagtggcagcaatctttccatgcccttttcagcagaaggcacagaacagtagcgggactgccatctctggcaagatttcaggtaaagaatctcttcttaatttctaccttcctgtttctctgaatcagcccataggtgttgatgagtggccactcttaaagagtcactcagtatcagggatctactgtctttgttcaaaggtcaaataaaaacctagtctccttttattctactttctattcttagctagaatgaaactcagcatatatacacttctggacataataatattgaatagtaattacctttactagatgaaagaaattttcattacaaacttaaatcatgtaaaactcaacaactcagattcctggacctggtgtcctggttgggtccaaggtgattttacagaagaaaaaaacaactcaagcattctggtggcaacatagagattgtaggctgcttctaagaaagttattaacaatttggaaattcctaagtaggatgagagttagtaactggatacgagtgaagtttatatccaagttcagactcaaaggcattattatgatttgcttcttcccatgtcttccatgtcctgcttctcaaagtttttctcatccatcacactcctgccttaactgctctgagtatgcatttgttttcaattcatctttatttcaatctgtttaacttttgaatcgcatgggaatacgcacattaagttcctttctaaaataaggttttatgaagctgagtttcacgataagtgtcttgctattttttgagatgttttatggacaaagaaaaactagggcccacctttaacagagcacccctttgaaagttttataggtatgaaatatatgtagatatttgtaaagggttttaatttttttttttgatggggtgctgtgtaaatcttgtatttataaatgtaatgaaggtattgacagaaaaaaatatatacaacttttataaaggattgtgtactgactgaatacatttaaaagaaaatatattttgaaacctgttctgctatgaacagagataacatatctttttactatgctattggtttttaggttaagcttcctaatgcataataaatttacagtggttactttta

SEQ ID NO: 321943 - DNA, 742 bp, Homo sapiens
aggctggtaccggccggagtgtaaggatcaagggccagtcgcgagctacaaggctttggccgaccaagtgtgtaccatgctgctattgtcatcttccttgaattctttgcgtggggcctgttgacaactccaatgttgactgttctacatgaaacattttctcaacacacattcctcatgaatggtctcattcaaggtgtaaagggcctgctctcttttttgagtgccccactcattggtgccctgtctgatgtgtgggggaggaagccctttctcctcggcactgtattctttacctgcttcccaatcccactgatgaggatcagcccatggtgagtgacttggcccttcacctcctgactgcttgttttgagtcacatgtaaattatacttatatttgcagagcacttcttaactattacaaagcagttgtgcttgtgttttcatttgatctctctggtaatactgaaaaccagtttggacagttgtcattatatccattttataaatggggtagtgaagacattctagaattaagtctgagataagttacttaggtgaagaagtagaaataaaagatgcctcttcaggcagctgatgttgccatgatgtcaggtatgggagtttaaccctgagaatgggctaacaatcctgtcttcattactgtgacttttagttgactttgtaaatatattatttttgtcagctcatcccatggagtaaactgcgtgatcctctgacc

SEQ ID NO: 321944 - DNA, 630 bp, Homo sapiens
aggctggtaccggccggagtgtaaggatcaagggccagtcgcgagctacaaggctttggccgaccaagtgtgtaccatgctgctattgtcatcttccttgaattctttgcgtggggcctgttgacaactccaatgttgactgttctacatgaaacattttctcaacacacattcctcatgaatggtctcattcaaggtgtaaagggcctgctctcttttttgagtgccccactcattggtgccctgtctgatgtgtgggggaggaagccctttctcctcggcactgtattctttacctgcttcccaatcccactgatgaggatcagcccatggtggtattttgcgatgatttctgtgtctggagtcttctcggtcacgttttctgttatatttgcctgtcggcatgcgtgctttacattcggctttggctagacgcccagttcctgatacaaccgcttacacgcagtgccgtcctcacggaacagatgacagcgttgcggcggcaggccaatagcgaatgttgcaccttcttctaccagcaccacgtcgttctggcggtagaccaggttctgacgtattgccgggatttggatgtgaatttgagtttcattacccagttgctctaccacc

SEQ ID NO: 321945 - DNA, 397 bp, Homo sapiens
aggctggtaccggccggagtgtaaggatcaagggccagtcgcgagctacaaggctttggccgaccaagtgtgtaccatgctgctattgtcatcttccttgaattctttgcgtggggcctgttgacaactccaatgttgactgttctacatgaaacattttctcaacacacattcctcatgaatggtctcattcaaggtgtaaagggcctgctctcttttttgagtgccccactcattggtgccctgtctgatgtgtgggggaggaagccctttctcctcggcactgtattctttacctgcttcccaatcccactgatgaggatcagcccatggtggtattttgcgagcaggagaggaatgggggagaggacgtgagggaccacccccacccacacag

SEQ ID NO: 321946 - DNA, 3156 bp, Homo sapiens
ggtggtgacagagagacagaaatctacagctgtctagtcaaaaagcttcaacttccacctcaacaaattctttgttgttgttaatagtttttttctaagaatagcagagggttccccctgaccccaggcagtgctaatgaaatgaccaccaaatgataaaatgttcaaacagtgcagtgtttttagaagattaaatcaagcacagtacttgagtagtttgtaagttttatcatcagccctgcaggaattcttttcataccatctcacatccccggtccccagttaaagaagaccaaagagctaatgttttatttgtggggaaggtttttacaatttttgtttgtaataagataatccttttttactcttgtagctctgcagggtatctccagttaatagtttatgaacacattcttaaatcactttaattctctttcattcttaaaatttatatgcaacacatttcttttgtcttacttaaagccagggaagcatggctgcaggtatgcacctgtgggaccctggttgagtgtgctttcctgaaggtgtgcacctgcagcaggcagacctgggtaaggatatgctttccccagaggtgttcacctatgggaccctgggtgagagtgtgctttcccacaggtctcagccacctttgcggctagtcttgtcagcagcccggccattggagcatatctttctgccagttacggagacagcctcgttgtgctggtggccacagtggtggctcttctggacatctgcttcatcttagtggctgttccagaatctctgcctgagaaaatgagaccggtttcctggggagctcagatttcttggaaacaagcagacccttttgcgtcgttgaagaaagttggaaaagattctactgtcttactaatctgcatcaccgtgtttctttcataccttcctgaagctggacagtattcaagtttttttctctatctcaggcaggtcataggttttggatctgttaaaattgcagcattcatagctatggtaggaattctgtctattgtggctcagacggcctttcttagcatcttgatgagatcattaggaaataagaatactgtcctccttggcttgggcttccagatgctccagttagcctggtacggttttggatcacaggcctggatgatgtgggcagcagggaccgtggctgccatgtccagcatcacgtttccggcaatcagtgccctcgtctctcggaatgcagagtcagatcagcaaggagttgcccaggggatcataactggaataagaggactatgcaatggcctggggccagcactgtatggcttcatattctacatgttccatgtggaactgactgagttgggcccgaaattgaattctaacaacgttcccctgcagggagctgtcatcccaggcccgccgtttttatttggggcatgtatagtccttatgtcttttctggttgccttattcattcctgaatacagtaaagccagtggagttcaaaaacacagtaacagcagcagcggcagcctgaccaacaccccagaacggggcagtgatgaggacattgagccactactgcaagacagcagcatctgggagctctcttcatttgaggagcctgggaatcagtgcactgagctgtaaactcggcagaaagtgggattctgcatacgccatctctgagagccatggagggagccacacccctggtgacttcatggtgctggatgggagacgctagcggcatccttcagggccaagtttgataaataccaccgccatcattctgctcatcctcctcctgtttttttttttctcttacattctttttttttttcctgtttatacattagaacaagataagatttgaaatacttccttgcaaataatgtgcaactcccaaggtgaaactcaaatagaaaaagtcatctctctggtagaaaggatggctttcctgtaatgactatagagtaagagtggcagcaatctttccatgcccttttcagcagaaggcacagaacagtagcgggactgccatctctggcaagatttcaggtaaagaatctcttcttaatttctaccttcctgtttctctgaatcagcccataggtgttgatgagtggccactcttaaagagtcactcagtatcagggatctactgtctttgttcaaaggtcaaataaaaacctagtctccttttattctactttctattcttagctagaatgaaactcagcatatatacacttctggacataataatattgaatagtaattacctttactagatgaaagaaattttcattacaaacttaaatcatgtaaaactcaacaactcagattcctggacctggtgtcctggttgggtccaaggtgattttacagaagaaaaaaacaactcaagcattctggtggcaacatagagattgtaggctgcttctaagaaagttattaacaatttggaaattcctaagtaggatgagagttagtaactggatacgagtgaagtttatatccaagttcagactcaaaggcattattatgatttgcttcttcccatgtcttccatgtcctgcttctcaaagtttttctcatccatcacactcctgccttaactgctctgagtatgcatttgttttcaattcatctttatttcaatctgtttaacttttgaatcgcatgggaatacgcacattaagttcctttctaaaataaggttttatgaagctgagtttcacgataagtgtcttgctattttttgagatgttttatggacaaagaaaactttacagatttatatgtattttgctgcaccagtaaatggaccattaactagggcccacctttaacagagcacccctttgaaagttttataggtatgaaatatatgtagatatttgtaaagggttttaatttttttttttgatggggtgctgtgtaaatcttgtatttataaatgtaatgaaggtattgacagaaaaaaatatatacaacttttataaaggattgtgtactgactgaatacatttaaaagaaaatatattttgaaacctgttctgctatgaacagagataacatatctttttactatgctattggtttttaggttaagcttcctaatgcataataaatttacagtggttactttta

SEQ ID NO: 321947 - DNA, 2793 bp, Homo sapiens
agtttgacctgtagcggctggagcgtacttatttgtctaccagatataaaagttgaacatgatcactttgaagaatagagtgaatttacctatacggatacgctctgtactgaatatggctttaaagaagttacattatgaattgagagaagtgattttcttaaaaggttctgtaggaatatatttccaggttctgtttataggaagttcgggatctgttcagggattttaatcagtgtgttaacaaagatgagtaagtgtgttttgtgggtttatttttttgcttttttttttagctatatgatttgaaatatatacctctgaaattaagacttgtaacttcctcagaaagatggtgatagaacttccttttattaaccatttgacttttgttattcatcttaatagatcaaaataatgaagctgatgtcccagaacattggcaacattaatgtgtattggcattttaagtgtgttctttctgcttattctcagtcgttgaagaaagttggaaaagattctactgtcttactaatctgcatcaccgtgtttctttcataccttcctgaagctggacagtattcaagtttttttctctatctcaggcaggtcataggttttggatctgttaaaattgcagcattcatagctatggtaggaattctgtctattgtggctcagacggcctttcttagcatcttgatgagatcattaggaaataagaatactgtcctccttggcttgggcttccagatgctccagttagcctggtacggttttggatcacaggcctggatgatgtgggcagcagggaccgtggctgccatgtccagcatcacgtttccggcaatcagtgccctcgtctctcggaatgcagagtcagatcagcaaggagttgcccaggggatcataactggaataagaggactatgcaatggcctggggccagcactgtatggcttcatattctacatgttccatgtggaactgactgagttgggcccgaaattgaattctaacaacgttcccctgcagggagctgtcatcccaggcccgccgtttttatttggggcatgtatagtccttatgtcttttctggttgccttattcattcctgaatacagtaaagccagtggagttcaaaaacacagtaacagcagcagcggcagcctgaccaacaccccagaacggggcagtgatgaggacattgagccactactgcaagacagcagcatctgggagctctcttcatttgaggagcctgggaatcagtgcactgagctgtaaactcggcagaaagtgggattctgcatacgccatctctgagagccatggagggagccacacccctggtgacttcatggtgctggatgggagacgctagcggcatccttcagggccaagtttgataaataccaccgccatcattctgctcatcctcctcctgtttttttttttctcttacattctttttttttttcctgtttatacattagaacaagataagatttgaaatacttccttgcaaataatgtgcaactcccaaggtgaaactcaaatagaaaaagtcatctctctggtagaaaggatggctttcctgtaatgactatagagtaagagtggcagcaatctttccatgcccttttcagcagaaggcacagaacagtagcgggactgccatctctggcaagatttcaggtaaagaatctcttcttaatttctaccttcctgtttctctgaatcagcccataggtgttgatgagtggccactcttaaagagtcactcagtatcagggatctactgtctttgttcaaaggtcaaataaaaacctagtctccttttattctactttctattcttagctagaatgaaactcagcatatatacacttctggacataataatattgaatagtaattacctttactagatgaaagaaattttcattacaaacttaaatcatgtaaaactcaacaactcagattcctggacctggtgtcctggttgggtccaaggtgattttacagaagaaaaaaacaactcaagcattctggtggcaacatagagattgtaggctgcttctaagaaagttattaacaatttggaaattcctaagtaggatgagagttagtaactggatacgagtgaagtttatatccaagttcagactcaaaggcattattatgatttgcttcttcccatgtcttccatgtcctgcttctcaaagtttttctcatccatcacactcctgccttaactgctctgagtatgcatttgttttcaattcatctttatttcaatctgtttaacttttgaatcgcatgggaatacgcacattaagttcctttctaaaataaggttttatgaagctgagtttcacgataagtgtcttgctattttttgagatgttttatggacaaagaaaactttacagatttatatgtattttgctgcaccagtaaatggaccattaactagggcccacctttaacagagcacccctttgaaagttttataggtatgaaatatatgtagatatttgtaaagggttttaatttttttttttgatggggtgctgtgtaaatcttgtatttataaatgtaatgaaggtattgacagaaaaaaatatatacaacttttataaaggattgtgtactgactgaatacatttaaaagaaaatatattttgaaacctgttctgctatgaacagagataacatatctttttactatgctattggtttttaggttaagcttcctaatgcataataaatttacagtggttactttta

SEQ ID NO: 321948 - DNA, 2866 bp, Homo sapiens
aggctggtaccggccggagtgtaaggatcaagggccagtcgcgagctacaaggctttggccgaccaagtgtgtaccatgctgctattgtcatcttccttgaattctttgcgtggggcctgttgacaactccaatgttgactgttctacatgaaacattttctcaacacacattcctcatgaatggtctcattcaaggtgtaaagggcctgctctcttttttgagtgccccactcattggtgccctgtctgatgtgtgggggaggaagccctttctcctcggcactgtattctttacctgcttcccaatcccactgatgaggatcagcccatggtggtattttgcgatgatttctgtgtctggagtcttctcggtcacgttttctgttatatttgcctatgtagctgatgtcactcaggagcacgagcgaagtacagcttatggatgggtctcagccacctttgcggctagtcttgtcagcagcccggccattggagcatatctttctgccagttacggagacagcctcgttgtgctggtggccacagtggtggctcttctggacatctgcttcatcttagtggctgttccagaatctctgcctgagaaaatgagaccggtttcctggggagctcagatttcttggaaacaagcagacccttttgcgtcgttgaagaaagttggaaaagattctactgtcttactaatctgcatcaccgtgtttctttcataccttcctgaagctggacagtattcaagtttttttctctatctcaggcaggtcataggttttggatctgttaaaattgcagcattcatagctatggtaggaattctgtctattgtggctcagacggcctttcttagcatcttgatgagatcattaggaaataagaatactgtcctccttggcttgggcttccagatgctccagttagcctggtacggttttggatcacaggcctggagttgcccaggggatcataactggaataagaggactatgcaatggcctggggccagcactgtatggcttcatattctacatgttccatgtggaactgactgagttgggcccgaaattgaattctaacaacgttcccctgcagggagctgtcatcccaggcccgccgtttttatttggggcatgtatagtccttatgtcttttctggttgccttattcattcctgaatacagtaaagccagtggagttcaaaaacacagtaacagcagcagcggcagcctgaccaacaccccagaacggggcagtgatgaggacattgagccactactgcaagacagcagcatctgggagctctcttcatttgaggagcctgggaatcagtgcactgagctgtaaactcggcagaaagtgggattctgcatacgccatctctgagagccatggagggagccacacccctggtgacttcatggtgctggatgggagacgctagcggcatccttcagggccaagtttgataaataccaccgccatcattctgctcatcctcctcctgtttttttttttctcttacattctttttttttttcctgtttatacattagaacaagataagatttgaaatacttccttgcaaataatgtgcaactcccaaggtgaaactcaaatagaaaaagtcatctctctggtagaaaggatggctttcctgtaatgactatagagtaagagtggcagcaatctttccatgcccttttcagcagaaggcacagaacagtagcgggactgccatctctggcaagatttcaggtaaagaatctcttcttaatttctaccttcctgtttctctgaatcagcccataggtgttgatgagtggccactcttaaagagtcactcagtatcagggatctactgtctttgttcaaaggtcaaataaaaacctagtctccttttattctactttctattcttagctagaatgaaactcagcatatatacacttctggacataataatattgaatagtaattacctttactagatgaaagaaattttcattacaaacttaaatcatgtaaaactcaacaactcagattcctggacctggtgtcctggttgggtccaaggtgattttacagaagaaaaaaacaactcaagcattctggtggcaacatagagattgtaggctgcttctaagaaagttattaacaatttggaaattcctaagtaggatgagagttagtaactggatacgagtgaagtttatatccaagttcagactcaaaggcattattatgatttgcttcttcccatgtcttccatgtcctgcttctcaaagtttttctcatccatcacactcctgccttaactgctctgagtatgcatttgttttcaattcatctttatttcaatctgtttaacttttgaatcgcatgggaatacgcacattaagttcctttctaaaataaggttttatgaagctgagtttcacgataagtgtcttgctattttttgagatgttttatggacaaagaaaactttacagatttatatgtattttgctgcaccagtaaatggaccattaactagggcccacctttaacagagcacccctttgaaagttttataggtatgaaatatatgtagatatttgtaaagggttttaatttttttttttgatggggtgctgtgtaaatcttgtatttataaatgtaatgaaggtattgacagaaaaaaatatatacaacttttataaaggattgtgtactgactgaatacatttaaaagaaaatatattttgaaacctgttctgctatgaacagagataacatatctttttactatgctattggtttttaggttaagcttcctaatgcataataaatttacagtggttactttta

SEQ ID NO: 321949 - DNA, 6146 bp, Homo sapiens
  misc_feature (2610)..(2610): n is a, c, g, or t
  misc_feature (2653)..(2653): n is a, c, g, or t
  misc_feature (3653)..(3653): n is a, c, g, or t
  misc_feature (3945)..(3945): n is a, c, g, or t
ttttttttaaatagactatttttctagaacagttttaggttcacagcaaaattgagagtaagatatagagatttcccatatatcccctatccccatacatgcatagcctcctccactatcaacatctcccacgagggtgggaaatttttacaactgatgaacctacattgacaaattatcttaacataaagtccacagtttacattagggttcatgcttagtgttgtacattctatgggtttggacaaacgtatgatgacatgataacatgtatcaacccttacagtatcacacagtgaattttcactgcaaaaatcccttatgctatgcctgtttatctctccctccaccaccaacccctggcaaccactgatctctttattgtctccatagttttaccttttttcatacagtatgtagccttttcagattggtttctttcaattaataatatgcatttaaggttctttcatggcttgatagctcattttgtttttggcatttgtttggatttgccagtttatccattcacccactgaacgacaccttacttgctttaaagttttgacagttgtgcataaagctgctgtaacattcatgtactgtaatgttttaatctttaataatattaattaaatttaacagataaaacttatttcagacctgcccttgttccaggtctgattgaagccagcttgctgaggcaccttcagtaggtcatagctcaactgctgctgtggacttcagggggactcaaaagcattaatcaaaatcttccctctctagagtattttacactttaaaaaaatttataccctattttgtcccccaaaacagataattgacttaaagcaattaaaaaaaagaaaaccaaaaacttcccctttcaactgttcttcagctctctgggattgctcagacctaagctgcctttccattgcatcctgtggtcttttactgatttcattggaaggcaggccttttcctaatggtttactttgacacagcaagcttcctcctaagataaattcctctttttctggttgtatttaaaaatgaagtgtattaaattcttcattctgatagttttcctgagggtatgggactaatattttacgtggtggcatataaataaaacctttttacttttttattggagacaagagtcttgctctgttgcccaggctggagtgcaatggcgtgatcttggctcgctgcagcctctgtctcctgggttcaagaaatccttgtgcctcagcctgccaagcagctgggattatcggtatgcaccaccacacccagctaagttttgtatttttagtagagacagggttttaccatgttggtcaggctggtcttgaactcctggtctcaagtgatctgcctgtttcagcctcccaaaatgctgggattataggcatgagccactacacccgatctttcccaggcatttctcttttgttcatttttggtggttgtatgctagagatttagagggaagaatggtgagatagtgtagaaaattatacttgtgtctaaattaatttgtgcattacattacatatgcatttaacacagaaaataatgtaggaagatgagacagtccaaggaagaaagctaaaaaaaaagttacatctctttatgtaggtaataaacaactatgactattttattcttctagcttttctcctacacatatgctcatgtcaccaccaccaccaattatgacaaatcggaatcattccatattattttatattattgctggctgctaagaacaattaacacactaacattttagttaaatttgcatgtgatatttgaagatcatatatttgataaataacttgtatccagaatacatgtagaactcttataataaaagacttaatagcatcttacaataactcaacaataaagagacaactcagttgaaaagataggcaaaggattttgcagagaagatctacaaaaggccaataagcacaggaaaagaagaataacattactagccgtcaaggacatgcaagtcacaccaacaatgagataaccatttcacatgttctaggatggctatcaaaaagacagacaaggatgtggagaaatcggagccctcatacttgctggtgagaatgtaaaatggtacagctgctgtaagaaaacagcctggcagttccccaaaatattcaacatatagttaccatatgactcagcaaatatactcctaggtatatatacccatgagacatgaaaacacacttctaacacagaaacttgtacacagattatcattcataatgtctagaaagtagaatcaactcaaatgtctatcagctaatgaatggattaacaaatatgcctatacattagaatgttaattattcagcagtaaaaagcaatgaagtacagatacgtgctacaacataggtgaaccttgacgacatgctcagagaaagaagccagtcacaaagtactgcacattgtatgatttcatttatgtgaaatgcccagaataggcaaatccatagggacaggaagtagactaacggttgggggatgggaaggttaggggagtagaactcctaatggctgctacgtttctttgaggantgatgaaaatcacttttgattgtgctgatggttgcacaactcnttggatatactaaaaccattgacctacacacttaaatgggtgaattgtatggtatttaaattctatcttaataaagctctttaacaataatatatatttacaaataaaggctgagaatccctaaatctacattttccggttccagtttttaaaacttcaaacaaaatgttaatgtcagcagcactggattggctgtccagaggttctagccctaggacttttcattagccagttgtgtccctggaagcaagacactcatttgtgaaatgagaataatgtatataatttaatcccataatttttaaggtccttttcctgaattttaatatagggcaaaataatgtaacttttttttttttttgagatggagtctcactttgtcgcccaggctggaatacagtggcacaatcttggctcactgcaacctctacattccaggttcaagctagtctcctgcctcagcctcctgagtagctgggattacaggcacacgccaccacgtccagctaattttttgtatttttagtagagacggggtgtcgccatgttggtcaggctggtctcgaactgctgacctgatgatccgcctgccttggcctcccaaagtgctgggattacaggcgtgagccactgcacctagccccaaaataacgtaacttttaaaaaacttgatatttaagtcttaaaagttgtagacatttcggagatactgttacggtcagaggcttagaaatcattgccaggttactttggctgcttattagaatcaccatgggagcttttaaaacatacctgtgcccgggtcataccgccagagagcctgatttaactggtctccagtggtcttccagcatctcactgctctccttcccttgctctccttatcccttgtcttttgcttacatcatgattttaatgtgcaggcaaagttgagagccactggctttgctaatgagcaatgctgtattggcagcatcaaaagtcagtcattttgtttcantttttattacttgataccatatttatcaacttgtgggttggggatggagagggtatataaaacaacaggtagacatataatagaaaatgtctataaaacatttcacaatttaagttgtgcctgcttataacgatttcttacatcagttttagatataaattactggttatataggttcagctttcagcatgtcttaatttgccactggttttatgaattttcctagacttatcattgtaatagaacataatatttcttattattttataatatctatattactaaagtgttntcatttcatttccataggtcataggttttggatctgttaaaattgcagcattcatagctatggtaggaattctgtctattgtggctcagacggcctttcttagcatcttgatgagatcattaggaaataagaatactgtcctccttggcttgggcttccagatgctccagttagcctggtacggttttggatcacaggcctggatgatgtgggcagcagggaccgtggctgccatgtccagcatcacgtttccggcaatcagtgccctcgtctctcggaatgcagagtcagatcagcaaggagttgcccaggggatcataactggaataagaggactatgcaatggcctggggccagcactgtatggcttcatattctacatgttccatgtggaactgactgagttgggcccgaaattgaattctaacaacgttcccctgcagggagctgtcatcccaggcccgccgtttttatttggggcatgtatagtccttatgtcttttctggttgccttattcattcctgaatacagtaaagccagtggagttcaaaaacacagtaacagcagcagcggcagcctgaccaacaccccagaacggggcagtgatgaggacattgagccactactgcaagacagcagcatctgggagctctcttcatttgaggagcctgggaatcagtgcactgagctgtaaactcggcagaaagtgggattctgcatacgccatctctgagagccatggagggagccacacccctggtgacttcatggtgctggatgggagacgctagcggcatccttcagggccaagtttgataaataccaccgccatcattctgctcatcctcctcctgtttttttttttctcttacattctttttttttttcctgtttatacattagaacaagataagatttgaaatacttccttgcaaataatgtgcaactcccaaggtgaaactcaaatagaaaaagtcatctctctggtagaaaggatggctttcctgtaatgactatagagtaagagtggcagcaatctttccatgcccttttcagcagaaggcacagaacagtagcgggactgccatctctggcaagatttcaggtaaagaatctcttcttaatttctaccttcctgtttctctgaatcagcccataggtgttgatgagtggccactcttaaagagtcactcagtatcagggatctactgtctttgttcaaaggtcaaataaaaacctagtctccttttattctactttctattcttagctagaatgaaactcagcatatatacacttctggacataataatattgaatagtaattacctttactagatgaaagaaattttcattacaaacttaaatcatgtaaaactcaacaactcagattcctggacctggtgtcctggttgggtccaaggtgattttacagaagaaaaaaacaactcaagcattctggtggcaacatagagattgtaggctgcttctaagaaagttattaacaatttggaaattcctaagtaggatgagagttagtaactggatacgagtgaagtttatatccaagttcagactcaaaggcattattatgatttgcttcttcccatgtcttccatgtcctgcttctcaaagtttttctcatccatcacactcctgccttaactgctctgagtatgcatttgttttcaattcatctttatttcaatctgtttaacttttgaatcgcatgggaatacgcacattaagttcctttctaaaataaggttttatgaagctgagtttcacgataagtgtcttgctattttttgagatgttttatggacaaagaaaactttacagatttatatgtattttgctgcaccagtaaatggaccattaactagggcccacctttaacagagcacccctttgaaagttttataggtatgaaatatatgtagatatttgtaaagggttttaatttttttttttgatggggtgctgtgtaaatcttgtatttataaatgtaatgaaggtattgacagaaaaaaatatatacaacttttataaaggattgtgtactgactgaatacatttaaaagaaaatatattttgaaacctgttctgctatgaacagagataacatatctttttactatgctattggtttttaggttaagcttcctaatgcataataaatttacagtggttactttta

SEQ ID NO: 321950 - DNA, 3010 bp, Homo sapiens
aggctggtaccggccggagtgtaaggatcaagggccagtcgcgagctacaaggctttggccgaccaagtgtgtaccatgctgctattgtcatcttccttgaattctttgcgtggggcctgttgacaactccaatgttgactgttctacatgaaacattttctcaacacacattcctcatgaatggtctcattcaaggtgtaaagggcctgctctcttttttgagtgccccactcattggtgccctgtctgatgtgtgggggaggaagccctttctcctcggcactgtattctttacctgcttcccaatcccactgatgaggatcagcccatggtggtattttgcgatgatttctgtgtctggagtcttctcggtcacgttttctgttatatttgcctatgtagctgatgtcactcaggagcacgagcgaagtacagcttatggatgggtctcagccacctttgcggctagtcttgtcagcagcccggccattggagcatatctttctgccagttacggagacagcctcgttgtgctggtggccacagtggtggctcttctggacatctgcttcatcttagtggctgttccagaatctctgcctgagaaaatgagaccggtttcctggggagctcagatttcttggaaacaagcagacccttttgcgtcgttgaagaaagttggaaaagattctactgtcttactaatctgcatcaccgtgtttctttcataccttcctgaagctggacagtattcaagtttttttctctatctcaggcaggtcataggttttggatctgttaaaattgcagcattcatagctatggtaggaattctgtctattgtggctcagacggcctttcttagcatcttgatgagatcattaggaaataagaatactgtcctccttggcttgggcttccagatgctccagttagcctggtacggttttggatcacaggcctggatgatgtgggcagcagggaccgtggctgccatgtccagcatcacgtttccggcaatcagtgccctcgtctctcggaatgcagagtcagatcagcaaggagttgcccaggggatcataactggaataagaggactatgcaatggcctggggccagcactgtatggcttcatattctacatgttccatgtggaactgactgagttgggcccgaaattgaattctaacaacgttcccctgcagggagctgtcatcccaggcccgccgtttttatttggggcatgtatagtccttatgtcttttctggttgccttattcattcctgaatacagtaaagccagtggagttcaaaaacacagtaacagcagcagcggcagcctgaccaacaccccagaacggggcagtgatgaggacattgagccactactgcaagacagcagcatctgggagctctcttcatttgaggagcctgggaatcagtgcactgagctgtaaactcggcagaaagtgggattctgcatacgccatctctgagagccatggagggagccacacccctggtgacttcatggtgctggatgggagacgctagcggcatccttcagggccaagtttgataaataccaccgccatcattctgctcatcctcctcctgtttttttttttctcttacattctttttttttttcctgtttatacattagaacaagataagatttgaaatacttccttgcaaataatgtgcaactcccaaggtgaaactcaaatagaaaaagtcatctctctggtagaaaggatggctttcctgtaatgactatagagtaagagtggcagcaatctttccatgcccttttcagcagaaggcacagaacagtagcgggactgccatctctggcaagatttcaggtaaagaatctcttcttaatttctaccttcctgtttctctgaatcagcccataggtgttgatgagtggccactcttaaagagtcactcagtatcagggatctactgtctttgttcaaaggtcaaataaaaacctagtctccttttattctactttctattcttagctagaatgaaactcagcatatatacacttctggacataataatattgaatagtaattacctttactagatgaaagaaattttcattacaaacttaaatcatgtaaaactcaacaactcagattcctggacctggtgtcctggttgggtccaaggtgattttacagaagaaaaaaacaactcaagcattctggtggcaacatagagattgtaggctgcttctaagaaagttattaacaatttggaaattcctaagtaggatgagagttagtaactggatacgagtgaagtttatatccaagttcagactcaaaggcattattatgatttgcttcttcccatgtcttccatgtcctgcttctcaaagtttttctcatccatcacactcctgccttaactgctctgagtatgcatttgttttcaattcatctttatttcaatctgtttaacttttgaatcgcatgggaatacgcacattaagttcctttctaaaataaggttttatgaagctgagtttcacgataagtgtcttgctattttttgagatgttttatggacaaagaaaactttacagatttatatgtattttgctgcaccagtaaatggaccattaactagggcccacctttaacagagcacccctttgaaagttttataggtatgaaatatatgtagatatttgtaaagggttttaatttttttttttgatggggtgctgtgtaaatcttgtatttataaatgtaatgaaggtattgacagaaaaaaatatatacaacttttataaaggattgtgtactgactgaatacatttaaaagaaaatatattttgaaacctgttctgctatgaacagagataacatatctttttactatgctattatgcattaggaagcttaacctaaaaaccaatagcatagtaaaaagatatgttatctctgttcatagcagaacaggtttcaaaatatattttctgtcgac

SEQ ID NO: 321951 - DNA, 2724 bp, Homo sapiens
aggctggtaccggccggagtgtaaggatcaagggccagtcgcgagctacaaggctttggccgaccaagtgtgtaccatgctgctattgtcatcttccttgaattctttgcgtggggcctgttgacaactccaatgttgactgttctacatgaaacattttctcaacacacattcctcatgaatggtctcattcaaggtgtaaagggcctgctctcttttttgagtgccccactcattggtgccctgtctgatgtgtgggggaggaagccctttctcctcggcactgtattctttacctgcttcccaatcccactgatgaggatcagcccatggtggtattttgcgatgatttctgtgtctggagtcttctcggtcacgttttctgttatatttgcctatgtagctgatgtcactcaggagcacgagcgaagtacagcttatggatgggtctcagccacctttgcggctagtcttgtcagcagcccggccattggagcatatctttctgccagttacggagacagcctcgttgtgctggtggccacagtggtggctcttctggacatctgcttcatcttagtggctgttccagaatctctgcctgagaaaatgagaccggtttcctggggagctcagatttcttggaaacaagcagacccttttgcgtcgttgaagaaagttggaaaagattctactgtcttactaatctgcatcaccgtgtttctttcataccttcctgaagctggacagtattcaagtttttttctctatctcaggcaggtcataggttttggatctgttaaaattgcagcattcatagctatggtaggaattctgtctattgtggctcagacggcctttcttagcatcttgatgagatcattaggaaataagaatactgtcctccttggcttgggcttccagatgctccagttagcctggtacggttttggatcacaggcctggatgatgtgggcagcagggaccgtggctgccatgtccagcatcacgtttccggcaatcagtgccctcgtctctcggaatgcagagtcagatcagcaaggagttgcccaggggatcataactggaataagaggactatgcaatggcctggggccagcactgtatggcttcatattctacatgttccatgtggaactgactgagttgggcccgaaattgaattctaacaacgttcccctgcagggagctgtcatcccaggcccgccgtttttatttggggcatgtatagtccttatgtcttttctggttgccttattcattcctgaatacagtaaagccagtggagttcaaaaacacagtaacagcagcagcggcagcctgaccaacaccccagaacggggcagtgatgaggacattgagccactactgcaagacagcagcatctgggagctctcttcatttgaggagcctgggaatcagtgcactgagctgtaaactcggcagaaagtgggattctgcatacgccatctctgagagccatggagggagccacacccctggtgacttcatggtgctggatgggagacgctagcggcatccttcagggccaagtttgataaataccaccgccatcattctgctcatcctcctcctgtttttttttttctcttacattctttttttttttcctgtttatacattagaacaagataagatttgaaatacttccttgcaaataatgtgcaactcccaaggtgaaactcaaatagaaaaagtcatctctctggtagaaaggatggctttcctgtaatgactatagagtaagagtggcagcaatctttccatgcccttttcagcagaaggcacagaacagtagcgggactgccatctctggcaagatttcaggtaaagaatctcttcttaatttctaccttcctgtttctctgaatcagcccataggtgttgatgagtggccactcttaaagagtcactcagtatcagggatctactgtctttgttcaaaggtcaaataaaaacctagtctccttttattctactttctattcttagctagaatgaaactcagcatatatacacttctggacataataatattgaatagtaattacctttactagatgaaagaaattttcattacaaacttaaatcatgtaaaactcaacaactcagattcctggacctggtgtcctggttgggtccaaggtgattttacagaagaaaaaaacaactcaagcattctggtggcaacatagagattgtaggctgcttctaagaaagttattaacaatttggaaattcctaagtaggatgagagttagtaactggatacgagtgaagtttatatccaagttcagactcaaaggcattattatgatttgcttcttcccatgtcttccatgtcctgcttctcaaagtttttctcatccatcacactcctgccttaactgctctgagtatgcatttgttttcaattcatctttatttcaatctgtttaacttttgaatcgcatgggaatacgcacattaagttcctttctaaaataaggttttatgaagctgagtttcacgataagtgtcttgctattttttgagatgttttatggacaaagaaaactttacagatttatatgtattttgctgcaccagtaaatggaccattactctgtttataatgtatgaggtttgcgaaaaattttacaatttataaggatggtacgcgatactttaaaaatttttgga

SEQ ID NO: 321952 - DNA, 4380 bp, Homo sapiens
ggacgggatttgtcatgtttctaggccagcccgataatcccttaggatgacggctctgctgggtccagttgctcagcattgattcctctgctccattcctgcccctctctgccccctccctctgtcctatatatcttcacttctctcctttctccccatcctgtgttctgggagagtggcctcaagttggggcttggctgggagaagtgcagagtgaagggatcaggactgaaatgagtttggaggaggataagcaatcaggatctcaggaaacttctagatctttttctagtttcaattctgcccttaatctatcccttccctttcccagggccttctcacagcccaccactgctccctgaagttccctgtctccattctctagcacgtgaaatcgctaaagaacattctccacttcctgaccatggttcccatggagatagtgatcccctcctcttcacccccagggcaggttgtttccatgggaactgtctaccctgctataggagaaggctatgacctcccgcagaccctctgactcctttagtagctgatttcttgtcctcaaccacccgcctcctgtaaggtgctcctatagggggtggaaaaggtgatggtgctggggtgtgagttgtctgggtcaacaagggttgttgtgggagtagaggccctgctcacaggtgcttcctctcctctccctggggtggggccagccaacaagcacaagccatggattgaggcagagtaccagggcatcgtcatggagaatgacaacacggtcctactgaatccaccactctttgccttggacaaggatgccccgctgcgctatgcaggtgagatctgcggcttccggctccatgggtctggggtgccctttgaggctgtgatccttgacaaggcgacaggagaggggctgatccgggccaaggagcctgtggactgcgaggcccagaaggaacacaccttcaccatccaggcctatgactgtggcgagggccccgacggggccaacaccaagaagtcccacaaggccactgtgcatgtgcgggtcaacgatgtgaacgagtttgccccagtgtttgtggaacggctgtatcgtgcggctgtgacagaggggaagctgtacgatcgcatcctgcgggtggaagccattgacggtgactgctccccccagtacagccagatctgctactatgagattctcacacccaacacccctttcctcattgacaatgacgggaacattgagaacacagagaagctgcagtacagtggtgagaggctctataagtttacagtgacagcttatgactgtgggaagaagcgggcagcagatgatgctgaggtggagattcaggtgaagcccacctgtaaacccagctggcaaggctggaacaaaaggatcgaatatgcaccaggtgctgggagcttggctttgttccctggtatccgcctggagacctgtgatgaaccactctggaacattcaggccaccatagagctgcagaccagccatgtggccaagggctgtgaccgtgacaactactcagagcgggcgctgcggaaactctgtggtgctgccactggggaggtggatctgttgcccatgcctggccccaatgccaactggacagcaggactctcggtgcactacagccaggacagcagcctgatctactggttcaatggcacccaggctgtgcaggtgcccctgggtggccccagtgggctgggctctgggccccaggacagcctcagtgaccacttcaccctgtccttctggatgaagcatggcgtaactcccaacaagggcaagaaggaagaggaaaccatcgtatgtaacactgtccagaatgaggacggcttctctcactactcgctgactgtccacggctgtaggattgccttcctctactggcccctgcttgagagtgcccgcccagtcaagttcctctggaagctggagcaggtctgtgatgatgagtggcaccactacgctctgaacctcgagttccccacagtcacactctataccgacggcatctccttcgaccctgccctcatccatgacaatggcctcatccacccaccccgaagggagcctgctctcatgattggggcctgctggactgaggagaagaacaaagagaaggaaaagggagacaacagtacagacaccacccaaggagaccctttgtcgatccaccactacttccatggctacctggctggtttcagcgtgcgctcaggtcgcctggagagccgcgaggtcatcgagtgcctctatgcatgtcgggaggggctggactatagggatttcgagagcctgggcaaaggcatgaaggtccacgtgaacccctcacagtccctgctcaccctggagggggatgatgtggagaccttcaaccatgccctgcagcatgtggcttacatgaacactctgcgctttgccacgcccggcgtcaggcccctgcgcctcaccactgctgtcaagtgcttcagcgaagagtcctgcgtctccatccctgaagtggagggctacgtggtcgtccttcagcctgacgccccccagatcctgctgagtggcactgctcattttgcccgcccagctgtggactttgagggaaccaacggcgtccctttgttccctgatcttcaaatcacctgctccatttctcaccaggtggaggccaaaaaggatgagagttggcagggcacagtgacagacacacgcatgtcggatgagattgtgcacaacctggatggctgtgaaatttctctggtgggggatgacctggatcccgagcgggaaagcctgctcctggacacaacctctctgcagcagcgggggctggagctcaccaacacatctgcctacctcactattgctggggtggagagcatcactgtgtatgaagagatcctgaggcaggctcgttatcggctgcgacacggagctgccctctacaccaggaagttccggctttcctgctcggaaatgaatggccgttactccagcaatgaattcatcgtggaggtcaatgtcctgcacagcatgaaccgggttgcccaccccagccacgtgctcagctcccagcagttcctgcaccgtggtcaccagcccccgcctgagatggctggacacagcctagccagctcccacagaaactccatgatacccagcgccgcaaccctcatcattgtggtgtgcgtgggcttcctggtgctcatggtcgtcctgggcctggtgcgcatccattcccttcaccgccgcgtctcaggggccggcgggcctccaggggcctccagtgaccccaaggacccagacctcttctgggatgactcagctctcaccatcattgtgaaccccatggagtcctaccagaatcggcagtcctgtgtgacgggggctgttgggggccagcaggaggatgaggacagcagtgactcggaggtggccgattcccccagcagcgacgagagacgcatcatcgagacccccccacaccgctactaaggcctacacctctccccacgcagagggggaattctgccctggtgaaacagacactccagacatgggagaaggactttctgggaacacagagaccaagagggagagaggcttcagaaccagtcctcctttcatttcaaaaccccagcgggccctctggagtccgccctgcccctcccccggccccccatccctcacttctgggctgtcatgctcctggtgtgccccttgcactggggctggctgggttggaaagtgggctggacttcagctgcctttctacccccaatggcagctgcccccttagcactcactgtgttggggagagggtgacgattgcaatggctggggctggggctggggctgggggtgggattgaaggaaaccctctcctctccccttcccttctctctcctgtccatgggaagcttttccccctctgcagggctccctcagctggaccatcgtccctgcttctcttatgatcgccccacctcatttccatttcagtctggggaccccatttctccctcctttccaacttccttcctttcttgtcctgtttcccttcctgcccttgcagtcctgaggtcctgcagccccggcccctcctccgtgacctggtgtggccaggctgcggggacgggaggggacgtgggggccccgggtgtacatatataatgtatattttttcaatgttgtcgtgagtgcagcccatgttcctgcgtgcagctcacggccttgtgtgtatgtgtgtgtgtgtgtgtgtgaggcatcgtcatgtcctggggcaggggcggggggttgggtgtggtgagggaggggacatatcctagggttttcaaataaaacaatcagaaaaa

SEQ ID NO: 321953 - DNA, 831 bp, Homo sapiens
gttggttgcctggcatgtagtgaggacaaggatgttattcctcgagctggataggcagcaaagcactagtaagccctgttggtagaactgggaataaagggactgtcccctgtctcccaggagatggggcagtgcctagggttagctctctgaagacgaattacctgagaggctcttgcccctaccctactctcccaggtctgtgatgatgagtggcaccactacgctctgaacctcgagttccccacagtcacactctataccgacggcatctccttcgaccctgccctcatccatgacaatggcctcatccacccaccccgaagggagcctgctctcatgattggggcctgctggactggtaagcttctcagtgaagactccagtggttcaggatttgggaagggaggtaggctggtgaggagcaagggcagtctgacccagcagctgaggccgcctcctgcatctctctgcagctgtgcagggtgactctgaagatctccatgggaagggaccacagcctccctcccgtatctcccactaatccaatgggtcatcacctctgacttggaggaattaacttctcacgcatccccagactctctctctgtaactccagccagtttccacttttttccatcaaagtgatgatgacttccatagcccattcccctgctcaaggagagtaaccccttagagtgtcctcggtcttccaacttttaagccattgaaaaaatttttctcctcttgggagtgtgtgtgtgcacatgtgcctgtctgtcttaccagagcccacgtgtttcctcagcagcatatcgtatttgggggttt

SEQ ID NO: 321954 - DNA, 537 bp, Homo sapiens
gaatcgagctggtaccatcatttgaagactgtggcagagcgggcgctgcggaaactctgtggtgctgccactggggaggtggatctgttgcccatgcctggccccaatgccaactggacagcaggactctcggtgcactacagccaggacagcagcctgatctactggttcaatggcacccaggctgtgcaggtgcccctgggtggccccagtgggctgggctctgggccccaggacagcctcagtgaccacttcaccctgtccttctggatgaagcatggcgtaactcccaacaagggcaagaaggaagaggaaaccatcgtatgtaacactgtccagaatgaggacggcttctctcactactcgctgactgtccacggctgtaggattgccttcctctactggcccctgcttgagagtgcccgcccagtcaagttcctctggaagctggagcaggctgaccacaaggaccagtgaggactaatttgagttttcacctccttctgtttctcttgcaagtcctggtggagtggctga

SEQ ID NO: 321955 - DNA, 4007 bp, Homo sapiens
cctgcagtagcggggttggggtgggagtgagagagtgaggacgctgggctgggggaaacgggaagccgctgcaagtccaccgcctcagctacccagattgggatctgcccaggcccgctttatggactagtgtgggcggcaggctcctttccgtccctgccctgctgtaccccgctccttggagaccccctgtatccctcccgcaaggtggaatccgcaggctggaggctcccaggggaggcaaacgcctggccctgccctgccccacgccgcaccatgaccctcctgctgctgccccttctgctggcctctctgctcgcgtcctgctcctgtaacaaagccaacaagcacaagccatggattgaggcagagtaccagggcatcgtcatggagaatgacaacacggtcctactgaatccaccactctttgccttggacaaggatgccccgctgcgctatgcaggtgagatctgcggcttccggctccatgggtctggggtgccctttgaggctgtgatccttgacaaggcgacaggagaggggctgatccgggccaaggagcctgtggactgcgaggcccagaaggaacacaccttcaccatccaggcctatgactgtggcgagggccccgacggggccaacaccaagaagtcccacaaggccactgtgcatgtgcgggtcaacgatgtgaacgagtttgccccagtgtttgtggaacggctgtatcgtgcggctgtgacagaggggaagctgtacgatcgcatcctgcgggtggaagccattgacggtgactgctccccccagtacagccagatctgctactatgagattctcacacccaacacccctttcctcattgacaatgacgggaacattgagaacacagagaagctgcagtacagtggtgagaggctctataagtttacagtgacagcttatgactgtgggaagaagcgggcagcagatgatgctgaggtggagattcaggtgaagcccacctgtaaacccagctggcaaggctggaacaaaaggatcgaatatgcaccaggtgctgggagcttggctttgttccctggtatccgcctggagacctgtgatgaaccactctggaacattcaggccaccatagagctgcagaccagccatgtggccaagggctgtgaccgtgacaactactcagagcgggcgctgcggaaactctgtggtgctgccactggggaggtggatctgttgcccatgcctggccccaatgccaactggacagcaggactctcggtgcactacagccaggacagcagcctgatctactggttcaatggcacccaggctgtgcaggtgcccctgggtggccccagtgggctgggctctgggccccaggacagcctcagtgaccacttcaccctgtccttctggatgaagcatggcgtaactcccaacaagggcaagaaggaagaggaaaccatcgtatgtaacactgtccagaatgaggacggcttctctcactactcgctgactgtccacggctgtaggattgccttcctctactggcccctgcttgagagtgcccgcccagtcaagttcctctggaagctggagcaggtctgtgatgatgagtggcaccactacgctctgaacctcgagttccccacagtcacactctataccgacggcatctccttcgaccctgccctcatccatgacaatggcctcatccacccaccccgaagggagcctgctctcatgattggggcctgctggactgaggagaagaacaaagagaaggaaaagggagacaacagtacagacaccacccaaggagaccctttgtcgatccaccactacttccatggctacctggctggtttcagcgtgcgctcaggtcgcctggagagccgcgaggtcatcgagtgcctctatgcatgtcgggaggggctggactatagggatttcgagagcctgggcaaaggcatgaaggtccacgtgaacccctcacagtccctgctcaccctggagggggatgatgtggagaccttcaaccatgccctgcagcatgtggcttacatgaacactctgcgctttgccacgcccggcgtcaggcccctgcgcctcaccactgctgtcaagtgcttcagcgaagagtcctgcgtctccatccctgaagtggagggctacgtggtcgtccttcagcctgacgccccccagatcctgctgagtggcactgctcattttgcccgcccagctgtggactttgagggaaccaacggcgtccctttgttccctgatcttcaaatcacctgctccatttctcaccaggtggaggccaaaaaggatgagagttggcagggcacagtgacagacacacgcatgtcggatgagattgtgcacaacctggatggctgtgaaatttctctggtgggggatgacctggatcccgagcgggaaagcctgctcctggacacaacctctctgcagcagcgggggctggagctcaccaacacatctgcctacctcactattgctggggtggagagcatcactgtgtatgaagagatcctgaggcaggctcgttatcggctgcgacacggagctgccctctacaccaggaagttccggctttcctgctcggaaatgaatggccgttactccagcaatgaattcatcgtggaggtcaatgtcctgcacagcatgaaccgggttgcccaccccagccacgtgctcagctcccagcagttcctgcaccgtggtcaccagcccccgcctgagatggctggacacagcctagccagctcccacagaaactccatgatacccagcgccgcaaccctcatcattgtggtgtgcgtgggcttcctggtgctcatggtcgtcctgggcctggtgcgcatccattcccttcaccgccgcgtctcaggggccggcgggcctccaggggcctccagtgaccccaaggacccagacctcttctgggatgactcagctctcaccatcattgtgaaccccatggagtcctaccagaatcggcagtcctgtgtgacgggggctgttgggggccagcaggaggatgaggacagcagtgactcggaggtggccgattcccccagcagcgacgagagacgcatcatcgagacccccccacaccgctactaaggcctacacctctccccacgcagagggggaattctgccctggtgaaacagacactccagacatgggagaaggactttctgggaacacagagaccaagagggagagaggcttcagaaccagtcctcctttcatttcaaaaccccagcgggccctctggagtccgccctgcccctcccccggccccccatccctcacttctgggctgtcatgctcctggtgtgccccttgcactggggctggctgggttggaaagtgggctggacttcagctgcctttctacccccaatggcagctgcccccttagcactcactgtgttggggagagggtgacgattgcaatggctggggctggggctggggctgggggtgggattgaaggaaaccctctcctctccccttcccttctctctcctgtccatgggaagcttttccccctctgcagggctccctcagctggaccatcgtccctgcttctcttatgatcgccccacctcatttccatttcagtctggggaccccatttctccctcctttccaacttccttcctttcttgtcctgtttcccttcctgcccttgcagtcctgaggtcctgcagccccggcccctcctccgtgacctggtgtggccaggctgcggggacgggaggggacgtgggggccccgggtgtacatatataatgtatattttttcaatgttgtcgtgagtgcagcccatgttcctgcgtgcagctcacggccttgtgtgtatgtgtgtgtgtgtgtgtgtgaggcatcgtcatgtcctggggcaggggcggggggttgggtgtggtgagggaggggacatatcctagggttttcaaataaaacaatcagaaaaa

SEQ ID NO: 321956 - DNA, 3765 bp, Homo sapiens
ccagagcaccaaggaggggctttaatggaggtggagatggggggtggggaggagcgtgctgactgcctcagtctcagggatagatgggcaggctccctcctgttctggctctccgtcgggattcctgcttgctcctttctggcatatgggtgtaccgtgtcgaggctgtaccttggtgtacagtataaggctgtatctcgttgtgcccatattgaggctgtttgttggtgtacagtattgaggctgtatcttggtgtacggtatcgaacctgtccctccatgtgccgtatcaaggctgtatcttgatgtaccgtatcgaggctgtacctcggtgtgctgtatcaaggctgtatctcaatgtataatgtcgaggctggctgccgtgtcttcatccctccttctctctggtatatgcagggccactgtgcatgtgcgggtcaacgatgtgaacgagtttgccccagtgtttgtggaacggctgtatcgtgcggctgtgacagaggggaagctgtacgatcgcatcctgcgggtggaagccattgacggtgactgctccccccagtacagccagatctgctactatgagattctcacacccaacacccctttcctcattgacaatgacgggaacattgagaacacagagaagctgcagtacagtggtgagaggctctataagtttacagtgacagcttatgactgtgggaagaagcgggcagcagatgatgctgaggtggagattcaggtgaagcccacctgtaaacccagctggcaaggctggaacaaaaggatcgaatatgcaccaggtgctgggagcttggctttgttccctggtatccgcctggagacctgtgatgaaccactctggaacattcaggccaccatagagctgcagaccagccatgtggccaagggctgtgaccgtgacaactactcagagcgggcgctgcggaaactctgtggtgctgccactggggaggtggatctgttgcccatgcctggccccaatgccaactggacagcaggactctcggtgcactacagccaggacagcagcctgatctactggttcaatggcacccaggctgtgcaggtgcccctgggtggccccagtgggctgggctctgggccccaggacagcctcagtgaccacttcaccctgtccttctggatgaagcatggcgtaactcccaacaagggcaagaaggaagaggaaaccatcgtatgtaacactgtccagaatgaggacggcttctctcactactcgctgactgtccacggctgtaggattgccttcctctactggcccctgcttgagagtgcccgcccagtcaagttcctctggaagctggagcaggtctgtgatgatgagtggcaccactacgctctgaacctcgagttccccacagtcacactctataccgacggcatctccttcgaccctgccctcatccatgacaatggcctcatccacccaccccgaagggagcctgctctcatgattggggcctgctggactgaggagaagaacaaagagaaggaaaagggagacaacagtacagacaccacccaaggagaccctttgtcgatccaccactacttccatggctacctggctggtttcagcgtgcgctcaggtcgcctggagagccgcgaggtcatcgagtgcctctatgcatgtcgggaggggctggactatagggatttcgagagcctgggcaaaggcatgaaggtccacgtgaacccctcacagtccctgctcaccctggagggggatgatgtggagaccttcaaccatgccctgcagcatgtggcttacatgaacactctgcgctttgccacgcccggcgtcaggcccctgcgcctcaccactgctgtcaagtgcttcagcgaagagtcctgcgtctccatccctgaagtggagggctacgtggtcgtccttcagcctgacgccccccagatcctgctgagtggcactgctcattttgcccgcccagctgtggactttgagggaaccaacggcgtccctttgttccctgatcttcaaatcacctgctccatttctcaccaggtggaggccaaaaaggatgagagttggcagggcacagtgacagacacacgcatgtcggatgagattgtgcacaacctggatggctgtgaaatttctctggtgggggatgacctggatcccgagcgggaaagcctgctcctggacacaacctctctgcagcagcgggggctggagctcaccaacacatctgcctacctcactattgctggggtggagagcatcactgtgtatgaagagatcctgaggcaggctcgttatcggctgcgacacggagctgccctctacaccaggaagttccggctttcctgctcggaaatgaatggccgttactccagcaatgaattcatcgtggaggtcaatgtcctgcacagcatgaaccgggttgcccaccccagccacgtgctcagctcccagcagttcctgcaccgtggtcaccagcccccgcctgagatggctggacacagcctagccagctcccacagaaactccatgatacccagcgccgcaaccctcatcattgtggtgtgcgtgggcttcctggtgctcatggtcgtcctgggcctggtgcgcatccattcccttcaccgccgcgtctcaggggccggcgggcctccaggggcctccagtgaccccaaggacccagacctcttctgggatgactcagctctcaccatcattgtgaaccccatggagtcctaccagaatcggcagtcctgtgtgacgggggctgttgggggccagcaggaggatgaggacagcagtgactcggaggtggccgattcccccagcagcgacgagagacgcatcatcgagacccccccacaccgctactaaggcctacacctctccccacgcagagggggaattctgccctggtgaaacagacactccagacatgggagaaggactttctgggaacacagagaccaagagggagagaggcttcagaaccagtcctcctttcatttcaaaaccccagcgggccctctggagtccgccctgcccctcccccggccccccatccctcacttctgggctgtcatgctcctggtgtgccccttgcactggggctggctgggttggaaagtgggctggacttcagctgcctttctacccccaatggcagctgcccccttagcactcactgtgttggggagagggtgacgattgcaatggctggggctggggctggggctgggggtgggattgaaggaaaccctctcctctccccttcccttctctctcctgtccatgggaagcttttccccctctgcagggctccctcagctggaccatcgtccctgcttctcttatgatcgccccacctcatttccatttcagtctggggaccccatttctccctcctttccaacttccttcctttcttgtcctgtttcccttcctgcccttgcagtcctgaggtcctgcagccccggcccctcctccgtgacctggtgtggccaggctgcggggacgggaggggacgtgggggccccgggtgtacatatataatgtatattttttcaatgttgtcgtgagtgcagcccatgttcctgcgtgcagctcacggccttgtgtgtatgtgtgtgtgtgtgtgtgtgaggcatcgtcatgtcctggggcaggggcggggggttgggtgtggtgagggaggggacatatcctagggttttcaaataaaacaatcagaaaaa

SEQ ID NO: 321957 - DNA, 2606 bp, Homo sapiens
gttggttgcctggcatgtagtgaggacaaggatgttattcctcgagctggataggcagcaaagcactagtaagccctgttggtagaactgggaataaagggactgtcccctgtctcccaggagatggggcagtgcctagggttagctctctgaagacgaattacctgagaggctcttgcccctaccctactctcccaggtctgtgatgatgagtggcaccactacgctctgaacctcgagttccccacagtcacactctataccgacggcatctccttcgaccctgccctcatccatgacaatggcctcatccacccaccccgaagggagcctgctctcatgattggggcctgctggactgaggagaagaacaaagagaaggaaaagggagacaacagtacagacaccacccaaggagaccctttgtcgatccaccactacttccatggctacctggctggtttcagcgtgcgctcaggtcgcctggagagccgcgaggtcatcgagtgcctctatgcatgtcgggaggggctggactatagggatttcgagagcctgggcaaaggcatgaaggtccacgtgaacccctcacagtccctgctcaccctggagggggatgatgtggagaccttcaaccatgccctgcagcatgtggcttacatgaacactctgcgctttgccacgcccggcgtcaggcccctgcgcctcaccactgctgtcaagtgcttcagcgaagagtcctgcgtctccatccctgaagtggagggctacgtggtcgtccttcagcctgacgccccccagatcctgctgagtggcactgctcattttgcccgcccagctgtggactttgagggaaccaacggcgtccctttgttccctgatcttcaaatcacctgctccatttctcaccaggtggaggccaaaaaggatgagagttggcagggcacagtgacagacacacgcatgtcggatgagattgtgcacaacctggatggctgtgaaatttctctggtgggggatgacctggatcccgagcgggaaagcctgctcctggacacaacctctctgcagcagcgggggctggagctcaccaacacatctgcctacctcactattgctggggtggagagcatcactgtgtatgaagagatcctgaggcaggctcgttatcggctgcgacacggagctgccctctacaccaggaagttccggctttcctgctcggaaatgaatggccgttactccagcaatgaattcatcgtggaggtcaatgtcctgcacagcatgaaccgggttgcccaccccagccacgtgctcagctcccagcagttcctgcaccgtggtcaccagcccccgcctgagatggctggacacagcctagccagctcccacagaaactccatgatacccagcgccgcaaccctcatcattgtggtgtgcgtgggcttcctggtgctcatggtcgtcctgggcctggtgcgcatccattcccttcaccgccgcgtctcaggggccggcgggcctccaggggcctccagtgaccccaaggacccagacctcttctgggatgactcagctctcaccatcattgtgaaccccatggagtcctaccagaatcggcagtcctgtgtgacgggggctgttgggggccagcaggaggatgaggacagcagtgactcggaggtggccgattcccccagcagcgacgagagacgcatcatcgagacccccccacaccgctactaaggcctacacctctccccacgcagagggggaattctgccctggtgaaacagacactccagacatgggagaaggactttctgggaacacagagaccaagagggagagaggcttcagaaccagtcctcctttcatttcaaaaccccagcgggccctctggagtccgccctgcccctcccccggccccccatccctcacttctgggctgtcatgctcctggtgtgccccttgcactggggctggctgggttggaaagtgggctggacttcagctgcctttctacccccaatggcagctgcccccttagcactcactgtgttggggagagggtgacgattgcaatggctggggctggggctggggctgggggtgggattgaaggaaaccctctcctctccccttcccttctctctcctgtccatgggaagcttttccccctctgcagggctccctcagctggaccatcgtccctgcttctcttatgatcgccccacctcatttccatttcagtctggggaccccatttctccctcctttccaacttccttcctttcttgtcctgtttcccttcctgcccttgcagtcctgaggtcctgcagccccggcccctcctccgtgacctggtgtggccaggctgcggggacgggaggggacgtgggggccccgggtgtacatatataatgtatattttttcaatgttgtcgtgagtgcagcccatgttcctgcgtgcagctcacggccttgtgtgtatgtgtgtgtgtgtgtgtgtgaggcatcgtcatgtcctggggcaggggcggggggttgggtgtggtgagggaggggacatatcctagggttttcaaataaaacaatcagaaaaa

SEQ ID NO: 321958 - DNA, 2230 bp, Homo sapiens
cagctgagtgtgctggctgctggggagaggggcgctgcagcagggtgtgggtgtgagtgtgaggagctcctgggccatgcgcttccctacgctctgctctgtctgttgacacatgagtctcaggctgtaggtaatttgcggacggggctggaatgcgatgtgtgtatttttctaggggcttgcttgtgtgactgctggtctctgtgtgtgtttggggcacacatacatggaatagtccctcagcaacgggaccgcccagggaggagctgctgtgtatgcatggtgggcaggggtgtgcacccatgtggggagtagtgacccagctgcccgtaagggccctgggcctggaggtgcgtgtgtggggtctctgcctccacctgctgtccctggggctgcgggctttcctgcttttcttccttgtgcttcttcgagagctgtgtgtgtgtgtgcaggaggcaggcagggctgtgctcatggcggctcgctctgtggccctcacggcccacgtctgtagtgtctatgtcttccttcagggggttgcctggtctgcccagctggtggggagctgggtgatgctgcacatatggctctaccgtgccttgctggagacccccagacgcgttcctttactcccgcagtgtgagcaggcggccaggtggctggtgtgggccagcatgcaggctggcaaaggcctggctcaggtgtggggcgtggcaacctttgtgcagctgtgtgcccacacggtcttcctgagcatgtacctgtgcatgcacatctgctttgccgccatcagctctaaggtccgtgtgagagtgaacgcaccgttctgtgtctcagtgcccttgaaggtccatgcccctctgagcctgggcatcaaagtggggctgcagggccagaagcatgggagagccacgggggaggcaggtatgcctcagggggagatgttggggaagcaggaaccccagacgtcccggagccccaagcccaccaggagaagggaggtgtcacggagtgagctcagtccagtgatacccagcgccgcaaccctcatcattgtggtgtgcgtgggcttcctggtgctcatggtcgtcctgggcctggtgcgcatccattcccttcaccgccgcgtctcaggggccggcgggcctccaggggcctccagtgaccccaaggacccagacctcttctgggatgactcagctctcaccatcattgtgaaccccatggagtcctaccagaatcggcagtcctgtgtgacgggggctgttgggggccagcaggaggatgaggacagcagtgactcggaggtggccgattcccccagcagcgacgagagacgcatcatcgagacccccccacaccgctactaaggcctacacctctccccacgcagagggggaattctgccctggtgaaacagacactccagacatgggagaaggactttctgggaacacagagaccaagagggagagaggcttcagaaccagtcctcctttcatttcaaaaccccagcgggccctctggagtccgccctgcccctcccccggccccccatccctcacttctgggctgtcatgctcctggtgtgccccttgcactggggctggctgggttggaaagtgggctggacttcagctgcctttctacccccaatggcagctgcccccttagcactcactgtgttggggagagggtgacgattgcaatggctggggctggggctggggctgggggtgggattgaaggaaaccctctcctctccccttcccttctctctcctgtccatgggaagcttttccccctctgcagggctccctcagctggaccatcgtccctgcttctcttatgatcgccccacctcatttccatttcagtctggggaccccatttctccctcctttccaacttccttcctttcttgtcctgtttcccttcctgcccttgcagtcctgaggtcctgcagccccggcccctcctccgtgacctggtgtggccaggctgcggggacgggaggggacgtgggggccccgggtgtacatatataatgtatattttttcaatgttgtcgtgagtgcagcccatgttcctgcgtgcagctcacggccttgtgtgtatgtgtgtgtgtgtgtgtgtgaggcatcgtcatgtcctggggcaggggcggggggttgggtgtggtgagggaggggacatatcctagggttttcaaataaaacaatcagaaaaa

SEQ ID NO: 321959 - DNA, 3350 bp, Homo sapiens
cctgcagtagcggggttggggtgggagtgagagagtgaggacgctgggctgggggaaacgggaagccgctgcaagtccaccgcctcagctacccagattgggatctgcccaggcccgctttatggactagtgtgggcggcaggctcctttccgtccctgccctgctgtaccccgctccttggagaccccctgtatccctcccgcaaggtggaatccgcaggctggaggctcccaggggaggcaaacgcctggccctgccctgccccacgccgcaccatgaccctcctgctgctgccccttctgctggcctctctgctcgcgtcctgctcctgtaacaaagccaacaagcacaagccatggattgaggcagagtaccagggcatcgtcatggagaatgacaacacggtcctactgaatccaccactctttgccttggacaaggatgccccgctgcgctatgcaggtgagatctgcggcttccggctccatgggtctggggtgccctttgaggctgtgatccttgacaaggcgacaggagaggggctgatccgggccaaggagcctgtggactgcgaggcccagaaggaacacaccttcaccatccaggcctatgactgtggcgagggccccgacggggccaacaccaagaagtcccacaaggccactgtgcatgtgcgggtcaacgatgtgaacgagtttgccccagtgtttgtggaacggctgtatcgtgcggctgtgacagaggggaagctgtacgatcgcatcctgcgggtggaagccattgacggtgactgctccccccagtacagccagatctgctactatgagattctcacacccaacacccctttcctcattgacaatgacgggaacattgagaacacagagaagctgcagtacagtggtgagaggctctataagtttacagtgacagcttatgactgtgggaagaagcgggcagcagatgatgctgaggtggagattcaggtgaagcccacctgtaaacccagctggcaaggctggaacaaaaggatcgaatatgcaccaggtgctgggagcttggctttgttccctggtatccgcctggagacctgtgatgaaccactctggaacattcaggccaccatagagctgcagaccagccatgtggccaagggctgtgaccgtgacaactactcagagcgggcgctgcggaaactctgtggtgctgccactggggaggtggatctgttgcccatgcctggccccaatgccaactggacagcaggactctcggtgcactacagccaggacagcagcctgatctactggttcaatggcacccaggctgtgcaggtgcccctgggtggccccagtgggctgggctctgggccccaggacagcctcagtgaccacttcaccctgtccttctggatgaagcatggcgtaactcccaacaagggcaagaaggaagaggaaaccatcgtatgtaacactgtccagaatgaggacggcttctctcactactcgctgactgtccacggctgtaggattgccttcctctactggcccctgcttgagagtgcccgcccagtcaagttcctctggaagctggagcaggtctgtgatgatgagtggcaccactacgctctgaacctcgagttccccacagtcacactctataccgacggcatctccttcgaccctgccctcatccatgacaatggcctcatccacccaccccgaagggagcctgctctcatgattggggcctgctggactgaggagaagaacaaagagaaggaaaagggagacaacagtacagacaccacccaaggagaccctttgtcgatccaccactacttccatggctacctggctggtttcagcgtgcgctcaggtcgcctggagagccgcgaggtcatcgagtgcctctatgcatgtcgggaggggctggactatagggatttcgagagcctgggcaaaggcatgaaggtccacgtgaacccctcacagtccctgctcaccctggagggggatgatgtggagaccttcaaccatgccctgcagcatgtggcttacatgaacactctgcgctttgccacgcccggcgtcaggcccctgcgcctcaccactgctgtcaagtgcttcagcgaagagtcctgcgtctccatccctgaagtggagggctacgtggtcgtccttcagcctgacgccccccagatcctgctgagtggcactgctcattttgcccgcccagctgtggactttgagggaaccaacggcgtccctttgttccctgatcttcaaatcacctgctccatttctcaccaggtggaggccaaaaaggatgagagttggcagggcacagtgacagacacacgcatgtcggatgagattgtgcacaacctggatggctgtgaaatttctctggtgggggatgacctggatcccgagcgggaaagcctgctcctggacacaacctctctgcagcagcgggggctggagctcaccaacacatctgcctacctcactattgctggggtggagagcatcactgtgtatgaagagatcctgaggcaggctcgttatcggctgcgacacggagctgccctctacaccaggaagttccggctttcctgctcggaaatgaatggccgttactccagcaatgaattcatcgtggaggtcaatgtcctgcacagcatgaaccgggttgcccaccccagccacgtgctcagctcccagcagttcctgcaccgtggtcaccagcccccgcctgagatggctggacacagcctagccagctcccacagaaactccatgatacccagcgccgcaaccctcatcattgtggtgtgcgtgggcttcctggtgctcatggtcgtcctgggcctggtgcgcatccattcccttcaccgccgcgtctcaggggccggcgggcctccaggggcctccagtgaccccaaggacccagacctcttctgggatgactcagctctcaccatcattgtgaaccccatggagtcctaccagaatcggcagtcctgtgtgacgggggctgttgggggccagcaggaggatgaggacagcagtgactcggaggtggccgattcccccagcagcgacgagagacgcatcatcgagacccccccacaccgctactaaggcctacaccttctgcagggctccctcagctggaccatcgtccctgcttctctcccatgttcctgcgtgcagctcacggccttgtgtgtatgtgtgtgtgtgtgtgtgtgaggcatcgtcatgtcctggggcaggggcggggggttgggtgtggtgagggaggggacatatcctagggttttcaaataaaacaatcagaaaaa

SEQ ID NO: 321960 - DNA, 1458 bp, Homo sapiens
cctgcagtagcggggttggggtgggagtgagagagtgaggacgctgggctgggggaaacgggaagccgctgcaagtccaccgcctcagctacccagattgggatctgcccaggcccgctttatggactagtgtgggcggcaggctcctttccgtccctgccctgctgtaccccgctccttggagaccccctgtatccctcccgcaaggtggaatccgcaggctggaggctcccaggggaggcaaacgcctggccctgccctgccccacgccgcaccatgaccctcctgctgctgccccttctgctggcctctctgctcgcgtcctgctcctgtaacaaagccaacaagcacaagccatggattgaggcagagtaccagggcatcgtcatggagaatgacaacacggtcctactgaatccaccactctttgccttggacaaggatgccccgctgcgctatgcaggtgagatctgcggcttccggctccatgggtctggggtgccctttgaggctgtgatccttgacaaggcgacaggagaggggctgatccgggccaaggagcctgtggactgcgaggcccagaaggaacacaccttcaccatccaggcctatgactgtggcgagggccccgacggggccaacaccaagaagtcccacaaggccactgtgcatgtgcgggtcaacgatgtgaacgagtttgccccagtgtttgtggaacggctgtatcgtgcggctgtgacagaggggaagctgtacgatcgcatcctgcgggtggaagccattgacggtgactgctccccccagtacagccagatctgctactatgagattctcacacccaacacccctttcctcattgacaatgacgggaacattgagaacacagagaagctgcagtacagtggtgagaggctctataagtttacagtgacagcttatgactgtgggaagaagcgggcagcagatgatgctgaggtggagattcaggtgaagcccacctgtaaacccagctggcaaggctggaacaaaaggatcgaatatgcaccaggtgctgggagcttggctttgttccctgtatgatcgccccacctcatttccatttcagtctggggaccccatttctccctcctttccaacttccttcctttcttgtcctgtttcccttcctgcccttgcagtcctgaggtcctgcagccccggcccctcctccgtgacctggtgtggccaggctgcggggacgggaggggacgtgggggccccgggtgtacatatataatgtatattttttcaatgttgtcgtgagtgcagcccatgttcctgcgtgcagctcacggccttgtgtgtatgtgtgtgtgtgtgtgtgtgaggcatcgtcatgtcctggggcaggggcggggggttgggtgtggtgagggaggggacatatcctagggttttcaaataaaacaatcagaaaaa

SEQ ID NO: 321961 - DNA, 1806 bp, Homo sapiens
cagctgagtgtgctggctgctggggagaggggcgctgcagcagggtgtgggtgtgagtgtgaggagctcctgggccatgcgcttccctacgctctgctctgtctgttgacacatgagtctcaggctgtaggtaatttgcggacggggctggaatgcgatgtgtgtatttttctaggggcttgcttgtgtgactgctggtctctgtgtgtgtttggggcacacatacatggaatagtccctcagcaacgggaccgcccagggaggagctgctgtgtatgcatggtgggcaggggtgtgcacccatgtggggagtagtgacccagctgcccgtaagggccctgggcctggaggtgcgtgtgtggggtctctgcctccacctgctgtccctggggctgcgggctttcctgcttttcttccttgtgcttcttcgagagctgtgtgtgtgtgtgcaggaggcaggcagggctgtgctcatggcggctcgctctgtggccctcacggcccacgtctgtagtgtctatgtcttccttcagggggttgcctggtctgcccagctggtggggagctgggtgatgctgcacatatggctctaccgtgccttgctggagacccccagacgcgttcctttactcccgcagtgtgagcaggcggccaggtggctggtgtgggccagcatgcaggctggcaaaggcctggctcaggtgtggggcgtggcaacctttgtgcagctgtgtgcccacacggtcttcctgagcatgtacctgtgcatgcacatctgctttgccgccatcagctctaaggtccgtgtgagagtgaacgcaccgttctgtgtctcagtgcccttgaaggtccatgcccctctgagcctgggcatcaaagtggggctgcagggccagaagcatgggagagccacgggggaggcaggtatgcctcagggggagatgttggggaagcaggaaccccagacgtcccggagccccaagcccaccaggagaagggaggtgtcacggagtgagctcagtccagtgatacccagcgccgcaaccctcatcattgtggtgtgcgtgggcttcctggtgctcatggtcgtcctgggcctggtgcgcatccattcccttcaccgccgcgtctcaggggccggcgggcctccaggggcctccagtgaccccaaggacccagacctcttctgggatgactcagctctcaccatcattgtgaaccccatggagtcctaccagaatcggcagtcctgtgtgacgggggctgttgggggccagcaggaggatgaggacagcagtgactcggaggtggccgattcccccagcagcgacgagagacgcatcatcgagacccccccacaccgctactaaggcctacaccttctgcagggctccctcagctggaccatcgtccctgcttctcttatgatcgccccacctcatttccatttcagtctggggaccccatttctccctcctttccaacttccttcctttcttgtcctgtttcccttcctgcccttgcagtcctgaggtcctgcagccccggcccctcctccgtgacctggtgtggccaggctgcggggacgggaggggacgtgggggccccgggtgtacatatataatgtatattttttcaatgttgtcgtgagtgcagcccatgttcctgcgtgcagctcacggccttgtgtgtatgtgtgtgtgtgtgtgtgtgaggcatcgtcatgtcctggggcaggggcggggggttgggtgtggtgagggaggggacatatcctagggttttcaaataaaacaatcagaaaaa

SEQ ID NO: 321962 - DNA, 1040 bp, Homo sapiens
cctgcagtagcggggttggggtgggagtgagagagtgaggacgctgggctgggggaaacgggaagccgctgcaagtccaccgcctcagctacccagattgggatctgcccaggcccgctttatggactagtgtgggcggcaggctcctttccgtccctgccctgctgtaccccgctccttggagaccccctgtatccctcccgcaaggtggaatccgcaggctggaggctcccaggggaggcaaacgcctggccctgccctgccccacgccgcaccatgaccctcctgctgctgccccttctgctggcctctctgctcgcgtcctgctcctgtaacaaagccaacaagcacaagccatggattgaggcagagtaccagggcatcgtcatggagaatgacaacacggtcctactgaatccaccactctttgccttggacaaggatgccccgctgcgctatgcaggtgagatctgcggcttccggctccatgggtctggggtgccctttgaggctgtgatccttgacaaggcgacaggagaggggctgatccgggccaaggagcctgtggactgcgaggcccagaaggaacacaccttcaccatccaggcctatgactgtggcgagggccccgacggggccaacaccaagaagtcccacaaggccactgtgcatgtgcgggtcaacgatgtgaacgagtttgccccagtgtttgtggaacggctgtatcgtgcggctgtgacagaggggaagctgtacgatcgcatcctgcgggtggaagccattgacggtgactgctccccccagtacagccagatctgctactatgagattctcacacccaacacccctttcctcattgacaatgacgggaacattgagaacacagagaagctgcagtacagtggtgagaggctctataagtttacagtgacagcttatgactgtgggaagaagcgggcagcagatgatgctgaggtggagattcaggtgaagcccacctgtaaacccagctggcaaggtgagagctcagcgctgtgccc

SEQ ID NO: 321963 - DNA, 367 bp, Homo sapiens
aagaggaaaccatcgtatgtaacactgtccagaatggtgagcctcccctccaggcactagccagagggggaaactggcttcttgtcccgcctctgtcactgcccagtgtgtgactgtgaacaggtcacttcccctctcttcatttgtgaggtgcaagtgccaggtgtgatatgccttgattctgtgctttatccccaacatgacatgttggatcgtactgctgtcagagtgcaatgggattccttgctgctactcttgttttcagttgcccagtcaacttctctgtgtcccaccatgtggtaggctgtccccaccccccatctccacctccattaaagcccctccattgcaatgggaaagcctgggt

SEQ ID NO: 321964 - DNA, 393 bp, Homo sapiens
gtcattctgaggtacacagattgggtttgagtcctgccaagggaatttgctggctatgaaatcttggttaatatgtgtaaacctcagggttaaaacaaccctgttatatagggataaaaagaattctatatcccagagtcgttaggattaaatgatgtaatagaccgttgtagactgaaaagcactccctctgtatatgttaattctcactattatcagccctgattatggagggataaataaaaatggataaaatatttaaaatcctctcttgagccaacagttgcagcctcttcattatttattctccaggctgaccacaaggaccagtgaggactaatttgagttttcacctccttctgtttctcttgcaagtcctggtggagtggctga

SEQ ID NO: 321965 - DNA, 476 bp, Homo sapiens
cctggggaagcggggttctgtagggtcaagactgtggagcacacacggtgaggactcctgaggaggggcaggcctgggtggaggctgttcgcagagctgcagtgagccggagggagagaggttcaggcagggaagggggtacacaggggttaaggggaccgagggaagtgtggtccctgaaagagaggctgggatgtgtgcaggccattgatcccttctcctctctgttcctgccctccagtcctaccagaatcggcagtcctgtgtgacgggggctgttgggggccagcaggaggatgaggacagcagtgactcggaggtggccgattcccccagcagcgacgagagacgcatcatcgagacccccccacaccgctactaaggcctacacctctccccacgcagagggggaattctgccctggtgaaacagacactccagacatgggagaaggactttctgggaacacagagacc

SEQ ID NO: 321966 - DNA, 4137 bp, Homo sapiens
tgaagggcctcgacccagctctgcttgccccggtgcatgactagggaggggccgcatgtgcgggaggcagcactgcccacacgtactgtgcagacatgtcagatgacttgtgacctttgtacacatgccatttcccttcttatggctggttttaatttggcttttactctgcatcttccttgcttatccccccggatctgactgttgtgaaggaaggccctgctggattttatgccttacccctcctcttggcaccctgacccatagcattttgcacagaagtcatcaaaatcagctcctgagcacccctgggccttgttcctcatcccctacatcagtcctcctttctttgggccctccctctggtgttgtcctctccctggcatgactttgatgcagcttggtgccctgtggggtggggaggagcgtgctgactgcctcagtctcagggatagatgggcaggctccctcctgttctggctctccgtcgggattcctgcttgctcctttctggcatatgggtgtaccgtgtcgaggctgtaccttggtgtacagtataaggctgtatctcgttgtgcccatattgaggctgtttgttggtgtacagtattgaggctgtatcttggtgtacggtatcgaacctgtccctccatgtgccgtatcaaggctgtatcttgatgtaccgtatcgaggctgtacctcggtgtgctgtatcaaggctgtatctcaatgtataatgtcgaggctggctgccgtgtcttcatccctccttctctctggtatatgcagggccactgtgcatgtgcgggtcaacgatgtgaacgagtttgccccagtgtttgtggaacggctgtatcgtgcggctgtgacagaggggaagctgtacgatcgcatcctgcgggtggaagccattgacggtgactgctccccccagtacagccagatctgctactatgagattctcacacccaacacccctttcctcattgacaatgacgggaacattgagaacacagagaagctgcagtacagtggtgagaggctctataagtttacagtgacagcttatgactgtgggaagaagcgggcagcagatgatgctgaggtggagattcaggtgaagcccacctgtaaacccagctggcaaggctggaacaaaaggatcgaatatgcaccaggtgctgggagcttggctttgttccctggtatccgcctggagacctgtgatgaaccactctggaacattcaggccaccatagagctgcagaccagccatgtggccaagggctgtgaccgtgacaactactcagagcgggcgctgcggaaactctgtggtgctgccactggggaggtggatctgttgcccatgcctggccccaatgccaactggacagcaggactctcggtgcactacagccaggacagcagcctgatctactggttcaatggcacccaggctgtgcaggtgcccctgggtggccccagtgggctgggctctgggccccaggacagcctcagtgaccacttcaccctgtccttctggatgaagcatggcgtaactcccaacaagggcaagaaggaagaggaaaccatcgtatgtaacactgtccagaatgaggacggcttctctcactactcgctgactgtccacggctgtaggattgccttcctctactggcccctgcttgagagtgcccgcccagtcaagttcctctggaagctggagcaggtctgtgatgatgagtggcaccactacgctctgaacctcgagttccccacagtcacactctataccgacggcatctccttcgaccctgccctcatccatgacaatggcctcatccacccaccccgaagggagcctgctctcatgattggggcctgctggactgaggagaagaacaaagagaaggaaaagggagacaacagtacagacaccacccaaggagaccctttgtcgatccaccactacttccatggctacctggctggtttcagcgtgcgctcaggtcgcctggagagccgcgaggtcatcgagtgcctctatgcatgtcgggaggggctggactatagggatttcgagagcctgggcaaaggcatgaaggtccacgtgaacccctcacagtccctgctcaccctggagggggatgatgtggagaccttcaaccatgccctgcagcatgtggcttacatgaacactctgcgctttgccacgcccggcgtcaggcccctgcgcctcaccactgctgtcaagtgcttcagcgaagagtcctgcgtctccatccctgaagtggagggctacgtggtcgtccttcagcctgacgccccccagatcctgctgagtggcactgctcattttgcccgcccagctgtggactttgagggaaccaacggcgtccctttgttccctgatcttcaaatcacctgctccatttctcaccaggtggaggccaaaaaggatgagagttggcagggcacagtgacagacacacgcatgtcggatgagattgtgcacaacctggatggctgtgaaatttctctggtgggggatgacctggatcccgagcgggaaagcctgctcctggacacaacctctctgcagcagcgggggctggagctcaccaacacatctgcctacctcactattgctggggtggagagcatcactgtgtatgaagagatcctgaggcaggctcgttatcggctgcgacacggagctgccctctacaccaggaagttccggctttcctgctcggaaatgaatggccgttactccagcaatgaattcatcgtggaggtcaatgtcctgcacagcatgaaccgggttgcccaccccagccacgtgctcagctcccagcagttcctgcaccgtggtcaccagcccccgcctgagatggctggacacagcctagccagctcccacagaaactccatgatacccagcgccgcaaccctcatcattgtggtgtgcgtgggcttcctggtgctcatggtcgtcctgggcctggtgcgcatccattcccttcaccgccgcgtctcaggggccggcgggcctccaggggcctccagtgaccccaaggacccagacctcttctgggatgactcagctctcaccatcattgtgaaccccatggagtcctaccagaatcggcagtcctgtgtgacgggggctgttgggggccagcaggaggatgaggacagcagtgactcggaggtggccgattcccccagcagcgacgagagacgcatcatcgagacccccccacaccgctactaaggcctacacctctccccacgcagagggggaattctgccctggtgaaacagacactccagacatgggagaaggactttctgggaacacagagaccaagagggagagaggcttcagaaccagtcctcctttcatttcaaaaccccagcgggccctctggagtccgccctgcccctcccccggccccccatccctcacttctgggctgtcatgctcctggtgtgccccttgcactggggctggctgggttggaaagtgggctggacttcagctgcctttctacccccaatggcagctgcccccttagcactcactgtgttggggagagggtgacgattgcaatggctggggctggggctggggctgggggtgggattgaaggaaaccctctcctctccccttcccttctctctcctgtccatgggaagcttttccccctctgcagggctccctcagctggaccatcgtccctgcttctcttatgatcgccccacctcatttccatttcagtctggggaccccatttctccctcctttccaacttccttcctttcttgtcctgtttcccttcctgcccttgcagtcctgaggtcctgcagccccggcccctcctccgtgacctggtgtggccaggctgcggggacgggaggggacgtgggggccccgggtgtacatatataatgtatattttttcaatgttgtcgtgagtgcagcccatgttcctgcgtgcagctcacggccttgtgtgtatgtgtgtgtgtgtgtgtgtgaggcatcgtcatgtcctggggcaggggcggggggttgggtgtggtgagggaggggacatatcctagggttttcaaataaaacaatcagaaaaa

SEQ ID NO: 321967 - DNA, 4064 bp, Homo sapiens
cctgcagtagcggggttggggtgggagtgagagagtgaggacgctgggctgggggaaacgggaagccgctgcaagtccaccgcctcagctacccagattgggatctgcccaggcccgctttatggactagtgtgggcggcaggctcctttccgtccctgccctgctgtaccccgctccttggagaccccctgtatccctcccgcaaggtggaatccgcaggctggaggctcccaggggaggcaaacgcctggccctgccctgccccacgccgcaccatgaccctcctgctgctgccccttctgctggcctctctgctcgcgtcctgctcctgtaacaaagccaacaagcacaagccatggattgaggcagagtaccagggcatcgtcatggagaatgacaacacggtcctactgaatccaccactctttgccttggacaaggatgccccgctgcgctatgcaggtgagatctgcggcttccggctccatgggtctggggtgccctttgaggctgtgatccttgacaaggcgacaggagaggggctgatccgggccaaggagcctgtggactgcgaggcccagaaggaacacaccttcaccatccaggcctatgactgtggcgagggccccgacggggccaacaccaagaagtcccacaaggccactgtgcatgtgcgggtcaacgatgtgaacgagtttgccccagtgtttgtggaacggctgtatcgtgcggctgtgacagaggggaagctgtacgatcgcatcctgcgggtggaagccattgacggtgactgctccccccagtacagccagatctgctactatgagattctcacacccaacacccctttcctcattgacaatgacgggaacattgagaacacagagaagctgcagtacagtggtgagaggctctataagtttacagtgacagcttatgactgtgggaagaagcgggcagcagatgatgctgaggtggagattcaggtgaagcccacctgtaaacccagctggcaaggctggaacaaaaggatcgaatatgcaccaggtgctgggagcttggctttgttccctggtatccgcctggagacctgtgatgaaccactctggaacattcaggccaccatagagctgcagaccagccatgtggccaagggctgtgaccgtgacaactactcagagcgggcgctgcggaaactctgtggtgctgccactggggaggtggatctgttgcccatgcctggccccaatgccaactggacagcaggactctcggtgcactacagccaggacagcagcctgatctactggttcaatggcacccaggctgtgcaggtgcccctgggtggccccagtgggctgggctctgggccccaggacagcctcagtgaccacttcaccctgtccttctggatgaagcatggcgtaactcccaacaagggcaagaaggaagaggaaaccatcgtatgtaacactgtccagaatgaggacggcttctctcactactcgctgactgtccacggctgtaggattgccttcctctactggcccctgcttgagagtgcccgcccagtcaagttcctctggaagctggagcaggtctgtgatgatgagtggcaccactacgctctgaacctcgagttccccacagtcacactctataccgacggcatctccttcgaccctgccctcatccatgacaatggcctcatccacccaccccgaagggagcctgctctcatgattggggcctgctggactgaggagaagaacaaagagaaggaaaagggagacaacagtacagacaccacccaaggagaccctttgtcgatccaccactacttccatggctacctggctggtttcagcgtgcgctcaggtcgcctggagagccgcgaggtcatcgagtgcctctatgcatgtcgggaggggctggactatagggatttcgagagcctgggcaaaggcatgaaggtccacgtgaacccctcacagtccctgctcaccctggagggggatgatgtggagaccttcaaccatgccctgcagcatgtggcttacatgaacactctgcgctttgccacgcccggcgtcaggcccctgcgcctcaccactgctgtcaagtgcttcagcgaagagtcctgcgtctccatccctgaagtggagggctacgtggtcgtccttcagcctgacgccccccagatcctgctgagtggcactgctcattttgcccgcccagctgtggactttgagggaaccaacggcgtccctttgttccctgatcttcaaatcacctgctccatttctcaccaggtggaggccaaaaaggatgagagttggcagggcacagtgacagacacacgcatgtcggatgagattgtgcacaacctggatggctgtgaaatttctctggtgggggatgacctggatcccgagcgggaaagcctgctcctggacacaacctctctgcagcagcgggggctggagctcaccaacacatctgcctacctcactattgctggggtggagagcatcactgtgtatgaagagatcctgaggcaggctcgttatcggctgcgacacggagctgccctctacaccaggaagttccggctttcctgctcggaaatgaatggccgttactccagcaatgaattcatcgtggaggtcaatgtcctgcacagcatgaaccgggttgcccaccccagccacgtgctcagctcccagcagttcctgcaccgtggtcaccagcccccgcctgagatggctggacacagcctagccagctcccacagaaactccatgatacccagcgccgcaaccctcatcattgtggtgtgcgtgggcttcctggtgctcatggtcgtcctgggcctggtgcgcatccattcccttcaccgccgcgtctcaggggccggcgggcctccaggggcctccagtgaccccaaggacccagacctcttctgggatgactcagctctcaccatcattgtgaaccccatggagtcctaccagaatcggcagtcctgtgtgacgggggctgttgggggccagcaggaggatgaggacagcagtgactcggaggtggccgattcccccagcagcgacgagagacgcatcatcgagacccccccacaccgctactaaggcctacacctctccccacgcagagggggaattctgccctggtgaaacagacactccagacatgggagaaggactttctgggaacacagagaccaagagggagagaggcttcagaaccagtcctcctttcatttcaaaaccccagcgggccctctggagtccgccctgcccctcccccggccccccatccctcacttctgggctgtcatgctcctggtgtgccccttgcactggggctggctgggttggaaagtgggctggacttcagctgcctttctacccccaatggcagctgcccccttagcactcactgtgttggggagagggtgacgattgcaatggctggggctggggctggggctgggggtgggattgaaggaaaccctctcctctccccttcccttctctctcctgtccatgggaagcttttccccctctgcagggctccctcagctggaccatcgtccctgcttctcttatgatcgccccacctcatttccatttcagtctggggaccccatttctccctcctttccaacttccttcctttcttgtcctgtttcccttcctgcccttgcagtcctgaggtcctgcagccccggcccctcctccgtgacctggtgtggccaggctgcggggacgggaggggacgtgggggccccgggtgtacatatataatgtatattttttcaatgttgtcgtgagtgcagcccatgttcctgcgtgcagctcacggccttgtgtgtatgtgtgtgtgtgtgtgtgtgaggcatcgtcatgtcctggggcaggggcggggggttgggtgtggtgaccatattctaaaaaaagtttttggtcaaaaacatcatttagcttaaaactcgggtatagaaatcttcctcatctaaaataaaaactgtcatactaccttcttt

SEQ ID NO: 321968 - DNA, 2789 bp, Homo sapiens
cagctgagtgtgctggctgctggggagaggggcgctgcagcagggtgtgggtgtgagtgtgaggagctcctgggccatgcgcttccctacgctctgctctgtctgttgacacatgagtctcaggctgtaggtaatttgcggacggggctggaatgcgatgtgtgtatttttctaggggcttgcttgtgtgactgctggtctctgtgtgtgtttggggcacacatacatggaatagtccctcagcaacgggaccgcccagggaggagctgctgtgtatgcatggtgggcaggggtgtgcacccatgtggggagtagtgacccagctgcccgtaagggccctgggcctggaggtgcgtgtgtggggtctctgcctccacctgctgtccctggggctgcgggctttcctgcttttcttccttgtgcttcttcgagagctgtgtgtgtgtgtgcaggaggcaggcagggctgtgctcatggcggctcgctctgtggccctcacggcccacgtctgtagtgtctatgtcttccttcagggggttgcctggtctgcccagctggtggggagctgggtgatgctgcacatatggctctaccgtgccttgctggagacccccagacgcgttcctttactcccgcagtgtgagcaggcggccaggtggctggtgtgggccagcatgcaggctggcaaaggcctggctcaggtgtggggcgtggcaacctttgtgcagctgtgtgcccacacggtcttcctgagcatgtacctgtgcatgcacatctgctttgccgccatcagctctaaggtccgtgtgagagtgaacgcaccgttctgtgtctcagtgcccttgaaggtccatgcccctctgagcctgggcatcaaagtggggctgcagggccagaagcatgggagagccacgggggaggcaggtatgcctcagggggagatgttggggaagcaggaaccccagacgtcccggagccccaagcccaccaggagaagggaggtgtcacggagtgagctcagtccaggtgggtaagggaaggggctgctctgtgccccttggacttgtccccagcctcaggtgctagtgccctcttcctgcagccagcccaggcctggagcctgcatctcctcctgctcagccaagcccgtgtgggggcccctcctctccctcactgggcactggcacctctttcctaggctgagtggtctctggggaaggcacaggtggaatgacaggggcagattccagtccttgccctctgtcctctgcgaatagggctgttcatgacagtgttgggcagggagtctttttcctcctctgcccttgcctctctgtacacctgcctccctctgtgtttgttcctttgccttgcagcagctcccttcctcccctttcgtctcctgcccttcctggtgggctgtttctcttctggcttctccaggtgttcctctcttctcggccaccgtgtgttctgccctgggagtccttcagcccgggctgcctcttttcctacccagccccctgtccaagtgcccccaggtgtgcctagtcacgctctgctcacccccgcgctctctctgcagtgatacccagcgccgcaaccctcatcattgtggtgtgcgtgggcttcctggtgctcatggtcgtcctgggcctggtgcgcatccattcccttcaccgccgcgtctcaggggccggcgggcctccaggggcctccagtgaccccaaggacccagacctcttctgggatgactcagctctcaccatcattgtgaaccccatggagtcctaccagaatcggcagtcctgtgtgacgggggctgttgggggccagcaggaggatgaggacagcagtgactcggaggtggccgattcccccagcagcgacgagagacgcatcatcgagacccccccacaccgctactaaggcctacacctctccccacgcagagggggaattctgccctggtgaaacagacactccagacatgggagaaggactttctgggaacacagagaccaagagggagagaggcttcagaaccagtcctcctttcatttcaaaaccccagcgggccctctggagtccgccctgcccctcccccggccccccatccctcacttctgggctgtcatgctcctggtgtgccccttgcactggggctggctgggttggaaagtgggctggacttcagctgcctttctacccccaatggcagctgcccccttagcactcactgtgttggggagagggtgacgattgcaatggctggggctggggctggggctgggggtgggattgaaggaaaccctctcctctccccttcccttctctctcctgtccatgggaagcttttccccctctgcagggctccctcagctggaccatcgtccctgcttctcttatgatcgccccacctcatttccatttcagtctggggaccccatttctccctcctttccaacttccttcctttcttgtcctgtttcccttcctgcccttgcagtcctgaggtcctgcagccccggcccctcctccgtgacctggtgtggccaggctgcggggacgggaggggacgtgggggccccgggtgtacatatataatgtatattttttcaatgttgtcgtgagtgcagcccatgttcctgcgtgcagctcacggccttgtgtgtatgtgtgtgtgtgtgtgtgtgaggcatcgtcatgtcctggggcaggggcggggggttgggtgtggtgagggaggggacatatcctagggttttcaaataaaacaatcagaaaaa

SEQ ID NO: 321969 - DNA, 1892 bp, Homo sapiens
cctgcagtagcggggttggggtgggagtgagagagtgaggacgctgggctgggggaaacgggaagccgctgcaagtccaccgcctcagctacccagattgggatctgcccaggcccgctttatggactagtgtgggcggcaggctcctttccgtccctgccctgctgtaccccgctccttggagaccccctgtatccctcccgcaaggtggaatccgcaggctggaggctcccaggggaggcaaacgcctggccctgccctgccccacgccgcaccatgaccctcctgctgctgccccttctgctggcctctctgctcgcgtcctgctcctgtaacaaagccaacaagcacaagccatggattgaggcagagtaccagggcatcgtcatggagaatgacaacacggtcctactgaatccaccactctttgccttggacaaggatgccccgctgcgctatgcaggtgagatctgcggcttccggctccatgggtctggggtgccctttgaggctgtgatccttgacaaggcgacaggagaggggctgatccgggccaaggagcctgtggactgcgaggcccagaaggaacacaccttcaccatccaggcctatgactgtggcgagggccccgacggggccaacaccaagaagtcccacaaggccactgtgcatgtgcgggtcaacgatgtgaacgagtttgccccagtgtttgtggaacggctgtatcgtgcggctgtgacagaggggaagctgtacgatcgcatcctgcgggtggaagccattgacggtgactgctccccccagtacagccagatctgctactatgagattctcacacccaacacccctttcctcattgacaatgacgggaacattgagaacacagagaagctgcagtacagtggtgagaggctctataagtttacagtgacagcttatgactgtgggaagaagcgggcagcagatgatgctgaggtggagattcaggtgaagcccacctgtaaacccagctggcaaggctggaacaaaaggatcgaatatgcaccaggtgctgggagcttggctttgttccctggtatccgcctggagacctgtgatgaaccactctggaacattcaggccaccatagagctgcagaccagccatgtggccaagggctgtgaccgtgacaactactcagagcgggcgctgcggaaactctgtggtgctgccactggggaggtggatctgttgcccatgcctggccccaatgccaactggacagcaggactctcggtgcactacagccaggacagcagcctgatctactggttcaatggcacccaggctgtgcaggtgcccctgggtggccccagtgggctgggctctgggccccaggacagcctcagtgaccacttcaccctgtccttctggatgaagcatggcgtaactcccttctctctcctgtccatgggaagcttttccccctctgcagggctccctcagctggaccatcgtccctgcttctcttatgatcgccccacctcatttccatttcagtctggggaccccatttctccctcctttccaacttccttcctttcttgtcctgtttcccttcctgcccttgcagtcctgaggtcctgcagccccggcccctcctccgtgacctggtgtggccaggctgcggggacgggaggggacgtgggggccccgggtgtacatatataatgtatattttttcaatgttgtcgtgagtgcagcccatgttcctgcgtgcagctcacggccttgtgtgtatgtgtgtgtgtgtgtgtgtgaggcatcgtcatgtcctggggcaggggcggggggttgggtgtggtgagggaggggacatatcctagggttttcaaataaaacaatcagaaaaa

SEQ ID NO: 321970 - DNA, 2232 bp, Homo sapiens
cctgcagtagcggggttggggtgggagtgagagagtgaggacgctgggctgggggaaacgggaagccgctgcaagtccaccgcctcagctacccagattgggatctgcccaggcccgctttatggactagtgtgggcggcaggctcctttccgtccctgccctgctgtaccccgctccttggagaccccctgtatccctcccgcaaggtggaatccgcaggctggaggctcccaggggaggcaaacgcctggccctgccctgccccacgccgcaccatgaccctcctgctgctgccccttctgctggcctctctgctcgcgtcctgctcctgtaacaaagccaacaagcacaagccatggattgaggcagagtaccagggcatcgtcatggagaatgacaacacggtcctactgaatccaccactctttgccttggacaaggatgccccgctgcgctatgcaggtgagatctgcggcttccggctccatgggtctggggtgccctttgaggctgtgatccttgacaaggcgacaggagaggggctgatccgggccaaggagcctgtggactgcgaggcccagaaggaacacaccttcaccatccaggcctatgactgtggcgagggccccgacggggccaacaccaagaagtcccacaaggccactgtgcatgtgcgggtcaacgatgtgaacgagtttgccccagtgtttgtggaacggctgtatcgtgcggctgtgacagaggggaagctgtacgatcgcatcctgcgggtggaagccattgacggtgactgctccccccagtacagccagatctgctactatgagattctcacacccaacacccctttcctcattgacaatgacgggaacattgagaacacagagaagctgcagtacagtggtgagaggctctataagtttacagtgacagcttatgactgtgggaagaagcgggcagcagatgatgctgaggtggagattcaggtgaagcccacctgtaaacccagctggcaaggctggaacaaaaggatcgaatatgcaccaggtgctgggagcttggctttgttccctggtatccgcctggagacctgtgatgaaccactctggaacattcaggccaccatagagctgcagaccagccatgtggccaagggctgtgaccgtgacaactactcagagcgggcgctgcggaaactctgtggtgctgccactggggaggtggatctgttgcccatgcctggccccaatgccaactggacagcaggactctcggtgcactacagccaggacagcagcctgatctactggttcaatggcacccaggctgtgcaggtgcccctgggtggccccagtgggctgggctctgggccccaggacagcctcagtgaccacttcaccctgtccttctggatgaagcatggcgtaactcccaacaagggcaagaaggaagaggaaaccatcgtatgtaacactgtccagaatgaggacggcttctctcactactcgctgactgtccacggctgtaggattgccttcctctactggcccctgcttgagagtgcccgcccagtcaagttcctctggaagctggagcaggtctgtgatgatgagtggcaccactacgctctgaacctcgagttccccacagtcacactctataccgacggcatctccttcgaccctgccctcatccatgacaatggcctcatccacccaccccgaagggagcctgctctcatgattggggcctgctggactggtaagcttctcagtgaagactccagtggttcaggatttgggaagggaggtaggctggtgaggagcaagggcagtctgacccagcagctgaggccgcctcctgcatctctctgcagctgtgcagggtgactctgaagatctccatgggaagggaccacagcctccctcccgtatctcccactaatccaatgggtcatcacctctgacttggaggaattaacttctcacgcatccccagactctctctctgtaactccagccagtttccacttttttccatcaaagtgatgatgacttccatagcccattcccctgctcaaggagagtaaccccttagagtgtcctcggtcttccaacttttaagccattgaaaaaatttttctcctcttgggagtgtgtgtgtgcacatgtgcctgtctgtcttaccagagcccacgtgtttcctcagcagcatatcgtatttgggggttt

SEQ ID NO: 321971 - DNA, 441 bp, Homo sapiens
tgggggttgggatgcagaggcatgaccccctttcttcccctgccccttcctgacatgagatgctctatgatagaggtagctggggcggggagtgaaacagaatgtgggttttcggggaggaagtgttggggtcacatgctgcttctcctgctttcttacataggtgcttcagcgaagagtcctgcgtctccatccctgaagtggagggctacgtggtcgtccttcagcctgacgccccccagatcctgctgagtggcactgctcattttgcccgcccagctgtggactttgagggaaccaacggcgtccctttgttccctgatcttcaaatcacctgctccatttctcaccaggtggaggccaaaaaggatgagagttggcagggcacaggtaaggacgacttcggggagtaacaccatccagagaaccagccagtgtctg

SEQ ID NO: 321972 - DNA, 358 bp, Homo sapiens
ctatacaatattttgaggtgagaactctgtctgtggaatgcttaagaaagaatatataactttgcgtaaagaaagtagccgagtagagagcaaatagtgtatctagttgaaatgttagttctttgaattagcaatgtttagacaataatgtgtgagaaaatatctgtatatgatagtgtgccttgtaggaaagatacttggagttttctgctgtgcaccataagtcttgtctgtgcgtacaatgaattccagttgtgataagtagatctatgctcaagttcacaggtgggctggaatcactgtagactgcccatgtcagacagtcaggaatgtgactgtatgtaccattttccccctg

SEQ ID NO: 321973 - DNA, 212 bp, Homo sapiens
aaaaataagtgaaataagatagaaggaagggggtctggctttattgtggagggcactgttttagggaggtacatacatgaatatgttcctccgtcagggaactgagggtccactgcactgattctcaaccatggctgcacattgaaatcactgatacccactccgaccctataggttctgagttcagtggcctggagtgtggtgtgaccggc

SEQ ID NO: 321974 - DNA, 94 bp, Homo sapiens
caggtgttatcattctttggtcctccagaacaggcaacatgccttgggcattccccaaacctgctgtcatgacctttactcctgcttgaccagc

SEQ ID NO: 321975 - DNA, 1089 bp, Homo sapiens
actcactaggctcttaatagtagctcctcttataagcagaacagggcaaagtagtaattgcaactgagaagagaaaatgcagttcaaagcaagattaaaaggatgagtaaagtcccctagagagctcagccctacaggatttgagattctcattcattcacaccttccctccttccttcccttctaatttttgttcaactacttccctcttttcctctctctctacccaccaaccattatgctagactccacatgcagcatctcattttatccacctggagcttgcttttgccctactctcctcagtggagaattctcttcctcctgtccctcccttcacccccgcttcctgtctctgagcttccttctccaggtttgctcctttccatcaggtatcactttatcaccacctcctcaaagaggccgtgttcatgtccaggcccacaatctcaagtagccatcctgtgattctgtatcatattatcctttttaaactctatgcagcatttactacctctgatgttttttcttctttaaggatttgattgccttatgtgacaagcccaagatctgtgacagttggagctcaaactaggcagtcttgattccagactgctctgaactagtatttgaaggaactaatgaacatgacatgttaaatgaaagtttggggacgtacactcaggatggaagcagggggacacaacagaaatgaaagaattttctgtagatctgggatctggacacctgccccccgtcatgggaaggcagtaaacaagatgctaactgatggagtgaaatccccaggagatgcagaaggcaagtgcagctaactgaggcctcaggggcaggagatgcccatcaggatgagagctatgtctttctccagtgatgactctgcttctatgaggtcaccagcagtagaaccatatcttgctggcatacacttgggatggccccgcctcctggacttccatctgtcatcaggagaacataaccatctggagtcagtacagatcatcaatccttccacatatacaagttcattttaaatttttaaaaatataatacaactgagaagtcttcatt

SEQ ID NO: 321976 - DNA, 2219 bp, Homo sapiens
tacatgtacatatcaaagagagactggagaaaaatttcttattgtccatcccatacattatttgtcaattgtactgttcccacacccttcctagcaacagtatgtaggagaggggttctcagagaccgacagtgaacttgtcctgtgcaattaaatcggtattcctgaacttcacagttgaaagtctagattacctaggtaggggctgtttctctaaggttttggtcccccaaacaatagaaaagctacaagaaatatgcatttttctagatttgcctatgtagacactgtgaccagcctagcccaaactgtattatttagtagatcatctagttggccatacagcctctatagggaattataccctgaggcattttttatttatatttaaaatgtactttatatgaagtaaattatactctaatgaagtagaattataaccaacaaaagaaacagtataaaatggtgcccatatctgaagtattatttgtttctagataattatatgacattatctcgtttgattgatctcctaagaagatgtggaaaactcgaggatgtcccaagatttttctcaatggctgagaaacgtaactccagagcaaaattggaaccaggatttcagtattgtaaaggactgtatctttggtacactggagaaccaaatgatgcccttcgacattttaataaagctcggaaagatcgtgactggggccaaaatgccctttataatatgatagagatctgtttgaatccagataatgaaactgttggaggtgaagtatttgaaaacctggatggagacctgggtaattcaactgagaagcaagaatctgtgcaactggcagtaagaacagcagaaaaacttcttaaggaactaaaacctcagactgttcagggtcacgtacagcttcgcataatggaaaactattgcttaatggctaccaaacagaaatctaatgttgaacaagcattaaataccttcactgaaatagcagcatctgagaaggagcatatcccagcgctcttgggaatggcaacggcttatatgatcttgaaacagactccacgagccagaaaccagctgaagcgtattgcgaaaatgaattggaatgctattgatgctgaagagtttgagaagagttggctgctacttgctgatatttacattcaatcagcaaaatatgacatggcagaagacctgttaaaacggtgcctgcgtcataatagatcttgctgcaaagcttatgaatatatgggatacattatggaaaaagagcaagcatatacagatgctgccttgaactatgagatggcatggaaatatagcaatcggacaaatccggcagtaggatacaaactggcatttaattacttaaaagcaaaaagatatgtggattcaattgacatatgtcaccaggttcttgaagcacatccaacttatccaaaaatcagaaaggatatacttgataaggcccgtgcgtctttaagaccttgaaaataattttaacttaggtgttggtttaacaggaaatgaaagaaatctaactttcagttcttcctgttcaaaacaggatttgattgccttatgtgacaagcccaagatctgtgacagttggagctcaaactaggcagtcttgattccagactgctctgaactagtatttgaaggaactaatgaacatgacatgttaaatgaaagtttggggacgtacactcaggatggaagcagggggacacaacagaaatgaaagaattttctgtagatctgggatctggacacctgccccccgtcatgaataaatgccatcccttcccacgccaaccatatcgatgatatagtggcaggaaggagagtaagggactctggagcttaaacagaccatcacatgggaaggcagtaaacaagatgctaactgatggagtgaaatccccaggagatgcagaaggcaagtgcagctaactgaggcctcaggggcaggagatgcccatcaggatgagagctatgtctttctccagtgatgactctgcttctatgaggtcaccagcagtagaaccatatcttgctggcatacacttgggatggccccgcctcctggacttccatctgtcatcaggagaacataaccatctggagtcagtacagatcatcaatccttccacatatacaagttcattttaaatttttaaaaatataatacaactgagaagtcttcatt

SEQ ID NO: 321977 - DNA, 2922 bp, Homo sapiens
ggaatgaaaagaattggagcttccacaaaatcaaaagacagaaaaactgaagttgatacaagccatcgtttatcgatctttcttgaattgatagacgttcaccgcttaaatggagagcagcatgaggcaaccaaagttttacaagatgccatccatgaattttctggaacatctgaagaagtgcgggttaccatgtgctaatgcagaccttgctctagcccaaggagatattgaacgggctttaagcatccttcagaatgttacagccgaacagccttattttatagaggccagagaaaaaatggcagatatttatctgaagcacagaaaagataaaatgttatatatcacttgttttagagaaattgctgaaagaatggctaaccctcggtcttttcttctccttggtgatgcatacatgaatattctagagcctgaagaagccatagtagcatatgagcaagcattaaatcagaacccgaaagatggaacattggcaagcaaaatgggcaaagcacttatcaaaactcataactactcaatggcaatcacttactatgaagctgctctgaaaactggacaaaagaattatctttgctatgacctggctgagctcttattaaaattgaaatggtatgacaaagcagaaaaagttcttcagcatgctctggctcatgaacctgtaaatgaactgtcagctctcatggaggatggacgttgtcaagttcttctagcaaaagtttatagtaaaatggaaaaacttggtgatgcgatcactgcattacaacaggctcgagaattacaagctcgggtactaaaacgtgttcagatggaacagccagatgcagttcctgcacagaaacatttagcagctgaaatttgtgcagagattgcaaaacattctgttgctcagcgagactatgaaaaagcaattaagttttatagagaggctctggttcactgcgaaacagataataagattatgttggaactggcacgattatacctggcacaagatgaccctgattcctgcctgcggcagtgtgctctactgcttcagagtgaccaggataacgaagctgctaccatgatgatggctgatctcatgttcagaaaacaagactatgaacaagcagtgtttcatttacagcagcttttagaacgtaagccagataattatatgacattatctcgtttgattgatctcctaagaagatgtggaaaactcgaggatgtcccaagatttttctcaatggctgagaaacgtaactccagagcaaaattggaaccaggatttcagtattgtaaaggactgtatctttggtacactggagaaccaaatgatgcccttcgacattttaataaagctcggaaagatcgtgactggggccaaaatgccctttataatatgatagagatctgtttgaatccagataatgaaactgttggaggtgaagtatttgaaaacctggatggagacctgggtaattcaactgagaagcaagaatctgtgcaactggcagtaagaacagcagaaaaacttcttaaggaactaaaacctcagactgttcagggtcacgtacagcttcgcataatggaaaactattgcttaatggctaccaaacagaaatctaatgttgaacaagcattaaataccttcactgaaatagcagcatctgagaaggagcatatcccagcgctcttgggaatggcaacggcttatatgatcttgaaacagactccacgagccagaaaccagctgaagcgtattgcgaaaatgaattggaatgctattgatgctgaagagtttgagaagagttggctgctacttgctgatatttacattcaatcagcaaaatatgacatggcagaagacctgttaaaacggtgcctgcgtcataatagatcttgctgcaaagcttatgaatatatgggatacattatggaaaaagagcaagcatatacagatgctgccttgaactatgagatggcatggaaatatagcaatcggacaaatccggcagtaggatacaaactggcatttaattacttaaaagcaaaaagatatgtggattcaattgacatatgtcaccaggttcttgaagcacatccaacttatccaaaaatcagaaaggatatacttgataaggcccgtgcgtctttaagaccttgaaaataattttaacttaggtgttggtttaacaggaaatgaaagaaatctaactttcagttcttcctgttcaaaacaggatttgattgccttatgtgacaagcccaagatctgtgacagttggagctcaaactaggcagtcttgattccagactgctctgaactagtatttgaaggaactaatgaacatgacatgttaaatgaaagtttggggacgtacactcaggatggaagcagggggacacaacagaaatgaaagaattttctgtagatctgggatctggacacctgccccccgtcatgcaccctcagtcatcacagtcattagactggacatctgcctccatggagaatatgtgaatacctgtgaatgtacttcctggaggcgctgccaaactatttccagcaatgacaaaacatagcatggaaggcagtaaacaagatgctaactgatggagtgaaatccccaggagatgcagaaggcaagtgcagctaactgaggcctcaggggcaggagatgcccatcaggatgagagctatgtctttctccagtgatgactctgcttctatgaggtcaccagcagtagaaccatatcttgctggcatacacttgggatggccccgcctcctggacttccatctgtcatcaggagaacataaccatctggagtcagtacagatcatcaatccttccacatatacaagttcattttaaatttttaaaaatataatacaactgagaagtcttcatt

SEQ ID NO: 321978 - DNA, 2800 bp, Homo sapiens
ggaatgaaaagaattggagcttccacaaaatcaaaagacagaaaaactgaagttgatacaagccatcgtttatcgatctttcttgaattgatagacgttcaccgcttaaatggagagcagcatgaggcaaccaaagttttacaagatgccatccatgaattttctggaacatctgaagaagtgcgggttaccatgtgctaatgcagaccttgctctagcccaaggagatattgaacgggctttaagcatccttcagaatgttacagccgaacagccttattttatagaggccagagaaaaaatggcagatatttatctgaagcacagaaaagataaaatgttatatatcacttgttttagagaaattgctgaaagaatggctaaccctcggtcttttcttctccttggtgatgcatacatgaatattctagagcctgaagaagccatagtagcatatgagcaagcattaaatcagaacccgaaagatggaacattggcaagcaaaatgggcaaagcacttatcaaaactcataactactcaatggcaatcacttactatgaagctgctctgaaaactggacaaaagaattatctttgctatgacctggctgagctcttattaaaattgaaatggtatgacaaagcagaaaaagttcttcagcatgctctggctcatgaacctgtaaatgaactgtcagctctcatggaggatggacgttgtcaagttcttctagcaaaagtttatagtaaaatggaaaaacttggtgatgcgatcactgcattacaacaggctcgagaattacaagctcgggtactaaaacgtgttcagatggaacagccagatgcagttcctgcacagaaacatttagcagctgaaatttgtgcagagattgcaaaacattctgttgctcagcgagactatgaaaaagcaattaagttttatagagaggctctggttcactgcgaaacagataataagattatgttggaactggcacgattatacctggcacaagatgaccctgattcctgcctgcggcagtgtgctctactgcttcagagtgaccaggataacgaagctgctaccatgatgatggctgatctcatgttcagaaaacaagactatgaacaagcagtgtttcatttacagcagcttttagaacgtaagccagataattatatgacattatctcgtttgattgatctcctaagaagatgtggaaaactcgaggatgtcccaagatttttctcaatggctgagaaacgtaactccagagcaaaattggaaccaggatttcagtattgtaaaggactgtatctttggtacactggagaaccaaatgatgcccttcgacattttaataaagctcggaaagatcgtgactggggccaaaatgccctttataatatgatagagatctgtttgaatccagataatgaaactgttggaggtgaagtatttgaaaacctggatggagacctgggtaattcaactgagaagcaagaatctgtgcaactggcagtaagaacagcagaaaaacttcttaaggaactaaaacctcagactgttcagggtcacgtacagcttcgcataatggaaaactattgcttaatggctaccaaacagaaatctaatgttgaacaagcattaaataccttcactgaaatagcagcatctgagaaggagcatatcccagcgctcttgggaatggcaacggcttatatgatcttgaaacagactccacgagccagaaaccagctgaagcgtattgcgaaaatgaattggaatgctattgatgctgaagagtttgagaagagttggctgctacttgctgatatttacattcaatcagcaaaatatgacatggcagaagacctgttaaaacggtgcctgcgtcataatagatcttgctgcaaagcttatgaatatatgggatacattatggaaaaagagcaagcatatacagatgctgccttgaactatgagatggcatggaaatatagcaatcggacaaatccggcagtaggatacaaactggcatttaattacttaaaagcaaaaagatatgtggattcaattgacatatgtcaccaggttcttgaagcacatccaacttatccaaaaatcagaaaggatatacttgataaggcccgtgcgtctttaagaccttgaaaataattttaacttaggtgttggtttaacaggaaatgaaagaaatctaactttcagttcttcctgttcaaaacaggatttgattgccttatgtgacaagcccaagatctgtgacagttggagctcaaactaggcagtcttgattccagactgctctgaactagtatttgaaggaactaatgaacatgacatgttaaatgaaagtttggggacgtacactcaggatggaagcagggggacacaacagaaatgaaagaattttctgtagatctgggatctggacacctgccccccgtcatgggaaggcagtaaacaagatgctaactgatggagtgaaatccccaggagatgcagaaggcaagtgcagctaactgaggcctcaggggcaggagatgcccatcaggatgagagctatgtctttctccagtgatgactctgcttctatgaggtcaccagcagtagaaccatatcttgctggcatacacttgggatggccccgcctcctggacttccatctgtcatcaggagaacataaccatctggagtcagtacagatcatcaatccttccacatatacaagttcattttaaatttttaaaaatataatacaactgagaagtcttcatt

SEQ ID NO: 321979 - DNA, 1535 bp, Homo sapiens
cttaatccatgcagtttcctctgtctgagagtgtccttgattcccaccctagcctagtttatgcctcattcttcagatttcagacatctcttgatacccttcaggttctttatggtaactcacttggcctggatctttctttcataacatttatctcagttttgaaattatttactcatgcaattattttaaaatgtactttttctcctaatagaatgcaaacctcataactgtaggcatcagtttgcctgtgtaagtgctaaataaatctgtactgtataaatgaatggctgtgttgtcatttactgccctatgatgagtttttactataacctgaaataaatgagacttttctagtaagttatagaaaccacacttgtgggatggcagctttctaacctatcaatgtattcactgtggtccttttttccaactccactttcttttcttcttacacttcttttgtgtcactctgtcttctattatcacacaacttctctgtatagcgtagtttggttgttcattcaccagcctcccttaccattctctagtgagtaagcaaagagaggaggaggcaaggaaaagtaatagtagcagtgtactccatcattctgttttatggtttttgtcttaacaggatacaaactggcatttaattacttaaaagcaaaaagatatgtggattcaattgacatatgtcaccaggttcttgaagcacatccaacttatccaaaaatcagaaaggatatacttgataaggcccgtgcgtctttaagaccttgaaaataattttaacttaggtgttggtttaacaggaaatgaaagaaatctaactttcagttcttcctgttcaaaacaggtttgagctcagtgctttgttattagaagtatacccttttttctccagcagaggttgctgctgtacatcaagagaagtactatgtgaaattggtgtttcctaatggagttgaatgagagctggtctatttgactctgttttgattgggtacagatttggtgactctgtggtaaagactataattatttctataaagaatattttgttaaaatctaggtaattaaataccctgtatcttttctaaggaatattatttcaggaaatatatttaaaatgcattgttctcttttaaagtgtttttgttatattcttttatttatttatttatttttaaagacagagccttgatctgccgcccaggctggagtgcagtggcacgatcttggctcactgcaacctccgcctcctgggtttacgcgattctcctgcttcagcctcccgagtagctgggactaaaggcatgtgccatcacacccggctaattttttgtatttttagtagagatgggatttcaccgtgttagccaggaggggcttgatctcttgaccttgtgatccacctgcctcggcctcccaaagtgctgggattacaggcatgagccaccgcacccagcctgtttttgttgtattctgtgttgtttcaaaaattggaataaatctccctgtaaataactcat

SEQ ID NO: 321980 - DNA, 831 bp, Homo sapiens
caccccccaagttatggaaccctctgatatacatgcccggtatcccgcacctttggaggcccaagccggttgatcacccgaggtaaggaattccggacacacccggcccacatggaggaccccctctcttcttaagatcaccaattacccggccattgtggcgcatgcccgttatccccgctactccggagggttagaaagggaaatcgcctggacacgggaggccgaggtttcactgagctgagattgcgcccttgcactcccagcctgggccaccaaaaccaattttttttccattaaaaaaaaaaaaaaaaaaaaaaacacctaaattatttattgctgataagagtgtgtgctctgtttcatggatcagctttgcaatttccttccaaatattcatctacttgcagaataaatgccatcccttcccacgccaaccatatcgatgatatagtggcaggaaggagagtaagggactctggagcttaaacagaccatcacatgggaaggcagtaaacaagatgctaactgatggagtgaaatccccaggagatgcagaaggcaagtgcagctaactgaggcctcaggggcaggagatgcccatcaggatgagagctatgtctttctccagtgatgactctgcttctatgaggtcaccagcagtagaaccatatcttgctggcatacacttgggatggccccgcctcctggacttccatctgtcatcaggagaacataaccatctggagtcagtacagatcatcaatccttccacatatacaagttcattttaaatttttaaaaatataatacaactgagaagtcttcatt

SEQ ID NO: 321981 - DNA, 767 bp, Homo sapiens
gtgtgagagaatttctgttttactagttaacttaaagtacatttaacaagtaaggccaattataccctataaagttgattctgaggtacacttaaattacattttaacatttctggaattcttataatctctgaagttgagatgactcttaaatgacattttagattcatcaaggtacacatttggaaatgaggtagaatattcacccaaagtgtaacaacagtgttctggtggagggaataatctgccacttaatgaagagccagtgtgtacagctcttcattattcaatgctgggtgcttagtaagtgctcattaatatagtagcagtgaccctctgtagcagctgctgttgtcctagttgtgaaaacatttatctagctaacaatatttacaggctcatctgattttggtcatgggtttagttttaaatttttgaggtttcagaaaattctatcaatttatttcgtaaatattataaatgtactagcatttattcattctgcgttatgagaaaatctccctttctagtgttatttgttcactattttggaagaatgattattttaatttcatctttacagcatgaggcaaccaaagttttacaagatgccatccatgaattttctggaacatctgaagaagtgcgggttaccatgtgctaatgcagaccttgctctagcccaaggagatattgaacgggctttaagcatccttcagaatgttacagccgaacagccttattttatagaggccagagaaaaaatg

SEQ ID NO: 321982 - DNA, 283 bp, Homo sapiens
tgccatcccttcccacgccaaccatatcgatgatatagtggcaggaaggagagtaagggactctggagcttaaacagaccatcacatggtaaggattgagagttgagctttttgttaaaagtatgttgtagatctacattattataaactgatttttctgtttgacctcaagtattttcagcacttttactgtgataggttaactgtcagccataaacatttctaaagaaataggaaaattttcttcctatattattcaaaatacaagtttctggtttatagc

SEQ ID NO: 321983 - DNA, 2894 bp, Homo sapiens
ggaatgaaaagaattggagcttccacaaaatcaaaagacagaaaaactgaagttgatacaagccatcgtttatcgatctttcttgaattgatagacgttcaccgcttaaatggagagcagcatgaggcaaccaaagttttacaagatgccatccatgaattttctggaacatctgaagaagtgcgggttaccatgtgctaatgcagaccttgctctagcccaaggagatattgaacgggctttaagcatccttcagaatgttacagccgaacagccttattttatagaggccagagaaaaaatggcagatatttatctgaagcacagaaaagataaaatgttatatatcacttgttttagagaaattgctgaaagaatggctaaccctcggtcttttcttctccttggtgatgcatacatgaatattctagagcctgaagaagccatagtagcatatgagcaagcattaaatcagaacccgaaagatggaacattggcaagcaaaatgggcaaagcacttatcaaaactcataactactcaatggcaatcacttactatgaagctgctctgaaaactggacaaaagaattatctttgctatgacctggctgagctcttattaaaattgaaatggtatgacaaagcagaaaaagttcttcagcatgctctggctcatgaacctgtaaatgaactgtcagctctcatggaggatggacgttgtcaagttcttctagcaaaagtttatagtaaaatggaaaaacttggtgatgcgatcactgcattacaacaggctcgagaattacaagctcgggtactaaaacgtgttcagatggaacagccagatgcagttcctgcacagaaacatttagcagctgaaatttgtgcagagattgcaaaacattctgttgctcagcgagactatgaaaaagcaattaagttttatagagaggctctggttcactgcgaaacagataataagattatgttggaactggcacgattatacctggcacaagatgaccctgattcctgcctgcggcagtgtgctctactgcttcagagtgaccaggataacgaagctgctaccatgatgatggctgatctcatgttcagaaaacaagactatgaacaagcagtgtttcatttacagcagcttttagaacgtaagccagataattatatgacattatctcgtttgattgatctcctaagaagatgtggaaaactcgaggatgtcccaagatttttctcaatggctgagaaacgtaactccagagcaaaattggaaccaggatttcagtattgtaaaggactgtatctttggtacactggagaaccaaatgatgcccttcgacattttaataaagctcggaaagatcgtgactggggccaaaatgccctttataatatgatagagatctgtttgaatccagataatgaaactgttggaggtgaagtatttgaaaacctggatggagacctgggtaattcaactgagaagcaagaatctgtgcaactggcagtaagaacagcagaaaaacttcttaaggaactaaaacctcagactgttcagggtcacgtacagcttcgcataatggaaaactattgcttaatggctaccaaacagaaatctaatgttgaacaagcattaaataccttcactgaaatagcagcatctgagaaggagcatatcccagcgctcttgggaatggcaacggcttatatgatcttgaaacagactccacgagccagaaaccagctgaagcgtattgcgaaaatgaattggaatgctattgatgctgaagagtttgagaagagttggctgctacttgctgatatttacattcaatcagcaaaatatgacatggcagaagacctgttaaaacggtgcctgcgtcataatagatcttgctgcaaagcttatgaatatatgggatacattatggaaaaagagcaagcatatacagatgctgccttgaactatgagatggcatggaaatatagcaatcggacaaatccggcagtaggatacaaactggcatttaattacttaaaagcaaaaagatatgtggattcaattgacatatgtcaccaggttcttgaagcacatccaacttatccaaaaatcagaaaggatatacttgataaggcccgtgcgtctttaagaccttgaaaataattttaacttaggtgttggtttaacaggaaatgaaagaaatctaactttcagttcttcctgttcaaaacaggatttgattgccttatgtgacaagcccaagatctgtgacagttggagctcaaactaggcagtcttgattccagactgctctgaactagtatttgaaggaactaatgaacatgacatgttaaatgaaagtttggggacgtacactcaggatggaagcagggggacacaacagaaatgaaagaattttctgtagatctgggatctggacacctgccccccgtcatgaataaatgccatcccttcccacgccaaccatatcgatgatatagtggcaggaaggagagtaagggactctggagcttaaacagaccatcacatgggaaggcagtaaacaagatgctaactgatggagtgaaatccccaggagatgcagaaggcaagtgcagctaactgaggcctcaggggcaggagatgcccatcaggatgagagctatgtctttctccagtgatgactctgcttctatgaggtcaccagcagtagaaccatatcttgctggcatacacttgggatggccccgcctcctggacttccatctgtcatcaggagaacataaccatctggagtcagtacagatcatcaatccttccacatatacaagttcattttaaatttttaaaaatataatacaactgagaagtcttcatt

SEQ ID NO: 321984 - DNA, 2925 bp, Homo sapiens
ggaatgaaaagaattggagcttccacaaaatcaaaagacagaaaaactgaagttgatacaagccatcgtttatcgatctttcttgaattgatagacgttcaccgcttaaatggagagcagcatgaggcaaccaaagttttacaagatgccatccatgaattttctggaacatctgaagaagtgcgggttaccatgtgctaatgcagaccttgctctagcccaaggagatattgaacgggctttaagcatccttcagaatgttacagccgaacagccttattttatagaggccagagaaaaaatggcagatatttatctgaagcacagaaaagataaaatgttatatatcacttgttttagagaaattgctgaaagaatggctaaccctcggtcttttcttctccttggtgatgcatacatgaatattctagagcctgaagaagccatagtagcatatgagcaagcattaaatcagaacccgaaagatggaacattggcaagcaaaatgggcaaagcacttatcaaaactcataactactcaatggcaatcacttactatgaagctgctctgaaaactggacaaaagaattatctttgctatgacctggctgagctcttattaaaattgaaatggtatgacaaagcagaaaaagttcttcagcatgctctggctcatgaacctgtaaatgaactgtcagctctcatggaggatggacgttgtcaagttcttctagcaaaagtttatagtaaaatggaaaaacttggtgatgcgatcactgcattacaacaggctcgagaattacaagctcgggtactaaaacgtgttcagatggaacagccagatgcagttcctgcacagaaacatttagcagctgaaatttgtgcagagattgcaaaacattctgttgctcagcgagactatgaaaaagcaattaagttttatagagaggctctggttcactgcgaaacagataataagattatgttggaactggcacgattatacctggcacaagatgaccctgattcctgcctgcggcagtgtgctctactgcttcagagtgaccaggataacgaagctgctaccatgatgatggctgatctcatgttcagaaaacaagactatgaacaagcagtgtttcatttacagcagcttttagaacgtaagccagataattatatgacattatctcgtttgattgatctcctaagaagatgtggaaaactcgaggatgtcccaagatttttctcaatggctgagaaacgtaactccagagcaaaattggaaccaggatttcagtattgtaaaggactgtatctttggtacactggagaaccaaatgatgcccttcgacattttaataaagctcggaaagatcgtgactggggccaaaatgccctttataatatgatagagatctgtttgaatccagataatgaaactgttggaggtgaagtatttgaaaacctggatggagacctgggtaattcaactgagaagcaagaatctgtgcaactggcagtaagaacagcagaaaaacttcttaaggaactaaaacctcagactgttcagggtcacgtacagcttcgcataatggaaaactattgcttaatggctaccaaacagaaatctaatgttgaacaagcattaaataccttcactgaaatagcagcatctgagaaggagcatatcccagcgctcttgggaatggcaacggcttatatgatcttgaaacagactccacgagccagaaaccagctgaagcgtattgcgaaaatgaattggaatgctattgatgctgaagagtttgagaagagttggctgctacttgctgatatttacattcaatcagcaaaatatgacatggcagaagacctgttaaaacggtgcctgcgtcataatagatcttgctgcaaagcttatgaatatatgggatacattatggaaaaagagcaagcatatacagatgctgccttgaactatgagatggcatggaaatatagcaatcggacaaatccggcagtaggatacaaactggcatttaattacttaaaagcaaaaagatatgtggattcaattgacatatgtcaccaggttcttgaagcacatccaacttatccaaaaatcagaaaggatatacttgataaggcccgtgcgtctttaagaccttgaaaataattttaacttaggtgttggtttaacaggaaatgaaagaaatctaactttcagttcttcctgttcaaaacaggtttgagctcagtgctttgttattagaagtatacccttttttctccagcagaggttgctgctgtacatcaagagaagtactatgtgaaattggtgtttcctaatggagttgaatgagagctggtctatttgactctgttttgattgggtacagatttggtgactctgtggtaaagactataattatttctataaagaatattttgttaaaatctaggtaattaaataccctgtatcttttctaaggaatattatttcaggaaatatatttaaaatgcattgttctcttttaaagtgtttttgttatattcttttatttatttatttatttttaaagacagagccttgatctgccgcccaggctggagtgcagtggcacgatcttggctcactgcaacctccgcctcctgggtttacgcgattctcctgcttcagcctcccgagtagctgggactaaaggcatgtgccatcacacccggctaattttttgtatttttagtagagatgggatttcaccgtgttagccaggaggggcttgatctcttgaccttgtgatccacctgcctcggcctcccaaagtgctgggattacaggcatgagccaccgcacccagcctgtttttgttgtattctgtgttgtttcaaaaattggaataaatctccctgtaaataactcat

SEQ ID NO: 321985 - DNA, 1931 bp, Homo sapiens
ggaatgaaaagaattggagcttccacaaaatcaaaagacagaaaaactgaagttgatacaagccatcgtttatcgatctttcttgaattgatagacgttcaccgcttaaatggagagcagcatgaggcaaccaaagttttacaagatgccatccatgaattttctggaacatctgaagaagtgcgggttaccatgtgctaatgcagaccttgctctagcccaaggagatattgaacgggctttaagcatccttcagaatgttacagccgaacagccttattttatagaggccagagaaaaaatggcagatatttatctgaagcacagaaaagataaaatgttatatatcacttgttttagagaaattgctgaaagaatggctaaccctcggtcttttcttctccttggtgatgcatacatgaatattctagagcctgaagaagccatagtagcatatgagcaagcattaaatcagaacccgaaagatggaacattggcaagcaaaatgggcaaagcacttatcaaaactcataactactcaatggcaatcacttactatgaagctgctctgaaaactggacaaaagaattatctttgctatgacctggctgagctcttattaaaattgaaatggtatgacaaagcagaaaaagttcttcagcatgctctggctcatgaacctgtaaatgaactgtcagctctcatggaggatggacgttgtcaagttcttctagcaaaagtttatagtaaaatggaaaaacttggtgatgcgatcactgcattacaacaggctcgagaattacaagctcgggtactaaaacgtgttcagatggaacagccagatgcagttcctgcacagaaacatttagcagctgaaatttgtgcagagattgcaaaacattctgttgctcagcgagactatgaaaaagcaattaagttttatagagaggctctggttcactgcgaaacagataataagattatgttggaactggcacgattatacctggcacaagatgaccctgattcctgcctgcggcagtgtgctctactgcttcagagtgaccaggataacgaagctgctaccatgatgatggctgatctcatgttcagaaaacaagactatgaacaagcagtgtttcatttacagcagcttttagaacgtaagccagataattatatgacattatctcgtttgattgatctcctaagaagatgtggaaaactcgaggatgtcccaagatttttctcaatggctgagaaacgtaactccagagcaaaattggaaccaggatttcagtattgtaaaggactgtatctttggtacactggagaaccaaatgatgcccttcgacattttaataaagctcggaaagatcgtgactggggccaaaatgccctttataatatgatagagatctgtttgaatccagataatgaaactgttggaggtgaagtatttgaaaacctggatggagacctgggtaattcaactgagaagcaagaatctgtgcaactggcagtaagaacagcagaaaaacttcttaaggaactaaaacctcagactgttcagggtcacgtacagcttcgcataatggaaaactattgcttaatggctaccaaacagaaatctaatgttgaacaagcattaaataccttcactgaaatagcagcatctgagaaggagcatatcccagcgctcttgggaatggcaacggcttatatgatcttgaaacagactccacgagccagaaaccagctgaagcgtattgcgaaaatgaattggaatgctattgatgctgaagagtttgagaagagttggctgctacttgctgatatttacattcaatcagcaaaatatgacatggcagaagacctgttaaaacggtgcctgcgtcataatagagtaggtgattgaagagtaaaaaata

SEQ ID NO: 321986 - DNA, 2426 bp, Homo sapiens
gagcgctctcgctcagtgcagcgaggccagcgatgccttctggaccacacgctgtcctcgccgaggtcctggtttgttcctcaacgtcggctgaaggcatcgtcccctgacttcctcttccattcgtccttccgaaaggggacccgactggttcctcttctacatatgaggcgcatctgcttggtgcaaatgtccaagcacctcttctgactcggtgagagtgattttccagtgattgctttggcctgtacaaccagagaacaggattcttcccttctttttggccaccaaatgcctatgtgcaccacacattccagtgtgctgagaagggcagagcttcttggatgatgatggacgtcccaccgggcaggatgaaggcagagcgtgtggcatctccacctcaagggtgcagcctgatcttcctcttctcccttgccagccagcactctgccttctgtatccaccatggtgtttggtgagtttttccatcgccctggacaagacgaggaacttgtcaacctgaatgtggggggctttaagcagtctgttgaccaaagcaccctcctgcggtttcctcacaccagactggggaagctgcttacttgccattctgaagaggccattctggagctgtgtgatgattacagtgtggccgataaggaatactactttgatcggaatccctccttgttcagatatgttttgaatttttattacacggggaagctgcatgtcatggaggagctgtgcgtattctcattctgccaggagatcgagtactggggcatcaacgagctcttcattgattcttgctgcagcaatcgctaccaggaacgcaaggaggaaaaccacgagaaggactgggaccagaaaagccatgatgtgagtaccgactcctcgtttgaagagtcgtctctgtttgagaaagagctggagaagtttgacacactgcgatttggtcagctccggaagaaaatctggattagaatggagaatccagcgtactgcctgtccgctaagcttatcgctatctcctccttgagcgtggtgctggcctccatcgtggccatgtgcgttcacagcatgtcggagttccagaatgaggatggagaagtggatgatccggtgctggaaggagtggagatcgcgtgcattgcctggttcaccggggagcttgccgtccggctggctgccgctccttgtcaaaagaaattctggaaaaaccctctgaacatcattgactttgtctctattattcccttctatgccacgttggctgtagacaccaaggaggaagagagtgaggatattgagaacatgggcaaggtggtccagatcctacggcttatgaggattttccgaattctaaagcttgcccggcactcggtaggacttcggtctctaggtgccacactgagacacagctaccatgaagttgggcttctgcttctcttcctctctgtgggcatttccattttctctgtgcttatctactccgtggagaaagatgaccacacatccagcctcaccagcatccccatctgctggtggtgggccaccatcagcatgacaactgtgggctatggagacacccacccggtcaccttggcgggaaagctcatcgccagcacatgcatcatctgtggcatcttggtggtggcccttcccatcaccatcatcttcaacaagttttccaagtactaccagaagcaaaaggacattgatgtggaccagtgcagtgaggatgcaccagagaagtgtcatgagctaccttactttaacattagggatatatatgcacagcggatgcacgccttcattaccagtctctcttctgtaggcattgtggtgagcgatcctgactccacagatgcttcaagcattgaagacaatgaggacatttgtaacaccacctccttggagaattgcacagcaaaatgagcgggggtgtttgtgcctgtttctcttatcctttcccaacattaggttaacacagctttataaacctcagtgggttcgttaaaatcatttaattctcagggtgtacctttcagccatagttggacattcattgctgaattctgaaatgatagaattgtctttatttttctctgtgaggtcaattaaatgccttgttctgaaatttattttttacaagagagagttgtgatatagtttggaatataagataaatggtattgggtggggtttgtggctacagcttatgcatcattctgtgtttgtcatttactcacattgagctaactttaaattactgacaagtagaatcaaaggtgcagctgactgagacgacatgcatgtaagatccacaaaatgagacaatgcatgtaaatccatgctcatgttctaaacatggaaactaggagcctaataaacttcctaattcagtatggaaaaaaaaaaaa

SEQ ID NO: 321987 - DNA, 1392 bp, Homo sapiens
agaccggccgacgcgggccaccccgctctcctcgccgccgcggcggcaggcgcggggccgcgccgcgaggcctgatccctgcagcgcgggcaggcggcgtcgcagagcggagctagctggatgcgtccggactcctgcaggtgagagtgattttccagtgattgctttggcctgtacaaccagagaacaggattcttcccttctttttggccaccaaatgcctatgtgcaccacacattccagtgtgctgagaagggcagagcttcttggatgatgatggacgtcccaccgggcaggatgaaggcagagcgtgtggcatctccacctcaagggtgcagcctgatcttcctcttctcccttgccagccagcactctgccttctgtatccaccatggtgtttggtgagtttttccatcgccctggacaagacgaggaacttgtcaacctgaatgtggggggctttaagcagtctgttgaccaaagcaccctcctgcggtttcctcacaccagactggggaagctgcttacttgccattctgaagaggccattctggagctgtgtgatgattacagtgtggccgataaggaatactactttgatcggaatccctccttgttcagatatgttttgaatttttattacacggggaagctgcatgtcatggaggagctgtgcgtattctcattctgccaggagatcgagtactggggcatcaacgagctcttcattgattcttgctgcagcaatcgctaccaggaacgcaaggaggaaaaccacgagaaggactgggaccagaaaagccatgatgtgagtaccgactcctcgtttgaagagtcgtctctgtttgagaaagagctggagaagtttgacacactgcgatttggtcagctccggaagaaaatctggattagaatggagaatccagcgtactgcctgtccgctaagcttatcgctatctcctccttgagcgtggtgctggcctccatcgtggccatgtgcgttcacagcatgtcggagttccagaatgaggatggagaagtggatgatccggtgctggaaggagtggagatcgcgtgcattgcctggttcaccggggagcttgccgtccggctggctgccgctccttgtcaaaagaaattctggaaaaaccctctgaacatcattgactttgtctctattattcccttttatgcatcattctgtgtttgtcatttactcacattgagctaactttaaattactgacaagtagaatcaaaggtgcagctgactgagacgacatgcatgtaagatccacaaaatgagacaatgcatgtaaatccatgctcatgttctaaacatggaaactaggagcctaataaacttcctaattcagtatggaaaaaaaaaaaa

SEQ ID NO: 321988 - DNA, 2352 bp, Homo sapiens
agaccggccgacgcgggccaccccgctctcctcgccgccgcggcggcaggcgcggggccgcgccgcgaggcctgatccctgcagcgcgggcaggcggcgtcgcagagcggagctagctggatgcgtccggactcctgcaggtgagagtgattttccagtgattgctttggcctgtacaaccagagaacaggattcttcccttctttttggccaccaaatgcctatgtgcaccacacattccagtgtgctgagaagggcagagcttcttggatgatgatggacgtcccaccgggcaggatgaaggcagagcgtgtggcatctccacctcaagggtgcagcctgatcttcctcttctcccttgccagccagcactctgccttctgtatccaccatggtgtttggtgagtttttccatcgccctggacaagacgaggaacttgtcaacctgaatgtggggggctttaagcagtctgttgaccaaagcaccctcctgcggtttcctcacaccagactggggaagctgcttacttgccattctgaagaggccattctggagctgtgtgatgattacagtgtggccgataaggaatactactttgatcggaatccctccttgttcagatatgttttgaatttttattacacggggaagctgcatgtcatggaggagctgtgcgtattctcattctgccaggagatcgagtactggggcatcaacgagctcttcattgattcttgctgcagcaatcgctaccaggaacgcaaggaggaaaaccacgagaaggactgggaccagaaaagccatgatgtgagtaccgactcctcgtttgaagagtcgtctctgtttgagaaagagctggagaagtttgacacactgcgatttggtcagctccggaagaaaatctggattagaatggagaatccagcgtactgcctgtccgctaagcttatcgctatctcctccttgagcgtggtgctggcctccatcgtggccatgtgcgttcacagcatgtcggagttccagaatgaggatggagaagtggatgatccggtgctggaaggagtggagatcgcgtgcattgcctggttcaccggggagcttgccgtccggctggctgccgctccttgtcaaaagaaattctggaaaaaccctctgaacatcattgactttgtctctattattcccttctatgccacgttggctgtagacaccaaggaggaagagagtgaggatattgagaacatgggcaaggtggtccagatcctacggcttatgaggattttccgaattctaaagcttgcccggcactcggtaggacttcggtctctaggtgccacactgagacacagctaccatgaagttgggcttctgcttctcttcctctctgtgggcatttccattttctctgtgcttatctactccgtggagaaagatgaccacacatccagcctcaccagcatccccatctgctggtggtgggccaccatcagcatgacaactgtgggctatggagacacccacccggtcaccttggcgggaaagctcatcgccagcacatgcatcatctgtggcatcttggtggtggcccttcccatcaccatcatcttcaacaagttttccaagtactaccagaagcaaaaggacattgatgtggaccagtgcagtgaggatgcaccagagaagtgtcatgagctaccttactttaacattagggatatatatgcacagcggatgcacgccttcattaccagtctctcttctgtaggcattgtggtgagcgatcctgactccacagatgcttcaagcattgaagacaatgaggacatttgtaacaccacctccttggagaattgcacagcaaaatgagcgggggtgtttgtgcctgtttctcttatcctttcccaacattaggttaacacagctttataaacctcagtgggttcgttaaaatcatttaattctcagggtgtacctttcagccatagttggacattcattgctgaattctgaaatgatagaattgtctttatttttctctgtgaggtcaattaaatgccttgttctgaaatttattttttacaagagagagttgtgatatagtttggaatataagataaatggtattgggtggggtttgtggctacagcttatgcatcattctgtgtttgtcatttactcacattgagctaactttaaattactgacaagtagaatcaaaggtgcagctgactgagacgacatgcatgtaagatccacaaaatgagacaatgcatgtaaatccatgctcatgttctaaacatggaaactaggagcctaataaacttcctaattcagtatggaaaaaaaaaaaa

SEQ ID NO: 321989 - DNA, 1972 bp, Homo sapiens
agaccggccgacgcgggccaccccgctctcctcgccgccgcggcggcaggcgcggggccgcgccgcgaggcctgatccctgcagcgcgggcaggcggcgtcgcagagcggagctagctggatgcgtccggactcctgcaggtgagagtgattttccagtgattgctttggcctgtacaaccagagaacaggattcttcccttctttttggccaccaaatgcctatgtgcaccacacattccagtgtgctgagaagggcagagcttcttggatgatgatggacgtcccaccgggcaggatgaaggcagagcgtgtggcatctccacctcaagggtgcagcctgatcttcctcttctcccttgccagccagcactctgccttctgtatccaccatggtgtttggtgagtttttccatcgccctggacaagacgaggaacttgtcaacctgaatgtggggggctttaagcagtctgttgaccaaagcaccctcctgcggtttcctcacaccagactggggaagctgcttacttgccattctgaagaggccattctggagctgtgtgatgattacagtgtggccgataaggaatactactttgatcggaatccctccttgttcagatatgttttgaatttttattacacggggaagctgcatgtcatggaggagctgtgcgtattctcattctgccaggagatcgagtactggggcatcaacgagctcttcattgattcttgctgcagcaatcgctaccaggaacgcaaggaggaaaaccacgagaaggactgggaccagaaaagccatgatgtgagtaccgactcctcgtttgaagagtcgtctctgtttgagaaagagctggagaagtttgacacactgcgatttggtcagctccggaagaaaatctggattagaatggagaatccagcgtactgcctgtccgctaagcttatcgctatctcctccttgagcgtggtgctggcctccatcgtggccatgtgcgttcacagcatgtcggagttccagaatgaggatggagaagtggatgatccggtgctggaaggagtggagatcgcgtgcattgcctggttcaccggggagcttgccgtccggctggctgccgctccttgtcaaaagaaattctggaaaaaccctctgaacatcattgactttgtctctattattcccttctatgccacgttggctgtagacaccaaggaggaagagagtgaggatattgagaacatgggcaaggtggtccagatcctacggcttatgaggattttccgaattctaaagcttgcccggcactcggtaggacttcggtctctaggtgccacactgagacacagctaccatgaagttgggcttctgcttctcttcctctctgtgggcatttccattttctctgtgcttatctactccgtggagaaagatgaccacacatccagcctcaccagcatccccatctgctggtggtgggccaccatcagcatgacaactgtgggctatggagacacccacccggtcaccttggcgggaaagctcatcgccagcacatgcatcatctgtggcatcttggtggtggcccttcccatcaccatcatcttcaacaagttttccaagtactaccagaagcaaaaggacattgatgtggaccagtgcagtgaggatgcaccagagaagtgtcatgagctaccttactttaacattagggatatattttggaatataagataaatggtattgggtggggtttgtggctacagcttatgcatcattctgtgtttgtcatttactcacattgagctaactttaaattactgacaagtagaatcaaaggtgcagctgactgagacgacatgcatgtaagatccacaaaatgagacaatgcatgtaaatccatgctcatgttctaaacatggaaactaggagcctaataaacttcctaattcagtatggaaaaaaaaaaaa

SEQ ID NO: 321990 - DNA, 182 bp, Homo sapiens
catgctcttgaggctgtatggtcgccactccccattccattccagaggagggcacagaggccggactgtcgcagtcctcactttagtgggtgaggacacctgcctccaacccactacctacctcagaagcctgcaggctttttcttattacataccccacccaaagacctaaaaaaaaaaaa

SEQ ID NO: 321991 - DNA, 230 bp, Homo sapiens
agagtgagactctgtctcaaaaaaaaaaaacaaacaaacaaaaaaaacaaaaccatatgcttcaacacctcaggttgaccatttggggggagtgtgtatgggtgttttaagatggcggggtatgcagatttactctgtcttcacacaaaagcctgatgctaaggaagcagctgagaaagtgagaaaagagtgtttgaagacaagttcttgttaaatatcaaattttacaa

SEQ ID NO: 321992 - DNA, 177 bp, Homo sapiens
atcagagaggtggggctggggtataagccaggctgtagacctcagagcctgtgttccaaagttacatcatatgacctgaagacacccctgtacaccctatcctcacccacccccagataatctagaccagcttcctttgcaattagttcagcatttgctgagcccacagtctgttgg

SEQ ID NO: 321993 - DNA, 5118 bp, Homo sapiens
cgcgccgccgccgccgccttctgtgcagtcgcggcccgggcggacggtggctggctgctccgcagcgctcggctggctgcagcggcaccgcgggttgcgcggccggggatgctccagcgggcgcgatggcccccgccatgcagccggccgagatccaatttgcccagcggctggcgtccagcgagaagggcatccgggaccgagcggtgaagaagctgcgccagtacatcagcgtgaagacgcagagggagacaggaggtttcagtcaggaagaacttctgaaaatctggaaggggctcttctactgcatgtgggtgcaggatgaaccccttctacaggaagagctcgccaacaccattgcacagctagtccatgctgttaacaactcagcggctcaacacctgttcattcagaccttttggcaaaccatgaatcgagaatggaaaggaatagacaggctacgcctggacaaatactatatgctgattcgtctggtcctgaggcagtcctttgaagtcttgaagcgaaatggctgggaagaaagccgaatcaaggttttcttggatgtcctgatgaaggaggtcctgtgtcctgagagtcagtctcctaatggagtgagattccacttcattgatatttacctggatgaactctccaaagtcggggggaaggagcttttagcagatcagaatctcaagtttatcgatccattctgcaaaattgctgcaaagacgaaggaccacaccctggtacagaccatagctcggggtgtcttcgaagctatcgtagatcagtctccttttgtgcctgaagagacgatggaggaacagaagacaaaagtgggtgatggtgacctctctgctgaggagatacctgaaaatgaggtatccttgagaagagctgtcagtaaaaagaagacagcactgggcaaaaaccattccagaaaagatggactcagtgatgaaagaggaagagatgactgtggaacctttgaggacacagggccccttctccagtttgactataaggctgttgctgatcgactcctggaaatgaccagcaggaagaacacgccccacttcaacaggaagcgcctctccaaactcatcaagaaattccaagacctttctgaaggaagcagtatatctcaactcagttttgcggaggacatttctgctgatgaagatgaccaaatcctcagtcaaggaaagcataagaagaaaggaaataaacttttagagaaaactaacttggaaaaggagaaaggaagcagagtcttttgtgtagaggaagaggacagtgaaagcagtcttcaaaagagaagaaggaagaagaagaagaagcaccacctgcagcctgaaaatccaggcccagggggtgcagccccgtccctggaacagaaccggggcagggagcccgaggcctctgggccgaaagccctgaaggcacgtgtggccgagccaggtgcagaggccacgtccagcactggggaggagagtggctccgagcatcctccagccgtccccatgcacaataaaaggaaacggccacggaagaagagcccgagggcccacagggaaatgttggaatcagcagtgttgcccccagaggacatgtctcagagtggcccgagtggcagtcatcctcagggacctagagggtccccgacaggtggagcccaactcctaaaaaggaagcggaaacttggagttgtgcccgtcaatggcagtggcctgtccacgccggcctggcctccattgcagcaggaaggccctcccacaggccccgcagagggggcgaacagccacaccacgctgccccagcgcaggaggctgcagaaaaagaaggcagggcccggcagcctggagctctgtggcctgcccagccagaaaacagcaagtttgaaaaagaggaagaaaatgagagtgatgtcaaacttggtggagcacaacggggtgctggagtccgaagctgggcaaccccaggctctgggaagcagtgggacttgcagttccctgaagaagcagaagctgagggcagagagcgactttgtgaagtttgacacccccttcttaccaaagcccctgttcttcagaagagccaagagcagcactgccacccaccctccaggccctgccgtccagctaaacaagacaccatccagctccaagaaagtcacctttgggctgaacagaaacatgactgccgaattcaagaagacagacaagagtatcttggtcagtcccacgggcccttctcgagtggccttcgaccctgaacagaagcccctccacggggtgctgaagacccccaccagctcacctgccagctcacccctggtggccaagaagcccctgaccaccacaccaaggagaaggcccagggctatggatttcttctgaggagcagcagagtcccttgtaaaagactgcttttgtacagaatgcgctataaattatacctttaagaatgtggggccttttttatgattttgtaagttcccataagttgtgtgcacgaggttctgagagtgcccgcaggctgctgcgtcctggcccctctgtagtggctgcgggcgtcttggttgaatcttttgctacaaaccatgtttgcgtttgagctctccaggattttacatttttgggtaacctcagtgattcccattggtgtaggaaatgagaccctctctgaagctgaggagagcacgttgatctgaactttaaatcaatcagtgctgctggcacaatgaaaggtggaactgcacttctgttgagctctcagttctgcggaatttggtactcattaccgtattcgccgtactaagttggtttctgttagtcttaacagtctgttttcttttaaaagcatgtagggcttcattgccatgttctgtgggtgtttggcaggttaccgatggggaagattcttgtcacagaatcagcaataccatagtttttctacatgtgctcagctgggggtgtggacaggtaggggtggggaaagaagaggctctgcgttctgggggctttttcttctcctccccctacccggtttccctccctgttttcctacctctacggcaagcccaaagtgtcttcccgggagcccagcgcagcccccggctcttacccaggaccccgccccgtgctgagccttctgctgaggtccttgcgtggagcacactcattcctccaagcccttgcgctcccgtttctctctctctccgtccacgttccagccgagtcactgcctgcctgaccggctccatggcagctccccatcttccctagaggctgcctgcgcatctggagcctgcgctccggctcagcgacctttcctctcaaatgcggaagcgtgcacttacagttcagaccgttctcctgtaagttcattacaaacacgggcggaaggcactcaggctttcgttggagaaacagaaataaggccttcttttgagcagcgattgctggatcattgatctgtttgaggaagtgtctgacctgggcctgagagctggagaaggtgcagattcaaagtgagcggctcctgaggagagccgccaaggctgctcgccttctccgtggcttccgcagctaccgtctgcacggtgagagggcacgggcacacggttcgggctggcgtgcagctctcccagccagccacgctctgctcaggcctggaagtgaaagccgcctccttcccgttatgccccccatacaggagcctcggtttttcagcaaaacgcggccagtccccttctccactgctgcctcccagcagagggccccaggatctccaaggtcccagctatggctttggacaacgtggcttcggcccctggggttgcagagcttgcattgggtttacctcggtctcattcattcatggagccaagggtggggtttcacctgcgaacatcagactgacttgctggcgtcaagagcagttgactcactgatgaaggccctggtgaggagaaagcactctgttcttcgcctactctgtaatcgttttgtcataatgagccatgaaaaaagtaatgaacttgtgctgttaatcgtcactgtaatgagaagtcttacgtacaacatagctgtggtggctgcgtggtttaatggctgcattagataggatcctcacatcccattcagaaccaaaactgatacagtgaaacaattaaggtgagcaaatagttttaacttttctttttttttttaagtttcattcttcctagaatatttttctaacaatttttatttcagctttaaagatgggtcatatagccaaacgggccatataatccaacattgttgagatgtcttaggacatctaaggcaaaactggcacatttgttctgcagactattgcaggaatgttttttcctagcatttctatattatctgtccattctgaggaaccagtgaatgtcctataaatgcacctcctgtcaaaaccatgcctgagaggtcccggctgggagtgacagggtgcttcttagattctattggtccttctctcattctccgaacttactcctttttatgggtaagtcaactaggtttacagtcccttatttttaatgcctaagttttgacagcaggaagaaaacaattttttaaaaattctcattacatagacgcacaagaatatgtcacataaagaaaatgtgtttagaatactggttttctatttacgcatgatattttcctaagtaaaattgccaagtggacttggaagtccagaaaggaaaataatttaaattaatgctggtgatcttaacaatattttgtaaaatgatgcttcccccttctccatggtctagtcaattttgtacaattaggtatctgactttacaagtttgttatcctttctaatttttactgaactgaaagcacaaagaagactacacagaaaatctggaaacagttgcaggtgttgggaggaagatgaaatcgagctgtcttttaacttttgtatgtgttttatcagaatttgctggactatgctggcaaggactttgtttacgatcaaattgtactagtgtctgcagggtttgtcagtactcgtcaaagccaagtccaattaaaaaaaaaagtctttgccctccaaaaaaaaatt

SEQ ID NO: 321994 - DNA, 4583 bp, Homo sapiens
cgcgccgccgccgccgccttctgtgcagtcgcggcccgggcggacggtggctggctgctccgcagcgctcggctggctgcagcggcaccgcgggttgcgcggccggggatgctccagcgggcgcgatggcccccgccatgcagccggccgagatccaatttgcccagcggctggcgtccagcgagaagggcatccgggaccgagcggtgaagaagctgcgccagtacatcagcgtgaagacgcagagggagacaggaggtttcagtcaggaagaacttctgaaaatctggaaggggctcttctactgcatgtgggtgcaggatgaaccccttctacaggaagagctcgccaacaccattgcacagctagtccatgctgttaacaactcagcggctcaacacctgttcattcagaccttttggcaaaccatgaatcgagaatggaaaggaatagacaggctacgcctggacaaatactatatgctgattcgtctggtcctgaggcagtcctttgaagtcttgaagcgaaatggctgggaagaaagccgaatcaaggttttcttggatgtcctgatgaaggaggtcctgtgtcctgagagtcagtctcctaatggagtgagattccacttcattgatatttacctggatgaactctccaaagtcggggggaaggagcttttagcagatcagaatctcaagtttatcgatccattctgcaaaattgctgcaaagacgaaggaccacaccctggtacagaccatagctcggggtgtcttcgaagctatcgtagatcagtctccttttgtgcctgaagagacgatggaggaacagaagacaaaagtgggtgatggtgacctctctgctgaggagatacctgaaaatgaggtatccttgagaagagctgtcagtaaaaagaagacagcactgggcaaaaaccattccagaaaagatggactcagtgatgaaagaggaagagatgactgtggaacctttgaggacacagggccccttctccagtttgactataaggctgttgctgatcgactcctggaaatgaccagcaggaagaacacgccccacttcaacaggaagcgcctctccaaactcatcaagaaattccaagacctttctgaaggaagcagtatatctcaactcagttttgcggaggacatttctgctgatgaagatgaccaaatcctcagtcaaggaaagcataagaagaaaggaaataaacttttagagaaaactaacttggaaaaggagaaaggaagcagagtcttttgtgtagaggaagaggacagtgaaagcagtcttcaaaagagaagaaggaagaagaagaagaagcaccacctgcagcctgaaaatccaggcccagggggtgcagccccgtccctggaacagaaccggggcagggagcccgaggcctctgggccgaaagccctgaaggcacgtgtggccgagccaggtgcagaggccacgtccagcactggggaggagagtggctccgagcatcctccagccgtccccatgcacaataaaaggaaacggccacggaagaagagcccgagggcccacagggaaatgttggaatcagcagtgttgcccccagaggacatgtctcagagtggcccgagtggcagtcatcctcagggacctagagggtccccgacaggtggagcccaactcctaaaaaggaagcggaaacttggagttgtgcccgtcaatggcagtggcctgtccacgccggcctggcctccattgcagcaggaaggccctcccacaggccccgcagagggggcgaacagccacaccacgctgccccagcgcaggaggctgcagaaaaagaaggcagggcccggcagcctggagctctgtggcctgcccagccagaaaacagcaagtttgaaaaagaggaagaaaatgagagtgatgtcaaacttggtggagcacaacggggtgctggagtccgaagctgggcaaccccaggctctgggaagcagtgggacttgcagttccctgaagaagcagaagctgagggcagagagcgactttgtgaagtttgacacccccttcttaccaaagcccctgttcttcagaagagccaagagcagcactgccacccaccctccaggccctgccgtccagctaaacaagacaccatccagctccaagaaagtcacctttgggctgaacagaaacatgactgccgaattcaagaagacagacaagagtatcttggtcagtcccacgggcccttctcgagtggccttcgaccctgaacagaagcccctccacggggtgctgaagacccccaccagctcacctgccagctcacccctggtggccaagaagcccctgaccaccacaccaaggagaaggcccagggctatggatttcttctgaggagcagcagagtcccttgtaaaagactgcttttgtacagaatgcgctataaattatacctttaagaatgtggggccttttttatgattttgtaagttcccataagttgtgtgcacgaggttctgagagtgcccgcaggctgctgcgtcctggcccctctgtagtggctgcgggcgtcttggttgaatcttttgctacaaaccatgtttgcgtttgagctctccaggattttacatttttgggtaacctcagtgattcccattggtgtaggaaatgagaccctctctgaagctgaggagagcacgttgatctgaactttaaatcaatcagtgctgctggcacaatgaaaggtggaactgcacttctgttgagctctcagttctgcggaatttggtactcattaccgtattcgccgtactaagttggtttctgttagtcttaacagtctgttttcttttaaaagcatgtagggcttcattgccatgttctgtgggtgtttggcaggttaccgatggggaagattcttgtcacagaatcagcaataccatagtttttctacatgtgctcagctgggggtgtggacaggtaggggtggggaaagaagaggctctgcgttctgggggctttttcttctcctccccctacccggtttccctccctgttttcctacctctacggcaagcccaaagtgtcttcccgggagcccagcgcagcccccggctcttacccaggaccccgccccgtgctgagccttctgctgaggtccttgcgtggagcacactcattcctcggtttttcagcaaaacgcggccagtccccttctccactgctgcctcccagcagagggccccaggatctccaaggtcccagctatggctttggacaacgtggcttcggcccctggggttgcagagcttgcattgggtttacctcggtctcattcattcatggagccaagggtggggtttcacctgcgaacatcagactgacttgctggcgtcaagagcagttgactcactgatgaaggccctggtgaggagaaagcactctgttcttcgcctactctgtaatcgttttgtcataatgagccatgaaaaaagtaatgaacttgtgctgttaatcgtcactgtaatgagaagtcttacgtacaacatagctgtggtggctgcgtggtttaatggctgcattagataggatcctcacatcccattcagaaccaaaactgatacagtgaaacaattaaggtgagcaaatagttttaacttttctttttttttttaagtttcattcttcctagaatatttttctaacaatttttatttcagctttaaagatgggtcatatagccaaacgggccatataatccaacattgttgagatgtcttaggacatctaaggcaaaactggcacatttgttctgcagactattgcaggaatgttttttcctagcatttctatattatctgtccattctgaggaaccagtgaatgtcctataaatgcacctcctgtcaaaaccatgcctgagaggtcccggctgggagtgacagggtgcttcttagattctattggtccttctctcattctccgaacttactcctttttatgggtaagtcaactaggtttacagtcccttatttttaatgcctaagttttgacagcaggaagaaaacaattttttaaaaattctcattacatagacgcacaagaatatgtcacataaagaaaatgtgtttagaatactggttttctatttacgcatgatattttcctaagtaaaattgccaagtggacttggaagtccagaaaggaaaataatttaaattaatgctggtgatcttaacaatattttgtaaaatgatgcttcccccttctccatggtctagtcaattttgtacaattaggtatctgactttacaagtttgttatcctttctaatttttactgaactgaaagcacaaagaagactacacagaaaatctggaaacagttgcaggtgttgggaggaagatgaaatcgagctgtcttttaacttttgtatgtgttttatcagaatttgctggactatgctggcaaggactttgtttacgatcaaattgtactagtgtctgcagggtttgtcagtactcgtcaaagccaagtccaattaaaaaaaaaagtctttgccctccaaaaaaaaatt

SEQ ID NO: 321995 - DNA, 5149 bp, Homo sapiens
  misc_feature (16)..(16): n is a, c, g, or t
aaatagccagttgtanacccgaggttataaatgaggcagtactataacggtctaaggtagcgaaggctgggtggctggtggctggctgctccgcagcgctcggctggctgcagcggcaccgcgggttgcgcggccggggatgctccagcgggcgcgatggcccccgccatgcagccggccgagatccaatttgcccagcggctggcgtccagcgagaagggcatccgggaccgagcggtgaagaagctgcgccagtacatcagcgtgaagacgcagagggagacaggaggtttcagtcaggaagaacttctgaaaatctggaaggggctcttctactgcatgtgggtgcaggatgaaccccttctacaggaagagctcgccaacaccattgcacagctagtccatgctgttaacaactcagcggctcaacacctgttcattcagaccttttggcaaaccatgaatcgagaatggaaaggaatagacaggctacgcctggacaaatactatatgctgattcgtctggtcctgaggcagtcctttgaagtcttgaagcgaaatggctgggaagaaagccgaatcaaggttttcttggatgtcctgatgaaggaggtcctgtgtcctgagagtcagtctcctaatggagtgagattccacttcattgatatttacctggatgaactctccaaagtcggggggaaggagcttttagcagatcagaatctcaagtttatcgatccattctgcaaaattgctgcaaagacgaaggaccacaccctggtacagaccatagctcggggtgtcttcgaagctatcgtagatcagtctccttttgtgcctgaagagacgatggaggaacagaagacaaaagtgggtgatggtgacctctctgctgaggagatacctgaaaatgaggtatccttgagaagagctgtcagtaaaaagaagacagcactgggcaaaaaccattccagaaaagatggactcagtgatgaaagaggaagagatgactgtggaacctttgaggacacagggccccttctccagtttgactataaggctgttgctgatcgactcctggaaatgaccagcaggaagaacacgccccacttcaacaggaagcgcctctccaaactcatcaagaaattccaagacctttctgaaggaagcagtatatctcaactcagttttgcggaggacatttctgctgatgaagatgaccaaatcctcagtcaaggaaagcataagaagaaaggaaataaacttttagagaaaactaacttggaaaaggagaaaggaagcagagtcttttgtgtagaggaagaggacagtgaaagcagtcttcaaaagagaagaaggaagaagaagaagaagcaccacctgcagcctgaaaatccaggcccagggggtgcagccccgtccctggaacagaaccggggcagggagcccgaggcctctgggccgaaagccctgaaggcacgtgtggccgagccaggtgcagaggccacgtccagcactggggaggagagtggctccgagcatcctccagccgtccccatgcacaataaaaggaaacggccacggaagaagagcccgagggcccacagggaaatgttggaatcagcagtgttgcccccagaggacatgtctcagagtggcccgagtggcagtcatcctcagggacctagagggtccccgacaggtggagcccaactcctaaaaaggaagcggaaacttggagttgtgcccgtcaatggcagtggcctgtccacgccggcctggcctccattgcagcaggaaggccctcccacaggccccgcagagggggcgaacagccacaccacgctgccccagcgcaggaggctgcagaaaaagaaggcagggcccggcagcctggagctctgtggcctgcccagccagaaaacagcaagtttgaaaaagaggaagaaaatgagagtgatgtcaaacttggtggagcacaacggggtgctggagtccgaagctgggcaaccccaggctctgggaagcagtgggacttgcagttccctgaagaagcagaagctgagggcagagagcgactttgtgaagtttgacacccccttcttaccaaagcccctgttcttcagaagagccaagagcagcactgccacccaccctccaggccctgccgtccagctaaacaagacaccatccagctccaagaaagtcacctttgggctgaacagaaacatgactgccgaattcaagaagacagacaagagtatcttggtcagtcccacgggcccttctcgagtggccttcgaccctgaacagaagcccctccacggggtgctgaagacccccaccagctcacctgccagctcacccctggtggccaagaagcccctgaccaccacaccaaggagaaggcccagggctatggatttcttctgaggagcagcagagtcccttgtaaaagactgcttttgtacagaatgcgctataaattatacctttaagaatgtggggccttttttatgattttgtaagttcccataagttgtgtgcacgaggttctgagagtgcccgcaggctgctgcgtcctggcccctctgtagtggctgcgggcgtcttggttgaatcttttgctacaaaccatgtttgcgtttgagctctccaggattttacatttttgggtaacctcagtgattcccattggtgtaggaaatgagaccctctctgaagctgaggagagcacgttgatctgaactttaaatcaatcagtgctgctggcacaatgaaaggtggaactgcacttctgttgagctctcagttctgcggaatttggtactcattaccgtattcgccgtactaagttggtttctgttagtcttaacagtctgttttcttttaaaagcatgtagggcttcattgccatgttctgtgggtgtttggcaggttaccgatggggaagattcttgtcacagaatcagcaataccatagtttttctacatgtgctcagctgggggtgtggacaggtaggggtggggaaagaagaggctctgcgttctgggggctttttcttctcctccccctacccggtttccctccctgttttcctacctctacggcaagcccaaagtgtcttcccgggagcccagcgcagcccccggctcttacccaggaccccgccccgtgctgagccttctgctgaggtccttgcgtggagcacactcattcctccaagcccttgcgctcccgtttctctctctctccgtccacgttccagccgagtcactgcctgcctgaccggctccatggcagctccccatcttccctagaggctgcctgcgcatctggagcctgcgctccggctcagcgacctttcctctcaaatgcggaagcgtgcacttacagttcagaccgttctcctgtaagttcattacaaacacgggcggaaggcactcaggctttcgttggagaaacagaaataaggccttcttttgagcagcgattgctggatcattgatctgtttgaggaagtgtctgacctgggcctgagagctggagaaggtgcagattcaaagtgagcggctcctgaggagagccgccaaggctgctcgccttctccgtggcttccgcagctaccgtctgcacggtgagagggcacgggcacacggttcgggctggcgtgcagctctcccagccagccacgctctgctcaggcctggaagtgaaagccgcctccttcccgttatgccccccatacaggagcctcggtttttcagcaaaacgcggccagtccccttctccactgctgcctcccagcagagggccccaggatctccaaggtcccagctatggctttggacaacgtggcttcggcccctggggttgcagagcttgcattgggtttacctcggtctcattcattcatggagccaagggtggggtttcacctgcgaacatcagactgacttgctggcgtcaagagcagttgactcactgatgaaggccctggtgaggagaaagcactctgttcttcgcctactctgtaatcgttttgtcataatgagccatgaaaaaagtaatgaacttgtgctgttaatcgtcactgtaatgagaagtcttacgtacaacatagctgtggtggctgcgtggtttaatggctgcattagataggatcctcacatcccattcagaaccaaaactgatacagtgaaacaattaaggtgagcaaatagttttaacttttctttttttttttaagtttcattcttcctagaatatttttctaacaatttttatttcagctttaaagatgggtcatatagccaaacgggccatataatccaacattgttgagatgtcttaggacatctaaggcaaaactggcacatttgttctgcagactattgcaggaatgttttttcctagcatttctatattatctgtccattctgaggaaccagtgaatgtcctataaatgcacctcctgtcaaaaccatgcctgagaggtcccggctgggagtgacagggtgcttcttagattctattggtccttctctcattctccgaacttactcctttttatgggtaagtcaactaggtttacagtcccttatttttaatgcctaagttttgacagcaggaagaaaacaattttttaaaaattctcattacatagacgcacaagaatatgtcacataaagaaaatgtgtttagaatactggttttctatttacgcatgatattttcctaagtaaaattgccaagtggacttggaagtccagaaaggaaaataatttaaattaatgctggtgatcttaacaatattttgtaaaatgatgcttcccccttctccatggtctagtcaattttgtacaattaggtatctgactttacaagtttgttatcctttctaatttttactgaactgaaagcacaaagaagactacacagaaaatctggaaacagttgcaggtgttgggaggaagatgaaatcgagctgtcttttaacttttgtatgtgttttatcagaatttgctggactatgctggcaaggactttgtttacgatcaaattgtactagtgtctgcagggtttgtcagtactcgtcaaagccaagtccaattaaaaaaaaaagtctttgccctccaaaaaaaaatt

SEQ ID NO: 321996 - DNA, 1281 bp, Homo sapiens
cgcgccgccgccgccgccttctgtgcagtcgcggcccgggcggacggtggctggctgctccgcagcgctcggctggctgcagcggcaccgcgggttgcgcggccggggatgctccagcgggcgcgatggcccccgccatgcagccggccgagatccaatttgcccagcggctggcgtccagcgagaagggcatccgggaccgagcggtgaagaagctgcgccagtacatcagcgtgaagacgcagagggagacaggaggtttcagtcaggaagaacttctgaaaatctggaaggggctcttctactgcatgtgggtgcaggatgaaccccttctacaggaagagctcgccaacaccattgcacagctagtccatgctgttaacaactcagcggctcaacacctgttcattcagaccttttggcaaaccatgaatcgagaatggaaaggaatagacaggctacgcctggacaaatactatatgctgattcgtctggtcctgaggcagtcctttgaagtcttgaagcgaaatggctgggaagaaagccgaatcaaggttttcttggatgtcctgatgaaggaggtcctgtgtcctgagagtcagtctcctaatggagtgagattccacttcattgatatttacctggatgaactctccaaagtcggggggaaggagcttttagcagatcagaatctcaagtttatcgatccattctgcaaaattgctgcaaagacgaaggaccacaccctggtacagaccatagctcggggtgtcttcgaagctatcgtagatcagtctccttttgtgcctgaagagacgatggaggaacagaagacaaaagtgggtgatggtgacctctctgctgaggagatacctgaaaatgaggtatccttgagaagagctgtcagtaaaaagaagacagcactgggcaaaaaccattccagaaaagatggactcagtgatgaaagaggaagagatgactgtggaacctttgaggacacagggccccttctccagtttgactataaggctgttgctgatcgactcctggaaatgaccagcaggaagaacacgccccacttcaacaggaagcgcctctccaaactcatcaagaaattccaagacctttctgaaggaagcagtatatctcaactcagttttgcggaggacatttctgctgatgaagatgaccaaatcctcagtcaaggaagctaaagaggaggaataaatctgagagaaatcatcggaaaggaagcgagcatatctgtgtgagagagacgca

SEQ ID NO: 321997 - DNA, 987 bp, Homo sapiens
  misc_feature (16)..(16): n is a, c, g, or t
aaatagccagttgtanacccgaggttataaatgaggcagtactataacggtctaaggtagcgaaggctgggtggctggtggctggctgctccgcagcgctcggctggctgcagcggcaccgcgggttgcgcggccggggatgctccagcgggcgcgatggcccccgccatgcagccggccgagatccaatttgcccagcggctggcgtccagcgagaagggcatccgggaccgagcggtgaagaagctgcgccagtacatcagcgtgaagacgcagagggagacaggaggtttcagtcaggaagaacttctgaaaatctggaaggggctcttctactgcatgtgggtgcaggatgaaccccttctacaggaagagctcgccaacaccattgcacagctagtccatgctgttaacaactcagcggctcaacacctgttcattcagaccttttggcaaaccatgaatcgagaatggaaaggaatagacaggctacgcctggacaaatactatatgctgattcgtctggtcctgaggcagtcctttgaagtcttgaagcgaaatggctgggaagaaagccggaagatgatcatgggaacagcaatagtagtcatgtaaaaatctttttaccgaaaaagctgcttgaatgtctgccgaaatgttcaagtttaccaaaagagaggcaccgctggaacactaatgagagatcatgatgcagccgtccttttggatttctttttaataatgtgtgacccttcacctttgatcccctgacctgcattaccttggtaaccatttcattttttaatttaatttcattttttaattttggtgtacaagctgtaacatttcatctttcaaagtgtaacacgctgatttcctcaaatagagatacccctttgagtgataaatttgcaaaatgctgtcttcattttctgtattacaattcatttcagttttacaaaaacacaacaccaaacaaaaaaggcg

SEQ ID NO: 321998 - DNA, 231 bp, Homo sapiens
gaagagctcgccaacaccattgcacagctagtccatgctgttaacaactcagcggctcgtaagtcctgttgtttcttctccttccttccaagttttccgacttgctagtttaatgggaaccttgtgccggtattgtgtagatgtcaggggacaagccattcctgtttttaaaagctgtgataaacttagtcattgacttggtgagagggcacagtgtcttggggagaatca

SEQ ID NO: 321999 - DNA, 459 bp, Homo sapiens
aaacaaaaattgcctttctttagctgattcgtctggtcctgaggcagtcctttgaagtcttgaagcgaaatggctgggaagaaaggtcagtaaaccatttgagttagcatgtggtagccttaaaacttaaaaggtagtagagtgtcaagttttctgaacttgtagagtaccaatgagaagctcgatacatcgttacctatagagaattgaaatccagtagaaggcataaaacagttaagtatatatgacagttaacattttatcctgatttaagtgattgcttttttccttgtaaaatgatttcagccttgcattgattgttaggctgtgtaggttctagacggagtatttttgtttctctttgggaagtgggacgtgttggcatactgtcattcacagaagcatgcgtttggttctttagccgaatcaaggttttcttggatgtcctgatgaaggagg

SEQ ID NO: 322000 - DNA, 5089 bp, Homo sapiens
  misc_feature (16)..(16): n is a, c, g, or t
aaatagccagttgtanacccgaggttataaatgaggcagtactataacggtctaaggtagcgaaggctgggtggctggtggctggctgctccgcagcgctcggctggctgcagcggcaccgcgggttgcgcggccggggatgctccagcgggcgcgatggcccccgccatgcagccggccgagatccaatttgcccagcggctggcgtccagcgagaagggcatccgggaccgagcggtgaagaagctgcgccagtacatcagcgtgaagacgcagagggagacaggaggtttcagtcaggaagaacttgaagagctcgccaacaccattgcacagctagtccatgctgttaacaactcagcggctcaacacctgttcattcagaccttttggcaaaccatgaatcgagaatggaaaggaatagacaggctacgcctggacaaatactatatgctgattcgtctggtcctgaggcagtcctttgaagtcttgaagcgaaatggctgggaagaaagccgaatcaaggttttcttggatgtcctgatgaaggaggtcctgtgtcctgagagtcagtctcctaatggagtgagattccacttcattgatatttacctggatgaactctccaaagtcggggggaaggagcttttagcagatcagaatctcaagtttatcgatccattctgcaaaattgctgcaaagacgaaggaccacaccctggtacagaccatagctcggggtgtcttcgaagctatcgtagatcagtctccttttgtgcctgaagagacgatggaggaacagaagacaaaagtgggtgatggtgacctctctgctgaggagatacctgaaaatgaggtatccttgagaagagctgtcagtaaaaagaagacagcactgggcaaaaaccattccagaaaagatggactcagtgatgaaagaggaagagatgactgtggaacctttgaggacacagggccccttctccagtttgactataaggctgttgctgatcgactcctggaaatgaccagcaggaagaacacgccccacttcaacaggaagcgcctctccaaactcatcaagaaattccaagacctttctgaaggaagcagtatatctcaactcagttttgcggaggacatttctgctgatgaagatgaccaaatcctcagtcaaggaaagcataagaagaaaggaaataaacttttagagaaaactaacttggaaaaggagaaaggaagcagagtcttttgtgtagaggaagaggacagtgaaagcagtcttcaaaagagaagaaggaagaagaagaagaagcaccacctgcagcctgaaaatccaggcccagggggtgcagccccgtccctggaacagaaccggggcagggagcccgaggcctctgggccgaaagccctgaaggcacgtgtggccgagccaggtgcagaggccacgtccagcactggggaggagagtggctccgagcatcctccagccgtccccatgcacaataaaaggaaacggccacggaagaagagcccgagggcccacagggaaatgttggaatcagcagtgttgcccccagaggacatgtctcagagtggcccgagtggcagtcatcctcagggacctagagggtccccgacaggtggagcccaactcctaaaaaggaagcggaaacttggagttgtgcccgtcaatggcagtggcctgtccacgccggcctggcctccattgcagcaggaaggccctcccacaggccccgcagagggggcgaacagccacaccacgctgccccagcgcaggaggctgcagaaaaagaaggcagggcccggcagcctggagctctgtggcctgcccagccagaaaacagcaagtttgaaaaagaggaagaaaatgagagtgatgtcaaacttggtggagcacaacggggtgctggagtccgaagctgggcaaccccaggctctgggaagcagtgggacttgcagttccctgaagaagcagaagctgagggcagagagcgactttgtgaagtttgacacccccttcttaccaaagcccctgttcttcagaagagccaagagcagcactgccacccaccctccaggccctgccgtccagctaaacaagacaccatccagctccaagaaagtcacctttgggctgaacagaaacatgactgccgaattcaagaagacagacaagagtatcttggtcagtcccacgggcccttctcgagtggccttcgaccctgaacagaagcccctccacggggtgctgaagacccccaccagctcacctgccagctcacccctggtggccaagaagcccctgaccaccacaccaaggagaaggcccagggctatggatttcttctgaggagcagcagagtcccttgtaaaagactgcttttgtacagaatgcgctataaattatacctttaagaatgtggggccttttttatgattttgtaagttcccataagttgtgtgcacgaggttctgagagtgcccgcaggctgctgcgtcctggcccctctgtagtggctgcgggcgtcttggttgaatcttttgctacaaaccatgtttgcgtttgagctctccaggattttacatttttgggtaacctcagtgattcccattggtgtaggaaatgagaccctctctgaagctgaggagagcacgttgatctgaactttaaatcaatcagtgctgctggcacaatgaaaggtggaactgcacttctgttgagctctcagttctgcggaatttggtactcattaccgtattcgccgtactaagttggtttctgttagtcttaacagtctgttttcttttaaaagcatgtagggcttcattgccatgttctgtgggtgtttggcaggttaccgatggggaagattcttgtcacagaatcagcaataccatagtttttctacatgtgctcagctgggggtgtggacaggtaggggtggggaaagaagaggctctgcgttctgggggctttttcttctcctccccctacccggtttccctccctgttttcctacctctacggcaagcccaaagtgtcttcccgggagcccagcgcagcccccggctcttacccaggaccccgccccgtgctgagccttctgctgaggtccttgcgtggagcacactcattcctccaagcccttgcgctcccgtttctctctctctccgtccacgttccagccgagtcactgcctgcctgaccggctccatggcagctccccatcttccctagaggctgcctgcgcatctggagcctgcgctccggctcagcgacctttcctctcaaatgcggaagcgtgcacttacagttcagaccgttctcctgtaagttcattacaaacacgggcggaaggcactcaggctttcgttggagaaacagaaataaggccttcttttgagcagcgattgctggatcattgatctgtttgaggaagtgtctgacctgggcctgagagctggagaaggtgcagattcaaagtgagcggctcctgaggagagccgccaaggctgctcgccttctccgtggcttccgcagctaccgtctgcacggtgagagggcacgggcacacggttcgggctggcgtgcagctctcccagccagccacgctctgctcaggcctggaagtgaaagccgcctccttcccgttatgccccccatacaggagcctcggtttttcagcaaaacgcggccagtccccttctccactgctgcctcccagcagagggccccaggatctccaaggtcccagctatggctttggacaacgtggcttcggcccctggggttgcagagcttgcattgggtttacctcggtctcattcattcatggagccaagggtggggtttcacctgcgaacatcagactgacttgctggcgtcaagagcagttgactcactgatgaaggccctggtgaggagaaagcactctgttcttcgcctactctgtaatcgttttgtcataatgagccatgaaaaaagtaatgaacttgtgctgttaatcgtcactgtaatgagaagtcttacgtacaacatagctgtggtggctgcgtggtttaatggctgcattagataggatcctcacatcccattcagaaccaaaactgatacagtgaaacaattaaggtgagcaaatagttttaacttttctttttttttttaagtttcattcttcctagaatatttttctaacaatttttatttcagctttaaagatgggtcatatagccaaacgggccatataatccaacattgttgagatgtcttaggacatctaaggcaaaactggcacatttgttctgcagactattgcaggaatgttttttcctagcatttctatattatctgtccattctgaggaaccagtgaatgtcctataaatgcacctcctgtcaaaaccatgcctgagaggtcccggctgggagtgacagggtgcttcttagattctattggtccttctctcattctccgaacttactcctttttatgggtaagtcaactaggtttacagtcccttatttttaatgcctaagttttgacagcaggaagaaaacaattttttaaaaattctcattacatagacgcacaagaatatgtcacataaagaaaatgtgtttagaatactggttttctatttacgcatgatattttcctaagtaaaattgccaagtggacttggaagtccagaaaggaaaataatttaaattaatgctggtgatcttaacaatattttgtaaaatgatgcttcccccttctccatggtctagtcaattttgtacaattaggtatctgactttacaagtttgttatcctttctaatttttactgaactgaaagcacaaagaagactacacagaaaatctggaaacagttgcaggtgttgggaggaagatgaaatcgagctgtcttttaacttttgtatgtgttttatcagaatttgctggactatgctggcaaggactttgtttacgatcaaattgtactagtgtctgcagggtttgtcagtactcgtcaaagccaagtccaattaaaaaaaaaagtctttgccctccaaaaaaaaatt

SEQ ID NO: 322001 - DNA, 3172 bp, Homo sapiens
ccaccctaccagcagctccccttagtctgtgcaggcagccctgggccctcccttgggagggtgagttgaggcatgggatgtggcctcactgccctcctttcctcagaaggctcttgggcctgctctctgcagggccttgagatggccctgcttcgtcctagcaagtgggtggggtcggcacccaggcaggacgctgtctaaggtgttgaagggacagctgtcggacccacttaatatggggccttgctctcatttgggacagaattcaagaagacagacaagagtatcttggtcagtcccacgggcccttctcgagtggccttcgaccctgaacagaagcccctccacggggtgctgaagacccccaccagctcacctgccagctcacccctggtggccaagaagcccctgaccaccacaccaaggagaaggcccagggctatggatttcttctgaggagcagcagagtcccttgtaaaagactgcttttgtacagaatgcgctataaattatacctttaagaatgtggggccttttttatgattttgtaagttcccataagttgtgtgcacgaggttctgagagtgcccgcaggctgctgcgtcctggcccctctgtagtggctgcgggcgtcttggttgaatcttttgctacaaaccatgtttgcgtttgagctctccaggattttacatttttgggtaacctcagtgattcccattggtgtaggaaatgagaccctctctgaagctgaggagagcacgttgatctgaactttaaatcaatcagtgctgctggcacaatgaaaggtggaactgcacttctgttgagctctcagttctgcggaatttggtactcattaccgtattcgccgtactaagttggtttctgttagtcttaacagtctgttttcttttaaaagcatgtagggcttcattgccatgttctgtgggtgtttggcaggttaccgatggggaagattcttgtcacagaatcagcaataccatagtttttctacatgtgctcagctgggggtgtggacaggtaggggtggggaaagaagaggctctgcgttctgggggctttttcttctcctccccctacccggtttccctccctgttttcctacctctacggcaagcccaaagtgtcttcccgggagcccagcgcagcccccggctcttacccaggaccccgccccgtgctgagccttctgctgaggtccttgcgtggagcacactcattcctccaagcccttgcgctcccgtttctctctctctccgtccacgttccagccgagtcactgcctgcctgaccggctccatggcagctccccatcttccctagaggctgcctgcgcatctggagcctgcgctccggctcagcgacctttcctctcaaatgcggaagcgtgcacttacagttcagaccgttctcctgtaagttcattacaaacacgggcggaaggcactcaggctttcgttggagaaacagaaataaggccttcttttgagcagcgattgctggatcattgatctgtttgaggaagtgtctgacctgggcctgagagctggagaaggtgcagattcaaagtgagcggctcctgaggagagccgccaaggctgctcgccttctccgtggcttccgcagctaccgtctgcacggtgagagggcacgggcacacggttcgggctggcgtgcagctctcccagccagccacgctctgctcaggcctggaagtgaaagccgcctccttcccgttatgccccccatacaggagcctcggtttttcagcaaaacgcggccagtccccttctccactgctgcctcccagcagagggccccaggatctccaaggtcccagctatggctttggacaacgtggcttcggcccctggggttgcagagcttgcattgggtttacctcggtctcattcattcatggagccaagggtggggtttcacctgcgaacatcagactgacttgctggcgtcaagagcagttgactcactgatgaaggccctggtgaggagaaagcactctgttcttcgcctactctgtaatcgttttgtcataatgagccatgaaaaaagtaatgaacttgtgctgttaatcgtcactgtaatgagaagtcttacgtacaacatagctgtggtggctgcgtggtttaatggctgcattagataggatcctcacatcccattcagaaccaaaactgatacagtgaaacaattaaggtgagcaaatagttttaacttttctttttttttttaagtttcattcttcctagaatatttttctaacaatttttatttcagctttaaagatgggtcatatagccaaacgggccatataatccaacattgttgagatgtcttaggacatctaaggcaaaactggcacatttgttctgcagactattgcaggaatgttttttcctagcatttctatattatctgtccattctgaggaaccagtgaatgtcctataaatgcacctcctgtcaaaaccatgcctgagaggtcccggctgggagtgacagggtgcttcttagattctattggtccttctctcattctccgaacttactcctttttatgggtaagtcaactaggtttacagtcccttatttttaatgcctaagttttgacagcaggaagaaaacaattttttaaaaattctcattacatagacgcacaagaatatgtcacataaagaaaatgtgtttagaatactggttttctatttacgcatgatattttcctaagtaaaattgccaagtggacttggaagtccagaaaggaaaataatttaaattaatgctggtgatcttaacaatattttgtaaaatgatgcttcccccttctccatggtctagtcaattttgtacaattaggtatctgactttacaagtttgttatcctttctaatttttactgaactgaaagcacaaagaagactacacagaaaatctggaaacagttgcaggtgttgggaggaagatgaaatcgagctgtcttttaacttttgtatgtgttttatcagaatttgctggactatgctggcaaggactttgtttacgatcaaattgtactagtgtctgcagggtttgtcagtactcgtcaaagccaagtccaattaaaaaaaaaagtctttgccctccaaaaaaaaatt

SEQ ID NO: 322002 - DNA, 495 bp, Homo sapiens
gaggcgttttcatcgcccctcttggcatggtgccatgatagcggtcgtgttgtgcgtgaagcctgagctctgccgaatggaagggctgtctgcaagtgcggtgcggaagaccgcgggccgtcgggtgggctggatctgcctggggctctgccttcccctcctgtgtgtgtgggcagcacaggaggctctgtcgtctgacccctcctccgcttctcacccctcgctcacgtagggaagcagtgggacttgcagttccctgaagaagcagaagctgagggcagagagcgactttgtgaagtttgacacccccttcttaccaaagcccctgttcttcagaagagccaagagcagcactgccacccaccctccaggccctgccgtccaggtacgcaccctccccagagtggcacagcacatttcaccacaagggcacagatgggcttgagctgacagtgcttcccatgccgggcctggagccccactgtggccctctga

SEQ ID NO: 322003 - DNA, 84 bp, Homo sapiens
catgaccaagtggtatttattctagatatttaaggcttagcatccaaaaatcaaagtaatccatcacatcaatagacgaaaaaa

SEQ ID NO: 322004 - DNA, 3143 bp, Homo sapiens
gatatcacagcaacattgaaatgctaaaaagtttttaaacactctcaatttctaattcaccatgtcacagactggtgaaaaaaaaaaaaaaagcggccgcttccccccggccgggcccccgccgccccgcggtccccagagcgccaggcccccggggggagggagggagggcgccgggccggtgggagccagcggcgcgcggtgggacccacggagccccgcgacccgccgagcctggagccgggccggctcggggaagccggctccagcccggagcgaacttcgcagcccgtcggggggcggcggggagggggcccggagccggaggagggggcggccgcgggcacccccgcctgtgccccggcgtccccgggcaccatgctgtccaactcccagggccagagcccgccggtgccgttccccgccccggccccgccgccgcagccccccacccctgccctgccgcaccccccggcgcagccgccgccgccgcccccgcagcagttcccgcagttccacgtcaagtccggcctgcagatcaagaagaacgccatcatcgatgactacaaggtcaccagccaggtcctggggctgggcatcaacggcaaagttttgcagatcttcaacaagaggacccaggagaaattcgccctcaaaatgcttcaggactgccccaaggcccgcagggaggtggagctgcactggcgggcctcccagtgcccgcacatcgtacggatcgtggatgtgtacgagaatctgtacgcagggaggaagtgcctgctgattgtcatggaatgtttggacggtggagaactctttagccgaatccaggatcgaggagaccaggcattcacagaaagagaagcatccgaaatcatgaagagcatcggtgaggccatccagtatctgcattcaatcaacattgcccatcgggatgtcaagcctgagaatctcttatacacctccaaaaggcccaacgccatcctgaaactcactgactttggctttgccaaggaaaccaccagccacaactctttgaccactccttgttatacaccgtactatgtggctccagaagtgctgggtccagagaagtatgacaagtcctgtgacatgtggtccctgggtgtcatcatgtacatcctgctgtgtgggtatccccccttctactccaaccacggccttgccatctctccgggcatgaagactcgcatccgaatgggccagtatgaatttcccaacccagaatggtcagaagtatcagaggaagtgaagatgctcattcggaatctgctgaaaacagagcccacccagagaatgaccatcaccgagtttatgaaccacccttggatcatgcaatcaacaaaggtccctcaaaccccactgcacaccagccgggtcctgaaggaggacaaggagcggtgggaggatgtcaaggaggagatgaccagtgccttggccacaatgcgcgttgactacgagcagatcaagataaaaaagattgaagatgcatccaaccctctgctgctgaagaggcggaagaaagctcgggccctggaggctgcggctctggcccactgagccaccgcgccctcctgcccacgggaggacaagcaataactctctacaggaatatattttttaaacgaagagacagaactgtccacatctgcctcctctcctcctcagctgcatggagcctggaactgcatcagtgactgaattctgccttggttctggccaccccagagtgggagaggctgggaggttgggaggctgtggagagaagtgagcaaggtgctcttgaacctgtgctcattttgcaattttatcagtaatttgacttagagtttttacgaaacctcttttgttgtccttgccccactcctctccaccagacgccttcctctctggatactgcaaaggcttgtggtttgttagagggtatttgtggaaactgtcatagggattgtccctgtgttgtcccatctgccctccctgtttctccacaacagcctggggttgtccccgctggctcacgcgttctgggagctcaaggccaccttggaggaggatgccacgcacttcctctctcggagccctcagacatctccagtgtgccagacaaataggagtgagtgtatgtgtgtgtgtgtgtgtgtgtgtgtgcacacgtgtgtatgagtgcgcagatctgtgcctgggatcgtgcatttgaggggccagggcaggcagggctgcagagggagacggccctgctggggcttaggaaccttctcccttcttgggtctgccctgcccatactgagcctgccaaagtgcctgggaagcccacccagattctgaaacaggccctctgtggcctgtctctattagctgggttccgggaggcagagaggagtgaccgggcactggcactgcgatcaggaagactggacccccagcccccagggcccccctccccccacttagtgctggtcctaggtcctctgaggcactcatctactgaatgacctctctacttccccttcttgccattattaacccatttttgtttattttccttaaatttttagccatttctccatgggccaccgcccagctcatgtaggtgagcctgggcagcttctgttggcagagcttttgcatttcctgtgtttgtcctgggttctggggcatcagccagctaccccttgtgggcaaaggcagggccacttttgaagtcttccctcagatttccattgtgtggcctggtgggtcagggggagtctttgcaccaaagatgtcctgactttgcccccttgcccatcagccatttgccatcaccccaaacaactcagcttcggggccggtgaggggaggggcctcccccagcacagatgaggagcagctggggtaggctgtctgtgccatggccccccactcccccttcccttggagggagaggtggcaggaatacttcacctttcctctccctcaggggcaggtggtggaggggcgcccagggtcgtctttgtgtatgggggaaggcgctgggtgcctgcagcgcctcccttgtctcagatggtgtgtccagcactcgattgttgtaaactgttgttttgtatgagcgaaattgtctttactaaacagatttaatagtt

SEQ ID NO: 322005 - DNA, 3680 bp, Homo sapiens
gatatcacagcaacattgaaatgctaaaaagtttttaaacactctcaatttctaattcaccatgtcacagactggtgaaaaaaaaaaaaaaagcggccgcttccccccggccgggcccccgccgccccgcggtccccagagcgccaggcccccggggggagggagggagggcgccgggccggtgggagccagcggcgcgcggtgggacccacggagccccgcgacccgccgagcctggagccgggccggctcggggaagccggctccagcccggagcgaacttcgcagcccgtcggggggcggcggggagggggcccggagccggaggagggggcggccgcgggcacccccgcctgtgccccggcgtccccgggcaccatgctgtccaactcccagggccagagcccgccggtgccgttccccgccccggccccgccgccgcagccccccacccctgccctgccgcaccccccggcgcagccgccgccgccgcccccgcagcagttcccgcagttccacgtcaagtccggcctgcagatcaagaagaacgccatcatcgatgactacaaggtcaccagccaggtcctggggctgggcatcaacggcaaagttttgcagatcttcaacaagaggacccaggagaaattcgccctcaaaatgcttcaggactgccccaaggcccgcagggaggtggagctgcactggcgggcctcccagtgcccgcacatcgtacggatcgtggatgtgtacgagaatctgtacgcagggaggaagtgcctgctgattgtcatggaatgtttggacggtggagaactctttagccgaatccaggatcgaggagaccaggcattcacagaaagagaagcatccgaaatcatgaagagcatcggtgaggccatccagtatctgcattcaatcaacattgcccatcgggatgtcaagcctgagaatctcttatacacctccaaaaggcccaacgccatcctgaaactcactgactttggctttgccaaggaaaccaccagccacaactctttgaccactccttgttatacaccgtactatgtggctccagaagtgctgggtccagagaagtatgacaagtcctgtgacatgtggtccctgggtgtcatcatgtacatcctgctgtgtgggtatccccccttctactccaaccacggccttgccatctctccgggcatgaagactcgcatccgaatgggccagtatgaatttcccaacccagaatggtcagaagtatcagaggaagtgaagatgctcattcggaatctgctgaaaacagagcccacccagagaatgaccatcaccgagtttatgaaccacccttggatcatgcaatcaacaaaggtccctcaaaccccactgcacaccagccgggtcctgaaggaggacaaggagcggtgggaggatgtcaaggggtgtcttcatgacaagaacagcgaccaggccacttggctgaccaggttgtgagcagaggattctgtgttcctgtccaaactcagtgctgtttcttagaatccttttattccctgggtctctaatgggaccttaaagaccatctggtatcatcttctcattttgcagaagagaaactgaggcccagaggcggagggcagtctgctcaaggtcacgcagctggtgactggttggggcagaccggacccaggtttcctgactcctggcccaagtctcttcctcctatcctgcgggatcactggggggctctcagggaacagcagcagtgccatagccaggctctctgctgcccagcgctggggtgaggctgccgttgtcagcgtggaccactaaccagcccgtcttctctctctgctcccacccctgccgccctcaccctgcccttgttgtctctgtctctcacgtctctcttctgctgtctctcctacctgtcttctggctctctctgtacccttcctggtgctgccgtgcccccaggaggagatgaccagtgccttggccacaatgcgcgttgactacgagcagatcaagataaaaaagattgaagatgcatccaaccctctgctgctgaagaggcggaagaaagctcgggccctggaggctgcggctctggcccactgagccaccgcgccctcctgcccacgggaggacaagcaataactctctacaggaatatattttttaaacgaagagacagaactgtccacatctgcctcctctcctcctcagctgcatggagcctggaactgcatcagtgactgaattctgccttggttctggccaccccagagtgggagaggctgggaggttgggaggctgtggagagaagtgagcaaggtgctcttgaacctgtgctcattttgcaattttatcagtaatttgacttagagtttttacgaaacctcttttgttgtccttgccccactcctctccaccagacgccttcctctctggatactgcaaaggcttgtggtttgttagagggtatttgtggaaactgtcatagggattgtccctgtgttgtcccatctgccctccctgtttctccacaacagcctggggttgtccccgctggctcacgcgttctgggagctcaaggccaccttggaggaggatgccacgcacttcctctctcggagccctcagacatctccagtgtgccagacaaataggagtgagtgtatgtgtgtgtgtgtgtgtgtgtgtgtgcacacgtgtgtatgagtgcgcagatctgtgcctgggatcgtgcatttgaggggccagggcaggcagggctgcagagggagacggccctgctggggcttaggaaccttctcccttcttgggtctgccctgcccatactgagcctgccaaagtgcctgggaagcccacccagattctgaaacaggccctctgtggcctgtctctattagctgggttccgggaggcagagaggagtgaccgggcactggcactgcgatcaggaagactggacccccagcccccagggcccccctccccccacttagtgctggtcctaggtcctctgaggcactcatctactgaatgacctctctacttccccttcttgccattattaacccatttttgtttattttccttaaatttttagccatttctccatgggccaccgcccagctcatgtaggtgagcctgggcagcttctgttggcagagcttttgcatttcctgtgtttgtcctgggttctggggcatcagccagctaccccttgtgggcaaaggcagggccacttttgaagtcttccctcagatttccattgtgtggcctggtgggtcagggggagtctttgcaccaaagatgtcctgactttgcccccttgcccatcagccatttgccatcaccccaaacaactcagcttcggggccggtgaggggaggggcctcccccagcacagatgaggagcagctggggtaggctgtctgtgccatggccccccactcccccttcccttggagggagaggtggcaggaatacttcacctttcctctccctcaggggcaggtggtggaggggcgcccagggtcgtctttgtgtatgggggaaggcgctgggtgcctgcagcgcctcccttgtctcagatggtgtgtccagcactcgattgttgtaaactgttgttttgtatgagcgaaattgtctttactaaacagatttaatagtt

SEQ ID NO: 322006 - DNA, 3099 bp, Homo sapiens
gatatcacagcaacattgaaatgctaaaaagtttttaaacactctcaatttctaattcaccatgtcacagactggtgaaaaaaaaaaaaaaagcggccgcttccccccggccgggcccccgccgccccgcggtccccagagcgccaggcccccggggggagggagggagggcgccgggccggtgggagccagcggcgcgcggtgggacccacggagccccgcgacccgccgagcctggagccgggccggctcggggaagccggctccagcccggagcgaacttcgcagcccgtcggggggcggcggggagggggcccggagccggaggagggggcggccgcgggcacccccgcctgtgccccggcgtccccgggcaccatgctgtccaactcccagggccagagcccgccggtgccgttccccgccccggccccgccgccgcccgccgcccccgcagcagttcccgcagttccacgtcaagtccggcctgcagatcaagaagaacgccatcatcgatgactacaaggtcaccagccaggtcctggggctgggcatcaacggcaaagttttgcagatcttcaacaagaggacccaggagaaattcgccctcaaaatgcttcaggactgccccaaggcccgcagggaggtggagctgcactggcgggcctcccagtgcccgcacatcgtacggatcgtggatgtgtacgagaatctgtacgcagggaggaagtgcctgctgattgtcatggaatgtttggacggtggagaactctttagccgaatccaggatcgaggagaccaggcattcacagaaagagaagcatccgaaatcatgaagagcatcggtgaggccatccagtatctgcattcaatcaacattgcccatcgggatgtcaagcctgagaatctcttatacacctccaaaaggcccaacgccatcctgaaactcactgactttggctttgccaaggaaaccaccagccacaactctttgaccactccttgttatacaccgtactatgtggctccagaagtgctgggtccagagaagtatgacaagtcctgtgacatgtggtccctgggtgtcatcatgtacatcctgctgtgtgggtatccccccttctactccaaccacggccttgccatctctccgggcatgaagactcgcatccgaatgggccagtatgaatttcccaacccagaatggtcagaagtatcagaggaagtgaagatgctcattcggaatctgctgaaaacagagcccacccagagaatgaccatcaccgagtttatgaaccacccttggatcatgcaatcaacaaaggtccctcaaaccccactgcacaccagccgggtcctgaaggaggacaaggagcggtgggaggatgtcaaggaggagatgaccagtgccttggccacaatgcgcgttgactacgagcagatcaagataaaaaagattgaagatgcatccaaccctctgctgctgaagaggcggaagaaagctcgggccctggaggctgcggctctggcccactgagccaccgcgccctcctgcccacgggaggacaagcaataactctctacaggaatatattttttaaacgaagagacagaactgtccacatctgcctcctctcctcctcagctgcatggagcctggaactgcatcagtgactgaattctgccttggttctggccaccccagagtgggagaggctgggaggttgggaggctgtggagagaagtgagcaaggtgctcttgaacctgtgctcattttgcaattttatcagtaatttgacttagagtttttacgaaacctcttttgttgtccttgccccactcctctccaccagacgccttcctctctggatactgcaaaggcttgtggtttgttagagggtatttgtggaaactgtcatagggattgtccctgtgttgtcccatctgccctccctgtttctccacaacagcctggggttgtccccgctggctcacgcgttctgggagctcaaggccaccttggaggaggatgccacgcacttcctctctcggagccctcagacatctccagtgtgccagacaaataggagtgagtgtatgtgtgtgtgtgtgtgtgtgtgtgtgcacacgtgtgtatgagtgcgcagatctgtgcctgggatcgtgcatttgaggggccagggcaggcagggctgcagagggagacggccctgctggggcttaggaaccttctcccttcttgggtctgccctgcccatactgagcctgccaaagtgcctgggaagcccacccagattctgaaacaggccctctgtggcctgtctctattagctgggttccgggaggcagagaggagtgaccgggcactggcactgcgatcaggaagactggacccccagcccccagggcccccctccccccacttagtgctggtcctaggtcctctgaggcactcatctactgaatgacctctctacttccccttcttgccattattaacccatttttgtttattttccttaaatttttagccatttctccatgggccaccgcccagctcatgtaggtgagcctgggcagcttctgttggcagagcttttgcatttcctgtgtttgtcctgggttctggggcatcagccagctaccccttgtgggcaaaggcagggccacttttgaagtcttccctcagatttccattgtgtggcctggtgggtcagggggagtctttgcaccaaagatgtcctgactttgcccccttgcccatcagccatttgccatcaccccaaacaactcagcttcggggccggtgaggggaggggcctcccccagcacagatgaggagcagctggggtaggctgtctgtgccatggccccccactcccccttcccttggagggagaggtggcaggaatacttcacctttcctctccctcaggggcaggtggtggaggggcgcccagggtcgtctttgtgtatgggggaaggcgctgggtgcctgcagcgcctcccttgtctcagatggtgtgtccagcactcgattgttgtaaactgttgttttgtatgagcgaaattgtctttactaaacagatttaatagtt

SEQ ID NO: 322007 - DNA, 3044 bp, Homo sapiens
gatatcacagcaacattgaaatgctaaaaagtttttaaacactctcaatttctaattcaccatgtcacagactggtgaaaaaaaaaaaaaaagcggccgcttccccccggccgggcccccgccgccccgcggtccccagagcgccaggcccccggggggagggagggagggcgccgggccggtgggagccagcggcgcgcggtgggacccacggagccccgcgacccgccgagcctggagccgggccggctcggggaagccggctccagcccggagcgaacttcgcagcccgtcggggggcggcggggagggggcccggagccggaggagggggcggccgcgggcacccccgcctgtgccccggcgtccccgggcaccatgctgtccaactcccagggccagagcccgccggtgccgttccccgccccggccccgccgccgcagccccccacccctgccctgccgcaccccccggcgcagccgccgccgccgcccccgcagcagttcccgcagttccacgtcaagtccggcctgcagatcaagaagaacgccatcatcgatgactacaaggtcaccagccaggtcctggggctgggcatcaacggcaaagttttgcagatcttcaacaagaggacccaggagaaattcgccctcaaaatgcttcaggactgccccaaggcccgcagggaggtggagctgcactggcgggcctcccagtgcccgcacatcgtacggatcgtggatgtgtacgagaatctgtacgcagggaggaagtgcctgctgattgtcatggaatgtttggacggtggagaactctttagccgaatccaggatcgaggagaccaggcattcacagaaagagaagcatccgaaatcatgaagagcatcggtgaggccatccagtatctgcattcaatcaacattgcccatcgggatgtcaagcctgagaatctcttatacacctccaaaaggcccaacgccatcctgaaactcactgactttggctttgccaaggaaaccaccagccacaactctttgaccactccttgttatacaccgtactatgtggctccagaagtgctgggtccagagaagtatgacaagtcctgtgacatgtggtccctgggtgtcatcatgtacatcctgctgtgtgggtatccccccttctactccaaccacggccttgccatctctccgggcatgaagactcgcatccgaatgggccagtatgaatttcccaacccagaatggtcagaagtatcagaggaagtgaagatgctcattcggaatctgctgaaaacagagcccacccagagaatgaccatcaccgagtttatgaaccacccttggatcatgcaatcaacaaaggtccctcaaaccccactgcacaccagccgggtcctgaaggaggacaaggagcggtgggaggatgtcaaggaggagatgaccagtgccttggccacaatgcgcgttgactacgagcagatcaagataaaaaagattgaagatgcatccaaccctctgctgctgaagaggcggaagaaagctcgggccctggaggctgcggctctggcccactgagccaccgcgccctcctgcccacgggaggacaagcaataactctctacaggaatatattttttaaacgaagagacagaactgtccacatctgcctcctctcctcctcagctgcatggagcctggaactgcatcagtgactgaattctgccttggttctggccaccccagagtgggagaggctgggaggttgggaggctgtggagagaagtgagcaaggtgctcttgaacctgtgctcattttgcaattttatcagtaatttgacttagagtttttacgaaacctcttttgttgtccttgccccactcctctccaccagacgccttcctctctggatactgcaaaggcttgtggtttgttagagggtatttgtggaaactgtcatagggattgtccctgtgttgtcccatctgccctccctgtttctccacaacagcctggggttgtccccgctggctcacgcgttctgggagctcaaggccaccttggaggaggatgccacgcacttcctctctcggagccctcagacatctccagtgtgccagacaaataggagtgagtgtatgtgtgtgtgtgtgtgtgtgtgtgtgcacacgtgtgtatgagtgcgcagatctgtgcctgggatcgtgcatttgaggggccagggcaggcagggctgcagagggagacggccctgctggggcttaggaaccttctcccttcttgggtctgccctgcccatactgagcctgccaaagtgcctgggaagcccacccagattctgaaacaagggcccccctccccccacttagtgctggtcctaggtcctctgaggcactcatctactgaatgacctctctacttccccttcttgccattattaacccatttttgtttattttccttaaatttttagccatttctccatgggccaccgcccagctcatgtaggtgagcctgggcagcttctgttggcagagcttttgcatttcctgtgtttgtcctgggttctggggcatcagccagctaccccttgtgggcaaaggcagggccacttttgaagtcttccctcagatttccattgtgtggcctggtgggtcagggggagtctttgcaccaaagatgtcctgactttgcccccttgcccatcagccatttgccatcaccccaaacaactcagcttcggggccggtgaggggaggggcctcccccagcacagatgaggagcagctggggtaggctgtctgtgccatggccccccactcccccttcccttggagggagaggtggcaggaatacttcacctttcctctccctcaggggcaggtggtggaggggcgcccagggtcgtctttgtgtatgggggaaggcgctgggtgcctgcagcgcctcccttgtctcagatggtgtgtccagcactcgattgttgtaaactgttgttttgtatgagcgaaattgtctttactaaacagatttaatagtt

SEQ ID NO: 322008 - DNA, 2402 bp, Homo sapiens
tctagaggatctctcataggttcgcagtgaggaagtgctgctgatgtcatggaaggtttggacggtggagaactctttagccgaatccaggatcgaggagaccaggcattcacagaaagagaagcatccgaaatcatgaagagcatcggtgaggccatccagtatctgcattcaatcaacattgcccatcgggatgtcaagcctgagaatctcttatacacctccaaaaggcccaacgccatcctgaaactcactgactttggctttgccaaggaaaccaccagccacaactctttgaccactccttgttatacaccgtactatgtggctccagaagtgctgggtccagagaagtatgacaagtcctgtgacatgtggtccctgggtgtcatcatgtacatcctgctgtgtgggtatccccccttctactccaaccacggccttgccatctctccgggcatgaagactcgcatccgaatgggccagtatgaatttcccaacccagaatggtcagaagtatcagaggaagtgaagatgctcattcggaatctgctgaaaacagagcccacccagagaatgaccatcaccgagtttatgaaccacccttggatcatgcaatcaacaaaggtccctcaaaccccactgcacaccagccgggtcctgaaggaggacaaggagcggtgggaggatgtcaaggaggagatgaccagtgccttggccacaatgcgcgttgactacgagcagatcaagataaaaaagattgaagatgcatccaaccctctgctgctgaagaggcggaagaaagctcgggccctggaggctgcggctctggcccactgagccaccgcgccctcctgcccacgggaggacaagcaataactctctacaggaatatattttttaaacgaagagacagaactgtccacatctgcctcctctcctcctcagctgcatggagcctggaactgcatcagtgactgaattctgccttggttctggccaccccagagtgggagaggctgggaggttgggaggctgtggagagaagtgagcaaggtgctcttgaacctgtgctcattttgcaattttatcagtaatttgacttagagtttttacgaaacctcttttgttgtccttgccccactcctctccaccagacgccttcctctctggatactgcaaaggcttgtggtttgttagagggtatttgtggaaactgtcatagggattgtccctgtgttgtcccatctgccctccctgtttctccacaacagcctggggttgtccccgctggctcacgcgttctgggagctcaaggccaccttggaggaggatgccacgcacttcctctctcggagccctcagacatctccagtgtgccagacaaataggagtgagtgtatgtgtgtgtgtgtgtgtgtgtgtgtgcacacgtgtgtatgagtgcgcagatctgtgcctgggatcgtgcatttgaggggccagggcaggcagggctgcagagggagacggccctgctggggcttaggaaccttctcccttcttgggtctgccctgcccatactgagcctgccaaagtgcctgggaagcccacccagattctgaaacaggccctctgtggcctgtctctattagctgggttccgggaggcagagaggagtgaccgggcactggcactgcgatcaggaagactggacccccagcccccagggcccccctccccccacttagtgctggtcctaggtcctctgaggcactcatctactgaatgacctctctacttccccttcttgccattattaacccatttttgtttattttccttaaatttttagccatttctccatgggccaccgcccagctcatgtaggtgagcctgggcagcttctgttggcagagcttttgcatttcctgtgtttgtcctgggttctggggcatcagccagctaccccttgtgggcaaaggcagggccacttttgaagtcttccctcagatttccattgtgtggcctggtgggtcagggggagtctttgcaccaaagatgtcctgactttgcccccttgcccatcagccatttgccatcaccccaaacaactcagcttcggggccggtgaggggaggggcctcccccagcacagatgaggagcagctggggtaggctgtctgtgccatggccccccactcccccttcccttggagggagaggtggcaggaatacttcacctttcctctccctcaggggcaggtggtggaggggcgcccagggtcgtctttgtgtatgggggaaggcgctgggtgcctgcagcgcctcccttgtctcagatggtgtgtccagcactcgattgttgtaaactgttgttttgtatgagcgaaattgtctttactaaacagatttaatagtt

SEQ ID NO: 322009 - DNA, 3798 bp, Homo sapiens
gatatcacagcaacattgaaatgctaaaaagtttttaaacactctcaatttctaattcaccatgtcacagactggtgaaaaaaaaaaaaaaagcggccgcttccccccggccgggcccccgccgccccgcggtccccagagcgccaggcccccggggggagggagggagggcgccgggccggtgggagccagcggcgcgcggtgggacccacggagccccgcgacccgccgagcctggagccgggccggctcggggaagccggctccagcccggagcgaacttcgcagcccgtcggggggcggcggggagggggcccggagccggaggagggggcggccgcgggcacccccgcctgtgccccggcgtccccgggcaccatgctgtccaactcccagggccagagcccgccggtgccgttccccgccccggccccgccgccgcagccccccacccctgccctgccgcaccccccggcgcagccgccgccgccgcccccgcagcagttcccgcagttccacgtcaagtccggcctgcagatcaagaagaacgccatcatcgatgactacaaggtcaccagccaggtcctggggctgggcatcaacggcaaagttttgcagatcttcaacaagaggacccaggagaaattcgccctcaaaatgcttcaggactgccccaaggcccgcagggaggtggagctgcactggcgggcctcccagtgcccgcacatcgtacggatcgtggatgtgtacgagaatctgtacgcagggaggaagtgcctgctgattgtcatggaatgtttggacggtggagaactctttagccgaatccaggatcgaggagaccaggcattcacagaaagagaagcatccgaaatcatgaagagcatcggtgaggccatccagtatctgcattcaatcaacattgcccatcgggatgtcaagcctgagaatctcttatacacctccaaaaggcccaacgccatcctgaaactcactgactttggctttgccaaggaaaccaccagccacaactctttgaccactccttgttatacaccgtactatgtggctccagaagtgctgggtccagagaagtatgacaagtcctgtgacatgtggtccctgggtgtcatcatgtacatcctgctgtgtgggtatccccccttctactccaaccacggccttgccatctctccgggcatgaagactcgcatccgaatgggccagtatgaatttcccaacccagaatggtcagaagtatcagaggaagtgaagatgctcattcggaatctgctgaaaacagagcccacccagagaatgaccatcaccgagtttatgaaccacccttggatcatgcaatcaacaaaggtccctcaaaccccactgcacaccagccgggtcctgaaggaggacaaggagcggtgggaggatgtcaaggtgaggggcaccactgggtgagaggggctccaggtggggtgggcggcttgcggggagtgcccaggtgtgaggcgtggtgctggtaggggagagcttgattctgcctctctcatcccaggggtgtcttcatgacaagaacagcgaccaggccacttggctgaccaggttgtgagcagaggattctgtgttcctgtccaaactcagtgctgtttcttagaatccttttattccctgggtctctaatgggaccttaaagaccatctggtatcatcttctcattttgcagaagagaaactgaggcccagaggcggagggcagtctgctcaaggtcacgcagctggtgactggttggggcagaccggacccaggtttcctgactcctggcccaagtctcttcctcctatcctgcgggatcactggggggctctcagggaacagcagcagtgccatagccaggctctctgctgcccagcgctggggtgaggctgccgttgtcagcgtggaccactaaccagcccgtcttctctctctgctcccacccctgccgccctcaccctgcccttgttgtctctgtctctcacgtctctcttctgctgtctctcctacctgtcttctggctctctctgtacccttcctggtgctgccgtgcccccaggaggagatgaccagtgccttggccacaatgcgcgttgactacgagcagatcaagataaaaaagattgaagatgcatccaaccctctgctgctgaagaggcggaagaaagctcgggccctggaggctgcggctctggcccactgagccaccgcgccctcctgcccacgggaggacaagcaataactctctacaggaatatattttttaaacgaagagacagaactgtccacatctgcctcctctcctcctcagctgcatggagcctggaactgcatcagtgactgaattctgccttggttctggccaccccagagtgggagaggctgggaggttgggaggctgtggagagaagtgagcaaggtgctcttgaacctgtgctcattttgcaattttatcagtaatttgacttagagtttttacgaaacctcttttgttgtccttgccccactcctctccaccagacgccttcctctctggatactgcaaaggcttgtggtttgttagagggtatttgtggaaactgtcatagggattgtccctgtgttgtcccatctgccctccctgtttctccacaacagcctggggttgtccccgctggctcacgcgttctgggagctcaaggccaccttggaggaggatgccacgcacttcctctctcggagccctcagacatctccagtgtgccagacaaataggagtgagtgtatgtgtgtgtgtgtgtgtgtgtgtgtgcacacgtgtgtatgagtgcgcagatctgtgcctgggatcgtgcatttgaggggccagggcaggcagggctgcagagggagacggccctgctggggcttaggaaccttctcccttcttgggtctgccctgcccatactgagcctgccaaagtgcctgggaagcccacccagattctgaaacaggccctctgtggcctgtctctattagctgggttccgggaggcagagaggagtgaccgggcactggcactgcgatcaggaagactggacccccagcccccagggcccccctccccccacttagtgctggtcctaggtcctctgaggcactcatctactgaatgacctctctacttccccttcttgccattattaacccatttttgtttattttccttaaatttttagccatttctccatgggccaccgcccagctcatgtaggtgagcctgggcagcttctgttggcagagcttttgcatttcctgtgtttgtcctgggttctggggcatcagccagctaccccttgtgggcaaaggcagggccacttttgaagtcttccctcagatttccattgtgtggcctggtgggtcagggggagtctttgcaccaaagatgtcctgactttgcccccttgcccatcagccatttgccatcaccccaaacaactcagcttcggggccggtgaggggaggggcctcccccagcacagatgaggagcagctggggtaggctgtctgtgccatggccccccactcccccttcccttggagggagaggtggcaggaatacttcacctttcctctccctcaggggcaggtggtggaggggcgcccagggtcgtctttgtgtatgggggaaggcgctgggtgcctgcagcgcctcccttgtctcagatggtgtgtccagcactcgattgttgtaaactgttgttttgtatgagcgaaattgtctttactaaacagatttaatagtt

SEQ ID NO: 322010 - DNA, 4208 bp, Homo sapiens
gatatcacagcaacattgaaatgctaaaaagtttttaaacactctcaatttctaattcaccatgtcacagactggtgaaaaaaaaaaaaaaagcggccgcttccccccggccgggcccccgccgccccgcggtccccagagcgccaggcccccggggggagggagggagggcgccgggccggtgggagccagcggcgcgcggtgggacccacggagccccgcgacccgccgagcctggagccgggccggctcggggaagccggctccagcccggagcgaacttcgcagcccgtcggggggcggcggggagggggcccggagccggaggagggggcggccgcgggcacccccgcctgtgccccggcgtccccgggcaccatgctgtccaactcccagggccagagcccgccggtgccgttccccgccccggccccgccgccgcagccccccacccctgccctgccgcaccccccggcgcagccgccgccgccgcccccgcagcagttcccgcagttccacgtcaagtccggcctgcagatcaagaagaacgccatcatcgatgactacaaggtcaccagccaggtcctggggctgggcatcaacggcaaagttttgcagatcttcaacaagaggacccaggagaaattcgccctcaaaatgcttcaggactgccccaaggcccgcagggaggtggagctgcactggcgggcctcccagtgcccgcacatcgtacggatcgtggatgtgtacgagaatctgtacgcagggaggaagtgcctgctgattgtcatggaatgtttggacggtggagaactctttagccgaatccaggatcgaggagaccaggcattcacagaaagagaagcatccgaaatcatgaagagcatcggtgaggccatccagtatctgcattcaatcaacattgcccatcgggatgtcaagcctgagaatctcttatacacctccaaaaggcccaacgccatcctgaaactcactgactttggctttgccaaggaaaccaccagccacaactctttgaccactccttgttatacaccgtactatgtggctccagaagtgctgggtccagagaagtatgacaagtcctgtgacatgtggtccctgggtgtcatcatgtacatcctgctgtgtgggtatccccccttctactccaaccacggccttgccatctctccgggcatgaagactcgcatccgaatgggccagtatgaatttcccaacccagaatggtcagaagtatcagaggaaggtaagaacccaggctttcaggacaaggggaagagcccgtgtgtgtgtgtgtgtgtgtatgtgtgtacacgcagacacatgtatgggcctccatctcatgtgcgtggtgtaactgtgggttagcacctatgcccacgcctgcggggtgcgtcctgcttcattttgcctgtgtggagggctggaggcagggccaaggctgtggggctgtgcagggcctctcaagtggtacagccgtaatggtccttggggccagttgctccggcagcctgcctccatgcaccccctctttgaacctggtttccccatgaaaactggggaaaggagcaggccagggagagtgacccctgagctgtcactgccccctgtcccaccccacagtgaagatgctcattcggaatctgctgaaaacagagcccacccagagaatgaccatcaccgagtttatgaaccacccttggatcatggctttcactcggaccccttttctctcttctcagcaatcaacaaaggtccctcaaaccccactgcacaccagccgggtcctgaaggaggacaaggagcggtgggaggatgtcaaggtgaggggcaccactgggtgagaggggctccaggtggggtgggcggcttgcggggagtgcccaggtgtgaggcgtggtgctggtaggggagagcttgattctgcctctctcatcccaggggtgtcttcatgacaagaacagcgaccaggccacttggctgaccaggttgtgagcagaggattctgtgttcctgtccaaactcagtgctgtttcttagaatccttttattccctgggtctctaatgggaccttaaagaccatctggtatcatcttctcattttgcagaagagaaactgaggcccagaggcggagggcagtctgctcaaggtcacgcagctggtgactggttggggcagaccggacccaggtttcctgactcctggcccaagtctcttcctcctatcctgcgggatcactggggggctctcagggaacagcagcagtgccatagccaggctctctgctgcccagcgctggggtgaggctgccgttgtcagcgtggaccactaaccagcccgtcttctctctctgctcccacccctgccgccctcaccctgcccttgttgtctctgtctctcacgtctctcttctgctgtctctcctacctgtcttctggctctctctgtacccttcctggtgctgccgtgcccccaggaggagatgaccagtgccttggccacaatgcgcgttgactacgagcagatcaagataaaaaagattgaagatgcatccaaccctctgctgctgaagaggcggaagaaagctcgggccctggaggctgcggctctggcccactgagccaccgcgccctcctgcccacgggaggacaagcaataactctctacaggaatatattttttaaacgaagagacagaactgtccacatctgcctcctctcctcctcagctgcatggagcctggaactgcatcagtgactgaattctgccttggttctggccaccccagagtgggagaggctgggaggttgggaggctgtggagagaagtgagcaaggtgctcttgaacctgtgctcattttgcaattttatcagtaatttgacttagagtttttacgaaacctcttttgttgtccttgccccactcctctccaccagacgccttcctctctggatactgcaaaggcttgtggtttgttagagggtatttgtggaaactgtcatagggattgtccctgtgttgtcccatctgccctccctgtttctccacaacagcctggggttgtccccgctggctcacgcgttctgggagctcaaggccaccttggaggaggatgccacgcacttcctctctcggagccctcagacatctccagtgtgccagacaaataggagtgagtgtatgtgtgtgtgtgtgtgtgtgtgtgtgcacacgtgtgtatgagtgcgcagatctgtgcctgggatcgtgcatttgaggggccagggcaggcagggctgcagagggagacggccctgctggggcttaggaaccttctcccttcttgggtctgccctgcccatactgagcctgccaaagtgcctgggaagcccacccagattctgaaacaggccctctgtggcctgtctctattagctgggttccgggaggcagagaggagtgaccgggcactggcactgcgatcaggaagactggacccccagcccccagggcccccctccccccacttagtgctggtcctaggtcctctgaggcactcatctactgaatgacctctctacttccccttcttgccattattaacccatttttgtttattttccttaaatttttagccatttctccatgggccaccgcccagctcatgtaggtgagcctgggcagcttctgttggcagagcttttgcatttcctgtgtttgtcctgggttctggggcatcagccagctaccccttgtgggcaaaggcagggccacttttgaagtcttccctcagatttccattgtgtggcctggtgggtcagggggagtctttgcaccaaagatgtcctgactttgcccccttgcccatcagccatttgccatcaccccaaacaactcagcttcggggccggtgaggggaggggcctcccccagcacagatgaggagcagctggggtaggctgtctgtgccatggccccccactcccccttcccttggagggagaggtggcaggaatacttcacctttcctctccctcaggggcaggtggtggaggggcgcccagggtcgtctttgtgtatgggggaaggcgctgggtgcctgcagcgcctcccttgtctcagatggtgtgtccagcactcgattgttgtaaactgttgttttgtatgagcgaaattgtctttactaaacagatttaatagtt

SEQ ID NO: 322011 - DNA, 2513 bp, Homo sapiens
accccaccgcaggttgtacttggatggcttcttgtaggtgctcccgttctggggccgcagattctcgccggtcttcagtttttggatgaagaagtcgtacttggaggcccgggctaccaggttctgcatctggaccctgctgtgtgggtatccccccttctactccaaccacggccttgccatctctccgggcatgaagactcgcatccgaatgggccagtatgaatttcccaacccagaatggtcagaagtatcagaggaaggtaagaacccaggctttcaggacaaggggaagagcccgtgtgtgtgtgtgtgtgtgtatgtgtgtacacgcagacacatgtatgggcctccatctcatgtgcgtggtgtaactgtgggttagcacctatgcccacgcctgcggggtgcgtcctgcttcattttgcctgtgtggagggctggaggcagggccaaggctgtggggctgtgcagggcctctcaagtggtacagccgtaatggtccttggggccagttgctccggcagcctgcctccatgcaccccctctttgaacctggtttccccatgaaaactggggaaaggagcaggccagggagagtgacccctgagctgtcactgccccctgtcccaccccacagtgaagatgctcattcggaatctgctgaaaacagagcccacccagagaatgaccatcaccgagtttatgaaccacccttggatcatgcaatcaacaaaggtccctcaaaccccactgcacaccagccgggtcctgaaggaggacaaggagcggtgggaggatgtcaaggaggagatgaccagtgccttggccacaatgcgcgttgactacgagcagatcaagataaaaaagattgaagatgcatccaaccctctgctgctgaagaggcggaagaaagctcgggccctggaggctgcggctctggcccactgagccaccgcgccctcctgcccacgggaggacaagcaataactctctacaggaatatattttttaaacgaagagacagaactgtccacatctgcctcctctcctcctcagctgcatggagcctggaactgcatcagtgactgaattctgccttggttctggccaccccagagtgggagaggctgggaggttgggaggctgtggagagaagtgagcaaggtgctcttgaacctgtgctcattttgcaattttatcagtaatttgacttagagtttttacgaaacctcttttgttgtccttgccccactcctctccaccagacgccttcctctctggatactgcaaaggcttgtggtttgttagagggtatttgtggaaactgtcatagggattgtccctgtgttgtcccatctgccctccctgtttctccacaacagcctggggttgtccccgctggctcacgcgttctgggagctcaaggccaccttggaggaggatgccacgcacttcctctctcggagccctcagacatctccagtgtgccagacaaataggagtgagtgtatgtgtgtgtgtgtgtgtgtgtgtgtgcacacgtgtgtatgagtgcgcagatctgtgcctgggatcgtgcatttgaggggccagggcaggcagggctgcagagggagacggccctgctggggcttaggaaccttctcccttcttgggtctgccctgcccatactgagcctgccaaagtgcctgggaagcccacccagattctgaaacaggccctctgtggcctgtctctattagctgggttccgggaggcagagaggagtgaccgggcactggcactgcgatcaggaagactggacccccagcccccagggcccccctccccccacttagtgctggtcctaggtcctctgaggcactcatctactgaatgacctctctacttccccttcttgccattattaacccatttttgtttattttccttaaatttttagccatttctccatgggccaccgcccagctcatgtaggtgagcctgggcagcttctgttggcagagcttttgcatttcctgtgtttgtcctgggttctggggcatcagccagctaccccttgtgggcaaaggcagggccacttttgaagtcttccctcagatttccattgtgtggcctggtgggtcagggggagtctttgcaccaaagatgtcctgactttgcccccttgcccatcagccatttgccatcaccccaaacaactcagcttcggggccggtgaggggaggggcctcccccagcacagatgaggagcagctggggtaggctgtctgtgccatggccccccactcccccttcccttggagggagaggtggcaggaatacttcacctttcctctccctcaggggcaggtggtggaggggcgcccagggtcgtctttgtgtatgggggaaggcgctgggtgcctgcagcgcctcccttgtctcagatggtgtgtccagcactcgattgttgtaaactgttgttttgtatgagcgaaattgtctttactaaacagatttaatagtt

SEQ ID NO: 322012 - DNA, 1955 bp, Homo sapiens
gatatcacagcaacattgaaatgctaaaaagtttttaaacactctcaatttctaattcaccatgtcacagactggtgaaaaaaaaaaaaaaagcggccgcttccccccggccgggcccccgccgccccgcggtccccagagcgccaggcccccggggggagggagggagggcgccgggccggtgggagccagcggcgcgcggtgggacccacggagccccgcgacccgccgagcctggagccgggccggctcggggaagccggctccagcccggagcgaacttcgcagcccgtcggggggcggcggggagggggcccggagccggaggagggggcggccgcgggcacccccgcctgtgccccggcgtccccgggcaccatgctgtcccactgagccaccgcgccctcctgcccacgggaggacaagcaataactctctacaggaatatattttttaaacgaagagacagaactgtccacatctgcctcctctcctcctcagctgcatggagcctggaactgcatcagtgactgaattctgccttggttctggccaccccagagtgggagaggctgggaggttgggaggctgtggagagaagtgagcaaggtgctcttgaacctgtgctcattttgcaattttatcagtaatttgacttagagtttttacgaaacctcttttgttgtccttgccccactcctctccaccagacgccttcctctctggatactgcaaaggcttgtggtttgttagagggtatttgtggaaactgtcatagggattgtccctgtgttgtcccatctgccctccctgtttctccacaacagcctggggttgtccccgctggctcacgcgttctgggagctcaaggccaccttggaggaggatgccacgcacttcctctctcggagccctcagacatctccagtgtgccagacaaataggagtgagtgtatgtgtgtgtgtgtgtgtgtgtgtgtgcacacgtgtgtatgagtgcgcagatctgtgcctgggatcgtgcatttgaggggccagggcaggcagggctgcagagggagacggccctgctggggcttaggaaccttctcccttcttgggtctgccctgcccatactgagcctgccaaagtgcctgggaagcccacccagattctgaaacaggccctctgtggcctgtctctattagctgggttccgggaggcagagaggagtgaccgggcactggcactgcgatcaggaagactggacccccagcccccagggcccccctccccccacttagtgctggtcctaggtcctctgaggcactcatctactgaatgacctctctacttccccttcttgccattattaacccatttttgtttattttccttaaatttttagccatttctccatgggccaccgcccagctcatgtaggtgagcctgggcagcttctgttggcagagcttttgcatttcctgtgtttgtcctgggttctggggcatcagccagctaccccttgtgggcaaaggcagggccacttttgaagtcttccctcagatttccattgtgtggcctggtgggtcagggggagtctttgcaccaaagatgtcctgactttgcccccttgcccatcagccatttgccatcaccccaaacaactcagcttcggggccggtgaggggaggggcctcccccagcacagatgaggagcagctggggtaggctgtctgtgccatggccccccactcccccttcccttggagggagaggtggcaggaatacttcacctttcctctccctcaggggcaggtggtggaggggcgcccagggtcgtctttgtgtatgggggaaggcgctgggtgcctgcagcgcctcccttgtctcagatggtgtgtccagcactcgattgttgtaaactgttgttttgtatgagcgaaattgtctttactaaacagatttaatagtt

SEQ ID NO: 322013 - DNA, 2186 bp, Homo sapiens
gatatcacagcaacattgaaatgctaaaaagtttttaaacactctcaatttctaattcaccatgtcacagactggtgaaaaaaaaaaaaaaagcggccgcttccccccggccgggcccccgccgccccgcggtccccagagcgccaggcccccggggggagggagggagggcgccgggccggtgggagccagcggcgcgcggtgggacccacggagccccgcgacccgccgagcctggagccgggccggctcggggaagccggctccagcccggagcgaacttcgcagcccgtcggggggcggcggggagggggcccggagccggaggagggggcggccgcgggcacccccgcctgtgccccggcgtccccgggcaccatgctgtccaactcccagggccagagcccgccggtgccgttccccgccccggccccgccgccgcagccccccacccctgccctgccgcaccccccggcgcagccgccgccgccgcccccgcagcagttcccgcagttccacgtcaagtccggcctgcagatcaagaagaacgccatcatcgatgactacaaggtcaccagccaggtcctggggctgggcatcaacggcaaagttttgcagatcttcaacaagaggacccaggagaaattcgccctcaaaatgcttcaggactgccccaaggcccgcagggaggtggagctgcactggcgggcctcccagtgcccgcacatcgtacggatcgtggatgtgtacgagaatctgtacgcagggaggaagtgcctgctgattgtcatggaatgtttggacggtggagaactctttagccgaatccaggatcgaggagaccaggcattcacagaaagagaagcatccgaaatcatgaagagcatcggtgaggccatccagtatctgcattcaatcaacattgcccatcgggatgtcaagcctgagaatctcttatacacctccaaaaggcccaacgccatcctgaaactcactgactttggctttgccaaggaaaccaccagccacaactctttgaccactccttgttatacaccgtactatgtggctccagaagtgctgggtccagagaagtatgacaagtcctgtgacatgtggtccctgggtgtcatcatgtacatcctgctgtgtgggtatccccccttctactccaaccacggccttgccatctctccgggcatgaagactcgcatccgaatgggccagtatgaatttcccaacccagaatggtcagaagtatcagaggaagtgaagatgctcattcggaatctgctgaaaacagagcccacccagagaatgaccatcaccgagtttatgaaccacccttggatcatgcaatcaacaaaggtccctcaaaccccactgcacaccagccgggtcctgaaggaggacaaggagcggtgggaggatgtcaagagaggagtgaccgggcactggcactgcgatcaggaagactggacccccagcccccagggcccccctccccccacttagtgctggtcctaggtcctctgaggcactcatctactgaatgacctctctacttccccttcttgccattattaacccatttttgtttattttccttaaatttttagccatttctccatgggccaccgcccagctcatgtaggtgagcctgggcagcttctgttggcagagcttttgcatttcctgtgtttgtcctgggttctggggcatcagccagctaccccttgtgggcaaaggcagggccacttttgaagtcttccctcagatttccattgtgtggcctggtgggtcagggggagtctttgcaccaaagatgtcctgactttgcccccttgcccatcagccatttgccatcaccccaaacaactcagcttcggggccggtgaggggaggggcctcccccagcacagatgaggagcagctggggtaggctgtctgtgccatggccccccactcccccttcccttggagggagaggtggcaggaatacttcacctttcctctccctcaggggcaggtggtggaggggcgcccagggtcgtctttgtgtatgggggaaggcgctgggtgcctgcagcgcctcccttgtctcagatggtgtgtccagcactcgattgttgtaaactgttgttttgtatgagcgaaattgtctttactaaacagatttaatagtt

SEQ ID NO: 322014 - DNA, 1786 bp, Homo sapiens
gatatcacagcaacattgaaatgctaaaaagtttttaaacactctcaatttctaattcaccatgtcacagactggtgaaaaaaaaaaaaaaagcggccgcttccccccggccgggcccccgccgccccgcggtccccagagcgccaggcccccggggggagggagggagggcgccgggccggtgggagccagcggcgcgcggtgggacccacggagccccgcgacccgccgagcctggagccgggccggctcggggaagccggctccagcccggagcgaacttcgcagcccgtcggggggcggcggggagggggcccggagccggaggagggggcggccgcgggcacccccgcctgtgccccggcgtccccgggcaccatgctgtccaactcccagggccagagcccgccggtgccgttccccgccccggccccgccgccgcagccccccacccctgccctgccgcaccccccggcgcagccgccgccgccgcccccgcagcagttcccgcagttccacgtcaagtccggcctgcagatcaagaagaacgccatcatcgatgactacaaggtcaccagccaggtcctggggctgggcatcaacggcaaagttttgcagatcttcaacaagaggacccaggagaaattcgccctcaaaatgcttcaggactgccccaaggcccgcagggaggtggagctgcactggcgggcctcccagtgcccgcacatcgtacggatcgtggatgtgtacgagaatctgtacgcagggaggaagtgcctgctgattgtcatggaatgtttggacggtggagaactctttagccgaatccaggatcgaggagaccaggcattcacagaaagagaagcatccgaaatcatgaagagcatcggtgaggccatccagtatctgcattcaatcaacattgcccatcgggatgtcaagcctgagaatctcttatacacctccaaaaggcccaacgccatcctgaaactcactgactttggctttgccaaggaaaccaccagccacaactctttgaccactccttgttatacaccgtactatgtggctccagaagtgctgggtccagagaagtatgacaagtcctgtgacatgtggtccctgggtgtcatcatgtacatcctgctgtgtgggtatccccccttctactccaaccacggccttgccatctctccgggcatgaagactcgcatccgaatgggccagtatgaatttcccaacccagaatggtcagaagtatcagaggaagtgaagatgctcattcggaatctgctgaaaacagagcccacccagagaatgaccatcaccgagtttatgaaccacccttggatcatgcaatcaacaaaggtccctcaaaccccactgcacaccagccgggtcctgaaggaggacaaggagcggtgggaggatgtcaaggaggagatgaccagtgccttggccacaatgcgcgttgactacgagcagatcaagataaaaaagattgaagatgcccccagcacagatgaggagcagctggggtaggctgtctgtgccatggccccccactcccccttcccttggagggagaggtggcaggaatacttcacctttcctctccctcaggggcaggtggtggaggggcgcccagggtcgtctttgtgtatgggggaaggcgctgggtgcctgcagcgcctcccttgtctcagatggtgtgtccagcactcgattgttgtaaactgttgttttgtatgagcgaaattgtctttactaaacagatttaatagtt

SEQ ID NO: 322015 - DNA, 453 bp, Homo sapiens
gtaagctcggcaggctggggagccttgggtctcacgggactattccacaggacagagtcttagccaggaccctaccccaggctttcactcggaccccttttctctcttctcagcaatcaacaaaggtccctcaaaccccactgcacaccagccgggtcctgaaggaggacaaggagcggtgggaggatgtcaaggtgaggggcaccactgggtgagaggggctccaggtggggtgggcggcttgcggggagtgcccaggtgtgaggcgtggtgctggtaggggagagcttgattctgcctctctcatcccaggggtgtcttcatgacaagaacagcgaccaggccacttggctgaccaggttgtgagcagaggattctgtgttcctgtccaaactcagtgctgtttcttagaatccttttattccctgggtctctaatgggaccttaaagacc

SEQ ID NO: 322016 - DNA, 3284 bp, Homo sapiens
  misc_feature (3155)..(3155): n is a, c, g, or t
  misc_feature (3183)..(3183): n is a, c, g, or t
  misc_feature (3197)..(3197): n is a, c, g, or t
  misc_feature (3199)..(3199): n is a, c, g, or t
  misc_feature (3203)..(3203): n is a, c, g, or t
  misc_feature (3205)..(3205): n is a, c, g, or t
  misc_feature (3210)..(3210): n is a, c, g, or t
  misc_feature (3213)..(3213): n is a, c, g, or t
  misc_feature (3234)..(3234): n is a, c, g, or t
  misc_feature (3236)..(3236): n is a, c, g, or t
  misc_feature (3239)..(3240): n is a, c, g, or t
  misc_feature (3247)..(3247): n is a, c, g, or t
  misc_feature (3256)..(3256): n is a, c, g, or t
  misc_feature (3259)..(3259): n is a, c, g, or t
  misc_feature (3276)..(3277): n is a, c, g, or t
gatatcacagcaacattgaaatgctaaaaagtttttaaacactctcaatttctaattcaccatgtcacagactggtgaaaaaaaaaaaaaaagcggccgcttccccccggccgggcccccgccgccccgcggtccccagagcgccaggcccccggggggagggagggagggcgccgggccggtgggagccagcggcgcgcggtgggacccacggagccccgcgacccgccgagcctggagccgggccggctcggggaagccggctccagcccggagcgaacttcgcagcccgtcggggggcggcggggagggggcccggagccggaggagggggcggccgcgggcacccccgcctgtgccccggcgtccccgggcaccatgctgtccaactcccagggccagagcccgccggtgccgttccccgccccggccccgccgccgcagccccccacccctgccctgccgcaccccccggcgcagccgccgccgccgcccccgcagcagttcccgcagttccacgtcaagtccggcctgcagatcaagaagaacgccatcatcgatgactacaaggtcaccagccaggtcctggggctgggcatcaacggcaaagttttgcagatcttcaacaagaggacccaggagaaattcgccctcaaaatgcttcaggactgccccaaggcccgcagggaggtggagctgcactggcgggcctcccagtgcccgcacatcgtacggatcgtggatgtgtacgagaatctgtacgcagggaggaagtgcctgctgattgtcatggaatgtttggacggtggagaactctttagccgaatccaggatcgaggagaccaggcattcacagaaagagaagcatccgaaatcatgaagagcatcggtgaggccatccagtatctgcattcaatcaacattgcccatcgggatgtcaagcctgagaatctcttatacacctccaaaaggcccaacgccatcctgaaactcactgactttggctttgccaaggaaaccaccagccacaactctttgaccactccttgttatacaccgtactatgtggctccagaagtgctgggtccagagaagtatgacaagtcctgtgacatgtggtccctgggtgtcatcatgtacatcctgctgtgtgggtatccccccttctactccaaccacggccttgccatctctccgggcatgaagactcgcatccgaatgggccagtatgaatttcccaacccagaatggtcagaagtatcagaggaagtgaagatgctcattcggaatctgctgaaaacagagcccacccagagaatgaccatcaccgagtttatgaaccacccttggatcatgcaatcaacaaaggtccctcaaaccccactgcacaccagccgggtcctgaaggaggacaaggagcggtgggaggatgtcaaggaggagatgaccagtgccttggccacaatgcgcgttgactacgagcagatcaagataaaaaagattgaagatgcatccaaccctctgctgctgaagaggcggaagaaagctcgggccctggaggctgcggctctggcccactgagccaccgcgccctcctgcccacgggaggacaagcaataactctctacaggaatatattttttaaacgaagagacagaactgtccacatctgcctcctctcctcctcagctgcatggagcctggaactgcatcagtgactgaattctgccttggttctggccaccccagagtgggagaggctgggaggttgggaggctgtggagagaagtgagcaaggtgctcttgaacctgtgctcattttgcaattttatcagtaatttgacttagagtttttacgaaacctcttttgttgtccttgccccactcctctccaccagacgccttcctctctggatactgcaaaggcttgtggtttgttagagggtatttgtggaaactgtcatagggattgtccctgtgttgtcccatctgccctccctgtttctccacaacagcctggggttgtccccgctggctcacgcgttctgggagctcaaggccaccttggaggaggatgccacgcacttcctctctcggagccctcagacatctccagtgtgccagacaaataggagtgagtgtatgtgtgtgtgtgtgtgtgtgtgtgtgcacacgtgtgtatgagtgcgcagatctgtgcctgggatcgtgcatttgaggggccagggcaggcagggctgcagagggagacggccctgctggggcttaggaaccttctcccttcttgggtctgccctgcccatactgagcctgccaaagtgcctgggaagcccacccagattctgaaacaggccctctgtggcctgtctctattagctgggttccgggaggcagagaggagtgaccgggcactggcactgcgatcaggaagactggacccccagcccccagggcccccctccccccacttagtgctggtcctaggtcctctgaggcactcatctactgaatgacctctctacttccccttcttgccattattaacccatttttgtttattttccttaaatttttagccatttctccatgggccaccgcccagctcatgtaggtgagcctgggcagcttctgttggcagagcttttgcatttcctgtgtttgtcctgggttctggggcatcagccagctaccccttgtgggcaaaggcagggccacttttgaagtcttccctcagatttccattgtgtggcctggtgggtcagggggagtctttgcaccaaagatgtcctgactttgcccccttgcccatcagccatttgccatcaccccaaacaactcagcttcggggccggtgaggggaggggcctcccccagcacagatgaggagcagctggggtaggctgtctgtgccatggccccccactcccccttcccttggagggagaggtggcaggaatacttcacctttcctctccctcaggggcaggtggtggaggggcgcccagggtcgtctttgtgtatgggggaaggcgctgggtgcctgcagcgcctcccttgtctcagatggtgtgtccagcactcgattgttgtaaactgttgttttgtatgagcgaaattgtctttactaaacagatttaatagttaaaaaaaaaaanaaaaaaaaaaaaaaaaaaaaaaaaaaanagggggggggcgcntnttanantattnccnccgggggggccccaagtttgngnggnnacccggntttttggtnaanagagggggcccccaatnngggagag

SEQ ID NO: 322017 - DNA, 3107 bp, Homo sapiens
gatatcacagcaacattgaaatgctaaaaagtttttaaacactctcaatttctaattcaccatgtcacagactggtgaaaaaaaaaaaaaaagcggccgcttccccccggccgggcccccgccgccccgcggtccccagagcgccaggcccccggggggagggagggagggcgccgggccggtgggagccagcggcgcgcggtgggacccacggagccccgcgacccgccgagcctggagccgggccggctcggggaagccggctccagcccggagcgaacttcgcagcccgtcggggggcggcggggagggggcccggagccggaggagggggcggccgcgggcacccccgcctgtgccccggcgtccccgggcaccatgctgtccaactcccagggccagagcccgccggtgccgttccccgccccggccccgccgccgcagccccccacccctgccctgccgcaccccccggcgcagccgccgccgccgcccccgcagcagttcccgcagttccacgtcaagtccggcctgcagatcaagaagaacgccatcatcgatgactacaaggtcaccagccaggtcctggggctgggcatcaacggcaaagttttgcagatcttcaacaagaggacccaggagaaattcgccctcaaaatgcttcaggactgccccaaggcccgcagggaggtggagctgcactggcgggcctcccagtgcccgcacatcgtacggatcgtggatgtgtacgagaatctgtacgcagggaggaagtgcctgctgattgtcatggaatgtttggacggtggagaactctttagccgaatccaggatcgaggagaccaggcattcacagaaagagaagcatccgaaatcatgaagagcatcggtgaggccatccagtatctgcattcaatcaacattgcccatcgggatgtcaagcctgagaatctcttatacacctccaaaaggcccaacgccatcctgaaactcactgactttggctttgccaaggaaaccaccagccacaactctttgaccactccttgttatacaccgtactatgtggctccagaagtgctgggtccagagaagtatgacaagtcctgtgacatgtggtccctgggtgtcatcatgtacatcctgctgtgtgggtatccccccttctactccaaccacggccttgccatctctccgggcatgaagactcgcatccgaatgggccagtatgaatttcccaacccagaatggtcagaagtatcagaggaagtgaagatgctcattcggaatctgctgaaaacagagcccacccagagaatgaccatcaccgagtttatgaaccacccttggatcatgcaatcaacaaaggtccctcaaaccccactgcacaccagccgggtcctgaaggaggacaaggagcggtgggaggatgtcaaggaggagatgaccagtgccttggccacaatgcgcgttgactacgagcagatcaagataaaaaagattgaagatgcatccaaccctctgctgctgaagaggcggaagaaagctcgggccctggaggctgcggctctggcccactgagccaccgcgccctcctgcccacgggaggacaagcaataactctctacaggaatatattttttaaacgaagagacagaactgtccacatctgcctcctctcctcctcagctgcatggagcctggaactgcatcagtgactgaattctgccttggttctggccaccccagagtgggagaggctgggaggttgggaggctgtggagagaagtgagcaaggtgctcttgaacctgtgctcattttgcaattttatcagtaatttgacttagagtttttacgaaacctcttttgttgtccttgccccactcctctccaccagacgccttcctctctggatactgcaaaggcttgtggtttgttagagggtatttgtggaaactgtcatagggattgtccctgtgttgtcccatctgccctccctgtttctccacaacagcctggggttgtccccgctggctcacgcgttctgggagctcaaggccaccttggaggaggatgccacgcacttcctctctcggagccctcagacatctccagtgtgccagacaaataggagtgagtgtatgtgtgtgtgtgtgtgtgtgtgtgtgcacacgtgtgtatgagtgcgcagatctgtgcctgggatcgtgcatttgaggggccagggcaggcagggctgcagagggagacggccctgctggggcttaggaaccttctcccttcttgggtctgccctgcccatactgagcctgccaaagtgcctgggaagcccacccagattctgaaacaggccctctgtggcctgtctctattagctgggttccgggaggcagagaggagtgaccgggcactggcactgcgatcaggaagactggacccccagcccccaggccctcccatggtgcggtcgggtcctgagcatttgttccccttcttgccattattaacccatttttgtttattttccttaaatttttagccatttctccatgggccaccgcccagctcatgtaggtgagcctgggcagcttctgttggcagagcttttgcatttcctgtgtttgtcctgggttctggggcatcagccagctaccccttgtgggcaaaggcagggccacttttgaagtcttccctcagatttccattgtgtggcctggtgggtcagggggagtctttgcaccaaagatgtcctgactttgcccccttgcccatcagccatttgccatcaccccaaacaactcagcttcggggccggtgaggggaggggcctcccccagcacagatgaggagcagctggggtaggctgtctgtgccatggccccccactcccccttcccttggagggagaggtggcaggaatacttcacctttcctctccctcaggggcaggtggtggaggggcgcccagggtcgtctttgtgtatgggggaaggcgctgggtgcctgcagcgcctcccttgtctcagatggtgtgtccagcactcgattgttgtaaactgttgttttgtatgagcgaaattgtctttactaaacagatttaatagtt

SEQ ID NO: 322018 - DNA, 3370 bp, Homo sapiens
gatatcacagcaacattgaaatgctaaaaagtttttaaacactctcaatttctaattcaccatgtcacagactggtgaaaaaaaaaaaaaaagcggccgcttccccccggccgggcccccgccgccccgcggtccccagagcgccaggcccccggggggagggagggagggcgccgggccggtgggagccagcggcgcgcggtgggacccacggagccccgcgacccgccgagcctggagccgggccggctcggggaagccggctccagcccggagcgaacttcgcagcccgtcggggggcggcggggagggggcccggagccggaggagggggcggccgcgggcacccccgcctgtgccccggcgtccccgggcaccatgctgtccaactcccagggccagagcccgccggtgccgttccccgccccggccccgccgccgcagccccccacccctgccctgccgcaccccccggcgcagccgccgccgccgcccccgcagcagttcccgcagttccacgtcaagtccggcctgcagatcaagaagaacgccatcatcgatgactacaaggtcaccagccaggtcctggggctgggcatcaacggcaaagttttgcagatcttcaacaagaggacccaggagaaattcgccctcaaaatgcttcaggactgccccaaggcccgcagggaggtggagctgcactggcgggcctcccagtgcccgcacatcgtacggatcgtggatgtgtacgagaatctgtacgcagggaggaagtgcctgctgattgtcatggaatgtttggacggtggagaactctttagccgaatccaggatcgaggagaccaggcattcacagaaagagaagcatccgaaatcatgaagagcatcggtgaggccatccagtatctgcattcaatcaacattgcccatcgggatgtcaagcctgagaatctcttatacacctccaaaaggcccaacgccatcctgaaactcactgactttggctttgccaaggaaaccaccagccacaactctttgaccactccttgttatacaccgtactatgtggctccagaagtgctgggtccagagaagtatgacaagtcctgtgacatgtggtccctgggtgtcatcatgtacatcctgctgtgtgggtatccccccttctactccaaccacggccttgccatctctccgggcatgaagactcgcatccgaatgggccagtatgaatttcccaacccagaatggtcagaagtatcagaggaagtgaagatgctcattcggaatctgctgaaaacagagcccacccagagaatgaccatcaccgagtttatgaaccacccttggatcatgcaatcaacaaaggtccctcaaaccccactgcacaccagccgggtcctgaaggaggacaaggagcggtgggaggatgtcaaggggtgtcttcatgacaagaacagcgaccaggccacttggctgaccaggttgtgagcagaggattctgtgttcctgtccaaactcagtgctgtttcttagaatccttttattccctgggtctctaatgggaccttaaagaccatctggtatcatgtctctcttctgctgtctctcctacctgtcttctggctctctctgtacccttcctggtgctgccgtgcccccaggaggagatgaccagtgccttggccacaatgcgcgttgactacgagcagatcaagataaaaaagattgaagatgcatccaaccctctgctgctgaagaggcggaagaaagctcgggccctggaggctgcggctctggcccactgagccaccgcgccctcctgcccacgggaggacaagcaataactctctacaggaatatattttttaaacgaagagacagaactgtccacatctgcctcctctcctcctcagctgcatggagcctggaactgcatcagtgactgaattctgccttggttctggccaccccagagtgggagaggctgggaggttgggaggctgtggagagaagtgagcaaggtgctcttgaacctgtgctcattttgcaattttatcagtaatttgacttagagtttttacgaaacctcttttgttgtccttgccccactcctctccaccagacgccttcctctctggatactgcaaaggcttgtggtttgttagagggtatttgtggaaactgtcatagggattgtccctgtgttgtcccatctgccctccctgtttctccacaacagcctggggttgtccccgctggctcacgcgttctgggagctcaaggccaccttggaggaggatgccacgcacttcctctctcggagccctcagacatctccagtgtgccagacaaataggagtgagtgtatgtgtgtgtgtgtgtgtgtgtgtgtgcacacgtgtgtatgagtgcgcagatctgtgcctgggatcgtgcatttgaggggccagggcaggcagggctgcagagggagacggccctgctggggcttaggaaccttctcccttcttgggtctgccctgcccatactgagcctgccaaagtgcctgggaagcccacccagattctgaaacaggccctctgtggcctgtctctattagctgggttccgggaggcagagaggagtgaccgggcactggcactgcgatcaggaagactggacccccagcccccagggcccccctccccccacttagtgctggtcctaggtcctctgaggcactcatctactgaatgacctctctacttccccttcttgccattattaacccatttttgtttattttccttaaatttttagccatttctccatgggccaccgcccagctcatgtaggtgagcctgggcagcttctgttggcagagcttttgcatttcctgtgtttgtcctgggttctggggcatcagccagctaccccttgtgggcaaaggcagggccacttttgaagtcttccctcagatttccattgtgtggcctggtgggtcagggggagtctttgcaccaaagatgtcctgactttgcccccttgcccatcagccatttgccatcaccccaaacaactcagcttcggggccggtgaggggaggggcctcccccagcacagatgaggagcagctggggtaggctgtctgtgccatggccccccactcccccttcccttggagggagaggtggcaggaatacttcacctttcctctccctcaggggcaggtggtggaggggcgcccagggtcgtctttgtgtatgggggaaggcgctgggtgcctgcagcgcctcccttgtctcagatggtgtgtccagcactcgattgttgtaaactgttgttttgtatgagcgaaattgtctttactaaacagatttaatagtt

SEQ ID NO: 322019 - DNA, 2504 bp, Homo sapiens
agctcacaggcctccagttagactatagagagatccccacacaccatggagaaggatgggcctgaagcctggaatgtaaacacttgattttttggggggcagtggagagtggcggcgggctgttgtgttctctggatctcactgtggcttcatttcagtttggacggtggagaactctttagccgaatccaggatcgaggagaccaggcattcacagaaagagaagcatccgaaatcatgaagagcatcggtgaggccatccagtatctgcattcaatcaacattgcccatcgggatgtcaagcctgagaatctcttatacacctccaaaaggcccaacgccatcctgaaactcactgactttggctttgccaaggaaaccaccagccacaactctttgaccactccttgttatacaccgtactatgtggctccagaagtgctgggtccagagaagtatgacaagtcctgtgacatgtggtccctgggtgtcatcatgtacatcctgctgtgtgggtatccccccttctactccaaccacggccttgccatctctccgggcatgaagactcgcatccgaatgggccagtatgaatttcccaacccagaatggtcagaagtatcagaggaagtgaagatgctcattcggaatctgctgaaaacagagcccacccagagaatgaccatcaccgagtttatgaaccacccttggatcatgcaatcaacaaaggtccctcaaaccccactgcacaccagccgggtcctgaaggaggacaaggagcggtgggaggatgtcaaggaggagatgaccagtgccttggccacaatgcgcgttgactacgagcagatcaagataaaaaagattgaagatgcatccaaccctctgctgctgaagaggcggaagaaagctcgggccctggaggctgcggctctggcccactgagccaccgcgccctcctgcccacgggaggacaagcaataactctctacaggaatatattttttaaacgaagagacagaactgtccacatctgcctcctctcctcctcagctgcatggagcctggaactgcatcagtgactgaattctgccttggttctggccaccccagagtgggagaggctgggaggttgggaggctgtggagagaagtgagcaaggtgctcttgaacctgtgctcattttgcaattttatcagtaatttgacttagagtttttacgaaacctcttttgttgtccttgccccactcctctccaccagacgccttcctctctggatactgcaaaggcttgtggtttgttagagggtatttgtggaaactgtcatagggattgtccctgtgttgtcccatctgccctccctgtttctccacaacagcctggggttgtccccgctggctcacgcgttctgggagctcaaggccaccttggaggaggatgccacgcacttcctctctcggagccctcagacatctccagtgtgccagacaaataggagtgagtgtatgtgtgtgtgtgtgtgtgtgtgtgtgcacacgtgtgtatgagtgcgcagatctgtgcctgggatcgtgcatttgaggggccagggcaggcagggctgcagagggagacggccctgctggggcttaggaaccttctcccttcttgggtctgccctgcccatactgagcctgccaaagtgcctgggaagcccacccagattctgaaacaggccctctgtggcctgtctctattagctgggttccgggaggcagagaggagtgaccgggcactggcactgcgatcaggaagactggacccccagcccccagggcccccctccccccacttagtgctggtcctaggtcctctgaggcactcatctactgaatgacctctctacttccccttcttgccattattaacccatttttgtttattttccttaaatttttagccatttctccatgggccaccgcccagctcatgtaggtgagcctgggcagcttctgttggcagagcttttgcatttcctgtgtttgtcctgggttctggggcatcagccagctaccccttgtgggcaaaggcagggccacttttgaagtcttccctcagatttccattgtgtggcctggtgggtcagggggagtctttgcaccaaagatgtcctgactttgcccccttgcccatcagccatttgccatcaccccaaacaactcagcttcggggccggtgaggggaggggcctcccccagcacagatgaggagcagctggggtaggctgtctgtgccatggccccccactcccccttcccttggagggagaggtggcaggaatacttcacctttcctctccctcaggggcaggtggtggaggggcgcccagggtcgtctttgtgtatgggggaaggcgctgggtgcctgcagcgcctcccttgtctcagatggtgtgtccagcactcgattgttgtaaactgttgttttgtatgagcgaaattgtctttactaaacagatttaatagtt

SEQ ID NO: 322020 - DNA, 3520 bp, Homo sapiens
gatatcacagcaacattgaaatgctaaaaagtttttaaacactctcaatttctaattcaccatgtcacagactggtgaaaaaaaaaaaaaaagcggccgcttccccccggccgggcccccgccgccccgcggtccccagagcgccaggcccccggggggagggagggagggcgccgggccggtgggagccagcggcgcgcggtgggacccacggagccccgcgacccgccgagcctggagccgggccggctcggggaagccggctccagcccggagcgaacttcgcagcccgtcggggggcggcggggagggggcccggagccggaggagggggcggccgcgggcacccccgcctgtgccccggcgtccccgggcaccatgctgtccaactcccagggccagagcccgccggtgccgttccccgccccggccccgccgccgcagccccccacccctgccctgccgcaccccccggcgcagccgccgccgccgcccccgcagcagttcccgcagttccacgtcaagtccggcctgcagatcaagaagaacgccatcatcgatgactacaaggtcaccagccaggtcctggggctgggcatcaacggcaaagttttgcagatcttcaacaagaggacccaggagaaattcgccctcaaaatgcttcaggactgccccaaggcccgcagggaggtggagctgcactggcgggcctcccagtgcccgcacatcgtacggatcgtggatgtgtacgagaatctgtacgcagggaggaagtgcctgctgattgtcatggaatgtttggacggtggagaactctttagccgaatccaggatcgaggagaccaggcattcacagaaagagaagcatccgaaatcatgaagagcatcggtgaggccatccagtatctgcattcaatcaacattgcccatcgggatgtcaagcctgagaatctcttatacacctccaaaaggcccaacgccatcctgaaactcactgactttggctttgccaaggaaaccaccagccacaactctttgaccactccttgttatacaccgtactatgtggctccagaagtgctgggtccagagaagtatgacaagtcctgtgacatgtggtccctgggtgtcatcatgtacatcctgctgtgtgggtatccccccttctactccaaccacggccttgccatctctccgggcatgaagactcgcatccgaatgggccagtatgaatttcccaacccagaatggtcagaagtatcagaggaaggtaagaacccaggctttcaggacaaggggaagagcccgtgtgtgtgtgtgtgtgtgtatgtgtgtacacgcagacacatgtatgggcctccatctcatgtgcgtggtgtaactgtgggttagcacctatgcccacgcctgcggggtgcgtcctgcttcattttgcctgtgtggagggctggaggcagggccaaggctgtggggctgtgcagggcctctcaagtggtacagccgtaatggtccttggggccagttgctccggcagcctgcctccatgcaccccctctttgaacctggtttccccatgaaaactggggaaaggagcaggccagggagagtgacccctgagctgtcactgccccctgtcccaccccacagtgaagatgctcattcggaatctgctgaaaacagagcccacccagagaatgaccatcaccgagtttatgaaccacccttggatcatgcaatcaacaaaggtccctcaaaccccactgcacaccagccgggtcctgaaggaggacaaggagcggtgggaggatgtcaaggaggagatgaccagtgccttggccacaatgcgcgttgactacgagcagatcaagataaaaaagattgaagatgcatccaaccctctgctgctgaagaggcggaagaaagctcgggccctggaggctgcggctctggcccactgagccaccgcgccctcctgcccacgggaggacaagcaataactctctacaggaatatattttttaaacgaagagacagaactgtccacatctgcctcctctcctcctcagctgcatggagcctggaactgcatcagtgactgaattctgccttggttctggccaccccagagtgggagaggctgggaggttgggaggctgtggagagaagtgagcaaggtgctcttgaacctgtgctcattttgcaattttatcagtaatttgacttagagtttttacgaaacctcttttgttgtccttgccccactcctctccaccagacgccttcctctctggatactgcaaaggcttgtggtttgttagagggtatttgtggaaactgtcatagggattgtccctgtgttgtcccatctgccctccctgtttctccacaacagcctggggttgtccccgctggctcacgcgttctgggagctcaaggccaccttggaggaggatgccacgcacttcctctctcggagccctcagacatctccagtgtgccagacaaataggagtgagtgtatgtgtgtgtgtgtgtgtgtgtgtgtgcacacgtgtgtatgagtgcgcagatctgtgcctgggatcgtgcatttgaggggccagggcaggcagggctgcagagggagacggccctgctggggcttaggaaccttctcccttcttgggtctgccctgcccatactgagcctgccaaagtgcctgggaagcccacccagattctgaaacaggccctctgtggcctgtctctattagctgggttccgggaggcagagaggagtgaccgggcactggcactgcgatcaggaagactggacccccagcccccagggcccccctccccccacttagtgctggtcctaggtcctctgaggcactcatctactgaatgacctctctacttccccttcttgccattattaacccatttttgtttattttccttaaatttttagccatttctccatgggccaccgcccagctcatgtaggtgagcctgggcagcttctgttggcagagcttttgcatttcctgtgtttgtcctgggttctggggcatcagccagctaccccttgtgggcaaaggcagggccacttttgaagtcttccctcagatttccattgtgtggcctggtgggtcagggggagtctttgcaccaaagatgtcctgactttgcccccttgcccatcagccatttgccatcaccccaaacaactcagcttcggggccggtgaggggaggggcctcccccagcacagatgaggagcagctggggtaggctgtctgtgccatggccccccactcccccttcccttggagggagaggtggcaggaatacttcacctttcctctccctcaggggcaggtggtggaggggcgcccagggtcgtctttgtgtatgggggaaggcgctgggtgcctgcagcgcctcccttgtctcagatggtgtgtccagcactcgattgttgtaaactgttgttttgtatgagcgaaattgtctttactaaacagatttaatagtt

SEQ ID NO: 322021 - DNA, 1944 bp, Homo sapiens
  misc_feature (16)..(16): n is a, c, g, or t
  misc_feature (19)..(19): n is a, c, g, or t
  misc_feature (26)..(26): n is a, c, g, or t
tcgcaggctggtacgnccngggtatntggatatcgtcgaccagggcgtcgcggacgcgtgggcagaggaagtgaagatgctcattcggaatctgctgaaaacagagcccacccagagaatgaccatcaccgagtttatgaaccacccttggatcatgcaatcaacaaaggtccctcaaaccccactgcacaccagccgggtcctgaaggaggacaaggagcggtgggaggatgtcaaggaggagatgaccagtgccttggccacaatgcgcgttgactacgagcagatcaagataaaaaagattgaagatgcatccaaccctctgctgctgaagaggcggaagaaagctcgggccctggaggctgcggctctggcccactgagccaccgcgccctcctgcccacgggaggacaagcaataactctctacaggaatatattttttaaacgaagagacagaactgtccacatctgcctcctctcctcctcagctgcatggagcctggaactgcatcagtgactgaattctgccttggttctggccaccccagagtgggagaggctgggaggttgggaggctgtggagagaagtgagcaaggtgctcttgaacctgtgctcattttgcaattttatcagtaatttgacttagagtttttacgaaacctcttttgttgtccttgccccactcctctccaccagacgccttcctctctggatactgcaaaggcttgtggtttgttagagggtatttgtggaaactgtcatagggattgtccctgtgttgtcccatctgccctccctgtttctccacaacagcctggggttgtccccgctggctcacgcgttctgggagctcaaggccaccttggaggaggatgccacgcacttcctctctcggagccctcagacatctccagtgtgccagacaaataggagtgagtgtatgtgtgtgtgtgtgtgtgtgtgtgtgcacacgtgtgtatgagtgcgcagatctgtgcctgggatcgtgcatttgaggggccagggcaggcagggctgcagagggagacggccctgctggggcttaggaaccttctcccttcttgggtctgccctgcccatactgagcctgccaaagtgcctgggaagcccacccagattctgaaacaggccctctgtggcctgtctctattagctgggttccgggaggcagagaggagtgaccgggcactggcactgcgatcaggaagactggacccccagcccccagggcccccctccccccacttagtgctggtcctaggtcctctgaggcactcatctactgaatgacctctctacttccccttcttgccattattaacccatttttgtttattttccttaaatttttagccatttctccatgggccaccgcccagctcatgtaggtgagcctgggcagcttctgttggcagagcttttgcatttcctgtgtttgtcctgggttctggggcatcagccagctaccccttgtgggcaaaggcagggccacttttgaagtcttccctcagatttccattgtgtggcctggtgggtcagggggagtctttgcaccaaagatgtcctgactttgcccccttgcccatcagccatttgccatcaccccaaacaactcagcttcggggccggtgaggggaggggcctcccccagcacagatgaggagcagctggggtaggctgtctgtgccatggccccccactcccccttcccttggagggagaggtggcaggaatacttcacctttcctctccctcaggggcaggtggtggaggggcgcccagggtcgtctttgtgtatgggggaaggcgctgggtgcctgcagcgcctcccttgtctcagatggtgtgtccagcactcgattgttgtaaactgttgttttgtatgagcgaaattgtctttactaaacagatttaatagtt

SEQ ID NO: 322022 - DNA, 2425 bp, Homo sapiens
gatatcacagcaacattgaaatgctaaaaagtttttaaacactctcaatttctaattcaccatgtcacagactggtgaaaaaaaaaaaaaaagcggccgcttccccccggccgggcccccgccgccccgcggtccccagagcgccaggcccccggggggagggagggagggcgccgggccggtgggagccagcggcgcgcggtgggacccacggagccccgcgacccgccgagcctggagccgggccggctcggggaagccggctccagcccggagcgaacttcgcagcccgtcggggggcggcggggagggggcccggagccggaggagggggcggccgcgggcacccccgcctgtgccccggcgtccccgggcaccatgctgtccaactcccagggccagagcccgccggtgccgttccccgccccggccccgccgccgcagccccccacccctgccctgccgcaccccccggcgcagccgccgccgccgcccccgcagcagttcccgcagttccacgtcaagtccggcctgcagatcaagaagaacgccatcatcgatgactacaaggtcaccagccaggtcctggggctgggcatcaacggcaaagttttgcagatcttcaacaagaggacccaggagaaattcgccctcaaaatgcttcaggactgccccaaggcccgcagggaggtggagctgcactggcgggcctcccagtgcccgcacatcgtacggatcgtggatgtgtacgagaatctgtacgcagggaggaagtgcctgctgattgtcatggaatgtttggacggtggagaactctttagccgaatccaggatcgaggagaccaggcattcacagaaagagaagcatccgaaatcatgaagagcatcggtgaggccatccagtatctgcattcaatcaacattgcccatcgggatgtcaagcctgagaatctcttatacacctccaaaaggcccaacgccatcctgaaactcactgactttggctttgccaaggaaaccaccagccacaactctttgaccactccttgttatacaccgtactatgtggctccagaagtgctgggtccagagaagtatgacaagtcctgtgacatgtggtccctgggtgtcatcatgtacatcctgctgtgtgggtatccccccttctactccaaccacggccttgccatctctccgggcatgaagactcgcatccgaatgggccagtatgaatttcccaacccagaatggtcagaagtatcagaggaagtgaagatgctcattcggaatctgctgaaaacagagcccacccagagaatgaccatcaccgagtttatgaaccacccttggatcatgcaatcaacaaaggtccctcaaaccccactgcacaccagccgggtcctgaaggaggacaaggagcggtgggaggatgtcaaggaggagatgaccagtgccttggccacaatgcgcgttgactacgagcagatcaagataaaaaagattgaagatgcatccaaccctctgctgctgaagaggcggaagaaagctcgggccctggaggctgcggctctggcccactgagccaccgcgccctcctgcccacgggaggacaagcaataactctctacaggaatatattttttaaacgaagagacagaactgtccacatctgcctcctctcctcctcagctgcatggagcctggaactgcatcagtgactgaattctgccttggttctggccaccccagagtgggagaggctgggaggttgggaggctgtggagagaagtgagcaaggtgctcttgaacctgtgctcattttgcaattttatcagtaatttgacttagagtttttacgaaacctcttttgttgtccttgccccactcctctccaccagacgccttcctctctggatactgcaaaggcttgtggtttgttagagggtatttgtggaaactgtcatagggattgtccctgtgttgtcccatctgccctccctgtttctccacaacagcctggggttgtccccgctggctcacgcgttctgggagctcaaggccaccttggaggaggatgccacgcacttcctctctcggagccctcagacatctccagtgtgccagacaaataggagtgagtgtatgtgtgtgtgtgtgtgtgtgtgtgtgcacacgtgtgtatgagtgcgcagatctgtgcctgggatcgtgcatttgaggggccagggcaggcagggctgcagagggagacggccctgctggggcttaggaaccttctcccttcttgggtctgccctgcccatactgagcctgccaaagtgcctgcagcgcctcccttgtctcagatggtgtgtccagcactcgattgttgtaaactgttgttttgtatgagcgaaattgtctttactaaacagatttaatagtt

SEQ ID NO: 322023 - DNA, 1909 bp, Homo sapiens
  misc_feature (1780)..(1780): n is a, c, g, or t
  misc_feature (1808)..(1808): n is a, c, g, or t
  misc_feature (1822)..(1822): n is a, c, g, or t
  misc_feature (1824)..(1824): n is a, c, g, or t
  misc_feature (1828)..(1828): n is a, c, g, or t
  misc_feature (1830)..(1830): n is a, c, g, or t
  misc_feature (1835)..(1835): n is a, c, g, or t
  misc_feature (1838)..(1838): n is a, c, g, or t
  misc_feature (1859)..(1859): n is a, c, g, or t
  misc_feature (1861)..(1861): n is a, c, g, or t
  misc_feature (1864)..(1865): n is a, c, g, or t
  misc_feature (1872)..(1872): n is a, c, g, or t
  misc_feature (1881)..(1881): n is a, c, g, or t
  misc_feature (1884)..(1884): n is a, c, g, or t
  misc_feature (1901)..(1902): n is a, c, g, or t
gatatcacagcaacattgaaatgctaaaaagtttttaaacactctcaatttctaattcaccatgtcacagactggtgaaaaaaaaaaaaaaagcggccgcttccccccggccgggcccccgccgccccgcggtccccagagcgccaggcccccggggggagggagggagggcgccgggccggtgggagccagcggcgcgcggtgggacccacggagccccgcgacccgccgagcctggagccgggccggctcggggaagccggctccagcccggagcgaacttcgcagcccgtcggggggcggcggggagggggcccggagccggaggagggggcggccgcgggcacccccgcctgtgccccggcgtccccgggcaccatgctgtccaactcccagggccagagcccgccggtgccgttccccgccccggccccgccgccgcagccccccacccctgccctgccgcaccccccggcgcagccgccgccgccgcccccgcagcagttcccgcagttccacgtcaagtccggcctgcagatcaagaagaacgccatcatcgatgactacaaggtcaccagccaggtcctggggctgggcatcaacggcaaagttttgcagatcttcaacaagaggacccaggagaaattcgccctcaaaatgcttcaggactgccccaaggcccgcagggaggtggagctgcactggcgggcctcccagtgcccgcacatcgtacggatcgtggatgtgtacgagaatctgtacgcagggaggaagtgcctgctgattgtcatggaatgtttggacggtggagaactctttagccgaatccaggatcgaggagaccaggcattcacagaaagagaagcatccgaaatcatgaagagcatcggtgaggccatccagtatctgcattcaatcaacattgcccatcgggatgtcaagcctgagaatctcttatacacctccaaaaggcccaacgccatcctgaaactcactgactttggctttgccaaggaaaccaccagccacaactctttgaccactccttgttatacaccgtactatgtggctccagaagtgctgggtccagagaagtatgacaagtcctgtgacatgtggtccctgggtgtcatcatgtacatcctgctgtgtgggtatccccccttctactccaaccacggccttgccatctctccgggcatgaagactcgcatccgaatgggccagtatgaatttcccaacccagaatggtcagaagtatcagaggaagtgaagatgctcattcggaatctgctgaaaacagagcccacccagagaatgaccatcaccgagtttatgaaccacccttggatcatgcaatcaacaaaggtccctcaaaccccactgcacaccagccgggtcctgaaggaggacaaggagcggtgggaggatgtcaagagaggagtgaccgggcactggcactgcgatcaggaagactggacccccagccccccccccagcacagatgaggagcagctggggtaggctgtctgtgccatggccccccactcccccttcccttggagggagaggtggcaggaatacttcacctttcctctccctcaggggcaggtggtggaggggcgcccagggtcgtctttgtgtatgggggaaggcgctgggtgcctgcagcgcctcccttgtctcagatggtgtgtccagcactcgattgttgtaaactgttgttttgtatgagcgaaattgtctttactaaacagatttaatagttaaaaaaaaaaanaaaaaaaaaaaaaaaaaaaaaaaaaaanagggggggggcgcntnttanantattnccnccgggggggccccaagtttgngnggnnacccggntttttggtnaanagagggggcccccaatnngggagag

SEQ ID NO: 322024 - DNA, 1001 bp, Homo sapiens
  misc_feature (872)..(872): n is a, c, g, or t
  misc_feature (900)..(900): n is a, c, g, or t
  misc_feature (914)..(914): n is a, c, g, or t
  misc_feature (916)..(916): n is a, c, g, or t
  misc_feature (920)..(920): n is a, c, g, or t
  misc_feature (922)..(922): n is a, c, g, or t
  misc_feature (927)..(927): n is a, c, g, or t
  misc_feature (930)..(930): n is a, c, g, or t
  misc_feature (951)..(951): n is a, c, g, or t
  misc_feature (953)..(953): n is a, c, g, or t
  misc_feature (956)..(957): n is a, c, g, or t
  misc_feature (964)..(964): n is a, c, g, or t
  misc_feature (973)..(973): n is a, c, g, or t
  misc_feature (976)..(976): n is a, c, g, or t
  misc_feature (993)..(994): n is a, c, g, or t
gatatcacagcaacattgaaatgctaaaaagtttttaaacactctcaatttctaattcaccatgtcacagactggtgaaaaaaaaaaaaaaagcggccgcttccccccggccgggcccccgccgccccgcggtccccagagcgccaggcccccggggggagggagggagggcgccgggccggtgggagccagcggcgcgcggtgggacccacggagccccgcgacccgccgagcctggagccgggccggctcggggaagccggctccagcccggagcgaacttcgcagcccgtcggggggcggcggggagggggcccggagccggaggagggggcggccgcgggcacccccgcctgtgccccggcgtccccgggcaccatgctgtccaactcccagggccagagcccgccggtgccgttccccgccccggccccgccgccgcagccccccacccctgccctgccgcaccccccggcgcagccgccgccgccgcccccgcagcagttcccgcagttccacgtcaagtccggcctgcagatcaagaagaacgccatcatcgatgactacaaggtcaccagccaggtcctggggctgggcatcaacggcaaagttttgcagatcttcaacaagaggcccccactcccccttcccttggagggagaggtggcaggaatacttcacctttcctctccctcaggggcaggtggtggaggggcgcccagggtcgtctttgtgtatgggggaaggcgctgggtgcctgcagcgcctcccttgtctcagatggtgtgtccagcactcgattgttgtaaactgttgttttgtatgagcgaaattgtctttactaaacagatttaatagttaaaaaaaaaaanaaaaaaaaaaaaaaaaaaaaaaaaaaanagggggggggcgcntnttanantattnccnccgggggggccccaagtttgngnggnnacccggntttttggtnaanagagggggcccccaatnngggagag

SEQ ID NO: 322025 - DNA, 501 bp, Homo sapiens
ggcttggaccaggaacaacatggtctgagagagctcatcccatgttccaaagggagattaaatgacaaattaagataccccaatattaaaacaacaacaataagatcttcctatctggagggtacagaggtgaatggctttggttttcatttctcttcttcactgccttttctcggtgtggtatttgacaagattttagctcaaagcctcaccatgaattgattttttttgtttgtgtgtgtgtttgttttgggacaattttagatacctgagtgcactttttcagttagtcctaacttttaaaagaaggaaaaccaagagacatatctggtgtacgtgttgcagtatgaactctggttgcaatccctccccctcccacactgccccccatttgagtacgccgcacaagtcaaacgctaggaagtttgaataaaaccaatttttctaacttgttgctcatttgttgtaactcaataaagcaaagactaaacatttttataa

SEQ ID NO: 322026 - DNA, 3588 bp, Homo sapiens
cttcaaagacggagcgtcccgttgatcagcacagcagttctaacagacttccctgtctaggcctggccagcctctgcagggacgcagtcggagtctgattcagccagttccgacacaccttctgccgcagcctgactctagctatctgatctatctgagatcgcatcctcctccccgaccgtcacctccacgtattccatcccggggaggccaacttcaagctgaagttaattaaacgcaataatcaaactgtcttggaacagtccatcgaaaccaccaaccatgtcgtgtccatcaccaccagtggccctggaactggtgacagtgattctgggatctcggtgagtaaaacccccatcatgaagcctggaaaaccaaaagcggatgccaagaaggtgcccaagaagcccgaggagatcacccccgagaaccacgtggaagggaccgcccgcctggtgacagacacagctgagatcctctcgagactcggcggggtggagctcctccaagacacattaggacacgtcatgccttctgtacagctgccaccaaatatcaaccttgtgcccaaggtccctgtcccactaaatactaccaaatacaactctgccctggatacaaatgccacgatgatcaactctttcaacaagtttccttacccgacccaggctgagttgtcctggctgacagctgcctccaaacacccagaggagcacatcagaatctggtttgccacccagcgcttaaagcatggcatcagctggtccccagaagaggtggaggaggcccggaagaagatgttcaacggcaccatccagtcagtacccccgaccatcactgtgctgcccgcccagttggcccccacaaaggtgacgcagcccatcctccagacggctctaccgtgccagatcctcggccagactagcctggtgctgactcaggtgaccagcgggtcaacaaccgtctcttgctcccccatcacacttgccgtggcaggagtcaccaaccatggccagaagagacccttggtgactccccaagctgcccccgaacccaagcgtccacacatcgctcaggtgccagagcccccacccaaggtggccaaccccccgctcacaccagccagtgaccgcaagaagacaaaggagcagatagcacatctcaaggccagctttctccagagccagttccctgacgatgccgaggtttaccggctcatcgaggtgactggccttgccaggagcgagatcaagaagtggttcagtgaccaccgatatcggtgtcaaaggggcatcgtccacatcaccagcgaatcccttgccaaagaccagttggccatcgcggcctcccgacacggtcgcacgtatcatgcgtacccagactttgccccccagaagttcaaagagaaaacacagggtcaggttaaaatcttggaagacagctttttgaaaagttcttttcctacccaagcagaactggatcggctaagggtggagaccaagctgagcaggagagagatcgactcctggttctcggagaggcggaagcttcgagacagcatggaacaagctgtcttggattccatggggtctggcaaaaaaggccaagatgtgggagcccccaatggtgctctgtctcgactcgaccagctctccggtgcccagttaacaagttctctgcccagcccttcgccagcaattgcaaaaagtcaagaacaggttcatctcctgaggagcacgtttgcaagaacccagtggcctactccccaggagtacgaccagttagcggccaagactggcctggtccgaactgagattgtgcgttggttcaaggagaacagatgcttgctgaaaacgggaaccgtgaagtggatggagcagtaccagcaccagcccatggcagatgatcacggctacgatgccgtagcaaggaaagcaacaaaacccatggccgagagcccaaagaacgggggtgatgtggttccacaatattacaaggaccccaaaaagctctgcgaagaggacttggagaagttggtgaccagggtaaaagtaggcagcgagccagcaaaagactgtttgccagcaaagccctcagaggccacctcagaccggtcagagggcagcagccgggacggccagggtagcgacgagaacgaggagtcgagcgttgtggattacgtggaggtgacggtcggggaggaggatgcgatctcagatagatcagatagctggagtcaggctgcggcagaaggtgtgtcggaactggctgaatcagactccgactgcgtccctgcagaggctggccaggcctagacagggaagtctgttagaactgctgtgctgatcaacgggacgctccgtctttgaagaaagaagagatggtctctccccagccatgggccacccttgccagtgactccaagtggaactacttagctcgcgtgtgcctggagggtgcgggaagtccagcgactctcagacgcacctcccagaggaccggtgggaattgttcatagtgccaaagtcctactactgcgttttcaatgggtccttgtacatagtttgctcctctgccctagccctcacctcttgctatactggaaccgatttgtacaatgtgggaattttgttacctttttaatcaagggcaacttccttttccagcactaccattgtaaggtttttttcaggagggagggctaaccaccttgcttttctcttttctctttttcttttttttatttttgttttattaatttggggaaaggggtgttagcattagtgccatgatatctactggattttaagtagggagactttatttttaaaggtaggttgaaatttgggagatttctcggcaggaagggctgaaatccaggcccctgtctcaacttggagagaggtgacagacggcagatcttccaaatcaaattcctttccagttcttcccctggctgcctttttgggggtccctgccttagccccacacaaggctttctgaactgccaagaggggatctggcttctcaactgctcggcctcttgggcagggctgtgcccagccagccctgggagaactgggtagcaggtggctgacttctttaagcacctttctaaataccagcagaagaggctcccgcctctgttagcatgatcagtactattgtgacattaaaacaacaacaataagatcttcctatctggagggtacagaggtgaatggctttggttttcatttctcttcttcactgccttttctcggtgtggtatttgacaagattttagctcaaagcctcaccatgaattgattttttttgtttgtgtgtgtgtttgttttgggacaattttagatacctgagtgcactttttcagttagtcctaacttttaaaagaaggaaaaccaagagacatatctggtgtacgtgttgcagtatgaactctggttgcaatccctccccctcccacactgccccccatttgagtacgccgcacaagtcaaacgctaggaagtttgaataaaaccaatttttctaacttgttgctcatttgttgtaactcaataaagcaaagactaaacatttttataa

SEQ ID NO: 322027 - DNA, 3581 bp, Homo sapiens
tagtacccacactaatcatcatcacacgctgaggaaaccaaacagaacgactcaatgcaggactttatttcctattctacaccctagcaggatccctaccactgctggtagcactagtttatatccaaaacaccacaggctcactaaacttcttaattatccatccctatccgaccacaactccaagttccatcccggggaggccaacttcaagctgaagttaattaaacgcaataatcaaactgtcttggaacagtccatcgaaaccaccaaccatgtcgtgtccatcaccaccagtggccctggaactggtgacagtgattctgggatctcggtgagtaaaacccccatcatgaagcctggaaaaccaaaagcggatgccaagaaggtgcccaagaagcccgaggagatcacccccgagaaccacgtggaagggaccgcccgcctggtgacagacacagctgagatcctctcgagactcggcggggtggagctcctccaagacacattaggacacgtcatgccttctgtacagctgccaccaaatatcaaccttgtgcccaaggtccctgtcccactaaatactaccaaatacaactctgccctggatacaaatgccacgatgatcaactctttcaacaagtttccttacccgacccaggctgagttgtcctggctgacagctgcctccaaacacccagaggagcacatcagaatctggtttgccacccagcgcttaaagcatggcatcagctggtccccagaagaggtggaggaggcccggaagaagatgttcaacggcaccatccagtcagtacccccgaccatcactgtgctgcccgcccagttggcccccacaaaggtgacgcagcccatcctccagacggctctaccgtgccagatcctcggccagactagcctggtgctgactcaggtgaccagcgggtcaacaaccgtctcttgctcccccatcacacttgccgtggcaggagtcaccaaccatggccagaagagacccttggtgactccccaagctgcccccgaacccaagcgtccacacatcgctcaggtgccagagcccccacccaaggtggccaaccccccgctcacaccagccagtgaccgcaagaagacaaaggagcagatagcacatctcaaggccagctttctccagagccagttccctgacgatgccgaggtttaccggctcatcgaggtgactggccttgccaggagcgagatcaagaagtggttcagtgaccaccgatatcggtgtcaaaggggcatcgtccacatcaccagcgaatcccttgccaaagaccagttggccatcgcggcctcccgacacggtcgcacgtatcatgcgtacccagactttgccccccagaagttcaaagagaaaacacagggtcaggttaaaatcttggaagacagctttttgaaaagttcttttcctacccaagcagaactggatcggctaagggtggagaccaagctgagcaggagagagatcgactcctggttctcggagaggcggaagcttcgagacagcatggaacaagctgtcttggattccatggggtctggcaaaaaaggccaagatgtgggagcccccaatggtgctctgtctcgactcgaccagctctccggtgcccagttaacaagttctctgcccagcccttcgccagcaattgcaaaaagtcaagaacaggttcatctcctgaggagcacgtttgcaagaacccagtggcctactccccaggagtacgaccagttagcggccaagactggcctggtccgaactgagattgtgcgttggttcaaggagaacagatgcttgctgaaaacgggaaccgtgaagtggatggagcagtaccagcaccagcccatggcagatgatcacggctacgatgccgtagcaaggaaagcaacaaaacccatggccgagagcccaaagaacgggggtgatgtggttccacaatattacaaggaccccaaaaagctctgcgaagaggacttggagaagttggtgaccagggtaaaagtaggcagcgagccagcaaaagactgtttgccagcaaagccctcagaggccacctcagaccggtcagagggcagcagccgggacggccagggtagcgacgagaacgaggagtcgagcgttgtggattacgtggaggtgacggtcggggaggaggatgcgatctcagatagatcagatagctggagtcaggctgcggcagaaggtgtgtcggaactggctgaatcagactccgactgcgtccctgcagaggctggccaggcctagacagggaagtctgttagaactgctgtgctgatcaacgggacgctccgtctttgaagaaagaagagatggtctctccccagccatgggccacccttgccagtgactccaagtggaactacttagctcgcgtgtgcctggagggtgcgggaagtccagcgactctcagacgcacctcccagaggaccggtgggaattgttcatagtgccaaagtcctactactgcgttttcaatgggtccttgtacatagtttgctcctctgccctagccctcacctcttgctatactggaaccgatttgtacaatgtgggaattttgttacctttttaatcaagggcaacttccttttccagcactaccattgtaaggtttttttcaggagggagggctaaccaccttgcttttctcttttctctttttcttttttttatttttgttttattaatttggggaaaggggtgttagcattagtgccatgatatctactggattttaagtagggagactttatttttaaaggtaggttgaaatttgggagatttctcggcaggaagggctgaaatccaggcccctgtctcaacttggagagaggtgacagacggcagatcttccaaatcaaattcctttccagttcttcccctggctgcctttttgggggtccctgccttagccccacacaaggctttctgaactgccaagaggggatctggcttctcaactgctcggcctcttgggcagggctgtgcccagccagccctgggagaactgggtagcaggtggctgacttctttaagcacctttctaaataccagcagaagaggctcccgcctctgttagcatgatcagtactattgtgacattaaaacaacaacaataagatcttcctatctggagggtacagaggtgaatggctttggttttcatttctcttcttcactgccttttctcggtgtggtatttgacaagattttagctcaaagcctcaccatgaattgattttttttgtttgtgtgtgtgtttgttttgggacaattttagatacctgagtgcactttttcagttagtcctaacttttaaaagaaggaaaaccaagagacatatctggtgtacgtgttgcagtatgaactctggttgcaatccctccccctcccacactgccccccatttgagtacgccgcacaagtcaaacgctaggaagtttgaataaaaccaatttttctaacttgttgctcatttgttgtaactcaataaagcaaagactaaacatttttataa

SEQ ID NO: 322028 - DNA, 1753 bp, Homo sapiens
tgctagtgtcatccctgttatacagaagcaaaaactaagccctagagtgatcaagtcctataggtacagccctgcagccactaaggggagaagttaggacccaaatccagatttgtctgactccagggccttttaggagccactgggactggttgactttctaggaataataaaagggtcttgtaaggatgaaaagaatcacaggccaccaccttcacttgcccagaaagtcactctgttttcaaaggcctgattctggaggcttttcctattatggcggactgtgctcagaaaacacactcgtttctttacaacaggccccgtacatgaagggcatgtgtctctcttccaagccccaggatgactttggaaggcccccaccccaacccaggagagccaggaagaagcaaaccatgatgccttccccccagggaacaatggtcatttgcctgacatcttgactctgtggttttgtgtcttctagggaagtctgttagaactgctgtgctgatcaacgggacgctccgtctttgaagaaagaagagatggtctctccccagccatgggccacccttgccagtgactccaagtggaactacttagctcgcgtgtgcctggagggtgcgggaagtccagcgactctcagacgcacctcccagaggaccggtgggaattgttcatagtgccaaagtcctactactgcgttttcaatgggtccttgtacatagtttgctcctctgccctagccctcacctcttgctatactggaaccgatttgtacaatgtgggaattttgttacctttttaatcaagggcaacttccttttccagcactaccattgtaaggtttttttcaggagggagggctaaccaccttgcttttctcttttctctttttcttttttttatttttgttttattaatttggggaaaggggtgttagcattagtgccatgatatctactggattttaagtagggagactttatttttaaaggtaggttgaaatttgggagatttctcggcaggaagggctgaaatccaggcccctgtctcaacttggagagaggtgacagacggcagatcttccaaatcaaattcctttccagttcttcccctggctgcctttttgggggtccctgccttagccccacacaaggctttctgaactgccaagaggggatctggcttctcaactgctcggcctcttgggcagggctgtgcccagccagccctgggagaactgggtagcaggtggctgacttctttaagcacctttctaaataccagcagaagaggctcccgcctctgttagcatgatcagtactattgtgacattaaaacaacaacaataagatcttcctatctggagggtacagaggtgaatggctttggttttcatttctcttcttcactgccttttctcggtgtggtatttgacaagattttagctcaaagcctcaccatgaattgattttttttgtttgtgtgtgtgtttgttttgggacaattttagatacctgagtgcactttttcagttagtcctaacttttaaaagaaggaaaaccaagagacatatctggtgtacgtgttgcagtatgaactctggttgcaatccctccccctcccacactgccccccatttgagtacgccgcacaagtcaaacgctaggaagtttgaataaaaccaatttttctaacttgttgctcatttgttgtaactcaataaagcaaagactaaacatttttataa

SEQ ID NO: 322029 - DNA, 3562 bp, Homo sapiens
cggccgccgcgcggggtcgtgcttaatattcaatgatctcgctcgcgcctccccctcctcttctcgcagaaattccaccgagtccgttactgggctcagacttttaagttaatttactgcccccctaccttggccagtaaccagcgcctttagggctagcctcccccccagctcctgcctgaaaaatgacatttcgccggtgtctccggagggggctgaatttcactttgtaactttctgcggaacccgagcccgggtggcagctcgggtggtggtatcgtatgcaaatacgcatgctgacgttacagatcatgtgggttttggcgtagattccccactgatcgaggcattttttttccctttttttttcctttttttttttcttttaaaaattttggccaccgttctccgtacgggggctttttctgtctgtctgtctggctggcaggctggctttccccctctttcccacggagcccgagccgggcgcccggtggggagtggggagtgggtggggggagccagcagagttccattttggaacgcccgtgccgcgtctccgcgttcccagcccgggtccccgcgttcacagccccagcgcaggtctggatgtaccgactgcttttggaataaaaagattcccaggatgtgagcaacacgggaccgatatgatgcttcctggtgtgtttagtggttggtgccattccaattttctgtgctgaaatcattctgaaaactcaaacagtagacttcagcacacaaggaaagccaaagccatttgagggggaataaagccaaaagcctttcaccttattcgttccaagaatctcaccgccccctccttatccccctccaaaaataagccattgcacacagacaggcagcatggctagcaaacgaaaatctacaactccatgcatggttcggacatcacaagtagtagaacaagatgtgcccgaggaagtagacagggccaaagagaaaggaatcggcacaccacagcctgacgtggccaaggacagttgggcagcagaacttgaaaactcttccaaagaaaacgaagtgatagaggtgaaatctatgggggaaagccagtccaaaaaactccaaggtggttatgagtgcaaatactgcccctactccacgcaaaacctgaacgagttcacggagcatgtcgacatgcagcatcccaacgtgattctcaaccccctctacgtgtgtgcagaatgtaacttcacaaccaaaaagtacgactccctatccgaccacaactccaagttccatcccggggaggccaacttcaagctgaagttaattaaacgcaataatcaaactgtcttggaacagtccatcgaaaccaccaaccatgtcgtgtccatcaccaccagtggccctggaactggtgacagtgattctgggatctcggtgagtaaaacccccatcatgaagcctggaaaaccaaaagcggatgccaagaaggtgcccaagaagcccgaggagatcacccccgagaaccacgtggaagggaccgcccgcctggtgacagacacagctgagatcctctcgagactcggcggggtggagctcctccaagacacattaggacacgtcatgccttctgtacagctgccaccaaatatcaaccttgtgcccaaggtccctgtcccactaaatactaccaaatacaactctgccctggatacaaatgccacgatgatcaactctttcaacaagtttccttacccgacccaggctgagttgtcctggctgacagctgcctccaaacacccagaggagcacatcagaatctggtttgccacccagcgcttaaagcatggcatcagctggtccccagaagaggtggaggaggcccggaagaagatgttcaacggcaccatccagtcagtacccccgaccatcactgtgctgcccgcccagttggcccccacaaaggtgacgcagcccatcctccagacggctctaccgtgccagatcctcggccagactagcctggtgctgactcaggtgaccagcgggtcaacaaccgtctcttgctcccccatcacacttgccgtggcaggagtcaccaaccatggccagaagagacccttggtgactccccaagctgcccccgaacccaagcgtccacacatcgctcaggtgccagagcccccacccaaggtggccaaccccccgctcacaccagccagtgaccgcaagaagacaaaggagcagatagcacatctcaaggccagctttctccagagccagttccctgacgatgccgaggtttaccggctcatcgaggtgactggccttgccaggagcgagatcaagaagtggttcagtgaccaccgatatcggtgtcaaaggggcatcgtccacatcaccagcgaatcccttgccaaagaccagttggccatcgcggcctcccgacacggtcgcacgtatcatgcgtacccagactttgccccccagaagttcaaagagaaaacacagggtcaggttaaaatcttggaagacagctttttgaaaagttcttttcctacccaagcagaactggatcggctaagggtggagaccaagctgagcaggagagagatcgactcctggttctcggagaggcggaagcttcgagacagcatggaacaagctgtcttggattccatggggtctggcaaaaaaggccaagatgtgggagcccccaatggtgctctgtctcgactcgaccagctctccggtgcccagttaacaagttctctgcccagcccttcgccagcaattgcaaaaagtcaagaacaggttcatctcctgaggagcacgtttgcaagaacccagtggcctactccccaggagtacgaccagttagcggccaagactggcctggtccgaactgagattgtgcgttggttcaaggagaacagatgcttgctgaaaacgggaaccgtgaagtggatggagcagtaccagcaccagcccatggcagatgatcacggctacgatgccgtagcaaggaaagcaacaaaacccatggccgagagcccaaagaacgggggtgatgtggttccacaatattacaaggaccccaaaaagctctgcgaagaggacttggagaagttggtgaccagggtaaaagtaggcagcgagccagcaaaagactgtttgccagcaaagccctcagaggccacctcagaccggtcagagggcagcagccgggacggccagggtagcgacgagaacgaggagtcgagcgttgtggattacgtggaggtgacggtcggggaggaggatgcgatctcagatagatcagatagctggagtcaggctgcggcagaaggtgtgtcggaactggctgaatcagactccgactgcgtccctgcagaggctggccaggcctagacaggtaattccacctgctcacccaggcagcaggggagaacgcagcttgctttcttttcgttgccagggttaatatagattgtagggtacagagatgttgacacagatggtggcgtctttttcttgtaattaacaaataagaatgatgtatattgatcacata

SEQ ID NO: 322030 - DNA, 4672 bp, Homo sapiens
cggccgccgcgcggggtcgtgcttaatattcaatgatctcgctcgcgcctccccctcctcttctcgcagaaattccaccgagtccgttactgggctcagacttttaagttaatttactgcccccctaccttggccagtaaccagcgcctttagggctagcctcccccccagctcctgcctgaaaaatgacatttcgccggtgtctccggagggggctgaatttcactttgtaactttctgcggaacccgagcccgggtggcagctcgggtggtggtatcgtatgcaaatacgcatgctgacgttacagatcatgtgggttttggcgtagattccccactgatcgaggcattttttttccctttttttttcctttttttttttcttttaaaaattttggccaccgttctccgtacgggggctttttctgtctgtctgtctggctggcaggctggctttccccctctttcccacggagcccgagccgggcgcccggtggggagtggggagtgggtggggggagccagcagagttccattttggaacgcccgtgccgcgtctccgcgttcccagcccgggtccccgcgttcacagccccagcgcaggtctggatgtaccgactgcttttggaataaaaagattcccaggatgtgagcaacacgggaccgatatgatgcttcctggtgtgtttagtggttggtgccattccaattttctgtgctgaaatcattctgaaaactcaaacagtagacttcagcacacaaggaaagccaaagccatttgagggggaataaagccaaaagcctttcaccttattcgttccaagaatctcaccgccccctccttatccccctccaaaaataagccattgcacacagacaggcagcatggctagcaaacgaaaatctacaactccatgcatggttcggacatcacaagtagtagaacaagatgtgcccgaggaagtagacagggccaaagagaaaggaatcggcacaccacagcctgacgtggccaaggacagttgggcagcagaacttgaaaactcttccaaagaaaacgaagtgatagaggtgaaatctatgggggaaagccagtccaaaaaactccaaggtggttatgagtgcaaatactgcccctactccacgcaaaacctgaacgagttcacggagcatgtcgacatgcagcatcccaacgtgattctcaaccccctctacgtgtgtgcagaatgtaacttcacaaccaaaaagtacgactccctatccgaccacaactccaagttccatcccggggaggccaacttcaagctgaagttaattaaacgcaataatcaaactgtcttggaacagtccatcgaaaccaccaaccatgtcgtgtccatcaccaccagtggccctggaactggtgacagtgattctgggatctcggtgagtaaaacccccatcatgaagcctggaaaaccaaaagcggatgccaagaaggtgcccaagaagcccgaggagatcacccccgagaaccacgtggaagggaccgcccgcctggtgacagacacagctgagatcctctcgagactcggcggggtggagctcctccaagacacattaggacacgtcatgccttctgtacagctgccaccaaatatcaaccttgtgcccaaggtccctgtcccactaaatactaccaaatacaactctgccctggatacaaatgccacgatgatcaactctttcaacaagtttccttacccgacccaggctgagttgtcctggctgacagctgcctccaaacacccagaggagcacatcagaatctggtttgccacccagcgcttaaagcatggcatcagctggtccccagaagaggtggaggaggcccggaagaagatgttcaacggcaccatccagtcagtacccccgaccatcactgtgctgcccgcccagttggcccccacaaaggtgacgcagcccatcctccagacggctctaccgtgccagatcctcggccagactagcctggtgctgactcaggtgaccagcgggtcaacaaccgtctcttgctcccccatcacacttgccgtggcaggagtcaccaaccatggccagaagagacccttggtgactccccaagctgcccccgaacccaagcgtccacacatcgctcaggtgccagagcccccacccaaggtggccaaccccccgctcacaccagccagtgaccgcaagaagacaaaggagcagatagcacatctcaaggccagctttctccagagccagttccctgacgatgccgaggtttaccggctcatcgaggtgactggccttgccaggagcgagatcaagaagtggttcagtgaccaccgatatcggtgtcaaaggggcatcgtccacatcaccagcgaatcccttgccaaagaccagttggccatcgcggcctcccgacacggtcgcacgtatcatgcgtacccagactttgccccccagaagttcaaagagaaaacacagggtcaggttaaaatcttggaagacagctttttgaaaagttcttttcctacccaagcagaactggatcggctaagggtggagaccaagctgagcaggagagagatcgactcctggttctcggagaggcggaagcttcgagacagcatggaacaagctgtcttggattccatggggtctggcaaaaaaggccaagatgtgggagcccccaatggtgctctgtctcgactcgaccagctctccggtgcccagttaacaagttctctgcccagcccttcgccagcaattgcaaaaagtcaagaacaggttcatctcctgaggagcacgtttgcaagaacccagtggcctactccccaggagtacgaccagttagcggccaagactggcctggtccgaactgagattgtgcgttggttcaaggagaacagatgcttgctgaaaacgggaaccgtgaagtggatggagcagtaccagcaccagcccatggcagatgatcacggctacgatgccgtagcaaggaaagcaacaaaacccatggccgagagcccaaagaacgggggtgatgtggttccacaatattacaaggaccccaaaaagctctgcgaagaggacttggagaagttggtgaccagggtaaaagtaggcagcgagccagcaaaagactgtttgccagcaaagccctcagaggccacctcagaccggtcagagggcagcagccgggacggccagggtagcgacgagaacgaggagtcgagcgttgtggattacgtggaggtgacggtcggggaggaggatgcgatctcagatagatcagatagctggagtcaggctgcggcagaaggtgtgtcggaactggctgaatcagactccgactgcgtccctgcagaggctggccaggcctagacagggaagtctgttagaactgctgtgctgatcaacgggacgctccgtctttgaagaaagaagagatggtctctccccagccatgggccacccttgccagtgactccaagtggaactacttagctcgcgtgtgcctggagggtgcgggaagtccagcgactctcagacgcacctcccagaggaccggtgggaattgttcatagtgccaaagtcctactactgcgttttcaatgggtccttgtacatagtttgctcctctgccctagccctcacctcttgctatactggaaccgatttgtacaatgtgggaattttgttacctttttaatcaagggcaacttccttttccagcactaccattgtaaggtttttttcaggagggagggctaaccaccttgcttttctcttttctctttttcttttttttatttttgttttattaatttggggaaaggggtgttagcattagtgccatgatatctactggattttaagtagggagactttatttttaaaggtaggttgaaatttgggagatttctcggcaggaagggctgaaatccaggcccctgtctcaacttggagagaggtgacagacggcagatcttccaaatcaaattcctttccagttcttcccctggctgcctttttgggggtccctgccttagccccacacaaggctttctgaactgccaagaggggatctggcttctcaactgctcggcctcttgggcagggctgtgcccagccagccctgggagaactgggtagcaggtggctgacttctttaagcacctttctaaataccagcagaagaggctcccgcctctgttagcatgatcagtactattgtgacattaaaacaacaacaataagatcttcctatctggagggtacagaggtgaatggctttggttttcatttctcttcttcactgccttttctcggtgtggtatttgacaagattttagctcaaagcctcaccatgaattgattttttttgtttgtgtgtgtgtttgttttgggacaattttagatacctgagtgcactttttcagttagtcctaacttttaaaagaaggaaaaccaagagacatatctggtgtacgtgttgcagtatgaactctggttgcaatccctccccctcccacactgccccccatttgagtacgccgcacaagtcaaacgctaggaagtttgaataaaaccaatttttctaacttgttgctcatttgttgtaactcaataaagcaaagactaaacatttttataa

SEQ ID NO: 322031 - DNA, 3232 bp, Homo sapiens
cgagctcaatcttgtccttgcatattgtacctgtgtaaattgtgtccgaaacccgaggagatcacccccgagaaccacgtggaagggaccgcccgcctggtgacagacacagctgagatcctctcgagactcggcggggtggagctcctccaagacacattaggacacgtcatgccttctgtacagctgccaccaaatatcaaccttgtgcccaaggtccctgtcccactaaatactaccaaatacaactctgccctggatacaaatgccacgatgatcaactctttcaacaagtttccttacccgacccaggctgagttgtcctggctgacagctgcctccaaacacccagaggagcacatcagaatctggtttgccacccagcgcttaaagcatggcatcagctggtccccagaagaggtggaggaggcccggaagaagatgttcaacggcaccatccagtcagtacccccgaccatcactgtgctgcccgcccagttggcccccacaaaggtgacgcagcccatcctccagacggctctaccgtgccagatcctcggccagactagcctggtgctgactcaggtgaccagcgggtcaacaaccgtctcttgctcccccatcacacttgccgtggcaggagtcaccaaccatggccagaagagacccttggtgactccccaagctgcccccgaacccaagcgtccacacatcgctcaggtgccagagcccccacccaaggtggccaaccccccgctcacaccagccagtgaccgcaagaagacaaaggagcagatagcacatctcaaggccagctttctccagagccagttccctgacgatgccgaggtttaccggctcatcgaggtgactggccttgccaggagcgagatcaagaagtggttcagtgaccaccgatatcggtgtcaaaggggcatcgtccacatcaccagcgaatcccttgccaaagaccagttggccatcgcggcctcccgacacggtcgcacgtatcatgcgtacccagactttgccccccagaagttcaaagagaaaacacagggtcaggttaaaatcttggaagacagctttttgaaaagttcttttcctacccaagcagaactggatcggctaagggtggagaccaagctgagcaggagagagatcgactcctggttctcggagaggcggaagcttcgagacagcatggaacaagctgtcttggattccatggggtctggcaaaaaaggccaagatgtgggagcccccaatggtgctctgtctcgactcgaccagctctccggtgcccagttaacaagttctctgcccagcccttcgccagcaattgcaaaaagtcaagaacaggttcatctcctgaggagcacgtttgcaagaacccagtggcctactccccaggagtacgaccagttagcggccaagactggcctggtccgaactgagattgtgcgttggttcaaggagaacagatgcttgctgaaaacgggaaccgtgaagtggatggagcagtaccagcaccagcccatggcagatgatcacggctacgatgccgtagcaaggaaagcaacaaaacccatggccgagagcccaaagaacgggggtgatgtggttccacaatattacaaggaccccaaaaagctctgcgaagaggacttggagaagttggtgaccagggtaaaagtaggcagcgagccagcaaaagactgtttgccagcaaagccctcagaggccacctcagaccggtcagagggcagcagccgggacggccagggtagcgacgagaacgaggagtcgagcgttgtggattacgtggaggtgacggtcggggaggaggatgcgatctcagatagatcagatagctggagtcaggctgcggcagaaggtgtgtcggaactggctgaatcagactccgactgcgtccctgcagaggctggccaggcctagacagggaagtctgttagaactgctgtgctgatcaacgggacgctccgtctttgaagaaagaagagatggtctctccccagccatgggccacccttgccagtgactccaagtggaactacttagctcgcgtgtgcctggagggtgcgggaagtccagcgactctcagacgcacctcccagaggaccggtgggaattgttcatagtgccaaagtcctactactgcgttttcaatgggtccttgtacatagtttgctcctctgccctagccctcacctcttgctatactggaaccgatttgtacaatgtgggaattttgttacctttttaatcaagggcaacttccttttccagcactaccattgtaaggtttttttcaggagggagggctaaccaccttgcttttctcttttctctttttcttttttttatttttgttttattaatttggggaaaggggtgttagcattagtgccatgatatctactggattttaagtagggagactttatttttaaaggtaggttgaaatttgggagatttctcggcaggaagggctgaaatccaggcccctgtctcaacttggagagaggtgacagacggcagatcttccaaatcaaattcctttccagttcttcccctggctgcctttttgggggtccctgccttagccccacacaaggctttctgaactgccaagaggggatctggcttctcaactgctcggcctcttgggcagggctgtgcccagccagccctgggagaactgggtagcaggtggctgacttctttaagcacctttctaaataccagcagaagaggctcccgcctctgttagcatgatcagtactattgtgacattaaaacaacaacaataagatcttcctatctggagggtacagaggtgaatggctttggttttcatttctcttcttcactgccttttctcggtgtggtatttgacaagattttagctcaaagcctcaccatgaattgattttttttgtttgtgtgtgtgtttgttttgggacaattttagatacctgagtgcactttttcagttagtcctaacttttaaaagaaggaaaaccaagagacatatctggtgtacgtgttgcagtatgaactctggttgcaatccctccccctcccacactgccccccatttgagtacgccgcacaagtcaaacgctaggaagtttgaataaaaccaatttttctaacttgttgctcatttgttgtaactcaataaagcaaagactaaacatttttataa

SEQ ID NO: 322032 - DNA, 1453 bp, Homo sapiens
cggccgccgcgcggggtcgtgcttaatattcaatgatctcgctcgcgcctccccctcctcttctcgcagaaattccaccgagtccgttactgggctcagacttttaagttaatttactgcccccctaccttggccagtaaccagcgcctttagggctagcctcccccccagctcctgcctgaaaaatgacatttcgccggtgtctccggagggggctgaatttcactttgtaactttctgcggaacccgagcccgggtggcagctcgggtggtggtatcgtatgcaaatacgcatgctgacgttacagatcatgtgggttttggcgtagattccccactgatcgaggcattttttttccctttttttttcctttttttttttcttttaaaaattttggccaccgttctccgtacgggggctttttctgtctgtctgtctggctggcaggctggctttccccctctttcccacggagcccgagccgggcgcccggtggggagtggggagtgggtggggggagccagcagagttccattttggaacgcccgtgccgcgtctccgcgttcccagcccgggtccccgcgttcacagccccagcgcaggtctggatgtaccgactgcttttggaataaaaagattcccaggatgtgagcaacacgggaccgatatgatgcttcctggtgtgtttagtggttggtgccattccaattttctgtgctgaaatcattctgaaaactcaaacagtagacttcagcacacaaggaaagccaaagccatttgagggggaataaagccaaaagcctttcaccttattcgttccaagaatctcaccgccccctccttatccccctccaaaaataagccattgcacacagacaggcagcatggctagcaaacgaaaatctacaactccatgcatggttcggacatcacaagtagtagaacaagatgtgcccgaggaagtagacagggccaaagagaaaggaatcggcacaccacagcctgacgtggccaaggacagttgggcagcagaacttgaaaactcttccaaagaaaacgaagtgatagaggtgaaatctatgggggaaagccagtccaaaaaactccaaggtggttatgagtgcaaatactgcccctactccacgcaaaacctgaacgagttcacggagcatgtcgacatgcagcatcccaacgtgattctcaaccccctctacgtgtgtgcagaatgtaacttcacaaccaaaaagtacgactccctatccgaccacaactccaagttccatcccggggaggccaacttcaagctgaagttaattaaacgcaataatcaaactgtcttggaacagtccatcgaaaccaccaaccagatgtgtcctctctacatgcgagatggcgtgtctgagccacggaattgcgtggggactttgcctagatcccacgactggtccgtag

SEQ ID NO: 322033 - DNA, 567 bp, Homo sapiens
aggaggaggccccgtcgcggccttcgccgccgccaacggggctgtccctgtagctcccgatggagtttgaggtcgtgaaacctccgccgagctctgccccggcgagacgaggcgcctccgtcgccaagccgcgccgtcgcggggctcccgggagcggcccttagcgaccccgcccgggccccctcaggtgtagctagcttgaaccagagtgcactgagccgtccaatgcaaaggaaactggtgacacttgtaaactgtcaactggtggaggaagaaggtcgtgtaagagccatgcgagcagctcgttcccttggagaaagaactgtaacagaactgatattacagcaccagaaccctcagcagttgtctgccaatctatgggccgctgtcagggctcgaggatgccagtttttagggccaggtaagataggttactatcttaccttttttattagctattggggcttgaggatgccaatttctggagctcggtgaatcctgagactcaacccgtctttatatgtacaaatcttgatataattaaagataaatttgtttttgttgttg

SEQ ID NO: 322034 - DNA, 388 bp, Homo sapiens
aggaggaggccccgtcgcggccttcgccgccgccaacggggctgtccctgtagctcccgatggagtttgaggtcgtgaaacctccgccgagctctgccccggcgagacgaggcgcctccgtcgccaagccgcgccgtcgcggggctcccgggagcggcccttagcgaccccgcccgggccccctcagcttacaaaacactacacagcaaaataatgatctgctagactgctaacccgagcatccagcttccacaatgcctgtgcaggcagctcaatggacagaatttctgtcctgtccaatctgctataatgaatcggcatcgcgggagctggatgccctggaccgcggctgttcaccacctgacgcgagcacctgcctaatgcatcg

SEQ ID NO: 322035 - DNA, 4860 bp, Homo sapiens
aggaggaggccccgtcgcggccttcgccgccgccaacggggctgtccctgtagctcccgatggagtttgaggtcgtgaaacctccgccgagctctgccccggcgagacgaggcgcctccgtcgccaagccgcgccgtcgcggggctcccgggagcggcccttagcgaccccgcccgggccccctcagcttacaaaacactacacagcaaaataatgatctgctagactgctaacccgagcatccagcttccacaatgcctgtgcaggcagctcaatggacagaatttctgtcctgtccaatctgctataatgaatttgatgagaatgtgcacaaacccatcagtttaggttgttcacacactgtttgcaagacctgcttgaataaacttcatcgaaaagcttgtccttttgaccagactgccatcaacacagatattgatgtacttcctgtcaacttcgcacttctccagttagttggagcccaggtaccagatcatcagtcaattaagttaagtaatctaggtgagaataaacactatgaggttgcaaagaaatgcgttgaggatttggcactctacttaaaaccactaagtggaggtaaaggtgtagctagcttgaaccagagtgcactgagccgtccaatgcaaaggaaactggtgacacttgtaaactgtcaactggtggaggaagaaggtcgtgtaagagccatgcgagcagctcgttcccttggagaaagaactgtaacagaactgatattacagcaccagaaccctcagcagttgtctgccaatctatgggccgctgtcagggctcgaggatgccagtttttagggccagctatgcaagaagaggccttgaagctggtgttactggcattagaagatggttctgccctctcaaggaaagttctggtactttttgttgtgcagagactagaaccaagatttcctcaggcatcaaaaacaagtattggtcatgttgtgcaactactgtatcgagcttcttgttttaaggttaccaaaagagatgaagactcttccctaatgcagctgaaggaggaatttcggagttatgaagcattacgcagagaacatgatgcccaaattgttcatattgccatggaagcaggactccgtatttcacctgaacagtggtcctctcttttgtatggtgatttggctcataaatcacacatgcagtctatcattgataagctacagtctccagagtcatttgcaaagagtgtccaggaattgacaattgttttgcaacgaacaggtgacccagctaacttaaatagactgaggcctcatttagagcttcttgcaaacatagaccctaatccagacgctgtttcaccaacttgggagcagctggaaaatgcaatggtagctgttaaaacagtagttcatggccttgtggacttcatacaaaattatagtagaaaaggccatgagacccctcagcctcagccaaacagcaaatacaagactagcatgtgccgagatttgcgacagcaagggggttgtccacgaggaacaaattgtacatttgcccattctcaggaagagcttgaaaagtatcgattaaggaacaaaaagatcaatgccactgtaagaacgtttcctcttctaaataaagttggtgtaaacaacactgtcacaaccacagccggaaatgtcatttctgtcataggaagtactgaaacaacagggaaaattgttccaagtacaaacggaatttcaaatgcagaaaacagtgtttcccagctaatctcacgtagtactgacagtaccttaagagctctggagaccgtgaagaaagtgggaaaggttggcgctaatggtcagaatgctgctgggccctctgcagattctgtaactgaaaataaaattggttctccacccaagactcctgtaagtaatgtagcagctacctcagctgggccctctaatgttggaacagagctgaattctgtgcctcaaaaatccagcccatttctaactagagtaccagtatatcctccgcattctgaaaacattcagtattttcaagatccaaggactcagataccctttgaagtcccacagtacccacagacaggatactatccaccacctccaacggtaccagctggtgtggctccctgtgttcctcgctttgtgaggtccaataacgttccagagtcctccctcccacctgcttccatgccatatgccgatcattacagtacattttcccctcgagatcgaatgaattcttctccttaccagcctcctcctccgcagccgtatggaccagttcctccagtaccttctggaatgtatgctcctgtgtacgacagcaggcgcatctggcgcccacctatgtaccaacgagatgacattattagaagcaattctttacctccaatggatgtgatgcactcatctgtctatcagacatctttgcgggaaagatataactcattagatggatattattcggtggcttgtcagccaccaagtgagccaaggacaactgtgcctttaccaagggaaccttgtggtcatttgaagaccagttgcgaggagcagataagaagaaagccagatcagtgggcacagtaccacactcagaaagcacctcttgtctcttcaactcttcctgtggcaacacagtcaccaacaccaccttctcctctgttcagtgtagactttcgtgcggatttctcagagagtgtgagtggtacaaaatttgaagaagatcatctttcccattattctccctggtcttgtggcaccataggctcctgtataaatgccattgattcagagcccaaagatgtcattgctaattcaaatgctgtgttaatggacctggacagtggtgatgttaagagaagagtacatttatttgaaacccagagaaggacaaaagaagaagatccaataattccctttagtgatggacccatcatctcaaaatggggtgcgatttccagatcttcccgtacaggttaccataccacagatcctgtccaggccactgcttcccaaggaagtgcgactaagcccatcagtgtatcagattatgtcccttatgtcaatgctgttgattcaaggtggagttcatatggcaacgaggccacatcatcagcacactatgttgaaagggacagattcattgttactgatttatctggtcatagaaagcattccagtactggggaccttttgagccttgaacttcagcaggccaagagcaactcattacttcttcagagagaggccaatgctttggccatgcaacagaagtggaattccctggatgaaggccgtcaccttaccttaaaccttttaagcaaggaaattgaactaagaaatggagagttacagagtgattatacagaagatgcaacagatactaaacctgatagggatatcgagttagagctttcagcacttgatactgatgaacctgatggacaaagtgaaccaattgaagagatcttggacatacagcttggtatcagttctcaaaatgatcagttgctaaatggaatggcagtggaaaatgggcatccagtacagcagcaccaaaaggagccaccaaagcagaagaaacagagtttaggtgaagaccatgtgattctggaggagcaaaaaacaattctgccggtaacttcttgctttagccagccactcccagtgtctattagcaatgcaagttgcctccccatcaccacatctgtcagtgctggcaacctcattctgaaaactcatgttatgtctgaagataaaaacgactttttaaaacctgttgcaaatgggaagatggttaacagctgaaaggaggttcatctttcaaatttgtgaccacaccatggaagcatttacactagctttttatatatataatatatattatataatgtatattttttttaaaaaaaagatattactgggggcatccatttcctgtggactctttgatacttcaagccctcttgcattagcattatgaaaaaaaaaaagaaaatttactttactagggtaacatgttcactttccagaaatgattggaatttggacaacatttaacttaagcttcaagcagctttttatgagtttgtagcaatccggtgcagtaactgagccatttcctattttaaatggcttctatagaaaattaacaactcagttattaaactagcaggatcctacaatgatacatctagtgaaagtagacttagttaacttatttatttctattttatgtttcactgagagaagtttccatctcattccagctgctttatttatctttttcatggaactttgcatggatttctttttctttttttaattttgaagagtggagttagatgttcttaccatagaattttacagggttatatactagcattctttactgcattatatgtaggagtgtggtgcagtgcttttatctgtagcatataatttttttttaattttccatttttcaagagtagtttctgctttgttaatatttatacacaggctacttgttgaagtaattaattaaaaatataaccaagtgcctaagtctttcagctgatgtactagatattaaattctcctaagttatgcagaatcgtttttacaattttgataaattatgcactaatgtaatggcagttttttaaaatgcagatttaagcctgtacattattgaatctgatgacttggcaaaagaatcaggtgctttcagctttcttgagaaaaccctgtatgtagcgtttgcactgactaacaagatggtattgctgggtttttaatttaaactaattaatttggttgttcattgcattatcttggttaaatattgtttattgtt

SEQ ID NO: 322036 - DNA, 5091 bp, Homo sapiens
agccaagtcttgtcagagatttcctctttcaggtggcaaagctgttttcttcacacttgagtctctacaatattgtttggatcagtagtttccaaagttcattaactcctggccatactttattatgttttggggtactggttatccaagggaaacacttttttaaacaacaaaacaaaaaaaccgcccagcagtccaaagtaatttgtgttcctaaaaatggaatatggaaagttaatttgcttgtttgatgtggtcgttgagaaaaatacataaaagctttgatgtttattatgtgagcaaccaatataaatacagtttagttgaaaggaacactattaaggtattgtttccaggcagaatttcagaaatgtaattaattcagcaaataggttttttaaaaaagacatccaaaggttataaaattatttagaagtattttaggtctgaagctgtaatagttgacttaagcaattaactcttcaaaggtgaatgatgaatatgtggttaattcatacttttgtccatttctagcttacaaaacactacacagcaaaataatgatctgctagactgctaacccgagcatccagcttccacaatgcctgtgcaggcagctcaatggacagaatttctgtcctgtccaatctgctataatgaatttgatgagaatgtgcacaaacccatcagtttaggttgttcacacactgtttgcaagacctgcttgaataaacttcatcgaaaagcttgtccttttgaccagactgccatcaacacagatattgatgtacttcctgtcaacttcgcacttctccagttagttggagcccaggtaccagatcatcagtcaattaagttaagtaatctaggtgagaataaacactatgaggttgcaaagaaatgcgttgaggatttggcactctacttaaaaccactaagtggaggtaaaggtgtagctagcttgaaccagagtgcactgagccgtccaatgcaaaggaaactggtgacacttgtaaactgtcaactggtggaggaagaaggtcgtgtaagagccatgcgagcagctcgttcccttggagaaagaactgtaacagaactgatattacagcaccagaaccctcagcagttgtctgccaatctatgggccgctgtcagggctcgaggatgccagtttttagggccagctatgcaagaagaggccttgaagctggtgttactggcattagaagatggttctgccctctcaaggaaagttctggtactttttgttgtgcagagactagaaccaagatttcctcaggcatcaaaaacaagtattggtcatgttgtgcaactactgtatcgagcttcttgttttaaggttaccaaaagagatgaagactcttccctaatgcagctgaaggaggaatttcggagttatgaagcattacgcagagaacatgatgcccaaattgttcatattgccatggaagcaggactccgtatttcacctgaacagtggtcctctcttttgtatggtgatttggctcataaatcacacatgcagtctatcattgataagctacagtctccagagtcatttgcaaagagtgtccaggaattgacaattgttttgcaacgaacaggtgacccagctaacttaaatagactgaggcctcatttagagcttcttgcaaacatagaccctaatccagacgctgtttcaccaacttgggagcagctggaaaatgcaatggtagctgttaaaacagtagttcatggccttgtggacttcatacaaaattatagtagaaaaggccatgagacccctcagcctcagccaaacagcaaatacaagactagcatgtgccgagatttgcgacagcaagggggttgtccacgaggaacaaattgtacatttgcccattctcaggaagagcttgaaaagaagtactgaaacaacagggaaaattgttccaagtacaaacggaatttcaaatgcagaaaacagtgtttcccagctaatctcacgtagtactgacagtaccttaagagctctggagaccgtgaagaaagtgggaaaggttggcgctaatggtcagaatgctgctgggccctctgcagattctgtaactgaaaataaaattggttctccacccaagactcctgtaagtaatgtagcagctacctcagctgggccctctaatgttggaacagagctgaattctgtgcctcaaaaatccagcccatttctaactagagtaccagtatatcctccgcattctgaaaacattcagtattttcaagatccaaggactcagataccctttgaagtcccacagtacccacagacaggatactatccaccacctccaacggtaccagctggtgtggctccctgtgttcctcgctttgtgaggtccaataacgttccagagtcctccctcccacctgcttccatgccatatgccgatcattacagtacattttcccctcgagatcgaatgaattcttctccttaccagcctcctcctccgcagccgtatggaccagttcctccagtaccttctggaatgtatgctcctgtgtacgacagcaggcgcatctggcgcccacctatgtaccaacgagatgacattattagaagcaattctttacctccaatggatgtgatgcactcatctgtctatcagacatctttgcgggaaagatataactcattagatggatattattcggtggcttgtcagccaccaagtgagccaaggacaactgtgcctttaccaagggaaccttgtggtcatttgaagaccagttgcgaggagcagataagaagaaagccagatcagtgggcacagtaccacactcagaaagcacctcttgtctcttcaactcttcctgtggcaacacagtcaccaacaccaccttctcctctgttcagtgtagactttcgtgcggatttctcagagagtgtgagtggtacaaaatttgaagaagatcatctttcccattattctccctggtcttgtggcaccataggctcctgtataaatgccattgattcagagcccaaagatgtcattgctaattcaaatgctgtgttaatggacctggacagtggtgatgttaagagaagagtacatttatttgaaacccagagaaggacaaaagaagaagatccaataattccctttagtgatggacccatcatctcaaaatggggtgcgatttccagatcttcccgtacaggttaccataccacagatcctgtccaggccactgcttcccaaggaagtgcgactaagcccatcagtgtatcagattatgtcccttatgtcaatgctgttgattcaaggtggagttcatatggcaacgaggccacatcatcagcacactatgttgaaagggacagattcattgttactgatttatctggtcatagaaagcattccagtactggggaccttttgagccttgaacttcagcaggccaagagcaactcattacttcttcagagagaggccaatgctttggccatgcaacagaagtggaattccctggatgaaggccgtcaccttaccttaaaccttttaagcaaggaaattgaactaagaaatggagagttacagagtgattatacagaagatgcaacagatactaaacctgatagggatatcgagttagagctttcagcacttgatactgatgaacctgatggacaaagtgaaccaattgaagagatcttggacatacagcttggtatcagttctcaaaatgatcagttgctaaatggaatggcagtggaaaatgggcatccagtacagcagcaccaaaaggagccaccaaagcagaagaaacagagtttaggtgaagaccatgtgattctggaggagcaaaaaacaattctgccggtaacttcttgctttagccagccactcccagtgtctattagcaatgcaagttgcctccccatcaccacatctgtcagtgctggcaacctcattctgaaaactcatgttatgtctgaagataaaaacgactttttaaaacctgttgcaaatgggaagatggttaacagctgaaaggaggttcatctttcaaatttgtgaccacaccatggaagcatttacactagctttttatatatataatatatattatataatgtatattttttttaaaaaaaagatattactgggggcatccatttcctgtggactctttgatacttcaagccctcttgcattagcattatgaaaaaaaaaaagaaaatttactttactagggtaacatgttcactttccagaaatgattggaatttggacaacatttaacttaagcttcaagcagctttttatgagtttgtagcaatccggtgcagtaactgagccatttcctattttaaatggcttctatagaaaattaacaactcagttattaaactagcaggatcctacaatgatacatctagtgaaagtagacttagttaacttatttatttctattttatgtttcactgagagaagtttccatctcattccagctgctttatttatctttttcatggaactttgcatggatttctttttctttttttaattttgaagagtggagttagatgttcttaccatagaattttacagggttatatactagcattctttactgcattatatgtaggagtgtggtgcagtgcttttatctgtagcatataatttttttttaattttccatttttcaagagtagtttctgctttgttaatatttatacacaggctacttgttgaagtaattaattaaaaatataaccaagtgcctaagtctttcagctgatgtactagatattaaattctcctaagttatgcagaatcgtttttacaattttgataaattatgcactaatgtaatggcagttttttaaaatgcagatttaagcctgtacattattgaatctgatgacttggcaaaagaatcaggtgctttcagctttcttgagaaaaccctgtatgtagcgtttgcactgactaacaagatggtattgctgggtttttaatttaaactaattaatttggttgttcattgcattatcttggttaaatattgtttattgtt

SEQ ID NO: 322037 - DNA, 3874 bp, Homo sapiens
agccaagtcttgtcagagatttcctctttcaggtggcaaagctgttttcttcacacttgagtctctacaatattgtttggatcagtagtttccaaagttcattaactcctggccatactttattatgttttggggtactggttatccaagggaaacacttttttaaacaacaaaacaaaaaaaccgcccagcagtccaaagtaatttgtgttcctaaaaatggaatatggaaagttaatttgcttgtttgatgtggtcgttgagaaaaatacataaaagctttgatgtttattatgtgagcaaccaatataaatacagtttagttgaaaggaacactattaaggtattgtttccaggcagaatttcagaaatgtaattaattcagcaaataggttttttaaaaaagacatccaaaggttataaaattatttagaagtattttaggtctgaagctgtaatagttgacttaagcaattaactcttcaaaggtgaatgatgaatatgtggttaattcatacttttgtccatttctagcttacaaaacactacacagcaaaataatgatctgctagactgctaacccgagcatccagcttccacaatgcctgtgcaggcagctcaatggacagaatttctgtcctgtccaatctgctataatgaatttgatgagaatgtgcacaaacccatcagtttaggttgttcacacactgtttgcaagacctgcttgaataaacttcatcgaaaagcttgtccttttgaccagactgccatcaacacagatattgatgtacttcctgtcaacttcgcacttctccagttagttggagcccaggtaccagatcatcagtcaattaagttaagtaatctaggtgagaataaacactatgaggttgcaaagaaatgcgttgaggatttggcactctacttaaaaccactaagtggaggtaaaggtgtagctagcttgaaccagagtgcactgagccgtccaatgcaaaggaaactggtgacacttgtaaactgtcaactggtggaggaagaaggtcgtgtaagagccatgcgagcagctcgttcccttggagaaagaactgtaacagaactgatattacagcaccagaaccctcagcagttgtctgccaatctatgggccgctgtcagggctcgaggatgccagtttttagggccagctatgcaagaagaggccttgaagctggtgttactggcattagaagatggttctgccctctcaaggaaagttctggtactttttgttgtgcagagactagaaccaagatttcctcaggcatcaaaaacaagtattggtcatgttgtgcaactactgtatcgagcttcttgttttaaggttaccaaaagagatgaagactcttccctaatgcagctgaaggaggaatttcggagttatgaagcattacgcagagaacatgatgcccaaattgttcatattgccatggaagcaggactccgtatttcacctgaacagtggtcctctcttttgtatggtgatttggctcataaatcacacatgcagtctatcattgataagctacagtctccagagtcatttgcaaagagtgtccaggaattgacaattgttttgcaacgaacaggtgacccagctaacttaaatagactgaggcctcatttagagcttcttgcaaacatagaccctaatccagacgctgtttcaccaacttgggagcagctggaaaatgcaatggtagctgttaaaacagtagttcatggccttgtggacttcatacaaaattatagtagaaaaggccatgagacccctcagcctcagccaaacagcaaatacaagactagcatgtgccgagatttgcgacagcaagggggttgtccacgaggaacaaattgtacatttgcccattctcaggaagagcttgaaaagtatcgattaaggaacaaaaagatcaatgccactgtaagaacgtttcctcttctaaataaagttggtgtaaacaacactgtcacaaccacagccggaaatgtcatttctgtcataggaagtactgaaacaacagggaaaattgttccaagtacaaacggaatttcaaatgcagaaaacagtgtttcccagctaatctcacgtagtactgacagtaccttaagagctctggagaccgtgaagaaagtgggaaaggttggcgctaatggtcagaatgctgctgggccctctgcagattctgtaactgaaaataaaattggttctccacccaagactcctgtaagtaatgtagcagctacctcagctgggccctctaatgttggaacagagctgaattctgtgcctcaaaaatccagcccatttctaactagagtaccagtatatcctccgcattctgaaaacattcagtattttcaagatccaaggactcagataccctttgaagtcccacagtacccacagacaggatactatccaccacctccaacggtaccagctggtgtggctccctgtgttcctcgctttgtgaggtccaataacgttccagagtcctccctcccacctgcttccatgccatatgccgatcattacagtacattttcccctcgagatcgaatgaattcttctccttaccagcctcctcctccgcagccgtatggaccagttcctccagtaccttctggaatgtatgctcctgtgtacgacagcaggcgcatctggcgcccacctatgtaccaacgagatgacattattagaagcaattctttacctccaatggatgtgatgcactcatctgtctatcagacatctttgcgggaaagatataactcattagatggatattattcggtggcttgtcagccaccaagtgagccaaggacaactgtgcctttaccaagggaaccttgtggtcatttgaagaccagttgcgaggagcagataagaagaaagccagatcagtgggcacagtaccacactcagaaagcacctcttgtctcttcaactcttcctgtggcaacacagtcaccaacaccaccttctcctctgttcagtgtagactttcgtgcggatttctcagagagtgtgagtggtacaaaatttgaagaagatcatctttcccattattctccctggtcttgtggcaccataggctcctgtataaatgccattgattcagagcccaaagatgtcattgctaattcaaatgctgtgttaatggacctggacagtggtgatgttaagagaagagtacatttatttgaaacccagagaaggacaaaagaagaagatccaataattccctttagtgatggacccatcatctcaaaatggggtgcgatttccagatcttcccgtacaggttaccataccacagatcctgtccaggccactgcttcccaaggaagtgcgactaagcccatcagtgtatcagattatgtcccttatgtcaatgctgttgattcaaggtggagttcatatggcaacgaggccacatcatcagcacactatgttgaaagggacagattcattgttactgatttatctggtcatagaaagcattccagtactggggaccttttgagccttgaacttcagcaggccaagagcaactcattacttcttcagagagaggccaatgctttggccatgcaacagaagtggaattccctggatgaaggccgtcaccttaccttaaaccttttaagcaaggaaattgaactaagaaatggagaggtaaagaaactgaacctttcggcttcatgcttaatgtatttgttttctgctgctgcatcttggttataccattactgagtgcattttggtgtgcctatctctgatggatgattgattgcttttaaaacttataacagaaataaaattgtaatccca

SEQ ID NO: 322038 - DNA, 5188 bp, Homo sapiens
agccaagtcttgtcagagatttcctctttcaggtggcaaagctgttttcttcacacttgagtctctacaatattgtttggatcagtagtttccaaagttcattaactcctggccatactttattatgttttggggtactggttatccaagggaaacacttttttaaacaacaaaacaaaaaaaccgcccagcagtccaaagtaatttgtgttcctaaaaatggaatatggaaagttaatttgcttgtttgatgtggtcgttgagaaaaatacataaaagctttgatgtttattatgtgagcaaccaatataaatacagtttagttgaaaggaacactattaaggtattgtttccaggcagaatttcagaaatgtaattaattcagcaaataggttttttaaaaaagacatccaaaggttataaaattatttagaagtattttaggtctgaagctgtaatagttgacttaagcaattaactcttcaaaggtgaatgatgaatatgtggttaattcatacttttgtccatttctagcttacaaaacactacacagcaaaataatgatctgctagactgctaacccgagcatccagcttccacaatgcctgtgcaggcagctcaatggacagaatttctgtcctgtccaatctgctataatgaatttgatgagaatgtgcacaaacccatcagtttaggttgttcacacactgtttgcaagacctgcttgaataaacttcatcgaaaagcttgtccttttgaccagactgccatcaacacagatattgatgtacttcctgtcaacttcgcacttctccagttagttggagcccaggtaccagatcatcagtcaattaagttaagtaatctaggtgagaataaacactatgaggttgcaaagaaatgcgttgaggatttggcactctacttaaaaccactaagtggaggtaaaggtgtagctagcttgaaccagagtgcactgagccgtccaatgcaaaggaaactggtgacacttgtaaactgtcaactggtggaggaagaaggtcgtgtaagagccatgcgagcagctcgttcccttggagaaagaactgtaacagaactgatattacagcaccagaaccctcagcagttgtctgccaatctatgggccgctgtcagggctcgaggatgccagtttttagggccagctatgcaagaagaggccttgaagctggtgttactggcattagaagatggttctgccctctcaaggaaagttctggtactttttgttgtgcagagactagaaccaagatttcctcaggcatcaaaaacaagtattggtcatgttgtgcaactactgtatcgagcttcttgttttaaggttaccaaaagagatgaagactcttccctaatgcagctgaaggaggaatttcggagttatgaagcattacgcagagaacatgatgcccaaattgttcatattgccatggaagcaggactccgtatttcacctgaacagtggtcctctcttttgtatggtgatttggctcataaatcacacatgcagtctatcattgataagctacagtctccagagtcatttgcaaagagtgtccaggaattgacaattgttttgcaacgaacaggtgacccagctaacttaaatagactgaggcctcatttagagcttcttgcaaacatagaccctaatccagacgctgtttcaccaacttgggagcagctggaaaatgcaatggtagctgttaaaacagtagttcatggccttgtggacttcatacaaaattatagtagaaaaggccatgagacccctcagcctcagccaaacagcaaatacaagactagcatgtgccgagatttgcgacagcaagggggttgtccacgaggaacaaattgtacatttgcccattctcaggaagagcttgaaaagtatcgattaaggaacaaaaagatcaatgccactgtaagaacgtttcctcttctaaataaagttggtgtaaacaacactgtcacaaccacagccggaaatgtcatttctgtcataggaagtactgaaacaacagggaaaattgttccaagtacaaacggaatttcaaatgcagaaaacagtgtttcccagctaatctcacgtagtactgacagtaccttaagagctctggagaccgtgaagaaagtgggaaaggttggcgctaatggtcagaatgctgctgggccctctgcagattctgtaactgaaaataaaattggttctccacccaagactcctgtaagtaatgtagcagctacctcagctgggccctctaatgttggaacagagctgaattctgtgcctcaaaaatccagcccatttctaactagagtaccagtatatcctccgcattctgaaaacattcagtattttcaagatccaaggactcagataccctttgaagtcccacagtacccacagacaggatactatccaccacctccaacggtaccagctggtgtggctccctgtgttcctcgctttgtgaggtccaataacgttccagagtcctccctcccacctgcttccatgccatatgccgatcattacagtacattttcccctcgagatcgaatgaattcttctccttaccagcctcctcctccgcagccgtatggaccagttcctccagtaccttctggaatgtatgctcctgtgtacgacagcaggcgcatctggcgcccacctatgtaccaacgagatgacattattagaagcaattctttacctccaatggatgtgatgcactcatctgtctatcagacatctttgcgggaaagatataactcattagatggatattattcggtggcttgtcagccaccaagtgagccaaggacaactgtgcctttaccaagggaaccttgtggtcatttgaagaccagttgcgaggagcagataagaagaaagccagatcagtgggcacagtaccacactcagaaagcacctcttgtctcttcaactcttcctgtggcaacacagtcaccaacaccaccttctcctctgttcagtgtagactttcgtgcggatttctcagagagtgtgagtggtacaaaatttgaagaagatcatctttcccattattctccctggtcttgtggcaccataggctcctgtataaatgccattgattcagagcccaaagatgtcattgctaattcaaatgctgtgttaatggacctggacagtggtgatgttaagagaagagtacatttatttgaaacccagagaaggacaaaagaagaagatccaataattccctttagtgatggacccatcatctcaaaatggggtgcgatttccagatcttcccgtacaggttaccataccacagatcctgtccaggccactgcttcccaaggaagtgcgactaagcccatcagtgtatcagattatgtcccttatgtcaatgctgttgattcaaggtggagttcatatggcaacgaggccacatcatcagcacactatgttgaaagggacagattcattgttactgatttatctggtcatagaaagcattccagtactggggaccttttgagccttgaacttcagcaggccaagagcaactcattacttcttcagagagaggccaatgctttggccatgcaacagaagtggaattccctggatgaaggccgtcaccttaccttaaaccttttaagcaaggaaattgaactaagaaatggagagttacagagtgattatacagaagatgcaacagatactaaacctgatagggatatcgagttagagctttcagcacttgatactgatgaacctgatggacaaagtgaaccaattgaagagatcttggacatacagcttggtatcagttctcaaaatgatcagttgctaaatggaatggcagtggaaaatgggcatccagtacagcagcaccaaaaggagccaccaaagcagaagaaacagagtttagggaggagcaaaaaacaattctgccggtaacttcttgctttagccagccactcccagtgtctattagcaatgcaagttgcctccccatcaccacatctgtcagtgctggcaacctcattctgaaaactcatgttatgtctgaagataaaaacgactttttaaaacctgttgcaaatgggaagatggttaacagctgaaaggaggttcatctttcaaatttgtgaccacaccatggaagcatttacactagctttttatatatataatatatattatataatgtatattttttttaaaaaaaagatattactgggggcatccatttcctgtggactctttgatacttcaagccctcttgcattagcattatgaaaaaaaaaaagaaaatttactttactagggtaacatgttcactttccagaaatgattggaatttggacaacatttaacttaagcttcaagcagctttttatgagtttgtagcaatccggtgcagtaactgagccatttcctattttaaatggcttctatagaaaattaacaactcagttattaaactagcaggatcctacaatgatacatctagtgaaagtagacttagttaacttatttatttctattttatgtttcactgagagaagtttccatctcattccagctgctttatttatctttttcatggaactttgcatggatttctttttctttttttaattttgaagagtggagttagatgttcttaccatagaattttacagggttatatactagcattctttactgcattatatgtaggagtgtggtgcagtgcttttatctgtagcatataatttttttttaattttccatttttcaagagtagtttctgctttgttaatatttatacacaggctacttgttgaagtaattaattaaaaatataaccaagtgcctaagtctttcagctgatgtactagatattaaattctcctaagttatgcagaatcgtttttacaattttgataaattatgcactaatgtaatggcagttttttaaaatgcagatttaagcctgtacattattgaatctgatgacttggcaaaagaatcaggtgctttcagctttcttgagaaaaccctgtatgtagcgtttgcactgactaacaagatggtattgctgggtttttaatttaaactaattaatttggttgttcattgcattatcttggttaaatattgtttattgtt

SEQ ID NO: 322039 - DNA, 5036 bp, Homo sapiens
agccaagtcttgtcagagatttcctctttcaggtggcaaagctgttttcttcacacttgagtctctacaatattgtttggatcagtagtttccaaagttcattaactcctggccatactttattatgttttggggtactggttatccaagggaaacacttttttaaacaacaaaacaaaaaaaccgcccagcagtccaaagtaatttgtgttcctaaaaatggaatatggaaagttaatttgcttgtttgatgtggtcgttgagaaaaatacataaaagctttgatgtttattatgtgagcaaccaatataaatacagtttagttgaaaggaacactattaaggtattgtttccaggcagaatttcagaaatgtaattaattcagcaaataggttttttaaaaaagacatccaaaggttataaaattatttagaagtattttaggtctgaagctgtaatagttgacttaagcaattaactcttcaaaggtgaatgatgaatatgtggttaattcatacttttgtccatttctagcttacaaaacactacacagcaaaataatgatctgctagactgctaacccgagcatccagcttccacaatgcctgtgcaggcagctcaatggacagaatttctgtcctgtccaatctgctataatgaatttgatgagaatgtgcacaaacccatcagtttaggttgttcacacactgtttgcaagacctgcttgaataaacttcatcgaaaagcttgtccttttgaccagactgccatcaacacagatattgatgtacttcctgtcaacttcgcacttctccagttagttggagcccaggtaccagatcatcagtcaattaagttaagtaatctaggtgagaataaacactatgaggttgcaaagaaatgcgttgaggatttggcactctacttaaaaccactaagtggaggtaaaggtgtagctagcttgaaccagagtgcactgagccgtccaatgcaaaggaaactggtgacacttgtaaactgtcaactggtggaggaagaaggtcgtgtaagagccatgcgagcagctcgttcccttggagaaagaactgtaacagaactgatattacagcaccagaaccctcagcagttgtctgccaatctatgggccgctgtcagggctcgaggatgccagtttttagggccagctatgcaagaagaggccttgaagctggtgttactggcattagaagatggttctgccctctcaaggaaagttctggtactttttgttgtgcagagactagaaccaagatttcctcaggcatcaaaaacaagtattggtcatgttgtgcaactactgtatcgagcttcttgttttaaggttaccaaaagagatgaagactcttccctaatgcagctgaaggaggaatttcggagttatgaagcattacgcagagaacatgatgcccaaattgttcatattgccatggaagcaggactccgtatttcacctgaacagtggtcctctcttttgtatggtgatttggctcataaatcacacatgcagtctatcattgataagctacagtctccagagtcatttgcaaagagtgtccaggaattgacaattgttttgcaacgaacaggtgacccagctaacttaaatagactgaggcctcatttagagcttcttgcaaacatagaccctaatccagacgctgtttcaccaacttgggagcagctggaaaatgcaatggtagctgttaaaacagtagttcatggccttgtggacttcatacaaaattatagtagaaaaggccatgagacccctcagcctcagccaaacagcaaatacaagactagcatgtgccgagatttgcgacagcaagggggttgtccacgaggaacaaattgtacatttgcccattctcaggaagagcttgaaaagtatcgattaaggaacaaaaagatcaatgccactgtaagaacgtttcctcttctaaataaagttggtgtaaacaacactgtcacaaccacagccggaaatgtcatttctgtcataggaagtactgaaacaacagggaaaattgttccaagtacaaacggaatttcaaatgcagaaaacagtgtttcccagctaatctcacgtagtactgacagtaccttaagagctctggagaccgtgaagaaagtgggaaaggttggcgctaatggtcagaatgctgctgggccctctgcagattctgtaactgaaaataaaattggttctccacccaagactcctgtaagtaatgtagcagctacctcagctgggccctctaatgttggaacagagctgaattctgtgcctcaaaaatccagcccatttctaactagagtaccagtatatcctccgcattctgaaaacattcagtattttcaagatccaaggactcagataccctttgaagtcccacagtacccacagacaggatactatccaccacctccaacggtaccagctggtgtggctccctgtgttcctcgctttgtgaggtccaataacgttccagagtcctccctcccacctgcttccatgccatatgccgatcattacagtacattttcccctcgagatcgaatgaattcttctccttaccagcctcctcctccgcagccgtatggaccagttcctccagtaccttctggaatgtatgctcctgtgtacgacagcaggcgcatctggcgcccacctatgtaccaacgagatgacattattagaagcaattctttacctccaatggatgtgatgcactcatctgtctatcagacatctttgcgggaaagatataactcattagatggatattattcggtggcttgtcagccaccaagtgagccaaggacaactgtgcctttaccaaggttctcagagagtgtgagtggtacaaaatttgaagaagatcatctttcccattattctccctggtcttgtggcaccataggctcctgtataaatgccattgattcagagcccaaagatgtcattgctaattcaaatgctgtgttaatggacctggacagtggtgatgttaagagaagagtacatttatttgaaacccagagaaggacaaaagaagaagatccaataattccctttagtgatggacccatcatctcaaaatggggtgcgatttccagatcttcccgtacaggttaccataccacagatcctgtccaggccactgcttcccaaggaagtgcgactaagcccatcagtgtatcagattatgtcccttatgtcaatgctgttgattcaaggtggagttcatatggcaacgaggccacatcatcagcacactatgttgaaagggacagattcattgttactgatttatctggtcatagaaagcattccagtactggggaccttttgagccttgaacttcagcaggccaagagcaactcattacttcttcagagagaggccaatgctttggccatgcaacagaagtggaattccctggatgaaggccgtcaccttaccttaaaccttttaagcaaggaaattgaactaagaaatggagagttacagagtgattatacagaagatgcaacagatactaaacctgatagggatatcgagttagagctttcagcacttgatactgatgaacctgatggacaaagtgaaccaattgaagagatcttggacatacagcttggtatcagttctcaaaatgatcagttgctaaatggaatggcagtggaaaatgggcatccagtacagcagcaccaaaaggagccaccaaagcagaagaaacagagtttaggtgaagaccatgtgattctggaggagcaaaaaacaattctgccggtaacttcttgctttagccagccactcccagtgtctattagcaatgcaagttgcctccccatcaccacatctgtcagtgctggcaacctcattctgaaaactcatgttatgtctgaagataaaaacgactttttaaaacctgttgcaaatgggaagatggttaacagctgaaaggaggttcatctttcaaatttgtgaccacaccatggaagcatttacactagctttttatatatataatatatattatataatgtatattttttttaaaaaaaagatattactgggggcatccatttcctgtggactctttgatacttcaagccctcttgcattagcattatgaaaaaaaaaaagaaaatttactttactagggtaacatgttcactttccagaaatgattggaatttggacaacatttaacttaagcttcaagcagctttttatgagtttgtagcaatccggtgcagtaactgagccatttcctattttaaatggcttctatagaaaattaacaactcagttattaaactagcaggatcctacaatgatacatctagtgaaagtagacttagttaacttatttatttctattttatgtttcactgagagaagtttccatctcattccagctgctttatttatctttttcatggaactttgcatggatttctttttctttttttaattttgaagagtggagttagatgttcttaccatagaattttacagggttatatactagcattctttactgcattatatgtaggagtgtggtgcagtgcttttatctgtagcatataatttttttttaattttccatttttcaagagtagtttctgctttgttaatatttatacacaggctacttgttgaagtaattaattaaaaatataaccaagtgcctaagtctttcagctgatgtactagatattaaattctcctaagttatgcagaatcgtttttacaattttgataaattatgcactaatgtaatggcagttttttaaaatgcagatttaagcctgtacattattgaatctgatgacttggcaaaagaatcaggtgctttcagctttcttgagaaaaccctgtatgtagcgtttgcactgactaacaagatggtattgctgggtttttaatttaaactaattaatttggttgttcattgcattatcttggttaaatattgtttattgtt

SEQ ID NO: 322040 - DNA, 1330 bp, Homo sapiens
agccaagtcttgtcagagatttcctctttcaggtggcaaagctgttttcttcacacttgagtctctacaatattgtttggatcagtagtttccaaagttcattaactcctggccatactttattatgttttggggtactggttatccaagggaaacacttttttaaacaacaaaacaaaaaaaccgcccagcagtccaaagtaatttgtgttcctaaaaatggaatatggaaagttaatttgcttgtttgatgtggtcgttgagaaaaatacataaaagctttgatgtttattatgtgagcaaccaatataaatacagtttagttgaaaggaacactattaaggtattgtttccaggcagaatttcagaaatgtaattaattcagcaaataggttttttaaaaaagacatccaaaggttataaaattatttagaagtattttaggtctgaagctgtaatagttgacttaagcaattaactcttcaaaggtgaatgatgaatatgtggttaattcatacttttgtccatttctagcttacaaaacactacacagcaaaataatgatctgctagactgctaacccgagcatccagcttccacaatgcctgtgcaggcagctcaatggacagaatttctgtcctgtccaatctgctataatgaatttgatgagaatgtgcacaaacccatcagtttaggttgttcacacactgtttgcaagacctgcttgaataaacttcatcgaaaagcttgtccttttgaccagactgccatcaacacagatattgatgtacttcctgtcaacttcgcacttctccagttagttggagcccaggtaccagatcatcagtcaattaagttaagtaatctaggtgagaataaacactatgaggttgcaaagaaatgcgttgaggatttggcactctacttaaaaccactaagtggaggtaaaggtgtagctagcttgaaccagagtgcactgagccgtccaatgcaaaggaaactggtgacacttgtaaactgtcaactggtggaggaagaaggtcgtgtaagagccatgcgagcagctcgttcccttggagaaagaactgtaacagaactgatattacagcaccagaaccctcagcagttgtctgccaatctatgggccgctgtcagggctcgaggatgccagtttttagggccaggtaagataggttactatcttaccttttttattagctattggggcttgaggatgccaatttctggagctcggtgaatcctgagactcaacccgtctttatatgtacaaatcttgatataattaaagataaatttgtttttgttgttg

SEQ ID NO: 322041 - DNA, 308 bp, Homo sapiens
gggagaccatggggagagggagaccatggggagagggagagggagagggagagcaaaatcagtatttttcttagttacagagtgattatacagaagatgcaacagatactaaacctgatagggatatcgagttagagctttcagcacttgatactgatgaacctgatggacaaagtgaaccaattgaagtaagtgccacaattagataattgagaggctttgtttgattgaaaatttataaaatactttcatactgaaggattaacattttattttcttaggagatcttggacatacagcttggtatc

SEQ ID NO: 322042 - DNA, 313 bp, Homo sapiens
caggaatatgacatctgttacgatgatcacgtgaattagctgtgtaaggtggcagtgaaattcattgccttatttgtcaatgtggcaatgtctgaagtgttttctattagtggtttcagaatataattttattaaaaatttctagtaaggaggacagtcatagacagtgatttctcctttgccctttgttaaattttctctccagtaaaattggttctccacccaagactcctgtaagtaatgtagcagctacctcagctgggccctctaatgttggaacagagctgaattctgtgcctcaaaaatccagccc

SEQ ID NO: 322043 - DNA, 5207 bp, Homo sapiens
agccaagtcttgtcagagatttcctctttcaggtggcaaagctgttttcttcacacttgagtctctacaatattgtttggatcagtagtttccaaagttcattaactcctggccatactttattatgttttggggtactggttatccaagggaaacacttttttaaacaacaaaacaaaaaaaccgcccagcagtccaaagtaatttgtgttcctaaaaatggaatatggaaagttaatttgcttgtttgatgtggtcgttgagaaaaatacataaaagctttgatgtttattatgtgagcaaccaatataaatacagtttagttgaaaggaacactattaaggtattgtttccaggcagaatttcagaaatgtaattaattcagcaaataggttttttaaaaaagacatccaaaggttataaaattatttagaagtattttaggtctgaagctgtaatagttgacttaagcaattaactcttcaaaggtgaatgatgaatatgtggttaattcatacttttgtccatttctagcttacaaaacactacacagcaaaataatgatctgctagactgctaacccgagcatccagcttccacaatgcctgtgcaggcagctcaatggacagaatttctgtcctgtccaatctgctataatgaatttgatgagaatgtgcacaaacccatcagtttaggttgttcacacactgtttgcaagacctgcttgaataaacttcatcgaaaagcttgtccttttgaccagactgccatcaacacagatattgatgtacttcctgtcaacttcgcacttctccagttagttggagcccaggtaccagatcatcagtcaattaagttaagtaatctaggtgagaataaacactatgaggttgcaaagaaatgcgttgaggatttggcactctacttaaaaccactaagtggaggtaaaggtgtagctagcttgaaccagagtgcactgagccgtccaatgcaaaggaaactggtgacacttgtaaactgtcaactggtggaggaagaaggtcgtgtaagagccatgcgagcagctcgttcccttggagaaagaactgtaacagaactgatattacagcaccagaaccctcagcagttgtctgccaatctatgggccgctgtcagggctcgaggatgccagtttttagggccagctatgcaagaagaggccttgaagctggtgttactggcattagaagatggttctgccctctcaaggaaagttctggtactttttgttgtgcagagactagaaccaagatttcctcaggcatcaaaaacaagtattggtcatgttgtgcaactactgtatcgagcttcttgttttaaggttaccaaaagagatgaagactcttccctaatgcagctgaaggaggaatttcggagttatgaagcattacgcagagaacatgatgcccaaattgttcatattgccatggaagcaggactccgtatttcacctgaacagtggtcctctcttttgtatggtgatttggctcataaatcacacatgcagtctatcattgataagctacagtctccagagtcatttgcaaagagtgtccaggaattgacaattgttttgcaacgaacaggtgacccagctaacttaaatagactgaggcctcatttagagcttcttgcaaacatagaccctaatccagacgctgtttcaccaacttgggagcagctggaaaatgcaatggtagctgttaaaacagtagttcatggccttgtggacttcatacaaaattatagtagaaaaggccatgagacccctcagcctcagccaaacagcaaatacaagactagcatgtgccgagatttgcgacagcaagggggttgtccacgaggaacaaattgtacatttgcccattctcaggaagagcttgaaaagtatcgattaaggaacaaaaagatcaatgccactgtaagaacgtttcctcttctaaataaagttggtgtaaacaacactgtcacaaccacagccggaaatgtcatttctgtcataggaagtactgaaacaacagggaaaattgttccaagtacaaacggaatttcaaatgcagaaaacagtgtttcccagctaatctcacgtagtactgacagtaccttaagagctctggagaccgtgaagaaagtgggaaaggttggcgctaatggtcagaatgctgctgggccctctgcagattctgtaactgaaaataaaattggttctccacccaagactcctgtaagtaatgtagcagctacctcagctgggccctctaatgttggaacagagctgaattctgtgcctcaaaaatccagcccatttctaactagagtaccagtatatcctccgcattctgaaaacattcagtattttcaagatccaaggactcagataccctttgaagtcccacagtacccacagacaggatactatccaccacctccaacggtaccagctggtgtggctccctgtgttcctcgctttgtgaggtccaataacgttccagagtcctccctcccacctgcttccatgccatatgccgatcattacagtacattttcccctcgagatcgaatgaattcttctccttaccagcctcctcctccgcagccgtatggaccagttcctccagtaccttctggaatgtatgctcctgtgtacgacagcaggcgcatctggcgcccacctatgtaccaacgagatgacattattagaagcaattctttacctccaatggatgtgatgcactcatctgtctatcagacatctttgcgggaaagatataactcattagatggatattattcggtggcttgtcagccaccaagtgagccaaggacaactgtgcctttaccaagggaaccttgtggtcatttgaagaccagttgcgaggagcagataagaagaaagccagatcagtgggcacagtaccacactcagaaagcacctcttgtctcttcaactcttcctgtggcaacacagtcaccaacaccaccttctcctctgttcagtgtagactttcgtgcggatttctcagagagtgtgagtggtacaaaatttgaagaagatcatctttcccattattctccctggtcttgtggcaccataggctcctgtataaatgccattgattcagagcccaaagatgtcattgctaattcaaatgctgtgttaatggacctggacagtggtgatgttaagagaagagtacatttatttgaaacccagagaaggacaaaagaagaagatccaataattccctttagtgatggacccatcatctcaaaatggggtgcgatttccagatcttcccgtacaggttaccataccacagatcctgtccaggccactgcttcccaaggaagtgcgactaagcccatcagtgtatcagattatgtcccttatgtcaatgctgttgattcaaggtggagttcatatggcaacgaggccacatcatcagcacactatgttgaaagggacagattcattgttactgatttatctggtcatagaaagcattccagtactggggaccttttgagccttgaacttcagcaggccaagagcaactcattacttcttcagagagaggccaatgctttggccatgcaacagaagtggaattccctggatgaaggccgtcaccttaccttaaaccttttaagcaaggaaattgaactaagaaatggagagttacagagtgattatacagaagatgcaacagatactaaacctgatagggatatcgagttagagctttcagcacttgatactgatgaacctgatggacaaagtgaaccaattgaagagatcttggacatacagcttggtatcagttctcaaaatgatcagttgctaaatggaatggcagtggaaaatgggcatccagtacagcagcaccaaaaggagccaccaaagcagaagaaacagagtttaggtgaagaccatgtgattctggaggagcaaaaaacaattctgccggtaacttcttgctttagccagccactcccagtgtctattagcaatgcaagttgcctccccatcaccacatctgtcagtgctggcaacctcattctgaaaactcatgttatgtctgaagataaaaacgactttttaaaacctgttgcaaatgggaagatggttaacagctgaaaggaggttcatctttcaaatttgtgaccacaccatggaagcatttacactagctttttatatatataatatatattatataatgtatattttttttaaaaaaaagatattactgggggcatccatttcctgtggactctttgatacttcaagccctcttgcattagcattatgaaaaaaaaaaagaaaatttactttactagggtaacatgttcactttccagaaatgattggaatttggacaacatttaacttaagcttcaagcagctttttatgagtttgtagcaatccggtgcagtaactgagccatttcctattttaaatggcttctatagaaaattaacaactcagttattaaactagcaggatcctacaatgatacatctagtgaaagtagacttagttaacttatttatttctattttatgtttcactgagagaagtttccatctcattccagctgctttatttatctttttcatggaactttgcatggatttctttttctttttttaattttgaagagtggagttagatgttcttaccatagaattttacagggttatatactagcattctttactgcattatatgtaggagtgtggtgcagtgcttttatctgtagcatataatttttttttaattttccatttttcaagagtagtttctgctttgttaatatttatacacaggctacttgttgaagtaattaattaaaaatataaccaagtgcctaagtctttcagctgatgtactagatattaaattctcctaagttatgcagaatcgtttttacaattttgataaattatgcactaatgtaatggcagttttttaaaatgcagatttaagcctgtacattattgaatctgatgacttggcaaaagaatcaggtgctttcagctttcttgagaaaaccctgtatgtagcgtttgcactgactaacaagatggtattgctgggtttttaatttaaactaattaatttggttgttcattgcattatcttggttaaatattgtttattgtt

SEQ ID NO: 322044 - DNA, 5153 bp, Homo sapiens
agccaagtcttgtcagagatttcctctttcaggtggcaaagctgttttcttcacacttgagtctctacaatattgtttggatcagtagtttccaaagttcattaactcctggccatactttattatgttttggggtactggttatccaagggaaacacttttttaaacaacaaaacaaaaaaaccgcccagcagtccaaagtaatttgtgttcctaaaaatggaatatggaaagttaatttgcttgtttgatgtggtcgttgagaaaaatacataaaagctttgatgtttattatgtgagcaaccaatataaatacagtttagttgaaaggaacactattaaggtattgtttccaggcagaatttcagaaatgtaattaattcagcaaataggttttttaaaaaagacatccaaaggttataaaattatttagaagtattttaggtctgaagctgtaatagttgacttaagcaattaactcttcaaaggtgaatgatgaatatgtggttaattcatacttttgtccatttctagcttacaaaacactacacagcaaaataatgatctgctagactgctaacccgagcatccagcttccacaatgcctgtgcaggcagctcaatggacagaatttctgtcctgtccaatctgctataatgaatttgatgagaatgtgcacaaacccatcagtttaggttgttcacacactgtttgcaagacctgcttgaataaacttcatcgaaaagcttgtccttttgaccagactgccatcaacacagatattgatgtacttcctgtcaacttcgcacttctccagttagttggagcccaggtaccagatcatcagtcaattaagttaagtaatctaggtgagaataaacactatgaggttgcaaagaaatgcgttgaggatttggcactctacttaaaaccactaagtggaggtaaaggtgtagctagcttgaaccagagtgcactgagccgtccaatgcaaaggaaactggtgacacttgtaaactgtcaactggtggaggaagaaggtcgtgtaagagccatgcgagcagctcgttcccttggagaaagaactgtaacagaactgatattacagcaccagaaccctcagcagttgtctgccaatctatgggccgctgtcagggctcgaggatgccagtttttagggccagctatgcaagaagaggccttgaagctggtgttactggcattagaagatggttctgccctctcaaggaaagttctggtactttttgttgtgcagagactagaaccaagatttcctcaggcatcaaaaacaagtattggtcatgttgtgcaactactgtatcgagcttcttgttttaaggttaccaaaagagatgaagactcttccctaatgcagctgaaggaggaatttcggagttatgaagcattacgcagagaacatgatgcccaaattgttcatattgccatggaagcaggactccgtatttcacctgaacagtggtcctctcttttgtatggtgatttggctcataaatcacacatgcagtctatcattgataagctacagtctccagagtcatttgcaaagagtgtccaggaattgacaattgttttgcaacgaacaggtgacccagctaacttaaatagactgaggcctcatttagagcttcttgcaaacatagaccctaatccagacgctgtttcaccaacttgggagcagctggaaaatgcaatggtagctgttaaaacagtagttcatggccttgtggacttcatacaaaattatagtagaaaaggccatgagacccctcagcctcagccaaacagcaaatacaagactagcatgtgccgagatttgcgacagcaagggggttgtccacgaggaacaaattgtacatttgcccattctcaggaagagcttgaaaagtatcgattaaggaacaaaaagatcaatgccactgtaagaacgtttcctcttctaaataaagttggtgtaaacaacactgtcacaaccacagccggaaatgtcatttctgtcataggaagtactgaaacaacagggaaaattgttccaagtacaaacggaatttcaaatgcagaaaacagtgtttcccagctaatctcacgtagtactgacagtaccttaagagctctggagaccgtgaagaaagtgggaaaggttggcgctaatggtcagaatgctgctgggccctctgcagattctgtaactgaaaataaaattggttctccacccaagactcctgtaagtaatgtagcagctacctcagctgggccctctaatgttggaacagagctgaattctgtgcctcaaaaatccagcccatttctaactagagtaccagtatatcctccgcattctgaaaacattcagtattttcaagatccaaggactcagataccctttgaagtcccacagtacccacagacaggatactatccaccacctccaacggtaccagctggtgtggctccctgtgttcctcgctttgtgaggtccaataacgttccagagtcctccctcccacctgcttccatgccatatgccgatcattacagtacattttcccctcgagatcgaatgaattcttctccttaccagcctcctcctccgcagccgtatggaccagttcctccagtaccttctggaatgtatgctcctgtgtacgacagcaggcgcatctggcgcccacctatgtaccaacgagatgacattattagaagcaattctttacctccaatggatgtgatgcactcatctgtctatcagacatctttgcgggaaagatataactcattagatggatattattcggtggcttgtcagccaccaagtgagccaaggacaactgtgcctttaccaagggaaccttgtggtcatttgaagaccagttgcgaggagcagataagaagaaagccagatcagtgggcacagtaccacactcagaaagcacctcttgtctcttcaactcttcctgtggcaacacagtcaccaacaccaccttctcctctgttcagtgtagactttcgtgcggatttctcagagagtgtgagtggtacaaaatttgaagaagatcatctttcccattattctccctggtcttgtggcaccataggctcctgtataaatgccattgattcagagcccaaagatgtcattgctaattcaaatgctgtgttaatggacctggacagtggtgatgttaagagaagagtacatttatttgaaacccagagaaggacaaaagaagaagatccaataattccctttagtgatggacccatcatctcaaaatggggtgcgatttccagatcttcccgtacaggttaccataccacagatcctgtccaggccactgcttcccaaggaagtgcgactaagcccatcagtgtatcagattatgtcccttatgtcaatgctgttgattcaaggtggagttcatatggcaacgaggccacatcatcagcacactatgttgaaagggacagattcattgttactgatttatctggtcatagaaagcattccagtactggggaccttttgagccttgaacttcagcaggccaagagcaactcattacttcttcagagagaggccaatgctttggccatgcaacagaagtggaattccctggatgaaggccgtcaccttaccttaaaccttttaagcaaggaaattgaactaagaaatggagagttacagagtgattatacagaagatgcaacagatactaaacctgatagggatatcgagttagagctttcagcacttgatactgatgaacctgatggacaaagtgaaccaattgaagagatcttggacatacagcttggtatcagttctcaaaatgatcagttgctaaatggaatggcagtggaaaatgggcatccagtacagcagcaccaaaaggagccaccaaagcagaagaaacagagtttaggtgaagaccatgtgattctggaggagcaaaaaacaattctgccggtaacttcttgctttagccagccactcccagtgtctattagcaatgcaagttgcctccccatcaccacatctgtcagtgctggcaacctcattctgaaaactcatgttatgtctgaagataaaaacgactttttaaaacctgttgcaaatgggaagatggttaacagctgaaaggaggttcatctttcaaatttgtgaccacaccatggaagcatttacactagctttttatatatataatatatattatataatgtatattttttttaaaaaaaagatattactgggggcatccatttcctgtggactctttgatacttcaagccctcttgcattagcattatgaaaaaaaaaaagaaaatttactttactagggtaacatgttcactttccagaaatgattggaatttggacaacatttaacttaagcttcaagcagctttttatgagtttgtagcaatccggtgcagtaactgagccatttcctattttaaatggcttctatagaaaattaacaactcagttattaaactagcaggatcctacaatgatacatctagtgaaagtagacttagttaacttatttatttctattttatgtttcactgagagaagtttccatctcattccagctgctttatttatctttttcatggaactttgcatggatttctttttctttttttaattttgaagagtggagttagatgttcttaccatagaattttacagggttatatactagcattctttactgcattatatgtaggagtgtggtgcagtgcttttatctgtagcatataatttttttttaattttccatttttcaagagtagtttctgctttgttaatatttatacacaggctacttgttgaagtaattaattaaaaatataaccaagtgcctaagtctttcagctgatgtactagatattaaattctcctaagttatgcagaatcgtttttacaattttgataaattatgcactaatgtaatggcagttttttaaaatgcagatttaagcctgtacattattgaatctgatgacttggcaaaagaatcaggtgctttcagctttcttgagtaatttaaactaattaatttggttgttcattgcattatcttggttaaatattgtttattgtt

SEQ ID NO: 322045 - DNA, 4383 bp, Homo sapiens
aaatgaaagcacattacaagggactcattaggaattgtggcttaatcgttaaatgcagataatgaaaattgacttttattttttattgaaaaaactttagctccctttgtttcccttttcctaaaggtgtagctagcttgaaccagagtgcactgagccgtccaatgcaaaggaaactggtgacacttgtaaactgtcaactggtggaggaagaaggtcgtgtaagagccatgcgagcagctcgttcccttggagaaagaactgtaacagaactgatattacagcaccagaaccctcagcagttgtctgccaatctatgggccgctgtcagggctcgaggatgccagtttttagggccagctatgcaagaagaggccttgaagctggtgttactggcattagaagatggttctgccctctcaaggaaagttctggtactttttgttgtgcagagactagaaccaagatttcctcaggcatcaaaaacaagtattggtcatgttgtgcaactactgtatcgagcttcttgttttaaggttaccaaaagagatgaagactcttccctaatgcagctgaaggaggaatttcggagttatgaagcattacgcagagaacatgatgcccaaattgttcatattgccatggaagcaggactccgtatttcacctgaacagtggtcctctcttttgtatggtgatttggctcataaatcacacatgcagtctatcattgataagctacagtctccagagtcatttgcaaagagtgtccaggaattgacaattgttttgcaacgaacaggtgacccagctaacttaaatagactgaggcctcatttagagcttcttgcaaacatagaccctaatccagacgctgtttcaccaacttgggagcagctggaaaatgcaatggtagctgttaaaacagtagttcatggccttgtggacttcatacaaaattatagtagaaaaggccatgagacccctcagcctcagccaaacagcaaatacaagactagcatgtgccgagatttgcgacagcaagggggttgtccacgaggaacaaattgtacatttgcccattctcaggaagagcttgaaaagtatcgattaaggaacaaaaagatcaatgccactgtaagaacgtttcctcttctaaataaagttggtgtaaacaacactgtcacaaccacagccggaaatgtcatttctgtcataggaagtactgaaacaacagggaaaattgttccaagtacaaacggaatttcaaatgcagaaaacagtgtttcccagctaatctcacgtagtactgacagtaccttaagagctctggagaccgtgaagaaagtgggaaaggttggcgctaatggtcagaatgctgctgggccctctgcagattctgtaactgaaaataaaattggttctccacccaagactcctgtaagtaatgtagcagctacctcagctgggccctctaatgttggaacagagctgaattctgtgcctcaaaaatccagcccatttctaactagagtaccagtatatcctccgcattctgaaaacattcagtattttcaagatccaaggactcagataccctttgaagtcccacagtacccacagacaggatactatccaccacctccaacggtaccagctggtgtggctccctgtgttcctcgctttgtgaggtccaataacgttccagagtcctccctcccacctgcttccatgccatatgccgatcattacagtacattttcccctcgagatcgaatgaattcttctccttaccagcctcctcctccgcagccgtatggaccagttcctccagtaccttctggaatgtatgctcctgtgtacgacagcaggcgcatctggcgcccacctatgtaccaacgagatgacattattagaagcaattctttacctccaatggatgtgatgcactcatctgtctatcagacatctttgcgggaaagatataactcattagatggatattattcggtggcttgtcagccaccaagtgagccaaggacaactgtgcctttaccaagggaaccttgtggtcatttgaagaccagttgcgaggagcagataagaagaaagccagatcagtgggcacagtaccacactcagaaagcacctcttgtctcttcaactcttcctgtggcaacacagtcaccaacaccaccttctcctctgttcagtgtagactttcgtgcggatttctcagagagtgtgagtggtacaaaatttgaagaagatcatctttcccattattctccctggtcttgtggcaccataggctcctgtataaatgccattgattcagagcccaaagatgtcattgctaattcaaatgctgtgttaatggacctggacagtggtgatgttaagagaagagtacatttatttgaaacccagagaaggacaaaagaagaagatccaataattccctttagtgatggacccatcatctcaaaatggggtgcgatttccagatcttcccgtacaggttaccataccacagatcctgtccaggccactgcttcccaaggaagtgcgactaagcccatcagtgtatcagattatgtcccttatgtcaatgctgttgattcaaggtggagttcatatggcaacgaggccacatcatcagcacactatgttgaaagggacagattcattgttactgatttatctggtcatagaaagcattccagtactggggaccttttgagccttgaacttcagcaggccaagagcaactcattacttcttcagagagaggccaatgctttggccatgcaacagaagtggaattccctggatgaaggccgtcaccttaccttaaaccttttaagcaaggaaattgaactaagaaatggagagttacagagtgattatacagaagatgcaacagatactaaacctgatagggatatcgagttagagctttcagcacttgatactgatgaacctgatggacaaagtgaaccaattgaagagatcttggacatacagcttggtatcagttctcaaaatgatcagttgctaaatggaatggcagtggaaaatgggcatccagtacagcagcaccaaaaggagccaccaaagcagaagaaacagagtttaggtgaagaccatgtgattctggaggagcaaaaaacaattctgccggtaacttcttgctttagccagccactcccagtgtctattagcaatgcaagttgcctccccatcaccacatctgtcagtgctggcaacctcattctgaaaactcatgttatgtctgaagataaaaacgactttttaaaacctgttgcaaatgggaagatggttaacagctgaaaggaggttcatctttcaaatttgtgaccacaccatggaagcatttacactagctttttatatatataatatatattatataatgtatattttttttaaaaaaaagatattactgggggcatccatttcctgtggactctttgatacttcaagccctcttgcattagcattatgaaaaaaaaaaagaaaatttactttactagggtaacatgttcactttccagaaatgattggaatttggacaacatttaacttaagcttcaagcagctttttatgagtttgtagcaatccggtgcagtaactgagccatttcctattttaaatggcttctatagaaaattaacaactcagttattaaactagcaggatcctacaatgatacatctagtgaaagtagacttagttaacttatttatttctattttatgtttcactgagagaagtttccatctcattccagctgctttatttatctttttcatggaactttgcatggatttctttttctttttttaattttgaagagtggagttagatgttcttaccatagaattttacagggttatatactagcattctttactgcattatatgtaggagtgtggtgcagtgcttttatctgtagcatataatttttttttaattttccatttttcaagagtagtttctgctttgttaatatttatacacaggctacttgttgaagtaattaattaaaaatataaccaagtgcctaagtctttcagctgatgtactagatattaaattctcctaagttatgcagaatcgtttttacaattttgataaattatgcactaatgtaatggcagttttttaaaatgcagatttaagcctgtacattattgaatctgatgacttggcaaaagaatcaggtgctttcagctttcttgagaaaaccctgtatgtagcgtttgcactgactaacaagatggtattgctgggtttttaatttaaactaattaatttggttgttcattgcattatcttggttaaatattgtttattgtt

SEQ ID NO: 322046 - DNA, 2898 bp, Homo sapiens
ctctaatcagccgggcattagggtcctcgttgacgatggcattgcagcggatttgcttggtgcggtcagcatacctgagggagctgagagtctcctcgtaattgatgtcagcagggctcagcgctgcaatcatggctgtgcgatactatccaccacctccaacggtaccagctggtgtggctccctgtgttcctcgctttgtgaggtccaataacgttccagagtcctccctcccacctgcttccatgccatatgccgatcattacagtacattttcccctcgagatcgaatgaattcttctccttaccagcctcctcctccgcagccgtatggaccagttcctccagtaccttctggaatgtatgctcctgtgtacgacagcaggcgcatctggcgcccacctatgtaccaacgagatgacattattagaagcaattctttacctccaatggatgtgatgcactcatctgtctatcagacatctttgcgggaaagatataactcattagatggatattattcggtggcttgtcagccaccaagtgagccaaggacaactgtgcctttaccaagggaaccttgtggtcatttgaagaccagttgcgaggagcagataagaagaaagccagatcagtgggcacagtaccacactcagaaagcacctcttgtctcttcaactcttcctgtggcaacacagtcaccaacaccaccttctcctctgttcagtgtagactttcgtgcggatttctcagagagtgtgagtggtacaaaatttgaagaagatcatctttcccattattctccctggtcttgtggcaccataggctcctgtataaatgccattgattcagagcccaaagatgtcattgctaattcaaatgctgtgttaatggacctggacagtggtgatgttaagagaagagtacatttatttgaaacccagagaaggacaaaagaagaagatccaataattccctttagtgatggacccatcatctcaaaatggggtgcgatttccagatcttcccgtacaggttaccataccacagatcctgtccaggccactgcttcccaaggaagtgcgactaagcccatcagtgtatcagattatgtcccttatgtcaatgctgttgattcaaggtggagttcatatggcaacgaggccacatcatcagcacactatgttgaaagggacagattcattgttactgatttatctggtcatagaaagcattccagtactggggaccttttgagccttgaacttcagcaggccaagagcaactcattacttcttcagagagaggccaatgctttggccatgcaacagaagtggaattccctggatgaaggccgtcaccttaccttaaaccttttaagcaaggaaattgaactaagaaatggagagttacagagtgattatacagaagatgcaacagatactaaacctgatagggatatcgagttagagctttcagcacttgatactgatgaacctgatggacaaagtgaaccaattgaagagatcttggacatacagcttggtatcagttctcaaaatgatcagttgctaaatggaatggcagtggaaaatgggcatccagtacagcagcaccaaaaggagccaccaaagcagaagaaacagagtttaggtgaagaccatgtgattctggaggagcaaaaaacaattctgccggtaacttcttgctttagccagccactcccagtgtctattagcaatgcaagttgcctccccatcaccacatctgtcagtgctggcaacctcattctgaaaactcatgttatgtctgaagataaaaacgactttttaaaacctgttgcaaatgggaagatggttaacagctgaaaggaggttcatctttcaaatttgtgaccacaccatggaagcatttacactagctttttatatatataatatatattatataatgtatattttttttaaaaaaaagatattactgggggcatccatttcctgtggactctttgatacttcaagccctcttgcattagcattatgaaaaaaaaaaagaaaatttactttactagggtaacatgttcactttccagaaatgattggaatttggacaacatttaacttaagcttcaagcagctttttatgagtttgtagcaatccggtgcagtaactgagccatttcctattttaaatggcttctatagaaaattaacaactcagttattaaactagcaggatcctacaatgatacatctagtgaaagtagacttagttaacttatttatttctattttatgtttcactgagagaagtttccatctcattccagctgctttatttatctttttcatggaactttgcatggatttctttttctttttttaattttgaagagtggagttagatgttcttaccatagaattttacagggttatatactagcattctttactgcattatatgtaggagtgtggtgcagtgcttttatctgtagcatataatttttttttaattttccatttttcaagagtagtttctgctttgttaatatttatacacaggctacttgttgaagtaattaattaaaaatataaccaagtgcctaagtctttcagctgatgtactagatattaaattctcctaagttatgcagaatcgtttttacaattttgataaattatgcactaatgtaatggcagttttttaaaatgcagatttaagcctgtacattattgaatctgatgacttggcaaaagaatcaggtgctttcagctttcttgagaaaaccctgtatgtagcgtttgcactgactaacaagatggtattgctgggtttttaatttaaactaattaatttggttgttcattgcattatcttggttaaatattgtttattgtt

SEQ ID NO: 322047 - DNA, 3925 bp, Homo sapiens
agccaagtcttgtcagagatttcctctttcaggtggcaaagctgttttcttcacacttgagtctctacaatattgtttggatcagtagtttccaaagttcattaactcctggccatactttattatgttttggggtactggttatccaagggaaacacttttttaaacaacaaaacaaaaaaaccgcccagcagtccaaagtaatttgtgttcctaaaaatggaatatggaaagttaatttgcttgtttgatgtggtcgttgagaaaaatacataaaagctttgatgtttattatgtgagcaaccaatataaatacagtttagttgaaaggaacactattaaggtattgtttccaggcagaatttcagaaatgtaattaattcagcaaataggttttttaaaaaagacatccaaaggttataaaattatttagaagtattttaggtctgaagctgtaatagttgacttaagcaattaactcttcaaaggtgaatgatgaatatgtggttaattcatacttttgtccatttctagcttacaaaacactacacagcaaaataatgatctgctagactgctaacccgagcatccagcttccacaatgcctgtgcaggcagctcaatggacagaatttctgtcctgtccaatctgctataatgaatttgatgagaatgtgcacaaacccatcagtttaggttgttcacacactgtttgcaagacctgcttgaataaacttcatcgaaaagcttgtccttttgaccagactgccatcaacacagatattgatgtacttcctgtcaacttcgcacttctccagttagttggagcccaggtaccagatcatcagtcaattaagttaagtaatctaggtgagaataaacactatgaggttgcaaagaaatgcgttgaggatttggcactctacttaaaaccactaagtggaggtaaaggtgtagctagcttgaaccagagtgcactgagccgtccaatgcaaaggaaactggtgacacttgtaaactgtcaactggtggaggaagaaggtcgtgtaagagccatgcgagcagctcgttcccttggagaaagaactgtaacagaactgatattacagcaccagaaccctcagcagttgtctgccaatctatgggccgctgtcagggctcgaggatgccagtttttagggccagctatgcaagaagaggccttgaagctggtgttactggcattagaagatggttctgccctctcaaggaaagttctggtactttttgttgtgcagagactagaaccaagatttcctcaggcatcaaaaacaagtattggtcatgttgtgcaactactgtatcgagcttcttgttttaaggttaccaaaagagatgaagactcttccctaatgcagctgaaggaggaatttcggagttatgaagcattacgcagagaacatgatgcccaaattgttcatattgccatggaagcaggactccgtatttcacctgaacagtggtcctctcttttgtatggtgatttggctcataaatcacacatgcagtctatcattgataagctacagtctccagagtcatttgcaaagagtgtccaggaattgacaattgttttgcaacgaacaggtgacccagctaacttaaatagactgaggcctcatttagagcttcttgcaaacatagaccctaatccagacgctgtttcaccaacttgggagcagctggaaaatgcaatggtagctgttaaaacagtagttcatggccttgtggacttcatacaaaattatagtagaaaaggccatgagacccctcagcctcagccaaacagcaaatacaagactagcatgtgccgagatttgcgacagcaagggggttgtccacgaggaacaaattgtacatttgcccattctcaggaagagcttgaaaagtatcgattaaggaacaaaaagatcaatgccactgtaagaacgtttcctcttctaaataaagttggtgtaaacaacactgtcacaaccacagccggaaatgtcatttctgtcataggaagtactgaaacaacagggaaaattgttccaagtacaaacggaatttcaaatgcagaaaacagtgtttcccagctaatctcacgtagtactgacagtaccttaagagctctggagaccgtgaagaaagtgggaaaggttggcgctaatggtcagaatgctgctgggccctctgcagattctgtaactgaaaataaaattggttctccacccaagactcctgtaagtaatgtagcagctacctcagctgggccctctaatgttggaacagagctgaattctgtgcctcaaaaatccagcccatttctaactagagtaccagtatatcctccgcattctgaaaacattcagtattttcaagatccaaggactcagataccctttgaagtcccacagtacccacagacaggatactatccaccacctccaacggtaccagctggtgtggctccctgtgttcctcgctttgtgaggtccaataacgttccagagtcctccctcccacctgcttccatgccatatgccgatcattacagtacattttcccctcgagatcgaatgaattcttctccttaccagcctcctcctccgcagccgtatggaccagttcctccagtaccttctggaatgtatgctcctgtgtacgacagcaggcgcatctggcgcccacctatgtaccaacgagatgacattattagaagcaattctttacctccaatggatgtgatgcactcatctgtctatcagacatctttgcgggaaagatataactcattagatggatattattcggtggcttgtcagccaccaagtgagccaaggacaactgtgcctttaccaagggaaccttgtggtcatttgaagaccagttgcgaggagcagataagaagaaagccagatcagtgggcacagtaccacactcagaaagcacctcttgtctcttcaactcttcctgtggcaacacagtcaccaacaccaccttctcctctgttcagtgtagactttcgtgcggatttctcagagagtgtgagtggtacaaaatttgaagaagatcatctttcccattattctccctggtcttgtggcaccataggctcctgtataaatgccattgattcagagcccaaagatgtcattgctaattcaaatgctgtgttaatggacctggacagtggtgatgttaagagaagagtacatttatttgaaacccagagaaggacaaaagaagaagatccaataattccctttagtgatggacccatcatctcaaaatggggtgcgatttccagatcttcccgtacaggttaccataccacagatcctgtccaggccactgcttcccaaggaagtgcgactaagcccatcagtgtatcagattatgtcccttatgtcaatgctgttgattcaaggtggagttcatatggcaacgaggccacatcatcagcacactatgttgaaagggacagattcattgttactgatttatctggtcatagaaagcattccagtactggggaccttttgagccttgaacttcagcaggccaagagcaactcattacttcttcagagagaggccaatgctttggccatgcaacagaagtggaattccctggatgaaggccgtcaccttaccttaaaccttttaagcaaggaaattgaactaagaaatggagaggtaaagaaactgaacctttcggcttcatgcttaatgtatttgttttctgctgctgcatcttggttataccattactgagtgcattttggtgtgcctatctctgatggatgattgattgcttttaaaacttataacagaaataaaattgtaatcccagatttcttaaataattctttaactagatcatcgggatttttgtttttttga

SEQ ID NO: 322048 - DNA, 3939 bp, Homo sapiens
agttggggagccgaaagcggagctcgaaactgactggaaacttcagtggcgcggagactcgccagtttcaaccccggaaacttttctttgcaggaggagaagagaaggggtgcaagcgcccccacttttgctctttttcctcccctcctcctcctctccaattcgcctccccccacttggagcgggcagctgtgaactggccaccccgcgccttcctaagtgctcgccgcggtagccggccgacgcgccagcttccccgggagccgcttgctccgcatccgggcagccgaggggagaggagcccgcgcctcgagtccccgagccgccgcggcttctcgcctttcccggccaccagccccctgccccgggcccgcgtatgaatctcctggaccccttcatgaagatgaccgacgagcaggagaagggcctgtccggcgcccccagccccaccatgtccgaggactccgcgggctcgccctgcccgtcgggctccggctcggacaccgagaacacgcggccccaggagaacacgttccccaagggcgagcccgatctgaagaaggagagcgaggaggacaagttccccgtgtgcatccgcgaggcggtcagccaggtgctcaaaggctacgactggacgctggtgcccatgccggtgcgcgtcaacggctccagcaagaacaagccgcacgtcaagcggcccatgaacgccttcatggtgtgggcgcaggcggcgcgcaggaagctcgcggaccagtacccgcacttgcacaacgccgagctcagcaagacgctgggcaagctctggagacttctgaacgagagcgagaagcggcccttcgtggaggaggcggagcggctgcgcgtgcagcacaagaaggaccacccggattacaagtaccagccgcggcggaggaagtcggtgaagaacgggcaggcggaggcagaggaggccacggagcagacgcacatctcccccaacgccatcttcaaggcgctgcaggccgactcgccacactcctcctccggcatgagcgaggtgcactcccccggcgagcactcggggcaatcccagggcccaccgaccccacccaccacccccaaaaccgacgtgcagccgggcaaggctgacctgaagcgagaggggcgccccttgccagaggggggcagacagccccctatcgacttccgcgacgtggacatcggcgagctgagcagcgacgtcatctccaacatcgagaccttcgatgtcaacgagtttgaccagtacctgccgcccaacggccacccgggggtgccggccacgcacggccaggtcacctacacgggcagctacggcatcagcagcaccgcggccaccccggcgagcgcgggccacgtgtggatgtccaagcagcaggcgccgccgccacccccgcagcagcccccacaggccccgccggccccgcaggcgcccccgcagccgcaggcggcgcccccacagcagccggcggcacccccgcagcagccacaggcgcacacgctgaccacgctgagcagcgagccgggccagtcccagcgaacgcacatcaagacggagcagctgagccccagccactacagcgagcagcagcagcactcgccccaacagatcgcctacagccccttcaacctcccacactacagcccctcctacccgcccatcacccgctcacagtacgactacaccgaccaccagaactccagctcctactacagccacgcggcaggccagggcaccggcctctactccaccttcacctacatgaaccccgctcagcgccccatgtacacccccatcgccgacacctctggggtcccttccatcccgcagacccacagcccccagcactgggaacaacccgtctacacacagctcactcgaccttgaggaggcctcccacgaagggcgaagatggccgagatgatcctaaaaataaccgaagaaagagaggaccaaccagaattccctttggacatttgtgtttttttgtttttttattttgttttgttttttcttcttcttcttcttccttaaagacatttaagctaaaggcaactcgtacccaaatttccaagacacaaacatgacctatccaagcgcattacccacttgtggccaatcagtggccaggccaaccttggctaaatggagcagcgaaatcaacgagaaactggactttttaaaccctcttcagagcaagcgtggaggatgatggagaatcgtgtgatcagtgtgctaaatctctctgcctgtttggactttgtaattatttttttagcagtaattaaagaaaaaagtcctctgtgaggaatattctctattttaaatatttttagtatgtactgtgtatgattcattaccattttgaggggatttatacatatttttagataaaattaaatgctcttatttttccaacagctaaactactcttagttgaacagtgtgccctagcttttcttgcaaccagagtatttttgtacagatttgctttctcttacaaaaagaaaaaaaaaatcctgttgtattaacatttaaaaacagaattgtgttatgtgatcagttttgggggttaactttgcttaattcctcaggctttgcgatttaaggaggagctgccttaaaaaaaaataaaggccttattttgcaattatgggagtaaacaatagtctagagaagcatttggtaagctttatcatatatatattttttaaagaagagaaaaacaccttgagccttaaaacggtgctgctgggaaacatttgcactcttttagtgcatttcctcctgcctttgcttgttcactgcagtcttaagaaagaggtaaaaggcaagcaaaggagatgaaatctgttctgggaatgtttcagcagccaataagtgcccgagcacactgcccccggttgcctgcctgggccccatgtggaaggcagatgcctgctcgctctgtcacctgtgcctctcagaacaccagcagttaaccttcaagacattccacttgctaaaattatttattttgtaaggagaggttttaattaaaacaaaaaaaaattcttttttttttttttttccaattttaccttctttaaaataggttgttggagctttcctcaaagggtatggtcatctgttgttaaattatgttcttaactgtaaccagtttttttttatttatctctttaatctttttttattattaaaagcaagtttctttgtattcctcaccctagatttgtataaatgcctttttgtccatcccttttttctttgttgtttttgttgaaaacaaactggaaacttgtttctttttttgtataaatgagagattgcaaatgtagtgtatcactgagtcatttgcagtgttttctgccacagacctttgggctgccttatattgtgtgtgtgtgtgggtgtgtgtgtgttttgacacaaaaacaatgcaagcatgtgtcatccatatttctctgcatcttctcttggagtgagggaggctacctggaggggatcagcccactgacagaccttaatcttaattactgctgtggctagagagtttgaggattgctttttaaaaaagacagcaaacttttttttttatttaaaaaaagatatattaacagttttagaagtcagtagaataaaatcttaaagcactcataatatggcatccttcaatttctgtataaaagcagatctttttaaaaagatacttctgtaacttaagaaacctggcatttaaatcatattttgtctttaggtaaaagctttggtttgtgttcgtgttttgtttgtttcacttgtttccctcccagccccaaaccttttgttctctccgtgaaacttacctttccctttttctttctcttttttttttttgtatattattgtttacaataaatatacattgcattaaaaagaaa

SEQ ID NO: 322049 - DNA, 3885 bp, Homo sapiens
agttggggagccgaaagcggagctcgaaactgactggaaacttcagtggcgcggagactcgccagtttcaaccccggaaacttttctttgcaggaggagaagagaaggggtgcaagcgcccccacttttgctctttttcctcccctcctcctcctctccaattcgcctccccccacttggagcgggcagctgtgaactggccaccccgcgccttcctaagtgctcgccgcggtagccggccgacgcgccagcttccccgggagccgcttgctccgcatccgggcagccgaggggagaggagcccgcgcctcgagtccccgagccgccgcggcttctcgcctttcccggccaccagccccctgccccgggcccgcgtatgaatctcctggaccccttcatgaagatgaccgacgagcaggagaagggcctgtccggcgcccccagccccaccatgtccgaggactccgcgggctcgccctgcccgtcgggctccggctcggacaccgagaacacgcggccccaggagaacacgttccccaagggcgagcccgatctgaagaaggagagcgaggaggacaagttccccgtgtgcatccgcgaggcggtcagccaggtgctcaaaggctacgactggacgctggtgcccatgccggtgcgcgtcaacggctccagcaagaacaagccgcacgtcaagcggcccatgaacgccttcatggtgtgggcgcaggcggcgcgcaggaagctcgcggaccagtacccgcacttgcacaacgccgagctcagcaagacgctgggcaagctctggagacttctgaacgagagcgagaagcggcccttcgtggaggaggcggagcggctgcgcgtgcagcacaagaaggaccacccggattacaagtaccagccgcggcggaggaagtcggtgaagaacgggcaggcggaggcagaggaggccacggagcagacgcacatctcccccaacgccatcttcaaggcgctgcaggccgactcgccacactcctcctccggcatgagcgaggtgcactcccccggcgagcactcggggcaatcccagggcccaccgaccccacccaccacccccaaaaccgacgtgcagccgggcaaggctgacctgaagcgagaggggcgccccttgccagaggggggcagacagccccctatcgacttccgcgacgtggacatcggcgagctgagcagcgacgtcatctccaacatcgagaccttcgatgtcaacgagtttgaccagtacctgccgcccaacggccacccgggggtgccggccacgcacggccaggtcacctacacgggcagctacggcatcagcagcaccgcggccaccccggcgagcgcgggccacgtgtggatgtccaagcagcaggcgccgccgccacccccgcagcagcccccacaggccccgccggccccgcaggcgcccccgcagccgcaggcggcgcccccacagcagccggcggcacccccgcagcagccacaggcgcacacgctgaccacgctgagcagcgagccgggccagtcccagcgaacgcacatcaagacggagcagctgagccccagccactacagcgagcagcagcagcactcgccccaacagatcgcctacagccccttcaacctcccacactacagcccctcctacccgcccatcacccgctcacagtacgactacaccgaccaccagaactccagctcctactacagccacgcggcaggccagggcaccggcctctactccaccttcacctacatgaaccccgctcagcgccccatgtacacccccatcgccgacacctctggggtcccttccatcccgcagacccacagcccccagcactgggaacaacccgtctacacacagctcactcgaccttgaggaggcctcccacgaagggcgaagatggccgagatgatcctatttttgtttttttattttgttttgttttttcttcttcttcttcttccttaaagacatttaagctaaaggcaactcgtacccaaatttccaagacacaaacatgacctatccaagcgcattacccacttgtggccaatcagtggccaggccaaccttggctaaatggagcagcgaaatcaacgagaaactggactttttaaaccctcttcagagcaagcgtggaggatgatggagaatcgtgtgatcagtgtgctaaatctctctgcctgtttggactttgtaattatttttttagcagtaattaaagaaaaaagtcctctgtgaggaatattctctattttaaatatttttagtatgtactgtgtatgattcattaccattttgaggggatttatacatatttttagataaaattaaatgctcttatttttccaacagctaaactactcttagttgaacagtgtgccctagcttttcttgcaaccagagtatttttgtacagatttgctttctcttacaaaaagaaaaaaaaaatcctgttgtattaacatttaaaaacagaattgtgttatgtgatcagttttgggggttaactttgcttaattcctcaggctttgcgatttaaggaggagctgccttaaaaaaaaataaaggccttattttgcaattatgggagtaaacaatagtctagagaagcatttggtaagctttatcatatatatattttttaaagaagagaaaaacaccttgagccttaaaacggtgctgctgggaaacatttgcactcttttagtgcatttcctcctgcctttgcttgttcactgcagtcttaagaaagaggtaaaaggcaagcaaaggagatgaaatctgttctgggaatgtttcagcagccaataagtgcccgagcacactgcccccggttgcctgcctgggccccatgtggaaggcagatgcctgctcgctctgtcacctgtgcctctcagaacaccagcagttaaccttcaagacattccacttgctaaaattatttattttgtaaggagaggttttaattaaaacaaaaaaaaattcttttttttttttttttccaattttaccttctttaaaataggttgttggagctttcctcaaagggtatggtcatctgttgttaaattatgttcttaactgtaaccagtttttttttatttatctctttaatctttttttattattaaaagcaagtttctttgtattcctcaccctagatttgtataaatgcctttttgtccatcccttttttctttgttgtttttgttgaaaacaaactggaaacttgtttctttttttgtataaatgagagattgcaaatgtagtgtatcactgagtcatttgcagtgttttctgccacagacctttgggctgccttatattgtgtgtgtgtgtgggtgtgtgtgtgttttgacacaaaaacaatgcaagcatgtgtcatccatatttctctgcatcttctcttggagtgagggaggctacctggaggggatcagcccactgacagaccttaatcttaattactgctgtggctagagagtttgaggattgctttttaaaaaagacagcaaacttttttttttatttaaaaaaagatatattaacagttttagaagtcagtagaataaaatcttaaagcactcataatatggcatccttcaatttctgtataaaagcagatctttttaaaaagatacttctgtaacttaagaaacctggcatttaaatcatattttgtctttaggtaaaagctttggtttgtgttcgtgttttgtttgtttcacttgtttccctcccagccccaaaccttttgttctctccgtgaaacttacctttccctttttctttctcttttttttttttgtatattattgtttacaataaatatacattgcattaaaaagaaa

SEQ ID NO: 322050 - DNA, 3886 bp, Homo sapiens
agttggggagccgaaagcggagctcgaaactgactggaaacttcagtggcgcggagactcgccagtttcaaccccggaaacttttctttgcaggaggagaagagaaggggtgcaagcgcccccacttttgctctttttcctcccctcctcctcctctccaattcgcctccccccacttggagcgggcagctgtgaactggccaccccgcgccttcctaagtgctcgccgcggtagccggccgacgcgccagcttccccgggagccgcttgctccgcatccgggcagccgaggggagaggagcccgcgcctcgagtccccgagccgccgcggcttctcgcctttcccggccaccagccccctgccccgggcccgcgtatgaatctcctggaccccttcatgaagatgaccgacgagcaggagaagggcctgtccggcgcccccagccccaccatgtccgaggactccgcgggctcgccctgcccgtcgggctccggctcggacaccgagaacacgcggccccaggagaacacgttccccaagggcgagcccgatctgaagaaggagagcgaggaggacaagttccccgtgtgcatccgcgaggcggtcagccaggtgctcaaaggctacgactggacgctggtgcccatgccggtgcgcgtcaacggctccagcaagaacaagccgcacgtcaagcggcccatgaacgccttcatggtgtgggcgcaggcggcgcgcaggaagctcgcggaccagtacccgcacttgcacaacgccgagctcagcaagacgctgggcaagctctggagacttctgaacgagagcgagaagcggcccttcgtggaggaggcggagcggctgcgcgtgcagcacaagaaggaccacccggattacaagtaccagccgcggcggaggaagtcggtgaagaacgggcaggcggaggcagaggaggccacggagcagacgcacatctcccccaacgccatcttcaaggcgctgcaggccgactcgccacactcctcctccggcatgagcgaggtgcactcccccggcgagcactcggggcaatcccagggcccaccgaccccacccaccacccccaaaaccgacgtgcagccgggcaaggctgacctgaagcgagaggggcgccccttgccagaggggggcagacagccccctatcgacttccgcgacgtggacatcggcgagctgagcagcgacgtcatctccaacatcgagaccttcgatgtcaacgagtttgaccagtacctgccgcccaacggccacccgggggtgccggccacgcacggccaggtcacctacacgggcagctacggcatcagcagcaccgcggccaccccggcgagcgcgggccacgtgtggatgtccaagcagcaggcgccgccgccacccccgcagcagcccccacaggccccgccggccccgcaggcgcccccgcagccgcaggcggcgcccccacagcagccggcggcacccccgcagcagccacaggcgcacacgctgaccacgctgagcagcgagccgggccagtcccagcgaacgcacatcaagacggagcagctgagccccagccactacagcgagcagcagcagcactcgccccaacagatcgcctacagccccttcaacctcccacactacagcccctcctacccgcccatcacccgctcacagtacgactacaccgaccaccagaactccagctcctactacagccacgcggcaggccagggcaccggcctctactccaccttcacctacatgaaccccgctcagcgccccatgtacacccccatcgccgacacctctggggtcccttccatcccgcagacccacagcccccagcactgggaacaacccgtctacacacagctcactcgaccttgaggaggcctcccacgaagggcgaagatggccgagatgatcctaaaaataaccgaagaaagagaggaccaaccagaattccctttggacatttgtgtttttttgtttttttattttgttttgttttttcttcttcttcttcttccttaaagacatttaagctaaaggcaactcgtacccaaatttccaagacacaaacatgacctatccaagcgcattacccacttgtggccaatcagtggccaggccaaccttggctaaatggagcagcgaaatcaacgagaaactggactttttaaaccctcttcagagcaagcgtggaggatgatggagaatcgtgtgatcagtgtgctaaatctctctgcctgtttggactttgtaattatttttttagcagtaattaaagaaaaaagtcctctgtgaggaatattctctattttaaatatttttagtatgtactgtgtatgattcattaccattttgaggggatttatacatatttttagatgtgccctagcttttcttgcaaccagagtatttttgtacagatttgctttctcttacaaaaagaaaaaaaaaatcctgttgtattaacatttaaaaacagaattgtgttatgtgatcagttttgggggttaactttgcttaattcctcaggctttgcgatttaaggaggagctgccttaaaaaaaaataaaggccttattttgcaattatgggagtaaacaatagtctagagaagcatttggtaagctttatcatatatatattttttaaagaagagaaaaacaccttgagccttaaaacggtgctgctgggaaacatttgcactcttttagtgcatttcctcctgcctttgcttgttcactgcagtcttaagaaagaggtaaaaggcaagcaaaggagatgaaatctgttctgggaatgtttcagcagccaataagtgcccgagcacactgcccccggttgcctgcctgggccccatgtggaaggcagatgcctgctcgctctgtcacctgtgcctctcagaacaccagcagttaaccttcaagacattccacttgctaaaattatttattttgtaaggagaggttttaattaaaacaaaaaaaaattcttttttttttttttttccaattttaccttctttaaaataggttgttggagctttcctcaaagggtatggtcatctgttgttaaattatgttcttaactgtaaccagtttttttttatttatctctttaatctttttttattattaaaagcaagtttctttgtattcctcaccctagatttgtataaatgcctttttgtccatcccttttttctttgttgtttttgttgaaaacaaactggaaacttgtttctttttttgtataaatgagagattgcaaatgtagtgtatcactgagtcatttgcagtgttttctgccacagacctttgggctgccttatattgtgtgtgtgtgtgggtgtgtgtgtgttttgacacaaaaacaatgcaagcatgtgtcatccatatttctctgcatcttctcttggagtgagggaggctacctggaggggatcagcccactgacagaccttaatcttaattactgctgtggctagagagtttgaggattgctttttaaaaaagacagcaaacttttttttttatttaaaaaaagatatattaacagttttagaagtcagtagaataaaatcttaaagcactcataatatggcatccttcaatttctgtataaaagcagatctttttaaaaagatacttctgtaacttaagaaacctggcatttaaatcatattttgtctttaggtaaaagctttggtttgtgttcgtgttttgtttgtttcacttgtttccctcccagccccaaaccttttgttctctccgtgaaacttacctttccctttttctttctcttttttttttttgtatattattgtttacaataaatatacattgcattaaaaagaaa

SEQ ID NO: 322051 - DNA, 4001 bp, Homo sapiens
  misc_feature (3814)..(3814): n is a, c, g, or t
agttggggagccgaaagcggagctcgaaactgactggaaacttcagtggcgcggagactcgccagtttcaaccccggaaacttttctttgcaggaggagaagagaaggggtgcaagcgcccccacttttgctctttttcctcccctcctcctcctctccaattcgcctccccccacttggagcgggcagctgtgaactggccaccccgcgccttcctaagtgctcgccgcggtagccggccgacgcgccagcttccccgggagccgcttgctccgcatccgggcagccgaggggagaggagcccgcgcctcgagtccccgagccgccgcggcttctcgcctttcccggccaccagccccctgccccgggcccgcgtatgaatctcctggaccccttcatgaagatgaccgacgagcaggagaagggcctgtccggcgcccccagccccaccatgtccgaggactccgcgggctcgccctgcccgtcgggctccggctcggacaccgagaacacgcggccccaggagaacacgttccccaagggcgagcccgatctgaagaaggagagcgaggaggacaagttccccgtgtgcatccgcgaggcggtcagccaggtgctcaaaggctacgactggacgctggtgcccatgccggtgcgcgtcaacggctccagcaagaacaagccgcacgtcaagcggcccatgaacgccttcatggtgtgggcgcaggcggcgcgcaggaagctcgcggaccagtacccgcacttgcacaacgccgagctcagcaagacgctgggcaagctctggagacttctgaacgagagcgagaagcggcccttcgtggaggaggcggagcggctgcgcgtgcagcacaagaaggaccacccggattacaagtaccagccgcggcggaggaagtcggtgaagaacgggcaggcggaggcagaggaggccacggagcagacgcacatctcccccaacgccatcttcaaggcgctgcaggccgactcgccacactcctcctccggcatgagcgaggtgcactcccccggcgagcactcggggcaatcccagggcccaccgaccccacccaccacccccaaaaccgacgtgcagccgggcaaggctgacctgaagcgagaggggcgccccttgccagaggggggcagacagccccctatcgacttccgcgacgtggacatcggcgagctgagcagcgacgtcatctccaacatcgagaccttcgatgtcaacgagtttgaccagtacctgccgcccaacggccacccgggggtgccggccacgcacggccaggtcacctacacgggcagctacggcatcagcagcaccgcggccaccccggcgagcgcgggccacgtgtggatgtccaagcagcaggcgccgccgccacccccgcagcagcccccacaggccccgccggccccgcaggcgcccccgcagccgcaggcggcgcccccacagcagccggcggcacccccgcagcagccacaggcgcacacgctgaccacgctgagcagcgagccgggccagtcccagcgaacgcacatcaagacggagcagctgagccccagccactacagcgagcagcagcagcactcgccccaacagatcgcctacagccccttcaacctcccacactacagcccctcctacccgcccatcacccgctcacagtacgactacaccgaccaccagaactccagctcctactacagccacgcggcaggccagggcaccggcctctactccaccttcacctacatgaaccccgctcagcgccccatgtacacccccatcgccgacacctctggggtcccttccatcccgcagacccacagcccccagcactgggaacaacccgtctacacacagctcactcgaccttgaggaggcctcccacgaagggcgaagatggccgagatgatcctaaaaataaccgaagaaagagaggaccaaccagaattccctttggacatttgtgtttttttgtttttttattttgttttgttttttcttcttcttcttcttccttaaagacatttaagctaaaggcaactcgtacccaaatttccaagacacaaacatgacctatccaagcgcattacccacttgtggccaatcagtggccaggccaaccttggctaaatggagcagcgaaatcaacgagaaactggactttttaaaccctcttcagagcaagcgtggaggatgatggagaatcgtgtgatcagtgtgctaaatctctctgcctgtttggactttgtaattatttttttagcagtaattaaagaaaaaagtcctctgtgaggaatattctctattttaaatatttttagtatgtactgtgtatgattcattaccattttgaggggatttatacatatttttagataaaattaaatgctcttatttttccaacagctaaactactcttagttgaacagtgtgccctagcttttcttgcaaccagagtatttttgtacagatttgctttctcttacaaaaagaaaaaaaaaatcctgttgtattaacatttaaaaacagaattgtgttatgtgatcagttttgggggttaactttgcttaattcctcaggctttgcgatttaaggaggagctgccttaaaaaaaaataaaggccttattttgcaattatgggagtaaacaatagtctagagaagcatttggtaagctttatcatatatatattttttaaagaagagaaaaacaccttgagccttaaaacggtgctgctgggaaacatttgcactcttttagtgcatttcctcctgcctttgcttgttcactgcagtcttaagaaagaggtaaaaggcaagcaaaggagatgaaatctgttctgggaatgtttcagcagccaataagtgcccgagcacactgcccccggttgcctgcctgggccccatgtggaaggcagatgcctgctcgctctgtcacctgtgcctctcagaacaccagcagttaaccttcaagacattccacttgctaaaattatttattttgtaaggagaggttttaattaaaacaaaaaaaaattcttttttttttttttttccaattttaccttctttaaaataggttgttggagctttcctcaaagggtatggtcatctgttgttaaattatgttcttaactgtaaccagtttttttttatttatctctttaatctttttttattattaaaagcaagtttctttgtattcctcaccctagatttgtataaatgcctttttgtccatcccttttttctttgttgtttttgttgaaaacaaactggaaacttgtttctttttttgtataaatgagagattgcaaatgtagtgtatcactgagtcatttgcagtgttttctgccacagacctttgggctgccttatattgtgtgtgtgtgtgggtgtgtgtgtgttttgacacaaaaacaatgcaagcatgtgtcatccatatttctctgcatcttctcttggagtgagggaggctacctggaggggatcagcccactgacagaccttaatcttaattactgctgtggctagagagtttgaggattgctttttaaaaaagacagcaaacttttttttttatttaaaaaaagatatattaacagttttagaagtcagtagaataaaatcttaaagcactcataatatggcatcgataaacacctttatcgatgccaccttcctggtgtctgggcttccgcagcttcttcttcttgaagtaagcatccgtaagatgttttgggatttttaccttgctgatatcgattttgtgttgaagtnggccatgaccaattttctggtgtgtttcttcgtatgaggaactcgacttgaggaccacgaggtcccagtcacaagtaataagccactagcccgctgcttcaggaaaaccaccctcttgcccctgtggcgtcccgtgaggatgatcagaatggtcccggggtatgctggctagtggcatcgatgaaca

SEQ ID NO: 322052 - DNA, 2194 bp, Homo sapiens
gtgatccgacgtgggcccctccgcagcgatttgaagaccttggggaaccgtcgagggggcgcccaattggaaaacctggagctccagcgggaggaagtcggcacgaccacagcccccagcactgggaacaacccgtctacacacagctcactcgaccttgaggaggcctcccacgaagggcgaagatggccgagatgatcctaaaaataaccgaagaaagagaggaccaaccagaattccctttggacatttgtgtttttttgtttttttattttgttttgttttttcttcttcttcttcttccttaaagacatttaagctaaaggcaactcgtacccaaatttccaagacacaaacatgacctatccaagcgcattacccacttgtggccaatcagtggccaggccaaccttggctaaatggagcagcgaaatcaacgagaaactggactttttaaaccctcttcagagcaagcgtggaggatgatggagaatcgtgtgatcagtgtgctaaatctctctgcctgtttggactttgtaattatttttttagcagtaattaaagaaaaaagtcctctgtgaggaatattctctattttaaatatttttagtatgtactgtgtatgattcattaccattttgaggggatttatacatatttttagataaaattaaatgctcttatttttccaacagctaaactactcttagttgaacagtgtgccctagcttttcttgcaaccagagtatttttgtacagatttgctttctcttacaaaaagaaaaaaaaaatcctgttgtattaacatttaaaaacagaattgtgttatgtgatcagttttgggggttaactttgcttaattcctcaggctttgcgatttaaggaggagctgccttaaaaaaaaataaaggccttattttgcaattatgggagtaaacaatagtctagagaagcatttggtaagctttatcatatatatattttttaaagaagagaaaaacaccttgagccttaaaacggtgctgctgggaaacatttgcactcttttagtgcatttcctcctgcctttgcttgttcactgcagtcttaagaaagaggtaaaaggcaagcaaaggagatgaaatctgttctgggaatgtttcagcagccaataagtgcccgagcacactgcccccggttgcctgcctgggccccatgtggaaggcagatgcctgctcgctctgtcacctgtgcctctcagaacaccagcagttaaccttcaagacattccacttgctaaaattatttattttgtaaggagaggttttaattaaaacaaaaaaaaattcttttttttttttttttccaattttaccttctttaaaataggttgttggagctttcctcaaagggtatggtcatctgttgttaaattatgttcttaactgtaaccagtttttttttatttatctctttaatctttttttattattaaaagcaagtttctttgtattcctcaccctagatttgtataaatgcctttttgtccatcccttttttctttgttgtttttgttgaaaacaaactggaaacttgtttctttttttgtataaatgagagattgcaaatgtagtgtatcactgagtcatttgcagtgttttctgccacagacctttgggctgccttatattgtgtgtgtgtgtgggtgtgtgtgtgttttgacacaaaaacaatgcaagcatgtgtcatccatatttctctgcatcttctcttggagtgagggaggctacctggaggggatcagcccactgacagaccttaatcttaattactgctgtggctagagagtttgaggattgctttttaaaaaagacagcaaacttttttttttatttaaaaaaagatatattaacagttttagaagtcagtagaataaaatcttaaagcactcataatatggcatccttcaatttctgtataaaagcagatctttttaaaaagatacttctgtaacttaagaaacctggcatttaaatcatattttgtctttaggtaaaagctttggtttgtgttcgtgttttgtttgtttcacttgtttccctcccagccccaaaccttttgttctctccgtgaaacttacctttccctttttctttctcttttttttttttgtatattattgtttacaataaatatacattgcattaaaaagaaa

SEQ ID NO: 322053 - DNA, 994 bp, Homo sapiens
ggaatagctttgcccagatttcgcaattgtgcttcggaaccgagcggttttttagacaatccacctgcgcgaaataaatatgttgtaaaaagagggctttattttaccccccaaacaaaaaaaaattcttttttttttttttttccaattttaccttctttaaaataggttgttggagctttcctcaaagggtatggtcatctgttgttaaattatgttcttaactgtaaccagtttttttttatttatctctttaatctttttttattattaaaagcaagtttctttgtattcctcaccctagatttgtataaatgcctttttgtccatcccttttttctttgttgtttttgttgaaaacaaactggaaacttgtttctttttttgtataaatgagagattgcaaatgtagtgtatcactgagtcatttgcagtgttttctgccacagacctttgggctgccttatattgtgtgtgtgtgtgggtgtgtgtgtgttttgacacaaaaacaatgcaagcatgtgtcatccatatttctctgcatcttctcttggagtgagggaggctacctggaggggatcagcccactgacagaccttaatcttaattactgctgtggctagagagtttgaggattgctttttaaaaaagacagcaaacttttttttttatttaaaaaaagatatattaacagttttagaagtcagtagaataaaatcttaaagcactcataatatggcatccttcaatttctgtataaaagcagatctttttaaaaagatacttctgtaacttaagaaacctggcatttaaatcatattttgtctttaggtaaaagctttggtttgtgttcgtgttttgtttgtttcacttgtttccctcccagccccaaaccttttgttctctccgtgaaacttacctttccctttttctttctcttttttttttttgtatattattgtttacaataaatatacattgcattaaaaagaaa

SEQ ID NO: 322054 - DNA, 4148 bp, Homo sapiens
  misc_feature (4031)..(4031): n is a, c, g, or t
  misc_feature (4045)..(4045): n is a, c, g, or t
agttggggagccgaaagcggagctcgaaactgactggaaacttcagtggcgcggagactcgccagtttcaaccccggaaacttttctttgcaggaggagaagagaaggggtgcaagcgcccccacttttgctctttttcctcccctcctcctcctctccaattcgcctccccccacttggagcgggcagctgtgaactggccaccccgcgccttcctaagtgctcgccgcggtagccggccgacgcgccagcttccccgggagccgcttgctccgcatccgggcagccgaggggagaggagcccgcgcctcgagtccccgagccgccgcggcttctcgcctttcccggccaccagccccctgccccgggcccgcgtatgaatctcctggaccccttcatgaagatgaccgacgagcaggagaagggcctgtccggcgcccccagccccaccatgtccgaggactccgcgggctcgccctgcccgtcgggctccggctcggacaccgagaacacgcggccccaggagaacacgttccccaagggcgagcccgatctgaagaaggagagcgaggaggacaagttccccgtgtgcatccgcgaggcggtcagccaggtgctcaaaggctacgactggacgctggtgcccatgccggtgcgcgtcaacggctccagcaagaacaagccgcacgtcaagcggcccatgaacgccttcatggtgtgggcgcaggcggcgcgcaggaagctcgcggaccagtacccgcacttgcacaacgccgagctcagcaagacgctgggcaagctctggagacttctgaacgagagcgagaagcggcccttcgtggaggaggcggagcggctgcgcgtgcagcacaagaaggaccacccggattacaagtaccagccgcggcggaggaagtcggtgaagaacgggcaggcggaggcagaggaggccacggagcagacgcacatctcccccaacgccatcttcaaggcgctgcaggccgactcgccacactcctcctccggcatgagcgaggtgcactcccccggcgagcactcggggcaatcccagggcccaccgaccccacccaccacccccaaaaccgacgtgcagccgggcaaggctgacctgaagcgagaggggcgccccttgccagaggggggcagacagccccctatcgacttccgcgacgtggacatcggcgagctgagcagcgacgtcatctccaacatcgagaccttcgatgtcaacgagtttgaccagtacctgccgcccaacggccacccgggggtgccggccacgcacggccaggtcacctacacgggcagctacggcatcagcagcaccgcggccaccccggcgagcgcgggccacgtgtggatgtccaagcagcaggcgccgccgccacccccgcagcagcccccacaggccccgccggccccgcaggcgcccccgcagccgcaggcggcgcccccacagcagccggcggcacccccgcagcagccacaggcgcacacgctgaccacgctgagcagcgagccgggccagtcccagcgaacgcacatcaagacggagcagctgagccccagccactacagcgagcagcagcagcactcgccccaacagatcgcctacagccccttcaacctcccacactacagcccctcctacccgcccatcacccgctcacagtacgactacaccgaccaccagaactccagctcctactacagccacgcggcaggccagggcaccggcctctactccaccttcacctacatgaaccccgctcagcgccccatgtacacccccatcgccgacacctctggggtcccttccatcccgcagacccacagcccccagcactgggaacaacccgtctacacacagctcactcgaccttgaggaggcctcccacgaagggcgaagatggccgagatgatcctaaaaataaccgaagaaagagaggaccaaccagaattccctttggacatttgtgtttttttgtttttttattttgttttgttttttcttcttcttcttcttccttaaagacatttaagctaaaggcaactcgtacccaaatttccaagacacaaacatgacctatccaagcgcattacccacttgtggccaatcagtggccaggccaaccttggctaaatggagcagcgaaatcaacgagaaactggactttttaaaccctcttcagagcaagcgtggaggatgatggagaatcgtgtgatcagtgtgctaaatctctctgcctgtttggactttgtaattatttttttagcagtaattaaagaaaaaagtcctctgtgaggaatattctctattttaaatatttttagtatgtactgtgtatgattcattaccattttgaggggatttatacatatttttagataaaattaaatgctcttatttttccaacagctaaactactcttagttgaacagtgtgccctagcttttcttgcaaccagagtatttttgtacagatttgctttctcttacaaaaagaaaaaaaaaatcctgttgtattaacatttaaaaacagaattgtgttatgtgatcagttttgggggttaactttgcttaattcctcaggctttgcgatttaaggaggagctgccttaaaaaaaaataaaggccttattttgcaattatgggagtaaacaatagtctagagaagcatttggtaagctttatcatatatatattttttaaagaagagaaaaacaccttgagccttaaaacggtgctgctgggaaacatttgcactcttttagtgcatttcctcctgcctttgcttgttcactgcagtcttaagaaagaggtaaaaggcaagcaaaggagatgaaatctgttctgggaatgtttcagcagccaataagtgcccgagcacactgcccccggttgcctgcctgggccccatgtggaaggcagatgcctgctcgctctgtcacctgtgcctctcagaacaccagcagttaaccttcaagacattccacttgctaaaattatttattttgtaaggagaggttttaattaaaacaaaaaaaaattcttttttttttttttttccaattttaccttctttaaaataggttgttggagctttcctcaaagggtatggtcatctgttgttaaattatgttcttaactgtaaccagtttttttttatttatctctttaatctttttttattattaaaagcaagtttctttgtattcctcaccctagatttgtataaatgcctttttgtccatcccttttttctttgttgtttttgttgaaaacaaactggaaacttgtttctttttttgtataaatgagagattgcaaatgtagtgtatcactgagtcatttgcagtgttttctgccacagacctttgggctgccttatattgtgtgtgtgtgtgggtgtgtgtgtgttttgacacaaaaacaatgcaagcatgtgtcatccatatttctctgcatcttctcttggagtgagggaggctacctggaggggatcagcccactgacagaccttaatcttaattactgctgtggctagagagtttgaggattgctttttaaaaaagacagcaaacttttttttttatttaaaaaaagatatattaacagttttagaagtcagtagaataaaatcttaaagcactcataatatggcatccttcaatttctgtataaaagcagatctttttaaaaagatacttctgtaacttaagaaacctggcatttaaatcatattttgtctttaggtaaaagctttggtttgtgttcgtgttttgtttgtttcacttgtttccctcccagccccaaaccttttgttctctccgtgaaacttacctttccctttttctttctcttttttttttttgtatattattgtttacaataaatatacattgcattaaaaagaaaaaaaaaaaaaaaaaaaaaaaaaaaaaaaaaaaaaaaaaaaaaaggggggaaaaaaaaccaaaaagggccaaaaagggagaggaagaaaaaanaaaggcccggcggnaaaaaacggcagggcgggggaaaaacccgggcgaaaccaaacttggggggcgtggggggaacaatcccctttttttctcaattgtggtaaatggcctgaaaaa

SEQ ID NO: 322055 - DNA, 670 bp, Homo sapiens
  misc_feature (34)..(34): n is a, c, g, or t
  misc_feature (36)..(36): n is a, c, g, or t
  misc_feature (38)..(38): n is a, c, g, or t
actgttccaaggatccccaatgtctctcctaccntnantttgaactgttcagcgttggagttttgaaaaagcaatcatgtttggtttgtttgtttggttttttgtttttgctggtatgaatctccagaaatagctctaaattgtggaataatgttaagagaatgcatcagacatgaaccacttgcaaaaatcattttgtggtcggaacagttttatgatttcttcagatatgtcgaaatgtcaacatttgacatagcttcagatgcatttgccacattcaagaaggtaacaaaaactgtagaattctaaatatccttgaaagtcagaggtgtgctgtttttctaaaccttcattgccctcctaaatctacacgtggctgccctctagtgggaagagaaagatacattttgtatatgtttgtgtgatagaggtatatgcagtaaagtcacagctttaaaagggtggaaaagttagattctaaagtctatctaaaagacaaaagtcctgtgtggtcaaaattctactttgctgttaaattataattaagtatggtatactgtacagcatatgtaacaaccaggttttctcctgtgtttgaaacattgtgtagcagtttctttggttaagcaccagatgaagtagttggcttctgttcaggtttatgttaatt

SEQ ID NO: 322056 - DNA, 3876 bp, Homo sapiens
gaagggggcgttgcggcaccgcccgacgtcgcgtcctcggcggctgcgcagtgcgcacgtcaaagccgggctcgggccgcaagcggggcgaggggttcggggagcggcgcggcctgggagacacagagccttcaggcgccggggcgggggcacaggcgaagactaaggcggcgccgggccccacagcagcagccgcagcccaagcgagcgcagcagcgcggcggcagccgcgggagcccctgggcagccgtccgcccgcgcagccgccgccgccgcgggagcccgtcgccgggagcaggagcgggcggaagacaacggaggggccgagcgtccgagccactccgcggggaccgaacgagcagcccgaagcggcggcggccgaggacggggacagcgacgacgcggaggcagagaagggaacgcccggcccagccccgtagcacaggcggagtgcagcggaggcccctgccgctgccgtcatgccgttcccgtttgggaagtctcacaaatctccagcagacattgtgaagaatctgaaggagagcatggctgttctggaaaagcaagacatttctgataaaaaagcagaaaaggctacagaagaagtttccaaaaatctggttgccatgaaagaaattctgtatggcacaaatgaaaaagagcctcagacagaagcagtagctcaacttgctcaagaactctataatagtgggctccttagcaccctggtagctgatttacagctcattgactttgagggcaaaaaagacgtggctcaaattttcaacaatattctcagaagacaaattggtacgagaactcctactgttgaatacatctgcacccaacagaatattttgttcatgttattgaaagggtatgaatctccagaaatagctctaaattgtggaataatgttaagagaatgcatcagacatgaaccacttgcaaaaatcattttgtggtcggaacagttttatgatttcttcagatatgtcgaaatgtcaacatttgacatagcttcagatgcatttgccacattcaaggatttacttacaagacataaattgctcagtgcagaatttttggaacagcattatgatagatttttcagtgaatatgagaagttacttcattcagaaaattatgtgacaaaaagacagtcactgaagcttctcggtgaactactactagatagacacaacttcacaattatgacaaaatacatcagtaaacctgagaacctcaaattaatgatgaacctgctgcgagacaaaagtcgcaacatccagtttgaggcctttcacgtttttaaggtgtttgtagccaatcctaacaagacgcagcccatcctagacatcctcctcaagaaccaggccaaactcatagagttcctcagcaagtttcagaacgacaggacggaggatgagcagtttaacgacgagaagacctatttagttaaacagatcagggatttgaagagaccagctcagcaagaagcttaatctccaataaacatctatgttaaatccaaattcagcatttgctgttagctattcagcatcaggcactcttattgattcatgaggaacattactgctaatctgctgttaagtgaacggtttttcattttacccttttgtttttcagtccaggttggagatcgtagctgctgctgcttgcacactagggcacatgtgggctttctcttgatctttgtgtcatttcagaattcaaagactgtgctacgggagttctgaacatggctgggttcatgaaggcaaatgtatggatgagagtgtggtttaggaaagagggcactgatatcagattagacctatgtgtttgcacccatctttgttggcgatctgagtgcagtgtggcaagtgcacacctggcatccctgcgtcagatcgcgcaccttcaggtcgcgcaccttcgctgaaggaagatgacgcagagctttatctgaaatcagaggggagctatccaaaatgggagtttgggggcagctaaagttgacatgcgaataaattgatactgaaacttagcaacttcttaaaagtgtaaagaagcctcataagatcataaggaaaatgtatatatgcttttcacagctttctagaattttttgacatttgattttcttgagacttgtaaacctggatatgttgaagggtatttgttaattttacttttcaaagatactttaaaacagtagagctagcaatgacaccttgcatttcatttcaacactgcttcaaggtttcttttgtatataattcttagaatgctcatttcttttaaatggtttaatttgtacagcagaggaatgttattgtagtagtatgtaactattacctaatactgagtttttgcaaaaaacaatgaatgctcatatgtaattgaaatacttcagatcacatgaaaatgctgatttaacatttaagtatcacagcattaaaagaaaaagaaagtaaaccagtcctttgtattcagttacctaatggggtgccatcaataagctgcgatacagccctggagctcagtcagccacaccttcctgcatcctattggccttattcattttaaatgagttaatgaatctgccagatctgtgaatgatagagattatgctaaattaatgctgattctttgtgtgtgtgggaaatctctgtagagcaccttttctttcttagactaagtaacccagtacaatagttgtgaactgaataattaaaactttggcttctcttaggaaaagacgacttcctagtcataggtgtcctatggggaaatttattttttttaatgtcctgttccttaatgctgcaaattatcagtatttataaagtaactgattttgcaccacttttttgttactgtgaccacggcagaacaatgtcttctagactatatctatgtaaagttattagaatggtatctgttcattttagtgatatgaagatcacaactaacaactgacaaatcagagtttgccagttcaaattcagcatggctgcagctgattaagaaattgatatgattattctttgctagcctctcttactaatggaattatatactggccagtaaaatgggcctcccaattgctgtttcagcaggttttaaaccttcaggaacaccagttaggaaaatagctccagaaaatatagatatattttatttttattaaaatggcagtctacatcataattggcatttctcaagactgtctttaccagaatctgtgtgaaataaggcaatctagtctccttgaaaaaaaaatctcttggatgtttaggaaggaagacttggccgtgatgtggtgtcctggctttgtggtgtagtgctgtgtgtatggagttagtgtaaaaacatggattacaccaagtggaagaaacgtcttcttgccaagctcattcttagaacttacacatctagaacagcttccactttggcagtgaggtcgtagccttttaggtggaagaagtgagggtgcagcgtgtcagacacaacattcatgttactcttacattggaatctgaaggtagttcagacttcgtgggttttgtttttaagcaaaacaatgtgaaaacatttaagtttgaaatgttgcatttgaagttatgatcatttaatatattcatattaccaagactattatactggaagtggtttttgtgttataaaggtttaattttacataaggcagttacttaatgtgatttttaacccttaaaaaagtggagatgtatacatttgttaacaatgccatgaaagcattttctttctcctaaggaaaagtgaatttcttatcagaatatctggctggccctgtaatttaaattaaaataaaattttggagaaacagca

SEQ ID NO: 322057 - DNA, 3816 bp, Homo sapiens
gaagggggcgttgcggcaccgcccgacgtcgcgtcctcggcggctgcgcagtgcgcacgtcaaagccgggctcgggccgcaagcggggcgaggggttcggggagcggcgcggcctgggagacacagagccttcaggcgccggggcgggggcacaggcgaagactaaggcggcgccgggccccacagcagcagccgcagcccaaccgccgccgccgcgggagcccgtcgccgggagcaggagcgggcggaagacaacggaggggccgagcgtccgagccactccgcggggaccgaacgagcagcccgaagcggcggcggccgaggacggggacagcgacgacgcggaggcagagaagggaacgcccggcccagccccgtagcacaggcggagtgcagcggaggcccctgccgctgccgtcatgccgttcccgtttgggaagtctcacaaatctccagcagacattgtgaagaatctgaaggagagcatggctgttctggaaaagcaagacatttctgataaaaaagcagaaaaggctacagaagaagtttccaaaaatctggttgccatgaaagaaattctgtatggcacaaatgaaaaagagcctcagacagaagcagtagctcaacttgctcaagaactctataatagtgggctccttagcaccctggtagctgatttacagctcattgactttgagggcaaaaaagacgtggctcaaattttcaacaatattctcagaagacaaattggtacgagaactcctactgttgaatacatctgcacccaacagaatattttgttcatgttattgaaagggtatgaatctccagaaatagctctaaattgtggaataatgttaagagaatgcatcagacatgaaccacttgcaaaaatcattttgtggtcggaacagttttatgatttcttcagatatgtcgaaatgtcaacatttgacatagcttcagatgcatttgccacattcaaggatttacttacaagacataaattgctcagtgcagaatttttggaacagcattatgatagatttttcagtgaatatgagaagttacttcattcagaaaattatgtgacaaaaagacagtcactgaagcttctcggtgaactactactagatagacacaacttcacaattatgacaaaatacatcagtaaacctgagaacctcaaattaatgatgaacctgctgcgagacaaaagtcgcaacatccagtttgaggcctttcacgtttttaaggtgtttgtagccaatcctaacaagacgcagcccatcctagacatcctcctcaagaaccaggccaaactcatagagttcctcagcaagtttcagaacgacaggacggaggatgagcagtttaacgacgagaagacctatttagttaaacagatcagggatttgaagagaccagctcagcaagaagcttaatctccaataaacatctatgttaaatccaaattcagcatttgctgttagctattcagcatcaggcactcttattgattcatgaggaacattactgctaatctgctgttaagtgaacggtttttcattttacccttttgtttttcagtccaggttggagatcgtagctgctgctgcttgcacactagggcacatgtgggctttctcttgatctttgtgtcatttcagaattcaaagactgtgctacgggagttctgaacatggctgggttcatgaaggcaaatgtatggatgagagtgtggtttaggaaagagggcactgatatcagattagacctatgtgtttgcacccatctttgttggcgatctgagtgcagtgtggcaagtgcacacctggcatccctgcgtcagatcgcgcaccttcaggtcgcgcaccttcgctgaaggaagatgacgcagagctttatctgaaatcagaggggagctatccaaaatgggagtttgggggcagctaaagttgacatgcgaataaattgatactgaaacttagcaacttcttaaaagtgtaaagaagcctcataagatcataaggaaaatgtatatatgcttttcacagctttctagaattttttgacatttgattttcttgagacttgtaaacctggatatgttgaagggtatttgttaattttacttttcaaagatactttaaaacagtagagctagcaatgacaccttgcatttcatttcaacactgcttcaaggtttcttttgtatataattcttagaatgctcatttcttttaaatggtttaatttgtacagcagaggaatgttattgtagtagtatgtaactattacctaatactgagtttttgcaaaaaacaatgaatgctcatatgtaattgaaatacttcagatcacatgaaaatgctgatttaacatttaagtatcacagcattaaaagaaaaagaaagtaaaccagtcctttgtattcagttacctaatggggtgccatcaataagctgcgatacagccctggagctcagtcagccacaccttcctgcatcctattggccttattcattttaaatgagttaatgaatctgccagatctgtgaatgatagagattatgctaaattaatgctgattctttgtgtgtgtgggaaatctctgtagagcaccttttctttcttagactaagtaacccagtacaatagttgtgaactgaataattaaaactttggcttctcttaggaaaagacgacttcctagtcataggtgtcctatggggaaatttattttttttaatgtcctgttccttaatgctgcaaattatcagtatttataaagtaactgattttgcaccacttttttgttactgtgaccacggcagaacaatgtcttctagactatatctatgtaaagttattagaatggtatctgttcattttagtgatatgaagatcacaactaacaactgacaaatcagagtttgccagttcaaattcagcatggctgcagctgattaagaaattgatatgattattctttgctagcctctcttactaatggaattatatactggccagtaaaatgggcctcccaattgctgtttcagcaggttttaaaccttcaggaacaccagttaggaaaatagctccagaaaatatagatatattttatttttattaaaatggcagtctacatcataattggcatttctcaagactgtctttaccagaatctgtgtgaaataaggcaatctagtctccttgaaaaaaaaatctcttggatgtttaggaaggaagacttggccgtgatgtggtgtcctggctttgtggtgtagtgctgtgtgtatggagttagtgtaaaaacatggattacaccaagtggaagaaacgtcttcttgccaagctcattcttagaacttacacatctagaacagcttccactttggcagtgaggtcgtagccttttaggtggaagaagtgagggtgcagcgtgtcagacacaacattcatgttactcttacattggaatctgaaggtagttcagacttcgtgggttttgtttttaagcaaaacaatgtgaaaacatttaagtttgaaatgttgcatttgaagttatgatcatttaatatattcatattaccaagactattatactggaagtggtttttgtgttataaaggtttaattttacataaggcagttacttaatgtgatttttaacccttaaaaaagtggagatgtatacatttgttaacaatgccatgaaagcattttctttctcctaaggaaaagtgaatttcttatcagaatatctggctggccctgtaatttaaattaaaataaaattttggagaaacagca

SEQ ID NO: 322058 - DNA, 3054 bp, Homo sapiens
tactccagacaagttgaccgatagcaaggactaacccctataccttctgcataatgtatgaatctccagaaatagctctaaattgtggaataatgttaagagaatgcatcagacatgaaccacttgcaaaaatcattttgtggtcggaacagttttatgatttcttcagatatgtcgaaatgtcaacatttgacatagcttcagatgcatttgccacattcaaggatttacttacaagacataaattgctcagtgcagaatttttggaacagcattatgatagatttttcagtgaatatgagaagttacttcattcagaaaattatgtgacaaaaagacagtcactgaagcttctcggtgaactactactagatagacacaacttcacaattatgacaaaatacatcagtaaacctgagaacctcaaattaatgatgaacctgctgcgagacaaaagtcgcaacatccagtttgaggcctttcacgtttttaaggtgtttgtagccaatcctaacaagacgcagcccatcctagacatcctcctcaagaaccaggccaaactcatagagttcctcagcaagtttcagaacgacaggacggaggatgagcagtttaacgacgagaagacctatttagttaaacagatcagggatttgaagagaccagctcagcaagaagcttaatctccaataaacatctatgttaaatccaaattcagcatttgctgttagctattcagcatcaggcactcttattgattcatgaggaacattactgctaatctgctgttaagtgaacggtttttcattttacccttttgtttttcagtccaggttggagatcgtagctgctgctgcttgcacactagggcacatgtgggctttctcttgatctttgtgtcatttcagaattcaaagactgtgctacgggagttctgaacatggctgggttcatgaaggcaaatgtatggatgagagtgtggtttaggaaagagggcactgatatcagattagacctatgtgtttgcacccatctttgttggcgatctgagtgcagtgtggcaagtgcacacctggcatccctgcgtcagatcgcgcaccttcaggtcgcgcaccttcgctgaaggaagatgacgcagagctttatctgaaatcagaggggagctatccaaaatgggagtttgggggcagctaaagttgacatgcgaataaattgatactgaaacttagcaacttcttaaaagtgtaaagaagcctcataagatcataaggaaaatgtatatatgcttttcacagctttctagaattttttgacatttgattttcttgagacttgtaaacctggatatgttgaagggtatttgttaattttacttttcaaagatactttaaaacagtagagctagcaatgacaccttgcatttcatttcaacactgcttcaaggtttcttttgtatataattcttagaatgctcatttcttttaaatggtttaatttgtacagcagaggaatgttattgtagtagtatgtaactattacctaatactgagtttttgcaaaaaacaatgaatgctcatatgtaattgaaatacttcagatcacatgaaaatgctgatttaacatttaagtatcacagcattaaaagaaaaagaaagtaaaccagtcctttgtattcagttacctaatggggtgccatcaataagctgcgatacagccctggagctcagtcagccacaccttcctgcatcctattggccttattcattttaaatgagttaatgaatctgccagatctgtgaatgatagagattatgctaaattaatgctgattctttgtgtgtgtgggaaatctctgtagagcaccttttctttcttagactaagtaacccagtacaatagttgtgaactgaataattaaaactttggcttctcttaggaaaagacgacttcctagtcataggtgtcctatggggaaatttattttttttaatgtcctgttccttaatgctgcaaattatcagtatttataaagtaactgattttgcaccacttttttgttactgtgaccacggcagaacaatgtcttctagactatatctatgtaaagttattagaatggtatctgttcattttagtgatatgaagatcacaactaacaactgacaaatcagagtttgccagttcaaattcagcatggctgcagctgattaagaaattgatatgattattctttgctagcctctcttactaatggaattatatactggccagtaaaatgggcctcccaattgctgtttcagcaggttttaaaccttcaggaacaccagttaggaaaatagctccagaaaatatagatatattttatttttattaaaatggcagtctacatcataattggcatttctcaagactgtctttaccagaatctgtgtgaaataaggcaatctagtctccttgaaaaaaaaatctcttggatgtttaggaaggaagacttggccgtgatgtggtgtcctggctttgtggtgtagtgctgtgtgtatggagttagtgtaaaaacatggattacaccaagtggaagaaacgtcttcttgccaagctcattcttagaacttacacatctagaacagcttccactttggcagtgaggtcgtagccttttaggtggaagaagtgagggtgcagcgtgtcagacacaacattcatgttactcttacattggaatctgaaggtagttcagacttcgtgggttttgtttttaagcaaaacaatgtgaaaacatttaagtttgaaatgttgcatttgaagttatgatcatttaatatattcatattaccaagactattatactggaagtggtttttgtgttataaaggtttaattttacataaggcagttacttaatgtgatttttaacccttaaaaaagtggagatgtatacatttgttaacaatgccatgaaagcattttctttctcctaaggaaaagtgaatttcttatcagaatatctggctggccctgtaatttaaattaaaataaaattttggagaaacagca

SEQ ID NO: 322059 - DNA, 2809 bp, Homo sapiens
tttggcaataaccctgatttatgttctcttatcttttagtttttcagtgaatatgagaagttacttcattcagaaaattatgtgacaaaaagacagtcactgaagcttctcggtgaactactactagatagacacaacttcacaattatgacaaaatacatcagtaaacctgagaacctcaaattaatgatgaacctgctgcgagacaaaagtcgcaacatccagtttgaggcctttcacgtttttaaggtgtttgtagccaatcctaacaagacgcagcccatcctagacatcctcctcaagaaccaggccaaactcatagagttcctcagcaagtttcagaacgacaggacggaggatgagcagtttaacgacgagaagacctatttagttaaacagatcagggatttgaagagaccagctcagcaagaagcttaatctccaataaacatctatgttaaatccaaattcagcatttgctgttagctattcagcatcaggcactcttattgattcatgaggaacattactgctaatctgctgttaagtgaacggtttttcattttacccttttgtttttcagtccaggttggagatcgtagctgctgctgcttgcacactagggcacatgtgggctttctcttgatctttgtgtcatttcagaattcaaagactgtgctacgggagttctgaacatggctgggttcatgaaggcaaatgtatggatgagagtgtggtttaggaaagagggcactgatatcagattagacctatgtgtttgcacccatctttgttggcgatctgagtgcagtgtggcaagtgcacacctggcatccctgcgtcagatcgcgcaccttcaggtcgcgcaccttcgctgaaggaagatgacgcagagctttatctgaaatcagaggggagctatccaaaatgggagtttgggggcagctaaagttgacatgcgaataaattgatactgaaacttagcaacttcttaaaagtgtaaagaagcctcataagatcataaggaaaatgtatatatgcttttcacagctttctagaattttttgacatttgattttcttgagacttgtaaacctggatatgttgaagggtatttgttaattttacttttcaaagatactttaaaacagtagagctagcaatgacaccttgcatttcatttcaacactgcttcaaggtttcttttgtatataattcttagaatgctcatttcttttaaatggtttaatttgtacagcagaggaatgttattgtagtagtatgtaactattacctaatactgagtttttgcaaaaaacaatgaatgctcatatgtaattgaaatacttcagatcacatgaaaatgctgatttaacatttaagtatcacagcattaaaagaaaaagaaagtaaaccagtcctttgtattcagttacctaatggggtgccatcaataagctgcgatacagccctggagctcagtcagccacaccttcctgcatcctattggccttattcattttaaatgagttaatgaatctgccagatctgtgaatgatagagattatgctaaattaatgctgattctttgtgtgtgtgggaaatctctgtagagcaccttttctttcttagactaagtaacccagtacaatagttgtgaactgaataattaaaactttggcttctcttaggaaaagacgacttcctagtcataggtgtcctatggggaaatttattttttttaatgtcctgttccttaatgctgcaaattatcagtatttataaagtaactgattttgcaccacttttttgttactgtgaccacggcagaacaatgtcttctagactatatctatgtaaagttattagaatggtatctgttcattttagtgatatgaagatcacaactaacaactgacaaatcagagtttgccagttcaaattcagcatggctgcagctgattaagaaattgatatgattattctttgctagcctctcttactaatggaattatatactggccagtaaaatgggcctcccaattgctgtttcagcaggttttaaaccttcaggaacaccagttaggaaaatagctccagaaaatatagatatattttatttttattaaaatggcagtctacatcataattggcatttctcaagactgtctttaccagaatctgtgtgaaataaggcaatctagtctccttgaaaaaaaaatctcttggatgtttaggaaggaagacttggccgtgatgtggtgtcctggctttgtggtgtagtgctgtgtgtatggagttagtgtaaaaacatggattacaccaagtggaagaaacgtcttcttgccaagctcattcttagaacttacacatctagaacagcttccactttggcagtgaggtcgtagccttttaggtggaagaagtgagggtgcagcgtgtcagacacaacattcatgttactcttacattggaatctgaaggtagttcagacttcgtgggttttgtttttaagcaaaacaatgtgaaaacatttaagtttgaaatgttgcatttgaagttatgatcatttaatatattcatattaccaagactattatactggaagtggtttttgtgttataaaggtttaattttacataaggcagttacttaatgtgatttttaacccttaaaaaagtggagatgtatacatttgttaacaatgccatgaaagcattttctttctcctaaggaaaagtgaatttcttatcagaatatctggctggccctgtaatttaaattaaaataaaattttggagaaacagca

SEQ ID NO: 322060 - DNA, 1652 bp, Homo sapiens
ggaggcgtctagagatcccttcgagggtcggatgaatagattttacgtgtcatttgttattttcttaccaagtgcatagatatgtgaagtagaatgaatagcagaggaatgttattgtagtagtatgtaactattacctaatactgagtttttgcaaaaaacaatgaatgctcatatgtaattgaaatacttcagatcacatgaaaatgctgatttaacatttaagtatcacagcattaaaagaaaaagaaagtaaaccagtcctttgtattcagttacctaatggggtgccatcaataagctgcgatacagccctggagctcagtcagccacaccttcctgcatcctattggccttattcattttaaatgagttaatgaatctgccagatctgtgaatgatagagattatgctaaattaatgctgattctttgtgtgtgtgggaaatctctgtagagcaccttttctttcttagactaagtaacccagtacaatagttgtgaactgaataattaaaactttggcttctcttaggaaaagacgacttcctagtcataggtgtcctatggggaaatttattttttttaatgtcctgttccttaatgctgcaaattatcagtatttataaagtaactgattttgcaccacttttttgttactgtgaccacggcagaacaatgtcttctagactatatctatgtaaagttattagaatggtatctgttcattttagtgatatgaagatcacaactaacaactgacaaatcagagtttgccagttcaaattcagcatggctgcagctgattaagaaattgatatgattattctttgctagcctctcttactaatggaattatatactggccagtaaaatgggcctcccaattgctgtttcagcaggttttaaaccttcaggaacaccagttaggaaaatagctccagaaaatatagatatattttatttttattaaaatggcagtctacatcataattggcatttctcaagactgtctttaccagaatctgtgtgaaataaggcaatctagtctccttgaaaaaaaaatctcttggatgtttaggaaggaagacttggccgtgatgtggtgtcctggctttgtggtgtagtgctgtgtgtatggagttagtgtaaaaacatggattacaccaagtggaagaaacgtcttcttgccaagctcattcttagaacttacacatctagaacagcttccactttggcagtgaggtcgtagccttttaggtggaagaagtgagggtgcagcgtgtcagacacaacattcatgttactcttacattggaatctgaaggtagttcagacttcgtgggttttgtttttaagcaaaacaatgtgaaaacatttaagtttgaaatgttgcatttgaagttatgatcatttaatatattcatattaccaagactattatactggaagtggtttttgtgttataaaggtttaattttacataaggcagttacttaatgtgatttttaacccttaaaaaagtggagatgtatacatttgttaacaatgccatgaaagcattttctttctcctaaggaaaagtgaatttcttatcagaatatctggctggccctgtaatttaaattaaaataaaattttggagaaacagca

SEQ ID NO: 322061 - DNA, 1927 bp, Homo sapiens
gaagggggcgttgcggcaccgcccgacgtcgcgtcctcggcggctgcgcagtgcgcacgtcaaagccgggctcgggccgcaagcggggcgaggggttcggggagcggcgcggcctgggagacacagagccttcaggcgccggggcgggggcacaggcgaagactaaggcggcgccgggccccacagcagcagccgcagcccaagcgagcgcagcagcgcggcggcagccgcgggagcccctgggcagccgtccgcccgcgcagccgccgccgccgcgggagcccgtcgccgggagcaggagcgggcggaagacaacggaggggccgagcgtccgagccactccgcggggaccgaacgagcagcccgaagcggcggcggccgaggacggggacagcgacgacgcggaggcagagaagggaacgcccggcccagccccgtagcacaggcggagtgcagcggaggcccctgccgctgccgtcatgccgttcccgtttgggaagtctcacaaatctccagcagacattgtgaagaatctgaaggagagcatggctgttctggaaaagcaagacatttctgataaaaaagcagaaaaggctacagaagaagtttccaaaaatctggttgccatgaaagaaattctgtatggcacaaatgaaaaagagcctcagacagaagcagtagctcaacttgctcaagaactctataatagtgggctccttagcaccctggtagctgatttacagctcattgactttgagggcaaaaaagacgtggctcaaattttcaacaatattctcagaagacaaattggtacgagaactcctactgttgaatacatctgcacccaacagaatattttgttcatgttattgaaagggtatgaatctccagaaatagctctaaattgtggaataatgttaagagaatgcatcagacatgaaccacttgcaaaaatcattttgtggtcggaacagttttatgatttcttcagatatgtcgaaatgtcaacatttgacatagcttcagatgcatttgccacattcaagtttgccagttcaaattcagcatggctgcagctgattaagaaattgatatgattattctttgctagcctctcttactaatggaattatatactggccagtaaaatgggcctcccaattgctgtttcagcaggttttaaaccttcaggaacaccagttaggaaaatagctccagaaaatatagatatattttatttttattaaaatggcagtctacatcataattggcatttctcaagactgtctttaccagaatctgtgtgaaataaggcaatctagtctccttgaaaaaaaaatctcttggatgtttaggaaggaagacttggccgtgatgtggtgtcctggctttgtggtgtagtgctgtgtgtatggagttagtgtaaaaacatggattacaccaagtggaagaaacgtcttcttgccaagctcattcttagaacttacacatctagaacagcttccactttggcagtgaggtcgtagccttttaggtggaagaagtgagggtgcagcgtgtcagacacaacattcatgttactcttacattggaatctgaaggtagttcagacttcgtgggttttgtttttaagcaaaacaatgtgaaaacatttaagtttgaaatgttgcatttgaagttatgatcatttaatatattcatattaccaagactattatactggaagtggtttttgtgttataaaggtttaattttacataaggcagttacttaatgtgatttttaacccttaaaaaagtggagatgtatacatttgttaacaatgccatgaaagcattttctttctcctaaggaaaagtgaatttcttatcagaatatctggctggccctgtaatttaaattaaaataaaattttggagaaacagca

SEQ ID NO: 322062 - DNA, 2159 bp, Homo sapiens
gaagggggcgttgcggcaccgcccgacgtcgcgtcctcggcggctgcgcagtgcgcacgtcaaagccgggctcgggccgcaagcggggcgaggggttcggggagcggcgcggcctgggagacacagagccttcaggcgccggggcgggggcacaggcgaagactaaggcggcgccgggccccacagcagcagccgcagcccaagcgagcgcagcagcgcggcggcagccgcgggagcccctgggcagccgtccgcccgcgcagccgccgccgccgcgggagcccgtcgccgggagcaggagcgggcggaagacaacggaggggccgagcgtccgagccactccgcggggaccgaacgagcagcccgaagcggcggcggccgaggacggggacagcgacgacgcggaggcagagaagggaacgcccggcccagccccgtagcacaggcggagtgcagcggaggcccctgccgctgccgtcatgccgttcccgtttgggaagtctcacaaatctccagcagacattgtgaagaatctgaaggagagcatggctgttctggaaaagcaagacatttctgataaaaaagcagaaaaggctacagaagaagtttccaaaaatctggttgccatgaaagaaattctgtatggcacaaatgaaaaagagcctcagacagaagcagtagctcaacttgctcaagaactctataatagtgggctccttagcaccctggtagctgatttacagctcattgactttgagggcaaaaaagacgtggctcaaattttcaacaatattctcagaagacaaattggtacgagaactcctactgttgaatacatctgcacccaacagaatattttgttcatgttattgaaagggtatgaatctccagaaatagctctaaattgtggaataatgttaagagaatgcatcagacatgaaccacttgcaaaaatcattttgtggtcggaacagttttatgatttcttcagatatgtcgaaatgtcaacatttgacatagcttcagatgcatttgccacattcaaggatttacttacaagacataaattgctcagtgcagaatttttggaacagcattatgatagatttttcagtgaatatgagaagttacttcattcagaaaattatgtgacaaaaagacagtcactgaagcttctcggtgaactactactagatagacacaacttcacaattatgacaaaatacatcagtaaacctgagaacctcaaattaatgatgaacctgctgcgagacaaaagtcgcaacatccagtttgaggcctttcacgtttttaaggtgtttgtagccaatcctaacaagacgcagcccatcctagacatcctcctcaagaaccaggccaaactcatagagttcctcagcaagtttcagaacgacaggacggaggatgagcagtttaacgacgagaagacctatttagttaaacagatcagggatttgaagagaccagctcagcaagaagcttaatctccaataaacatctatgttaaatccaaattcagcatttgctgttagctattcagcatcaggcactcttattgattcatgaggaacattactgctaatctgctgttaagtgaacggtttttcattttacccttttgtttttcagtccaggttggagatcgtagctgctgctgcttgcacactagggcacatgtgggctttctcttgatctttgtgtcatttcagaattcaaagactgtgctacgggagttctgaacatggctgggttcatgaaggcaaatgtatggatgagagtgtggtttaggaaagagggcactgatatcagattagacctatgtgtttgcacccatctttgttggcgatctgagtgcagtgtggcaagtgcacacctggcatccctgcgtcagatcgcgcaccttcaggtcgcgcaccttcgctgaaggaagatgacgcagagctttatctgaaatcagaggggagctatccaaaatgggagtttgggggcagctaaagttgacatgcgaataaattgatactgaaaaacaaaagggtaaaatgaaaaaccgttcacttaacagcagattagcagtaatgttcctcatgaatcaataagagtgcctgatgctgtatagctaacagcaaatgctgaatttt

SEQ ID NO: 322063 - DNA, 1113 bp, Homo sapiens
gaagggggcgttgcggcaccgcccgacgtcgcgtcctcggcggctgcgcagtgcgcacgtcaaagccgggctcgggccgcaagcggggcgaggggttcggggagcggcgcggcctgggagacacagagccttcaggcgccggggcgggggcacaggcgaagactaaggcggcgccgggccccacagcagcagccgcagcccaagcgagcgcagcagcgcggcggcagccgcgggagcccctgggcagccgtccgcccgcgcagccgccgccgccgcgggagcccgtcgccgggagcaggagcgggcggaagacaacggaggggccgagcgtccgagccactccgcggggaccgaacgagcagcccgaagcggcggcggccgaggacggggacagcgacgacgcggaggcagagaagggaacgcccggcccagccccgtagcacaggcggagtgcagcggaggcccctgccgctgccgtcatgccgttcccgtttgggaagtctcacaaatctccagcagacattgtgaagaatctgaaggagagcatggctgttctggaaaagcaagacatttctgataaaaaagcagaaaaggctacagaagaagtttccaaaaatctggttgccatgaaagaaattctgtatggcacaaatgaaaaagagcctcagacagaagcagtagctcaacttgctcaagaactctataatagtgggctccttagcaccctggtagctgatttacagctcattgactttgagggcaaaaaagacgtggctcaaattttcaacaatattctcagaagacaaattggtacgagaactcctactgttgaatacatctgcacccaacagaatattttgttcatgttattgaaagggtatgaatctccagaaatagctctaaattgtggaataatgttaagagaatgcatcagacatgaaccacttgcaaaaatcattttgtggtcggaacagtcaggtgacagctacgaacatgacgacatattcgcgttcgagtatacctcctgaaacacccctcacacacatcaagcccgaatagatatgttcctattcgctcacacaattatccgatccgtcccttctgactaggtgg

SEQ ID NO: 322064 - DNA, 2908 bp, Homo sapiens
tggccagaggggacgggagcccggctctgctcctgctctactgctcactcctttgtggccatggccaaggcagttaaccgcttggggacttagaagtccgtccttattgtaaaatgaggacattggactagcttgtcgtttttcagtgaatatgagaagttacttcattcagaaaattatgtgacaaaaagacagtcactgaagcttctcggtgaactactactagatagacacaacttcacaattatgacaaaatacatcagtaaacctgagaacctcaaattaatgatgaacctgctgcgagacaaaagtcgcaacatccagtttgaggcctttcacgtttttaaggtgtttgtagccaatcctaacaagacgcagcccatcctagacatcctcctcaagaaccaggccaaactcatagagttcctcagcaagtttcagaacgacaggacggaggatgagcagtttaacgacgagaagacctatttagttaaacagatcagggatttgaagagaccagctcagcaagaagcttaatctccaataaacatctatgttaaatccaaattcagcatttgctgttagctattcagcatcaggcactcttattgattcatgaggaacattactgctaatctgctgttaagtgaacggtttttcattttacccttttgtttttcagtccaggttggagatcgtagctgctgctgcttgcacactagggcacatgtgggctttctcttgatctttgtgtcatttcagaattcaaagactgtgctacgggagttctgaacatggctgggttcatgaaggcaaatgtatggatgagagtgtggtttaggaaagagggcactgatatcagattagacctatgtgtttgcacccatctttgttggcgatctgagtgcagtgtggcaagtgcacacctggcatccctgcgtcagatcgcgcaccttcaggtcgcgcaccttcgctgaaggaagatgacgcagagctttatctgaaatcagaggggagctatccaaaatgggagtttgggggcagctaaagttgacatgcgaataaattgatactgaaacttagcaacttcttaaaagtgtaaagaagcctcataagatcataaggaaaatgtatatatgcttttcacagctttctagaattttttgacatttgattttcttgagacttgtaaacctggatatgttgaagggtatttgttaattttacttttcaaagatactttaaaacagtagagctagcaatgacaccttgcatttcatttcaacactgcttcaaggtttcttttgtatataattcttagaatgctcatttcttttaaatggtttaatttgtacagcagaggaatgttattgtagtagtatgtaactattacctaatactgagtttttgcaaaaaacaatgaatgctcatatgtaattgaaatacttcagatcacatgaaaatgctgatttaacatttaagtatcacagcattaaaagaaaaagaaagtaaaccagtcctttgtattcagttacctaatggggtgccatcaataagctgcgatacagccctggagctcagtcagccacaccttcctgcatcctattggccttattcattttaaatgagttaatgaatctgccagatctgtgaatgatagagattatgctaaattaatgctgattctttgtgtgtgtgggaaatctctgtagagcaccttttctttcttagactaagtaacccagtacaatagttgtgaactgaataattaaaactttggcttctcttaggaaaagacgacttcctagtcataggtgtcctatggggaaatttattttttttaatgtcctgttccttaatgctgcaaattatcagtatttataaagtaactgattttgcaccacttttttgttactgtgaccacggcagaacaatgtcttctagactatatctatgtaaagttattagaatggtatctgttcattttagtgatatgaagatcacaactaacaactgacaaatcagagtttgccagttcaaattcagcatggctgcagctgattaagaaattgatatgattattctttgctagcctctcttactaatggaattatatactggccagtaaaatgggcctcccaattgctgtttcagcaggttttaaaccttcaggaacaccagttaggaaaatagctccagaaaatatagatatattttatttttattaaaatggcagtctacatcataattggcatttctcaagactgtctttaccagaatctgtgtgaaataaggcaatctagtctccttgaaaaaaaaatctcttggatgtttaggaaggaagacttggccgtgatgtggtgtcctggctttgtggtgtagtgctgtgtgtatggagttagtgtaaaaacatggattacaccaagtggaagaaacgtcttcttgccaagctcattcttagaacttacacatctagaacagcttccactttggcagtgaggtcgtagccttttaggtggaagaagtgagggtgcagcgtgtcagacacaacattcatgttactcttacattggaatctgaaggtagttcagacttcgtgggttttgtttttaagcaaaacaatgtgaaaacatttaagtttgaaatgttgcatttgaagttatgatcatttaatatattcatattaccaagactattatactggaagtggtttttgtgttataaaggtttaattttacataaggcagttacttaatgtgatttttaacccttaaaaaagtggagatgtatacatttgttaacaatgccatgaaagcattttctttctcctaaggaaaagtgaatttcttatcagaatatctggctggccctgtaatttaaattaaaataaaattttggagaaacagca

SEQ ID NO: 322065 - DNA, 2478 bp, Homo sapiens
gaagggggcgttgcggcaccgcccgacgtcgcgtcctcggcggctgcgcagtgcgcacgtcaaagccgggctcgggccgcaagcggggcgaggggttcggggagcggcgcggcctgggagacacagagccttcaggcgccggggcgggggcacaggcgaagactaaggcggcgccgggccccacagcagcagccgcagcccaagcgagcgcagcagcgcggcggcagccgcgggagcccctgggcagccgtccgcccgcgcagccgccgccgccgcgggagcccgtcgccgggagcaggagcgggcggaagacaacggaggggccgagcgtccgagccactccgcggggaccgaacgagcagcccgaagcggcggcggccgaggacggggacagcgacgacgcggaggcagagaagggaacgcccggcccagccccgtagcacaggcggagtgcagcggaggcccctgccgctgccgtcatgccgttcccgtttgggaagtctcacaaatctccagcagacattgtgaagaatctgaaggagagcatggctgttctggaaaagcaagacatttctgataaaaaagcagaaaaggctacagaagaagtttccaaaaatctggttgccatgaaagaaattctgtatggcacaaatgaaaaagagcctcagacagaagcagtagctcaacttgctcaagaactctataatagtgggctccttagcaccctggtagctgatttacagctcattgactttgagggcaaaaaagacgtggctcaaattttcaacaatattctcagaagacaaattggtacgagaactcctactgttgaatacatctgcacccaacagaatattttgttcatgttattgaaagggtatgaatctccagaaatagctctaaattgtggaataatgttaagagaatgcatcagacatgaaccacttgcaaaaatcattttgtggtcggaacagttttatgatttcttcagatatgtcgaaatgtcaacatttgacatagcttcagatgcatttgccacattcaaggatttacttacaagacataaattgctcagtgcagaatttttggaacagcattatgatagatttttcagtgaatatgagaagttacttcattcagaaaattatgtgacaaaaagacagtcactgaagcttctcggtgaactactactagatagacacaacttcacaattatgacaaaatacatcagtaaacctgagaacctcaaattaatgatgaacctgctgcgagacaaaagtcgcaacatccagtttgaggcctttcacgtttttaaggtgtttgtagccaatcctaacaagacgcagcccatcctagacatcctcctcaagaaccaggccaaactcatagagttcctcagcaagtttcagaacgacaggacggaggatgagcagtttaacgacgagaagacctatttagttaaacagatcagggatttgaagagaccagctcagcaagaagcttaatctccaataaacatctatgttaaatccaaattcagcatttgctgttagctattcagcatcaggcactcttattgattcatgaggaacattactgctaatctgctgttaagtgaacggtttttcattttacccttttgtttttcagtccaggttggagatcgtagctgctgctgcttgcacactagggcacatgtgggctttctcttgatctttgtgtcatttcagaattcaaagactgtgctacgggagttctgaacatggctgggttcatgaaggcaaatgtatggatgagagtgtggtttaggaaagagggcactgatatcagattagacctatgtgtttgcacccatctttgttggcgatctgagtgcagtgtggcaagtgcacacctggcatccctgcgtcagatcgcgcaccttcaggtcgcgcaccttcgctgaaggaagatgacgcagagctttatctgaaatcagaggggagctatccaaaatgggagtttgggggcagctaaagttgacatgcgaataaattgatactgaaacttagcaacttcttaaaagtgtaaagaagcctcataagatcataaggaaaatgtatatatgcttttcacagctttctagaattttttgacatttgattttcttgagacttgtaaacctggatatgttgaagggtatttgttaattttacttttcaaagatactttaaaacagtagagctagcaatgacaccttgcatttcatttcaacactgcttcaaggtttcttttgtatataattcttagaatgctcatttcttttaaatggtttaatttgtacagcagaggaatgttattgtagtagtatgtaactattacctaatactgagtttttgcaaaaaacaatgaatgctcatatgtaattgaaatacttcagatcacatgaaaatgctgatttaacatttaagtatcacagcattaaaagaaaaagaaagt

SEQ ID NO: 322066 - DNA, 1924 bp, Homo sapiens
gaagggggcgttgcggcaccgcccgacgtcgcgtcctcggcggctgcgcagtgcgcacgtcaaagccgggctcgggccgcaagcggggcgaggggttcggggagcggcgcggcctgggagacacagagccttcaggcgccggggcgggggcacaggcgaagactaaggcggcgccgggccccacagcagcagccgcagcccaagcgagcgcagcagcgcggcggcagccgcgggagcccctgggcagccgtccgcccgcgcagccgccgccgccgcgggagcccgtcgccgggagcaggagcgggcggaagacaacggaggggccgagcgtccgagccactccgcggggaccgaacgagcagcccgaagcggcggcggccgaggacggggacagcgacgacgcggaggcagagaagggaacgcccggcccagccccgtagcacaggcggagtgcagcggaggcccctgccgctgccgtcatgccgttcccgtttgggaagtctcacaaatctccagcagacattgtgaagaatctgaaggagagcatggctgttctggaaaagcaagacatttctgataaaaaagcagaaaaggctacagaagaagtttccaaaaatctggttgccatgaaagaaattctgtatggcacaaatgaaaaagagcctcagacagaagcagtagctcaacttgctcaagaactctataatagtgggctccttagcaccctggtagctgatttacagctcattgactttgagggcaaaaaagacgtggctcaaattttcaacaatattctcagaagacaaattggtacgagaactcctactgttgaatacatctgcacccaacagaatattttgttcatgttattgaaagggtatgaatctccagaaatagctctaaattgtggaataatgttaagagaatgcatcagacatgaaccacttgcaaaaatcattttgtggtcggaacagttttatgatttcttcagatatgtcgaaatgtcaacatttgacatagcttcagatgcatttgccacattcaaggatttacttacaagacataaattgctcagtgcagaatttttggaacagcattatgatagatttttcagtgaatatgagaagttacttcattcagaaaattatgtgacaaaaagacagtcactgaagcttctcggtgaactactactagatagacacaacttcacaattatgacaaaatacatcagtaaacctgagaacctcaaattaatgatgaacctgctgcgagacaaaagtcgcaacatccagtttgaggcctttcacgtttttaaggtgtttgtagccaatcctaacaagacgcagcccatcctagacatcctcctcaagaaccaggccaaactcatagagttcctcagcaagtttcagaacgacaggacggaggatgagcagtttaacgacgagaagacctatttagttaaacagatcagggatttgaagagaccagctcagcaagaagcttaatctccaataaacatctatgttaaatccaaattcagcatttgctgttagctattcagcatcaggcactcttattgattcatgaggaacattactgctaatctgctgttaagtgaacggtttttcattttacccttttgtttttcagtccaggttggagatcgtagctgctgctgcttgcacactagggcacatgtgggctttctctggaactggggtgcagtcaggaattcacgaagtggctccgcgggtcagcaacaatgggggtggtctgacaggcacagatggcgcgacaatggtgtttcaaaaagcacggatttaataccactggtggaccactgtgttgcacaaaaggggagaccacgacactctatacacagagaccacgagtaagaaactaaatacacagaggaaagacaata

SEQ ID NO: 322067 - DNA, 231 bp, Homo sapiens
taatcttgttatttcattgagttgtaagagttcttgatatgttctggataacactcatcagatatgtagtttgcaaatattttttcccagaaaatatttttatttttttagtcatgcctttggaagtataaaagttttgtttttttttttttttgagactgagtctcactcttgtcacccaggttggagcagtggcacaatctcggctcactgcaatctctgcctcccggg

SEQ ID NO: 322068 - DNA, 2105 bp, Homo sapiens
ccccgcccccacttctaggcttggttgaaccgtgcagataccttctcgaaacaaaagattttcctacctgcttatacttggtaaccgagggaatttctaagacttcttgctcatttctgagtattgtctttatatcctgacactatgaatgctacttggatgcctcttaagggtctcttctgcagggtccccatgaattgtggctgaagttgtgcacaaacaagtatctccagtgacaggagtgccttctgaggcagccattgcatcttcatctgctgacactctgctaggctgacttctgtagttttcaccactgatcttcagtccacctcacagagctctataaaacgcttaaatcctctttacatcatagactttcagctacttgaagatagccatcagccgctacgtgactcttttctccaggatctccctaatactatgaacgcggcagagataacggacaagctcggcctccattccctccgctacagaaactggcacattcaggctacttgtgccactactggacatgggctttacgaaggcctgaactggctcgccaaccagttccagaaccagaactgatcagaaggatctattctttgtgccttgtggccacatcagctagcctctgctgtgtgcacgtgtacgtgtgtgctgggagtggaggcagctttctcacagtgccttatccatgccataagaaaagcagtgttacattttaagaaacccagtgttaagttttaaacaccaccttccatttcagtagctttgatgatcatttttgcaattgatggagaagtccagagggcttgctggtgctcgaaggccagagcgggcttcatggaggcgagttggagcggggactgagttcagctgttgcaatcctggtctggcgtctggagtcctgttagtctttggcatcctttcgtaaaaaggaaggaattgtcattcttttttttttaaaaccatatttttactgtaccttttcatgtttatttattttttattaaaaaaattttttttgaaacagcctcccactctgtcgcccaagctggagtgcagtggtgcgatctcagctcactgcaacctccgtctctcgggctcaagcaatcctcccacctcagccccctgagtagctgagactatgggtgtgcaccaccacacctggctaatttttgtattttttgtggagacagggtcttgccatgttgcccaggctggtctgtaactcctgagctcaagggatccacccacctcagccttccaaaatgctgggattacaggcatgagccactgcgctaccgagaaatcgtcattctttaccaccactgctgcagctagcagctcactcttcagtgctttaagcaaatgatcctcaggaaagaaaaggtatttgcttattgcaggtgcaaagaggctcagattggaacttttccctgaaactatattgtagcccagagttcctgatgtaagacgctttatttaaagacatccgtgagctttttcactggcatatcaatacttcataacactaggaaggtatccagccttttccttatgctagttccttcccttatttgccagatggggaccctgtggggaggtgacccagtgtgaggccgaagctctttcccagagccccacaggccagtggagggtcgtgtttgtgctctgggcatcaccgtcttgggtctcggtcccctgcgactgcagctgctacatccctccctgctctgagataaatgttcttcccatgaagcagacggttcacttttgggatggcgctgtctccaggtttggctgtctcagtccagatgatgtttggttagtttccattcccagaaccacaagcctttgagttctgaaagtttgtgacagaatcaagaggctaatttgggagatgtgagattcccagcccacctggtattgccctcgagttagtggtaaattttgctatggaaaatatctcttgtcaagaccaagctccggcgcattgcctccctcttttggatggccatggcatctcatgaaccacttggaaatgtgttttatgttgttctccaaatattaataaaaatatcccggagaggaggttcact

SEQ ID NO: 322069 - DNA, 938 bp, Homo sapiens
gctcctgagtagctgggattacaggcgccctccaccacgcccggcgaatttttgtatctttagtagagacagggtttcaccacgttggccaggttggtcttgaactcctgacctcatgatccgcctgcctcggcctcccaaagtgttgggattacaggtgtgagccaccgcacccggcctctgagaaatatttagattgtacgcctcaaatgggcagggactgtgtcttacacttttgtatttatgctacagcttacctaatacagtgccaggcctcgttaaacacttattgattgctcagacgataaagaacttgctttggaaggaggagaggatagtcatgtgcttctgaatgtattgaacttcttgaaatctctttcctcatcaattttagcagagtttctattgaaactcctagggtgtgtttatggaagacaaactgagatgtgctgtcccagccttaggccctggcagtacgccttgccttttcacggcacacccactacagcctttcccacactgtgacactggagctggtgagtcagatgcatggcatgggaagccctctctaggaggatgctgtggccacacaagcgctggacgaaccgctggagttgaagattattctctcttctaaagaaaatagaagaatattaggagaaaagacacttgaaaatgttcactcttttattcacattacatcatctgtcttgaataatgggtctatctctttcctgttgctctggccctgaaaaaaaaattagctttttaaggctgcttttgttacgtgtgcattttcttgtaatcctgtcattctgggatttaataataatagtattaataccacctaccatttgttggttacttactgtgttttaggcactgtgctaaacgccttccatgtattcatctcattagtaaacatttctgaaactatt

SEQ ID NO: 322070 - DNA, 751 bp, Homo sapiens
ccccgcccccacttctaggcttggttgaaccgtgcagataccttctcgaaacaaaagattttcctacctgcttatacttggtaaccgagggaatttctaagacttcttgctcatttctgagtattgtctttatatcctgacactatgaatgctacttggatgcctcttaagggtctcttctgcagggtccccatgaattgtggctgaagttgtgcacaaacaagtatctccagtgacaggagtgccttctgaggcagccattgcatcttcatctgctgacactctgctaggctgacttctgtagttttcaccactgatcttcagtccacctcacagagctctataaaacgcttaaatcctctttacatcatagactttcagctacttgaagatagccatcagccgctacgtgactcttttctccaggttgaagattattctctcttctaaagaaaatagaagaatattaggagaaaagacacttgaaaatgttcactcttttattcacattacatcatctgtcttgaataatgggtctatctctttcctgttgctctggccctgaaaaaaaaattagctttttaaggctgcttttgttacgtgtgcattttcttgtaatcctgtcattctgggatttaataataatagtattaataccacctaccatttgttggttacttactgtgttttaggcactgtgctaaacgccttccatgtattcatctcattagtaaacatttctgaaactatt

SEQ ID NO: 322071 - DNA, 871 bp, Homo sapiens
gctcctgagtagctgggattacaggcgccctccaccacgcccggcgaatttttgtatctttagtagagacagggtttcaccacgttggccaggttggtcttgaactcctgacctcatgatccgcctgcctcggcctcccaaagtgttgggattacaggtgtgagccaccgcacccggcctctgagaaatatttagattgtacgcctcaaatgggcagggactgtgtcttacacttttgtatttatgctacagcttacctaatacagtgccaggcctcgttaaacacttattgattgctcagacgataaagaacttgctttggaaggaggagaggatagtcatgtgcttctgaatgtattgaacttcttgaaatctctttcctcatcaattttagcagagtttctattgaaactcctagggtgtgtttatggaagacaaactgagatgtgctgtcccagccttaggccctggcagtacgccttgccttttcacggcacacccactacagcctttcccacactgtgacactggagctggtgagtcagagttgaagattattctctcttctaaagaaaatagaagaatattaggagaaaagacacttgaaaatgttcactcttttattcacattacatcatctgtcttgaataatgggtctatctctttcctgttgctctggccctgaaaaaaaaattagctttttaaggctgcttttgttacgtgtgcattttcttgtaatcctgtcattctgggatttaataataatagtattaataccacctaccatttgttggttacttactgtgttttaggcactgtgctaaacgccttccatgtattcatctcattagtaaacatttctgaaactatt

SEQ ID NO: 322072 - DNA, 516 bp, Homo sapiens
gatatatttagttggagttaagagcgttgggctcccataaagcagtagggctctccttgagtttagtttatatatatttagttggagttaagagtgttgggctcccataaagcggaagggttctccttgagtgctgcatcatctgtcttagatcccgatttccccataatcatgtttattatcctttccaggttgaagattattctctcttctaaagaaaatagaagaatattaggagaaaagacacttgaaaatgttcactcttttattcacattacatcatctgtcttgaataatgggtctatctctttcctgttgctctggccctgaaaaaaaaattagctttttaaggctgcttttgttacgtgtgcattttcttgtaatcctgtcattctgggatttaataataatagtattaataccacctaccatttgttggttacttactgtgttttaggcactgtgctaaacgccttccatgtattcatctcattagtaaacatttctgaaactatt

SEQ ID NO: 322073 - DNA, 760 bp, Homo sapiens
ggattacaggcgtgagccactgcgcccagcctccctgtgtgtatttctttgtgtccacaatttccccttttttataaggacaagtcataatgggattagagtcctccctgatgacctcattttaactttatgacctctttggagatcttatctctttcttttttttcagagtctctctttgttgcccaggctggagtacagtggggtgatctcagctcactgcaacctcctcctcctaggttcaagtgattcttctgccttagccttccaagtagctggagttacaggtgctcgccaccatgcctagctaatttttacatttttggtagagatggggtttctccacattggccaggctggtctcgaactcctgacctcaagtggtccacccacctcggcctcttaaagtgctgagattgcaggcgtgagccaccgcacctggtctgaagatcccatctctaagatcacattctgagggtctcttctgcagggtccccatgaattgtggctgaagttgtgcacaaacaagtatctccagtgacaggagtgccttctgaggcagccattgcatcttcatctgctgacactctgctaggctgacttctgtagttttcaccactgatcttcagtccacctcacagagctctataaaacgcttaaatcctctttacatcatagactttcagctacttgaagatagccatcagccgctacgtgactcttttctccaggtaaaatctccaattatagcagctgttct

SEQ ID NO: 322074 - DNA, 1031 bp, Homo sapiens
ccccgcccccacttctaggcttggttgaaccgtgcagataccttctcgaaacaaaagattttcctacctgcttatacttggtaaccgagggaatttctaagacttcttgctcatttctgagtattgtctttatatcctgacactatgaatgctacttggatgcctcttaagggtctcttctgcagggtccccatgaattgtggctgaagttgtgcacaaacaagtatctccagtgacaggagtgccttctgaggcagccattgcatcttcatctgctgacactctgctaggctgacttctgtagttttcaccactgatcttcagtccacctcacagagctctataaaacgcttaaatcctctttacatcatagactttcagctacttgaagatagccatcagccgctacgtgactcttttctccaggatctccctaatactatgaacgcggcagagataacggacaagctcggcctccattccctccgctacagaaactggcacattcaggctacttgtgccactactggacatgggctttacgaaggcctgaactggctcgccaaccagttccagaaccagaactgatcagaaggatctattctttgtgccttgtggccacatcagctagcctctgctgtgtgcacgtgtacgtgtgtgctgggagtggaggcagctttctcacagtgccttatccatgccataagaaaagcagtgttacattttaagaaacccagtgttaagttttaaacaccaccttccatttcagtagctttgatgatcatttttgcaattgatggagaagtccagagggcttgctggtgctcgaaggccagagcgggcttcatggaggcgagttggagcggggactgagttcagctgttgcaatcctggtctggcgtctggagtcctgttagtctttggcatcctttcgtaaaaaggaaggaattgtcattcttttttttttaaaaccatatttttactgtaccttttcatgtttatttattttttattaaaaaaattttttttga

SEQ ID NO: 322075 - DNA, 2487 bp, Homo sapiens
gctcctgagtagctgggattacaggcgccctccaccacgcccggcgaatttttgtatctttagtagagacagggtttcaccacgttggccaggttggtcttgaactcctgacctcatgatccgcctgcctcggcctcccaaagtgttgggattacaggtgtgagccaccgcacccggcctctgagaaatatttagattgtacgcctcaaatgggcagggactgtgtcttacacttttgtatttatgctacagcttacctaatacagtgccaggcctcgttaaacacttattgattgctcagacgataaagaacttgctttggaaggaggagaggatagtcatgtgcttctgaatgtattgaacttcttgaaatctctttcctcatcaattttagcagagtttctattgaaactcctagggtgtgtttatggaagacaaactgagatgtgctgtcccagccttaggccctggcagtacgccttgccttttcacggcacacccactacagcctttcccacactgtgacactggagctggtgagtcagatgcatggcatgggaagccctctctaggaggatgctgtggccacacaagcgctggacgaaccgctggagtaggtgacttccaaggtgtcctgatgtagtagctattagacaagctcctgcatttggccagtaattagcatgctgctgcacattgccactaggtggtgctgctgctccattcccaagtaacccacatgcatccctggctggggtcagccttggggtttcccaagtgtagaggaatccatctctgtgcctgtggtaatggctggacaccaggagagacccagaaaacagggatatcctagaagagaaaggcaaaataagcactcagagcagaggacatttgagtgtcaataatgaaggtggcagcagtaatcatggctatcatttactaaaaatagtggatattggccagacatggtggctcacacctgtaatcccagcattttgggagaccaaggtgggtggatcacttgaggtcggcagttcgagaccagcccggccaacatggtgaaactatctactaaaaatacaaaaattagccaggtgtggtggtgcacgcctgtagtcccagctacttgggaggctgaggagggagaatcacttgaacctgggaggtggaggctgtagtgagctgagatcgcatcactgcactccagcctggacaacagagcaagactgtctcaaaaaaaaaaagtagatactgtgctagtcacttgatacacatcatctctgatctttgcactgagcgaggcatgtgtattatgtctgcattacaaaaggggaaaaattaaggttcaagaagataaagtcaccaggcatggtggcgcatgcctgtgatcgcagcactttaagaggctgagacaggcggattggttgaatccaggagttcaagaccagcctgggcaacatagtgagacctcatctctacaaaaaaaataaaattagctgggtgtggtggtgtgtgcctgtagtcacagctcctcgggaggctgatgtggaaggatcacttgagcccgggagatagaggctgcagtgagatgagactgagccattgcactcagcctaggcaacagagtgagaccctgtctcaaaacaaaacagaaataacaaaaaataaggtgacttgctggaggccacatggctgtgagccaaatacaggtctgggttatcagggctcacatacttctaagtacaccctactgccttggaatctgctgaagaccaagcccctgcccccaagccatggcaaagaaggagggaaggaagcaaaggtgcccagcggggacaactcggggaggggcgaggtgcccagggcccaggaaggccaagcagcatgtggcagggcagcatcaggtgactcccaagaaggaatgaggagaggatatgaggaaagagccacagcacagaggcctgctgttaggtcagcggagaccacggcccatgggacctggatctacccttgatgctaacaatgttctttggggaaaaaatctataatcacaaagtttctgcaactggactgtagtcatggttgcagaactgtatagatttactaggaaccatcaaattgttcacttacaatgggtaaattgtacagtacataggttatccctcagtaaagctgtatgaaatttatagtcatgaaactaatagtgacaaacgagctgggtaagtaggtctcagctgttctgtaggcactttgagaagaggaagagtagcatctcggttttaataaaagaaagcctggcccatggcgtccagcttctgcttgaatactttcagtgcccgggagctcagtatctcaaagcagcccactcctgtttaagagaactctaaaccttagaatgttgaaatacatcattattattctagtactgctgtgaaaaataaatgtctttgttttgccacataaaaaaaaaaaaccagggcggccgct

SEQ ID NO: 322076 - DNA, 2608 bp, Homo sapiens
ccccgcccccacttctaggcttggttgaaccgtgcagataccttctcgaaacaaaagattttcctacctgcttatacttggtaaccgagggaatttctaagacttcttgctcatttctgagtattgtctttatatcctgacactatgaatgctacttggatgcctcttaagggtctcttctgcagggtccccatgaattgtggctgaagttgtgcacaaacaagtatctccagtgacaggagtgccttctgaggcagccattgcatcttcatctgctgacactctgctaggctgacttctgtagttttcaccactgatcttcagtccacctcacagagctctataaaacgcttaaatcctctttacatcatagactttcagctacttgaagatagccatcagccgctacgtgactcttttctccagtttgccccggtctcagagtgtgggatccagcactgcccatataacgttcccaggatgttctgactgatgtagagtaagcctggtatcacccatgtcctaggaactgagaccccgtcactactggttctcactctgtcacctaagctggagtgcagtggcaccatctcagctcactgcaactgctgcctcccgggttcaagcaattcttttacctcagcccccccagtagctgggatcacagtgcatggcatgggaagccctctctaggaggatgctgtggccacacaagcgctggacgaaccgctggagtaggtgacttccaaggtgtcctgatgtagtagctattagacaagctcctgcatttggccagtaattagcatgctgctgcacattgccactaggtggtgctgctgctccattcccaagtaacccacatgcatccctggctggggtcagccttggggtttcccaagtgtagaggaatccatctctgtgcctgtggtaatggctggacaccaggagagacccagaaaacagggatatcctagaagagaaaggcaaaataagcactcagagcagaggacatttgagtgtcaataatgaaggtggcagcagtaatcatggctatcatttactaaaaatagtggatattggccagacatggtggctcacacctgtaatcccagcattttgggagaccaaggtgggtggatcacttgaggtcggcagttcgagaccagcccggccaacatggtgaaactatctactaaaaatacaaaaattagccaggtgtggtggtgcacgcctgtagtcccagctacttgggaggctgaggagggagaatcacttgaacctgggaggtggaggctgtagtgagctgagatcgcatcactgcactccagcctggacaacagagcaagactgtctcaaaaaaaaaaagtagatactgtgctagtcacttgatacacatcatctctgatctttgcactgagcgaggcatgtgtattatgtctgcattacaaaaggggaaaaattaaggttcaagaagataaagtcaccaggcatggtggcgcatgcctgtgatcgcagcactttaagaggctgagacaggcggattggttgaatccaggagttcaagaccagcctgggcaacatagtgagacctcatctctacaaaaaaaataaaattagctgggtgtggtggtgtgtgcctgtagtcacagctcctcgggaggctgatgtggaaggatcacttgagcccgggagatagaggctgcagtgagatgagactgagccattgcactcagcctaggcaacagagtgagaccctgtctcaaaacaaaacagaaataacaaaaaataaggtgacttgctggaggccacatggctgtgagccaaatacaggtctgggttatcagggctcacatacttctaagtacaccctactgccttggaatctgctgaagaccaagcccctgcccccaagccatggcaaagaaggagggaaggaagcaaaggtgcccagcggggacaactcggggaggggcgaggtgcccagggcccaggaaggccaagcagcatgtggcagggcagcatcaggtgactcccaagaaggaatgaggagaggatatgaggaaagagccacagcacagaggcctgctgttaggtcagcggagaccacggcccatgggacctggatctacccttgatgctaacaatgttctttggggaaaaaatctataatcacaaagtttctgcaactggactgtagtcatggttgcagaactgtatagatttactaggaaccatcaaattgttcacttacaatgggtaaattgtacagtacataggttatccctcagtaaagctgtatgaaatttatagtcatgaaactaatagtgacaaacgagctgggtaagtaggtctcagctgttctgtaggcactttgagaagaggaagagtagcatctcggttttaataaaagaaagcctggcccatggcgtccagcttctgcttgaatactttcagtgcccgggagctcagtatctcaaagcagcccactcctgtttaagagaactctaaaccttagaatgttgaaatacatcattattattctagtactgctgtgaaaaataaatgtctttgttttgccacataaaaaaaaaaaaccagggcggccgct

SEQ ID NO: 322077 - DNA, 2944 bp, Homo sapiens
aggtccggggctgggggagctgcctttggcactggtgcccctgggggtgggggcacgagtgggccagggtgatggtgaggtagaggaggtgtccctgacccgacgagctcgagggagcggcctggctgggaggcggggggccgcggggcccggggagcgggcgccgccgagggccctggaagcggcggggctgggggagaggggacgcgtgtgtggggcacggggacgcccgcccagcgcccactcgtaggcctgggacgcgggctgccggccgagtggcctgagggcctggctgcccggggggcgggccggggccgcggccgggggcgcggagcggagctcggggcgccaggccgagccgaggtgggacggaccgacgcggagaggaagggaagccgcatcccgcggggcgcccctcctgaagcgagccgggcagcggccgcgggcgcccctgccctgagcccaccccgcgctctgccctccctaacaatgggaatggggcagaaggaggcgccccactgcggggaggtgaggggtgggtttgggactggggtccgcggtggggggaggtgcgatctcgggctctcgcctctccgctccctctggctctggagttgggggcccctgtggggctctgaagtccgcctgagacttgggtcaagagtcaaactgtcgccccccgctcctcccccaaaatccggtgagcggtaaggaaagtgatgccaagtcttcgaagcctcagtgacaaacgcatagcaagaacacatccactccagagataccttctcgaaacaaaagattttcctacctgcttatacttggtaaccgagggaatttctaagacttcttgctcatttctgagtattgtctttatatcctgacactatgaatgctacttggatgcctcttaagggtctcttctgcagggtccccatgaattgtggctgaagttgtgcacaaacaagtatctccagtgacaggagtgccttctgaggcagccattgcatcttcatctgctgacactctgctaggctgacttctgtagttttcaccactgatcttcagtccacctcacagagctctataaaacgcttaaatcctctttacatcatagactttcagctacttgaagatagccatcagccgctacgtgactcttttctccaggctggagtgcaatggcgctaccttggctcaccgcaacttccgcctcctgggctcaagcaattctcctgcctcagcctcccgagtagctgggattacaggatctccctaatactatgaacgcggcagagataacggacaagctcggcctccattccctccgctacagaaactggcacattcaggctacttgtgccactactggacatgggctttacgaaggcctgaactggctcgccaaccagttccagaaccagaactgatcagaaggatctattctttgtgccttgtggccacatcagctagcctctgctgtgtgcacgtgtacgtgtgtgctgggagtggaggcagctttctcacagtgccttatccatgccataagaaaagcagtgttacattttaagaaacccagtgttaagttttaaacaccaccttccatttcagtagctttgatgatcatttttgcaattgatggagaagtccagagggcttgctggtgctcgaaggccagagcgggcttcatggaggcgagttggagcggggactgagttcagctgttgcaatcctggtctggcgtctggagtcctgttagtctttggcatcctttcgtaaaaaggaaggaattgtcattcttttttttttaaaaccatatttttactgtaccttttcatgtttatttattttttattaaaaaaattttttttgaaacagcctcccactctgtcgcccaagctggagtgcagtggtgcgatctcagctcactgcaacctccgtctctcgggctcaagcaatcctcccacctcagccccctgagtagctgagactatgggtgtgcaccaccacacctggctaatttttgtattttttgtggagacagggtcttgccatgttgcccaggctggtctgtaactcctgagctcaagggatccacccacctcagccttccaaaatgctgggattacaggcatgagccactgcgctaccgagaaatcgtcattctttaccaccactgctgcagctagcagctcactcttcagtgctttaagcaaatgatcctcaggaaagaaaaggtatttgcttattgcaggtgcaaagaggctcagattggaacttttccctgaaactatattgtagcccagagttcctgatgtaagacgctttatttaaagacatccgtgagctttttcactggcatatcaatacttcataacactaggaaggtatccagccttttccttatgctagttccttcccttatttgccagatggggaccctgtggggaggtgacccagtgtgaggccgaagctctttcccagagccccacaggccagtggagggtcgtgtttgtgctctgggcatcaccgtcttgggtctcggtcccctgcgactgcagctgctacatccctccctgctctgagataaatgttcttcccatgaagcagacggttcacttttgggatggcgctgtctccaggtttggctgtctcagtccagatgatgtttggttagtttccattcccagaaccacaagcctttgagttctgaaagtttgtgacagaatcaagaggctaatttgggagatgtgagattcccagcccacctggtattgccctcgagttagtggtaaattttgctatggaaaatatctcttgtcaagaccaagctccggcgcattgcctccctcttttggatggccatggcatctcatgaaccacttggaaatgtgttttatgttgttctccaaatattaataaaaatatcccggagaggaggttcact

SEQ ID NO: 322078 - DNA, 2913 bp, Homo sapiens
ggattacaggcgtgagccactgcgcccagcctccctgtgtgtatttctttgtgtccacaatttccccttttttataaggacaagtcataatgggattagagtcctccctgatgacctcattttaactttatgacctctttggagatcttatctctttcttttttttcagagtctctctttgttgcccaggctggagtacagtggggtgatctcagctcactgcaacctcctcctcctaggttcaagtgattcttctgccttagccttccaagtagctggagttacaggtgctcgccaccatgcctagctaatttttacatttttggtagagatggggtttctccacattggccaggctggtctcgaactcctgacctcaagtggtccacccacctcggcctcttaaagtgctgagattgcaggcgtgagccaccgcacctggtctgaagatcccatctctaagatcacattctgagggtctcttctgcagggtccccatgaattgtggctgaagttgtgcacaaacaagtatctccagtgacaggagtgccttctgaggcagccattgcatcttcatctgctgacactctgctaggctgacttctgtagttttcaccactgatcttcagtccacctcacagagctctataaaacgcttaaatcctctttacatcatagactttcagctacttgaagatagccatcagccgctacgtgactcttttctccagtttgccccggtctcagagtgtgggatccagcactgcccatataacgttcccaggatgttctgactgatgtagagtaagcctggtatcacccatgtcctaggaactgagaccccgtcactactggttctcactctgtcacctaagctggagtgcagtggcaccatctcagctcactgcaactgctgcctcccgggttcaagcaattcttttacctcagcccccccagtagctgggatcacagtgcatggcatgggaagccctctctaggaggatgctgtggccacacaagcgctggacgaaccgctggagtaggtgacttccaaggtgtcctgatgtagtagctattagacaagctcctgcatttggccagtaattagcatgctgctgcacattgccactaggtggtgctgctgctccattcccaagtaacccacatgcatccctggctggggtcagccttggggtttcccaagtgtagaggaatccatctctgtgcctgtggtaatggctggacaccaggagagacccagaaaacagggatatcctagaagagaaaggcaaaataagcactcagagcagaggacatttgagtgtcaataatgaaggtggcagcagtaatcatggctatcatttactaaaaatagtggatattggccagacatggtggctcacacctgtaatcccagcattttgggagaccaaggtgggtggatcacttgaggtcggcagttcgagaccagcccggccaacatggtgaaactatctactaaaaatacaaaaattagccaggtgtggtggtgcacgcctgtagtcccagctacttgggaggctgaggagggagaatcacttgaacctgggaggtggaggctgtagtgagctgagatcgcatcactgcactccagcctggacaacagagcaagactgtctcaaaaaaaaaaagtagatactgtgctagtcacttgatacacatcatctctgatctttgcactgagcgaggcatgtgtattatgtctgcattacaaaaggggaaaaattaaggttcaagaagataaagtcaccaggcatggtggcgcatgcctgtgatcgcagcactttaagaggctgagacaggcggattggttgaatccaggagttcaagaccagcctgggcaacatagtgagacctcatctctacaaaaaaaataaaattagctgggtgtggtggtgtgtgcctgtagtcacagctcctcgggaggctgatgtggaaggatcacttgagcccgggagatagaggctgcagtgagatgagactgagccattgcactcagcctaggcaacagagtgagaccctgtctcaaaacaaaacagaaataacaaaaaataaggtgacttgctggaggccacatggctgtgagccaaatacaggtctgggttatcagggctcacatacttctaagtacaccctactgccttggaatctgctgaagaccaagcccctgcccccaagccatggcaaagaaggagggaaggaagcaaaggtgcccagcggggacaactcggggaggggcgaggtgcccagggcccaggaaggccaagcagcatgtggcagggcagcatcaggtgactcccaagaaggaatgaggagaggatatgaggaaagagccacagcacagaggcctgctgttaggtcagcggagaccacggcccatgggacctggatctacccttgatgctaacaatgttctttggggaaaaaatctataatcacaaagtttctgcaactggactgtagtcatggttgcagaactgtatagatttactaggaaccatcaaattgttcacttacaatgggtaaattgtacagtacataggttatccctcagtaaagctgtatgaaatttatagtcatgaaactaatagtgacaaacgagctgggtaagtaggtctcagctgttctgtaggcactttgagaagaggaagagtagcatctcggttttaataaaagaaagcctggcccatggcgtccagcttctgcttgaatactttcagtgcccgggagctcagtatctcaaagcagcccactcctgtttaagagaactctaaaccttagaatgttgaaatacatcattattattctagtactgctgtgaaaaataaatgtctttgttttgccacataaaaaaaaaaaaccagggcggccgct

SEQ ID NO: 322079 - DNA, 1492 bp, Homo sapiens
aggtccggggctgggggagctgcctttggcactggtgcccctgggggtgggggcacgagtgggccagggtgatggtgaggtagaggaggtgtccctgacccgacgagctcgagggagcggcctggctgggaggcggggggccgcggggcccggggagcgggcgccgccgagggccctggaagcggcggggctgggggagaggggacgcgtgtgtggggcacggggacgcccgcccagcgcccactcgtaggcctgggacgcgggctgccggccgagtggcctgagggcctggctgcccggggggcgggccggggccgcggccgggggcgcggagcggagctcggggcgccaggccgagccgaggtgggacggaccgacgcggagaggaagggaagccgcatcccgcggggcgcccctcctgaagcgagccgggcagcggccgcgggcgcccctgccctgagcccaccccgcgctctgccctccctaacaatgggaatggggcagaaggaggcgccccactgcggggaggtgaggggtgggtttgggactggggtccgcggtggggggaggtgcgatctcgggctctcgcctctccgctccctctggctctggagttgggggcccctgtggggctctgaagtccgcctgagacttgggtcaagagtcaaactgtcgccccccgctcctcccccaaaatccggtgagcggtaaggaaagtgatgccaagtcttcgaagcctcagtgacaaacgcatagcaagaacacatccactccagagataccttctcgaaacaaaagattttcctacctgcttatacttggtaaccgagggaatttctaagacttcttgctcatttctgagtattgtctttatatcctgacactatgaatgctacttggatgcctcttaagggtctcttctgcagggtccccatgaattgtggctgaagttgtgcacaaacaagtatctccagtgacaggagtgccttctgaggcagccattgcatcttcatctgctgacactctgctaggctgacttctgtagttttcaccactgatcttcagtccacctcacagagctctataaaacgcttaaatcctctttacatcatagactttcagctacttgaagatagccatcagccgctacgtgactcttttctccaggttgaagattattctctcttctaaagaaaatagaagaatattaggagaaaagacacttgaaaatgttcactcttttattcacattacatcatctgtcttgaataatgggtctatctctttcctgttgctctggccctgaaaaaaaaattagctttttaaggctgcttttgttacgtgtgcattttcttgtaatcctgtcattctgggatttaataataatagtattaataccacctaccatttgttggttacttactgtgttttaggcactgtgctaaacgccttccatgtattcatctcattagtaaacatttctgaaactatt

SEQ ID NO: 322080 - DNA, 1337 bp, Homo sapiens
aggtccggggctgggggagctgcctttggcactggtgcccctgggggtgggggcacgagtgggccagggtgatggtgaggtagaggaggtgtccctgacccgacgagctcgagggagcggcctggctgggaggcggggggccgcggggcccggggagcgggcgccgccgagggccctggaagcggcggggctgggggagaggggacgcgtgtgtggggcacggggacgcccgcccagcgcccactcgtaggcctgggacgcgggctgccggccgagtggcctgagggcctggctgcccggggggcgggccggggccgcggccgggggcgcggagcggagctcggggcgccaggccgagccgaggtgggacggaccgacgcggagaggaagggaagccgcatcccgcggggcgcccctcctgaagcgagccgggcagcggccgcgggcgcccctgccctgagcccaccccgcgctctgccctccctaacaatgggaatggggcagaaggaggcgccccactgcggggaggtgaggggtgggtttgggactggggtccgcggtggggggaggtgcgatctcgggctctcgcctctccgctccctctggctctggagttgggggcccctgtggggctctgaagtccgcctgagacttgggtcaagagtcaaactgtcgccccccgctcctcccccaaaatccggtgagcggtaaggaaagtgatgccaagtcttcgaagcctcagtgacaaacgcatagcaagaacacatccactccagagataccttctcgaaacaaaagattttcctacctgcttatacttggtaaccgagggaatttctaagacttcttgctcatttctgagtattgtctttatatcctgacactatgaatgctacttggatgcctcttaagggtctcttctgcagggtccccatgaattgtggctgaagttgtgcacaaacaagtatctccagtgacaggagtgccttctgaggcagccattgcatcttcatctgctgacactctgctaggctgacttctgtagttttcaccactgatcttcagtccacctcacagagctctataaaacgcttaaatcctctttacatcatagactttcagctacttgaagatagccatcagccgctacgtgactcttttctccaggttgaagattattctctcttctaaagaaaatagaagaatattaggagaaaagacacttgaaaatgttcactcttttattcacattacatcatctgtcttgaataatgggtctatctctttcctgttgctctggccctgaaaaatctgggtttaatataataggttaatac

SEQ ID NO: 322081 - DNA, 1196 bp, Homo sapiens
aggtccggggctgggggagctgcctttggcactggtgcccctgggggtgggggcacgagtgggccagggtgatggtgaggtagaggaggtgtccctgacccgacgagctcgagggagcggcctggctgggaggcggggggccgcggggcccggggagcgggcgccgccgagggccctggaagcggcggggctgggggagaggggacgcgtgtgtggggcacggggacgcccgcccagcgcccactcgtaggcctgggacgcgggctgccggccgagtggcctgagggcctggctgcccggggggcgggccggggccgcggccgggggcgcggagcggagctcggggcgccaggccgagccgaggtgggacggaccgacgcggagaggaagggaagccgcatcccgcggggcgcccctcctgaagcgagccgggcagcggccgcgggcgcccctgccctgagcccaccccgcgctctgccctccctaacaatgggaatggggcagaaggaggcgccccactgcggggaggtgaggggtgggtttgggactggggtccgcggtggggggaggtgcgatctcgggctctcgcctctccgctccctctggctctggagttgggggcccctgtggggctctgaagtccgcctgagacttgggtcaagagtcaaactgtcgccccccgctcctcccccaaaatccggtgagcggtaaggaaagtgatgccaagtcttcgaagcctcagtgacaaacgcatagcaagaacacatccactccagagataccttctcgaaacaaaagattttcctacctgcttatacttggtaaccgagggaatttctaagacttcttgctcatttctgagtattgtctttatatcctgacactatgaatgctacttggatgcctcttaagggtctcttctgcagggtccccatgaattgtggctgaagttgtgcacaaacaagtatctccagtgacaggagtgccttctgaggcagccattgcatcttcatctgctgacactctgctaggctgacttctgtagttttcaccactgatcttcagtccacctcacagagctctataaaacgcttaaatcctctttacatcatagactttcagctacttgaagatagccatcagccgctacgtgactcttttctccaggtaaaatctccaattatagcagctgttct

SEQ ID NO: 322082 - DNA, 2846 bp, Homo sapiens
aggtccggggctgggggagctgcctttggcactggtgcccctgggggtgggggcacgagtgggccagggtgatggtgaggtagaggaggtgtccctgacccgacgagctcgagggagcggcctggctgggaggcggggggccgcggggcccggggagcgggcgccgccgagggccctggaagcggcggggctgggggagaggggacgcgtgtgtggggcacggggacgcccgcccagcgcccactcgtaggcctgggacgcgggctgccggccgagtggcctgagggcctggctgcccggggggcgggccggggccgcggccgggggcgcggagcggagctcggggcgccaggccgagccgaggtgggacggaccgacgcggagaggaagggaagccgcatcccgcggggcgcccctcctgaagcgagccgggcagcggccgcgggcgcccctgccctgagcccaccccgcgctctgccctccctaacaatgggaatggggcagaaggaggcgccccactgcggggaggtgaggggtgggtttgggactggggtccgcggtggggggaggtgcgatctcgggctctcgcctctccgctccctctggctctggagttgggggcccctgtggggctctgaagtccgcctgagacttgggtcaagagtcaaactgtcgccccccgctcctcccccaaaatccggtgagcggtaaggaaagtgatgccaagtcttcgaagcctcagtgacaaacgcatagcaagaacacatccactccagagataccttctcgaaacaaaagattttcctacctgcttatacttggtaaccgagggaatttctaagacttcttgctcatttctgagtattgtctttatatcctgacactatgaatgctacttggatgcctcttaagggtctcttctgcagggtccccatgaattgtggctgaagttgtgcacaaacaagtatctccagtgacaggagtgccttctgaggcagccattgcatcttcatctgctgacactctgctaggctgacttctgtagttttcaccactgatcttcagtccacctcacagagctctataaaacgcttaaatcctctttacatcatagactttcagctacttgaagatagccatcagccgctacgtgactcttttctccaggatctccctaatactatgaacgcggcagagataacggacaagctcggcctccattccctccgctacagaaactggcacattcaggctacttgtgccactactggacatgggctttacgaaggcctgaactggctcgccaaccagttccagaaccagaactgatcagaaggatctattctttgtgccttgtggccacatcagctagcctctgctgtgtgcacgtgtacgtgtgtgctgggagtggaggcagctttctcacagtgccttatccatgccataagaaaagcagtgttacattttaagaaacccagtgttaagttttaaacaccaccttccatttcagtagctttgatgatcatttttgcaattgatggagaagtccagagggcttgctggtgctcgaaggccagagcgggcttcatggaggcgagttggagcggggactgagttcagctgttgcaatcctggtctggcgtctggagtcctgttagtctttggcatcctttcgtaaaaaggaaggaattgtcattcttttttttttaaaaccatatttttactgtaccttttcatgtttatttattttttattaaaaaaattttttttgaaacagcctcccactctgtcgcccaagctggagtgcagtggtgcgatctcagctcactgcaacctccgtctctcgggctcaagcaatcctcccacctcagccccctgagtagctgagactatgggtgtgcaccaccacacctggctaatttttgtattttttgtggagacagggtcttgccatgttgcccaggctggtctgtaactcctgagctcaagggatccacccacctcagccttccaaaatgctgggattacaggcatgagccactgcgctaccgagaaatcgtcattctttaccaccactgctgcagctagcagctcactcttcagtgctttaagcaaatgatcctcaggaaagaaaaggtatttgcttattgcaggtgcaaagaggctcagattggaacttttccctgaaactatattgtagcccagagttcctgatgtaagacgctttatttaaagacatccgtgagctttttcactggcatatcaatacttcataacactaggaaggtatccagccttttccttatgctagttccttcccttatttgccagatggggaccctgtggggaggtgacccagtgtgaggccgaagctctttcccagagccccacaggccagtggagggtcgtgtttgtgctctgggcatcaccgtcttgggtctcggtcccctgcgactgcagctgctacatccctccctgctctgagataaatgttcttcccatgaagcagacggttcacttttgggatggcgctgtctccaggtttggctgtctcagtccagatgatgtttggttagtttccattcccagaaccacaagcctttgagttctgaaagtttgtgacagaatcaagaggctaatttgggagatgtgagattcccagcccacctggtattgccctcgagttagtggtaaattttgctatggaaaatatctcttgtcaagaccaagctccggcgcattgcctccctcttttggatggccatggcatctcatgaaccacttggaaatgtgttttatgttgttctccaaatattaataaaaatatcccggagaggaggttcact

SEQ ID NO: 322083 - DNA, 1683 bp, Homo sapiens
aggtccggggctgggggagctgcctttggcactggtgcccctgggggtgggggcacgagtgggccagggtgatggtgaggtagaggaggtgtccctgacccgacgagctcgagggagcggcctggctgggaggcggggggccgcggggcccggggagcgggcgccgccgagggccctggaagcggcggggctgggggagaggggacgcgtgtgtggggcacggggacgcccgcccagcgcccactcgtaggcctgggacgcgggctgccggccgagtggcctgagggcctggctgcccggggggcgggccggggccgcggccgggggcgcggagcggagctcggggcgccaggccgagccgaggtgggacggaccgacgcggagaggaagggaagccgcatcccgcggggcgcccctcctgaagcgagccgggcagcggccgcgggcgcccctgccctgagcccaccccgcgctctgccctccctaacaatgggaatggggcagaaggaggcgccccactgcggggaggtgaggggtgggtttgggactggggtccgcggtggggggaggtgcgatctcgggctctcgcctctccgctccctctggctctggagttgggggcccctgtggggctctgaagtccgcctgagacttgggtcaagagtcaaactgtcgccccccgctcctcccccaaaatccggtgagcggtaaggaaagtgatgccaagtcttcgaagcctcagtgacaaacgcatagcaagaacacatccactccagagataccttctcgaaacaaaagattttcctacctgcttatacttggtaaccgagggaatttctaagacttcttgctcatttctgagtattgtctttatatcctgacactatgaatgctacttggatgcctcttaagggtctcttctgcagggtccccatgaattgtggctgaagttgtgcacaaacaagtatctccagtgacaggagtgccttctgaggcagccattgcatcttcatctgctgacactctgctaggctgacttctgtagttttcaccactgatcttcagtccacctcacagagctctataaaacgcttaaatcctctttacatcatagactttcagctacttgaagatagccatcagccgctacgtgactcttttctccagtttgccccggtctcagagtgtgggatccagcactgcccatataacgttcccaggatgttctgactgatgtagagttctcactctgtcacctaagctggagtgcagtggcaccatctcagctcactgcaactgctgcctcccgggttcaagcaattcttttacctcagcccccccagtagctgggatcacaggttgaagattattctctcttctaaagaaaatagaagaatattaggagaaaagacacttgaaaatgttcactcttttattcacattacatcatctgtcttgaataatgggtctatctctttcctgttgctctggccctgaaaaaaaaattagctttttaaggctgcttttgttacgtgtgcattttcttgtaatcctgtcattctgggatttaataataatagtattaataccacctaccatttgttggttacttactgtgttttaggcactgtgctaaacgccttccatgtattcatctcattagtaaacatttctgaaactatt

SEQ ID NO: 322084 - DNA, 2527 bp, Homo sapiens
cccgccgcagccggccgcagccggccgcacccttccccgtccgtccatgtccctgcccgtggtgctcccgggctcctgctgccccgtggctgggctttcgggtgggccgcaggccgggggcccgggcgccgctgccgccgccgctcaggagccgccgctgcccccgctgcggccgcgctggccccggggcgcgctgcagcccccgtcgcggcctcgctgcgcggccaccgctgctgccggggtgctggccgcgccgccggcgctctcctcccgccgggcagtcgccgccgctgccgccgcggccccgggctccgcgctgctgcccgcccgcccgctgctgtcacttgggctgcttcagctgatcttgggctgctgcatggtggcgctcagcttcggggcgctgtcgctgagcagctccccgcaggtgaagaactcgtgcccgttctgggccggctcctcggtgatactctctggaatcataggattaacaacttggaaaaggcctatgatactcctggtaaacctctttgtgctgctctctgtggtttgtgtcctcttaaatctagctggatttatcctaggctgccaaggggcccagtttgtgtccagcgtgcccaggtgtgatctggtggacttaggtgaaggcaagatttgcttctgttgtgaagaatttcaaccagccaagtgcacagacaaagaaaatgccttgaaactctttccggttcagccctgtagtgctgttcaccttctacttaagaaagtcctctttgccctgtgtgccttgaatgccctgaccaccaccgtctgcttggtggccgctgccctccgctacctccagatattcgcaaccaggagatcctgcatcgatgaatcccagatttctgctgaagaagcggaggatcatggacgcatccccgaccctgatgattttgtgccgcctgtgcctcccccttcctattttgccacgttttactcgtgcacaccccggatgaaccgcaggatggttggtcctgatgttattcccctgccacacatctacggagctcgaatcaaaggtgtggaagtgttctgtcctctggatcccccgccgccatatgaagctgtggtgagccagatggaccaggagcagggatcttcattccaaatgtcagaaggatcagaagctgctgtgatcccattggatctgggctgcacacaagtgactcaagatggggacattcctaacatacctgccgaagaaaatgcatccacctcaactcccagttcaaccctggtgcgtcctatcagaagccggagagccctcccacccttgaggaccaggtcgaagagtgaccctgtgctccatccttctgaggagagagctgccccagtgctcagctgtgaagctgcaacacagactgaaaggagactggatctggctgcagtgactctgaggagaggcttgagatctagagcttcgcgatgcagaccgcggtctttgatagattacaaatcctacatggacaccaagctgctggtggcgaggttcctggagcagtcctcttgtaccatgaccccagacatccatgaacttgtagaaaacattaaatctgttttgaaatctgatgaggagcacatggaggaagccatcacaagtgccagttttctagaacagataatggccccattgcagcccagcacatccagggcccacaagctgccctcgcggagacagcctggcctgctgcacctccagagctgcggcgaccttcacaccttcacaccagcggggaggccccgagccgagaggaggccccggcgagtggaggctgagcggccacacagcctcattggggtcatccgagagactgtcctgtgaaccctggaagacagaaggccactccaaggggaaggatccctctcctctctgccatttcttggctgggagctgtggtccacctcaaaaaaaaaggagcactctggaggacacgttttcccacctgttggctcccgtgtctgctgactgagggcattcaggagtaaatgcacaggtcggtccaggcccgtctgggtttgggatgcactgagttggaggttatgaaagctttgatcctcttcttcctctgctgggcctcgcagcattcccaagggtcacatgccctggcatgggcagaaactgggctaatgattctttgcccacttcacccctcgtgtctctctttgttgctaagttctttccctcttggaaggacagatctgccgggctgctatttatagttgcctttggcctttcactgctctgcgatttggcaggaaataaggcgattaaccctatgtgtccacaagcctcaagccttgtttcaggtcaccctcaaatcacactctctttaggcaaaacaggaaacttcttaagtgacaaattttaatgccagacatttaaggagaggattattgttgattccatttactcatgcttgcaaaactagagacccctaaggcagaactgagaataaacatgtttactttgggccactgggcttgatgtgta

SEQ ID NO: 322085 - DNA, 2117 bp, Homo sapiens
gggaattgctatccctggggaaatcagcctcagaagagaagctcactgctctcctggaaggaatgtttctcgacagtattctgatgcttgcaaaaagaaatactatcataccacgttgttctgtgacagaaagcttctaagataagtttttggaattaagaagtacacattattgcatgagggtcataataatagccagcatttatttgggcactttccacgagccaaacaccatctaagtcctttacatgcatcctctcctgagaattgtcttatggaggcagcgttattattattttaaagattttctacattgtattctggtgatgtttgttgaagtacttagtggtgccattgtttccttgccccagaaagtcctctttgccctgtgtgccttgaatgccctgaccaccaccgtctgcttggtggccgctgccctccgctacctccagatattcgcaaccaggagatcctgcatcgatgaatcccagatttctgctgaagaagcggaggatcatggacgcatccccgaccctgatgattttgtgccgcctgtgcctcccccttcctattttgccacgttttactcgtgcacaccccggatgaaccgcaggatggttggtcctgatgttattcccctgccacacatctacggagctcgaatcaaaggtgtggaagtgttctgtcctctggatcccccgccgccatatgaagctgtgggatcttcattccaaatgtcagaaggatcagaagctgctgtgatcccattggatctgggctgcacacaagtgactcaagatggggacattcctaacatacctgccgaagaaaatgcatccacctcaactcccagttcaaccctggtgcgtcctatcagaagccggagagccctcccacccttgaggaccaggtcgaagagtgaccctgtgctccatccttctgaggagagagctgccccagtgctcagctgtgaagctgcaacacagactgaaaggagactggatctggctgcagtgactctgaggagaggcttgagatctagagcttcgcgatgcagaccgcggtctttgatagattacaaatcctacatggacaccaagctgctggtggcgaggttcctggagcagtcctcttgtaccatgaccccagacatccatgaacttgtagaaaacattaaatctgttttgaaatctgatgaggagcacatggaggaagccatcacaagtgccagttttctagaacagataatggccccattgcagcccagcacatccagggcccacaagctgccctcgcggagacagcctggcctgctgcacctccagagctgcggcgaccttcacaccttcacaccagcggggaggccccgagccgagaggaggccccggcgagtggaggctgagcggccacacagcctcattggggtcatccgagagactgtcctgtgaaccctggaagacagaaggccactccaaggggaaggatccctctcctctctgccatttcttggctgggagctgtggtccacctcaaaaaaaaaggagcactctggaggacacgttttcccacctgttggctcccgtgtctgctgactgagggcattcaggagtaaatgcacaggtcggtccaggcccgtctgggtttgggatgcactgagttggaggttatgaaagctttgatcctcttcttcctctgctgggcctcgcagcattcccaagggtcacatgccctggcatgggcagaaactgggctaatgattctttgcccacttcacccctcgtgtctctctttgttgctaagttctttccctcttggaaggacagatctgccgggctgctatttatagttgcctttggcctttcactgctctgcgatttggcaggaaataaggcgattaaccctatgtgtccacaagcctcaagccttgtttcaggtcaccctcaaatcacactctctttaggcaaaacaggaaacttcttaagtgacaaattttaatgccagacatttaaggagaggattattgttgattccatttactcatgcttgcaaaactagagacccctaaggcagaactgagaataaacatgtttactttgggccactgggcttgatgtgta

SEQ ID NO: 322086 - DNA, 1514 bp, Homo sapiens
tctaaattgctgcttatcaggccttcatagactgaagatgccaatgttgtgtatgctgaaggctgctggctgacttctggacacataatgaccagatctgagttttgcttcacacacttcacagtgcagaagcattgctggtctttacacccttgctgatataggcagccatggaaattagagcctgcagtggatttcccaggctctctgttgacttccagaatgatgtgtactttttctgcacctaaatttctcttttggtaatagctatagatctacctcatatccatggtgtgagcatcgataacacaagtcagtacaacgtccttgaggacttttgggacaaagctgccccagtgctcagctgtgaagctgcaacacagactgaaaggagactggatctggctgcagtgactctgaggagaggcttgagatctagagcttcgcgatgcagaccgcggtctttgatagattacaaatcctacatggacaccaagctgctggtggcgaggttcctggagcagtcctcttgtaccatgaccccagacatccatgaacttgtagaaaacattaaatctgttttgaaatctgatgaggagcacatggaggaagccatcacaagtgccagttttctagaacagataatggccccattgcagcccagcacatccagggcccacaagctgccctcgcggagacagcctggcctgctgcacctccagagctgcggcgaccttcacaccttcacaccagcggggaggccccgagccgagaggaggccccggcgagtggaggctgagcggccacacagcctcattggggtcatccgagagactgtcctgtgaaccctggaagacagaaggccactccaaggggaaggatccctctcctctctgccatttcttggctgggagctgtggtccacctcaaaaaaaaaggagcactctggaggacacgttttcccacctgttggctcccgtgtctgctgactgagggcattcaggagtaaatgcacaggtcggtccaggcccgtctgggtttgggatgcactgagttggaggttatgaaagctttgatcctcttcttcctctgctgggcctcgcagcattcccaagggtcacatgccctggcatgggcagaaactgggctaatgattctttgcccacttcacccctcgtgtctctctttgttgctaagttctttccctcttggaaggacagatctgccgggctgctatttatagttgcctttggcctttcactgctctgcgatttggcaggaaataaggcgattaaccctatgtgtccacaagcctcaagccttgtttcaggtcaccctcaaatcacactctctttaggcaaaacaggaaacttcttaagtgacaaattttaatgccagacatttaaggagaggattattgttgattccatttactcatgcttgcaaaactagagacccctaaggcagaactgagaataaacatgtttactttgggccactgggcttgatgtgta

SEQ ID NO: 322087 - DNA, 392 bp, Homo sapiens
aagtcattgtcatcaaaagaatttggttgtacatgatactatgctaggtactacatgaagacaattatgcacacctagttctgatttctagatgctgcaatcctataggaatatgcattgtcttaaaaaaagtcaaaaggatttttgtatactccctcttttataatttgttatatttttactatgtatgagtagatgattgaattattgaaatctgaccttgtttttagaactttggatagaatgaagtacacgcacccacacaattcacctctctctctgtgttgtttgtgtatagatgttacctgaataattaaaaattaaaataataacactgacttttttctgaatatatgaatacctgaacatctctaaatatctcttcattgtag

SEQ ID NO: 322088 - DNA, 313 bp, Homo sapiens
tgtgtgccttgaatgccctgaccaccaccgtctgcttggtggccgctgccctccgctacctccagatattcgcaaccaggagatcctgcatcgtaagtctatgcaagggcatcatggccacgtttccgctgagccagcccatggaccccttcgtgtcatccactgcctctctccccgtgcctttgtaatgaaggctgttgactaactgagctgctgtttaatcaggatgaatcccagatttctgctgaagaagcggaggatcatggacgcatccccgaccctgatgattttgtgccgcctgtgcctccccctt

SEQ ID NO: 322089 - DNA, 1461 bp, Homo sapiens
ttatggtttgcattctggattctcctctccaccatctggctttaccttgggggtggtgtcgtacatgacacaatgacgtgtttcgggccatatcctattggaactggacttcagggaataaccttgtgttatagttgttttccctccttctgcaagatgaaaagcaggatgtgcatggctatcagcatttgtcagatgctttccatgttgagttttgtggtctgtgctttcaggtacaggcatatgttcaaaaggggttggccaatgggtacatgttgtttgtttctgcccacagctgccccagtgctcagctgtgaagctgcaacacagactgaaaggagactggatctggctgcagtgactctgaggagaggcttgagatctagagcttcgcgatgcagaccgcggtctttgatagattacaaatcctacatggacaccaagctgctggtggcgaggttcctggagcagtcctcttgtaccatgaccccagacatccatgaacttgtagaaaacattaaatctgttttgaaatctgatgaggagcacatggaggaagccatcacaagtgccagttttctagaacagataatggccccattgcagcccagcacatccagggcccacaagctgccctcgcggagacagcctggcctgctgcacctccagagctgcggcgaccttcacaccttcacaccagcggggaggccccgagccgagaggaggccccggcgagtggaggctgagcggccacacagcctcattggggtcatccgagagactgtcctgtgaaccctggaagacagaaggccactccaaggggaaggatccctctcctctctgccatttcttggctgggagctgtggtccacctcaaaaaaaaaggagcactctggaggacacgttttcccacctgttggctcccgtgtctgctgactgagggcattcaggagtaaatgcacaggtcggtccaggcccgtctgggtttgggatgcactgagttggaggttatgaaagctttgatcctcttcttcctctgctgggcctcgcagcattcccaagggtcacatgccctggcatgggcagaaactgggctaatgattctttgcccacttcacccctcgtgtctctctttgttgctaagttctttccctcttggaaggacagatctgccgggctgctatttatagttgcctttggcctttcactgctctgcgatttggcaggaaataaggcgattaaccctatgtgtccacaagcctcaagccttgtttcaggtcaccctcaaatcacactctctttaggcaaaacaggaaacttcttaagtgacaaattttaatgccagacatttaaggagaggattattgttgattccatttactcatgcttgcaaaactagagacccctaaggcagaactgagaataaacatgtttactttgggccactgggcttgatgtgta

SEQ ID NO: 322090 - DNA, 2503 bp, Homo sapiens
cccgccgcagccggccgcagccggccgcacccttccccgtccgtccatgtccctgcccgtggtgctcccgggctcctgctgccccgtggctgggctttcgggtgggccgcaggccgggggcccgggcgccgctgccgccgccgctcaggagccgccgctgcccccgctgcggccgcgctggccccggggcgcgctgcagcccccgtcgcggcctcgctgcgcggccaccgctgctgccggggtgctggccgcgccgccggcgctctcctcccgccgggcagtcgccgccgctgccgccgcggccccgggctccgcgctgctgcccgcccgcccgctgctgtcacttgggctgcttcagctgatcttgggctgctgcatggtggcgctcagcttcggggcgctgtcgctgagcagctccccgcaggtgaagaactcgtgcccgttctgggccggctcctcggtgatactctctggaatcataggattaacaacttggaaaaggcctatgatactcctggtaaacctctttgtgctgctctctgtggtttgtgtcctcttaaatctagctggatttatcctaggctgccaaggggcccagtttgtgtccagcgtgcccaggtgtgatctggtggacttaggtgaaggcaagatttgcttctgttgtgaagaatttcaaccagccaagtgcacagacaaagaaaatgccttgaaactctttccggttcagccctgtagtgctgttcaccttctacttaagaaagtcctctttgccctgtgtgccttgaatgccctgaccaccaccgtctgcttggtggccgctgccctccgctacctccagatattcgcaaccaggagatcctgcatcgatgaatcccagatttctgctgaagaagcggaggatcatggacgcatccccgaccctgatgattttgtgccgcctgtgcctcccccttcctattttgccacgttttactcgtgcacaccccggatgaaccgcaggatggttggtcctgatgttattcccctgccacacatctacggagctcgaatcaaaggtgtggaagtgttctgtcctctggatcccccgccgccatatgaagctgtgggatcttcattccaaatgtcagaaggatcagaagctgctgtgatcccattggatctgggctgcacacaagtgactcaagatggggacattcctaacatacctgccgaagaaaatgcatccacctcaactcccagttcaaccctggtgcgtcctatcagaagccggagagccctcccacccttgaggaccaggtcgaagagtgaccctgtgctccatccttctgaggagagagctgccccagtgctcagctgtgaagctgcaacacagactgaaaggagactggatctggctgcagtgactctgaggagaggcttgagatctagagcttcgcgatgcagaccgcggtctttgatagattacaaatcctacatggacaccaagctgctggtggcgaggttcctggagcagtcctcttgtaccatgaccccagacatccatgaacttgtagaaaacattaaatctgttttgaaatctgatgaggagcacatggaggaagccatcacaagtgccagttttctagaacagataatggccccattgcagcccagcacatccagggcccacaagctgccctcgcggagacagcctggcctgctgcacctccagagctgcggcgaccttcacaccttcacaccagcggggaggccccgagccgagaggaggccccggcgagtggaggctgagcggccacacagcctcattggggtcatccgagagactgtcctgtgaaccctggaagacagaaggccactccaaggggaaggatccctctcctctctgccatttcttggctgggagctgtggtccacctcaaaaaaaaaggagcactctggaggacacgttttcccacctgttggctcccgtgtctgctgactgagggcattcaggagtaaatgcacaggtcggtccaggcccgtctgggtttgggatgcactgagttggaggttatgaaagctttgatcctcttcttcctctgctgggcctcgcagcattcccaagggtcacatgccctggcatgggcagaaactgggctaatgattctttgcccacttcacccctcgtgtctctctttgttgctaagttctttccctcttggaaggacagatctgccgggctgctatttatagttgcctttggcctttcactgctctgcgatttggcaggaaataaggcgattaaccctatgtgtccacaagcctcaagccttgtttcaggtcaccctcaaatcacactctctttaggcaaaacaggaaacttcttaagtgacaaattttaatgccagacatttaaggagaggattattgttgattccatttactcatgcttgcaaaactagagacccctaaggcagaactgagaataaacatgtttactttgggccactgggcttgatgtgta

SEQ ID NO: 322091 - DNA, 1859 bp, Homo sapiens
tcgtaaccatcatctttatctagttccaaagcattttcagtacttcagagagaccccatacccatcaaacaccactaatctgctctgtgtctctatggattgtttgctttttgactgatgggtttaaaagcaatgatggggttgcattttatacactgtcatttgcttaaggaactctggccacttcgtcggagagcagcttctattattctccctctcctggccaaggagaccatggtatggagaggtgagtggttttccccacagtttagagcaaagccagtatccgggcatcactgcagtcacgtggccagtctgtagaacgtgctttctgacgccaagtcgcttttcctaggatggttggtcctgatgttattcccctgccacacatctacggagctcgaatcaaaggtgtggaagtgttctgtcctctggatcccccgccgccatatgaagctgtgggatcttcattccaaatgtcagaaggatcagaagctgctgtgatcccattggatctgggctgcacacaagtgactcaagatggggacattcctaacatacctgccgaagaaaatgcatccacctcaactcccagttcaaccctggtgcgtcctatcagaagccggagagccctcccacccttgaggaccaggtcgaagagtgaccctgtgctccatccttctgaggagagagctgccccagtgctcagctgtgaagctgcaacacagactgaaaggagactggatctggctgcagtgactctgaggagaggcttgagatctagagcttcgcgatgcagaccgcggtctttgatagattacaaatcctacatggacaccaagctgctggtggcgaggttcctggagcagtcctcttgtaccatgaccccagacatccatgaacttgtagaaaacattaaatctgttttgaaatctgatgaggagcacatggaggaagccatcacaagtgccagttttctagaacagataatggccccattgcagcccagcacatccagggcccacaagctgccctcgcggagacagcctggcctgctgcacctccagagctgcggcgaccttcacaccttcacaccagcggggaggccccgagccgagaggaggccccggcgagtggaggctgagcggccacacagcctcattggggtcatccgagagactgtcctgtgaaccctggaagacagaaggccactccaaggggaaggatccctctcctctctgccatttcttggctgggagctgtggtccacctcaaaaaaaaaggagcactctggaggacacgttttcccacctgttggctcccgtgtctgctgactgagggcattcaggagtaaatgcacaggtcggtccaggcccgtctgggtttgggatgcactgagttggaggttatgaaagctttgatcctcttcttcctctgctgggcctcgcagcattcccaagggtcacatgccctggcatgggcagaaactgggctaatgattctttgcccacttcacccctcgtgtctctctttgttgctaagttctttccctcttggaaggacagatctgccgggctgctatttatagttgcctttggcctttcactgctctgcgatttggcaggaaataaggcgattaaccctatgtgtccacaagcctcaagccttgtttcaggtcaccctcaaatcacactctctttaggcaaaacaggaaacttcttaagtgacaaattttaatgccagacatttaaggagaggattattgttgattccatttactcatgcttgcaaaactagagacccctaaggcagaactgagaataaacatgtttactttgggccactgggcttgatgtgta

SEQ ID NO: 322092 - DNA, 2022 bp, Homo sapiens
cccgccgcagccggccgcagccggccgcacccttccccgtccgtccatgtccctgcccgtggtgctcccgggctcctgctgccccgtggctgggctttcgggtgggccgcaggccgggggcccgggcgccgctgccgccgccgctcaggagccgccgctgcccccgctgcggccgcgctggccccggggcgcgctgcagcccccgtcgcggcctcgctgcgcggccaccgctgctgccggggtgctggccgcgccgccggcgctctcctcccgccgggcagtcgccgccgctgccgccgcggccccgggctccgcgctgctgcccgcccgcccgctgctgtcacttgggctgcttcagctgatcttgggctgctgcatggtggcgctcagcttcggggcgctgtcgctgagcagctccccgcaggtgaagaactcgtgcccgttctgggccggctcctcggtgatactctctggaatcataggattaacaacttggaaaaggcctatgatactcctggtaaacctctttgtgctgctctctgtggtttgtgtcctcttaaatctagctggatttatcctaggctgccaaggggcccagtttgtgtccagcgtgcccaggtgtgatctggtggacttaggtgaaggcaagatttgcttctgttgtgaagaatttcaaccagccaagtgcacagacaaagaaaatgccttgaaactctttccggttcagccctgtagtgctgttcaccttctacttaagaaagtcctctttgccctgtgtgccttgaatgccctgaccaccaccgtctgcttggtggccgctgccctccgctacctccagatattcgcaaccaggagatcctgcatcgatgaatcccagatttctgctgaagaagcggaggatcatggacgcatccccgaccctgatgattttgtgccgcctgtgcctcccccttcctattttgccacgttttactcgtgcacaccccggatgaaccgcaggatggttggtcctgatgttattcccctgccacacatctacggagctcgaatcaaaggtgtggaagtgttctgtcctctggatcccccgccgccatatgaagctgtggtgagccagatggaccaggagcagggatcttcattccaaatgtcagaaggatcagaagctgctgtgatcccattggatctgggctgcacacaagtgactcaagatggggacattcctaacatacctgccgaagaaaatgcatccacctcaactcccagttcaaccctggtgcgtcctatcagaagccggagagccctcccacccttgaggaccaggtcgaagagtgaccctgtgctccatccttctgaggagagagaaaattataaaaaataaagaaactaaaggaagaaaattaaaatctcctgtaactccaccagcaccagcttcttcttgtgaagtagtctagcagagttgacctctgctgttctaaaacacctatgcaaataaaactttgataatcctccaccctgctctctctaaggtcctgtcttgagcccttgcagtctcggttctggctctctgacagtgtgtgttatttgccacagctctggactgaccatgtgcgagccagagagaacattcctcttgtctctacagcagcttctaagtggagaggaagtcctgccgcctggtactgagcgtgtctctgaaacacagtggccaggcagcctggcttctgattcccaagacctgccttcactgtgggtctcctacaccctacctggcaagttgaggactccagcctcaacgggaacttagctgtttgcacagcttagggaaatctttccagaaccccttctcattctgcagacctgcgggggcaagaacagcagctgctggagccctccattgtggaaggcgccaggttgccttcaagtggaagagtggagaccctgactctgtcctcacacgagtgtctttggcgagtgcttctggaagactcttgctgtctgtgacgtgcatatggctgcctgaga

SEQ ID NO: 322093 - DNA, 5240 bp, Homo sapiens
  misc_feature (896)..(896): n is a, c, g, or t
ggtagaccaacttaacactgaacccattacttttccaagaccagaaaaaaatattacatgaacaggaactacttctccttcagataagaattcaagctttgacattgtaaaccacagacgaattggagcttggcattgaaaggaggtgttctgcaatgattttttttcttgtttagagaagtttacttctacaagaagaaatctgaaaaatgacaggagcaaagaggaaaaagaaaagcatgctttggagcaagatgcataccccccagtgtgaagacattatacagtggtgtagaaggcgactgcccattttggattgggcaccacattacaatctgaaagaaaacttgcttccagacactgtgtctgggataatgttggcagttcaacaggtgacccaaggattggcctttgctgttctctcatctgtgcacccagtgtttggtttatatgggtctctgtttcctgccataatttatgccatatttggaatgggacatcatgttgccacaggcacctttgccttgacatccttaatatcagccaacgccgtggaacggattgtccctcagaacatgcagaatctcaccacacagagtaacacaagcgtgctgggcttatccgactttgaaatgcaaaggatccacgttgctgcagcagtttccttcttgggaggtgtgattcaggtggccatgtttgtgctgcaactgggcagtgccacatttgtggtcacagagcctgtgatcagcgcaatgacaactggggctgccacccatgtggtgacttcacaagtcaaatatctcttgggaatgaaaatgccatatatatccggaccacttggattcttttatatttatgcatatgtttttgaaaacatcaagtctgtgcgactggangcattgcttttatccttgctgagcattgtggtccttgttcttgttaaagagctgaatgaacagtttaaaaggaaaattaaagttgttcttcctgtagatttagttttgattattgctgcatcatttgcttgttattgcaccaatatggaaaacacatatggattagaagtagttggtcatattccacaaggaattccctcacctagagctcccccgatgaacatcctctctgcggtgatcactgaagctttcggagtggcacttgtaggctatgtggcctcactggctcttgctcaaggatctgccaaaaaattcaaatattcaattgatgacaaccaggaatttttggcccatggcctcagcaatatagtttcttcatttttcttctgcataccaagtgctgctgccatgggaaggacggctggcctgtacagcacaggagcgaagacacaggtggcttgtctaatatcttgcattttcgtccttatagtcatctatgcaataggacctttgctttactggctgcccatgtgtgtccttgcaagcattattgttgtgggactgaagggaatgctaatacagttccgagatttaaaaaaatattggaatgtggataaaatcgattggggaatatgggtcagtacatatgtatttacaatatgctttgctgccaatgtgggactgctgtttggtgttgtttgtaccatagctatagtgataggacgcttcccaagagcaatgactgtaagtataaaaaatatgaaagaaatggaatttaaagtgaagacagaaatggacagtgaaaccctgcagcaggtgaaaattatctcaataaacaacccgcttgttttcctgaatgcaaaaaaattttatactgatttaatgaacatgatccaaaaggaaaatgcctgtaatcagccacttgatgatatcagcaagtgtgaacaaaacacattgcttaattccctatccaatggcaactgcaatgaagaagcttcacagtcctgccctaatgagaagtgttatttaatcctggattgcagtggatttaccttttttgactattctggagtctccatgcttgttgaggtttacatggactgtaaaggcaggagtgtggatgtattgttagcccattgtacagcttccttgataaaagcaatgacgtattatggaaacctagactcagagaaaccaattttttttgaatcggtatctgctgcaataagtcatatccattcaaataagaatttgagcaaactcagtgaccacagtgaagtctgagacccttttgtcacagtacagctcttgtctttaccaactgcctgaagaggccatatgctggcattttgcacaactttttggttgtttagatcctacagatgacctctgctacaataagtacgatgtgacttagtaactgcatagcagttggaaagaactgccaacttttttttctcatttttgttagtaagaagattcgcttagttattttatgtaaaaatcagtatgtgtttagttttagtgtactgaagggtaaacatggttttattttattttaccatattattttgtgttgttttatttctattgtgctgtaagttgatgtttaaaattgagaaatacttttgtcataggtaatttggaacatttacaagccatttgtaaaattttaagataatctgtaactaatacataaaaacaacttagcaaatgtgccattttcacacaacttctctctgtataggcctctgaaatatcaataaggctaaatattactttacacagtaagatgtgaaattcacaaaaagtaaaccaaacaaaacgaatgaaaaactggaaataattcgtttccatatctttccatacatccatttctgaagtattcaggaatgttttcataatcgaaagaaacgggtatccaaataaaaccaagttcttgacattggtctgttttgctgtgaatattggaaatgcttaggatcttcagacccaatagctctaattttaacatttctacccaataagaggctctgttttccactgaagctttgttggagaaagagaatatgaaaattacacattttataatttttagatgagaaaataccactagcagaatagctttgtgctattccagtataagatgaactgtaataatttttgacttccctatttcagagatagtcaatataatatgtttatctatatccatatggatggataggtaggtagatcttcatagatttttttttcttttgttagaggagagcttgatgtgattatcttcaaacccaccaaaccaacaggataattgacaaataaacgccataggctaggctgaactgtatgttactgttttcatgcttatacatatattttcaatcacatacaagtacatagaatttcacattttaatttagcaaattgatttacctaggaaaaaattatcaccttcaaagataggcatagacacataattatgcttaagcttttaacagcattttaaccgctctaaaaattaccagagtaagaaaaagctaggtactttaaagtgagtttgagaaacaagttgaaactaaaattaaaataccagccatttaggtgctttctctggcatctataaaagtaaattctagtgcctgccaagtgatggattataatggtctctagcaaatgtgtggtaaacattcatatggccattaattttaacattaaatcgtaggtagggcaatgtagtaaaatgaaagagaattaagaaaggttttgaattcttataacatatccagccatttcaattttgattgaaatgaactacaaagaatagtgtttgtccctatggtagcctcagtctctttatcactaacttggattgaaatgagtgaggccaactcacattcccatcaaacactcttccaaggaaaagcagaagtaataattggaggtaaagtttccttagagaaaataattttattctgctttgtccaattaaattattccaatggcggatggtaatattcaccatctctaattcattggtcactggtaggtaagcatgagttaaggaaagtcaaaaatgaaaatatattttgctgtgtataaattgatattttgctatgcaactcctgtaattgaatttgtataatgcaggcactttctaatttattagagattatggatcagttctgacattaaaatcatagttaattgatggatggtttttatagtttgttgataaagtggacacagtattgtctgagcagttatattttaatgcatttcagtgtttatagtagaagtttagtggataaaactttaagtccaataacttgggggtcaaatgctaatgttttattcaatgtaaaggaagaccaaaccatgtaccttatgaagacctttgttttaagacttccacacaccaaggctacaatgactgttaacctggaggaagtctctggtatggagttctgagagcttaagagctaaacatgagtttagacacacaagattctaaaatgcaaatgtttattttgaagcaggcattgacaacacaaaaactgtgtagtggtcttgatgctggattgtttctagagtcacaatgaattatttttatgagattaccttatttttatatatgacaaactacttctataatgcttattatggtaaaataaaattggaaaaaattaaaactgacctataagagtgttaaggacctaatagagtgacatatataaattaagcataaaatatgtaaccaggaaaagactgttaacattacatttatgcaaattaaatgcccttaaatttcaccatttgtctttcattttaaaggttatttgctcccgattatatgattcaagtgttataagttttagcttgaactactttgcagtaatttatttgacagatctctattctataaatgtgtaatgtgatgaagaaagagatctttcttttttaatgaaaacattaatgtgttaataccctgtatggataatgcttgacatttagtggtttccaaaatatattagtatattgttgaacatacattatgccttagaaatgcacattctgtattttgtgggatgataatctaattcagtatagaatatgctgtttggcaatgagtttgtggccagatttcaaatagggagttaagtggtactttcacaatccaaagatttttagttaaaaatcatgtagtctaatatgctgcagttatttttttatatttttcaatgcatttaattatcttttttataattctttgtactaactcagcatgtaacaaccaatttacatggaaataaatcgaaatatgataactattatgcttaaaaa

SEQ ID NO: 322094 - DNA, 2644 bp, Homo sapiens
ttctgtttcttgtttctctttcagggaatatgggtcagtacatatgtatttacaatatgctttgctgccaatgtgggactgctgtttggtgttgtttgtaccatagctatagtgataggacgcttcccaagagcaatgactgtaagtataaaaaatatgaaagaaatggaatttaaagtgaagacagaaatggacagtgaaaccctgcagcaggtgaaaattatctcaataaacaacccgcttgttttcctgaatgcaaaaaaattttatactgatttaatgaacatgatccaaaaggaaaatgcctgtaatcagccacttgatgatatcagcaagtgtgaacaaaacacattgcttaattccctatccaatggcaactgcaatgaagaagcttcacagtcctgccctaatgagaagtgttatttaatcctggattgcagtggatttaccttttttgactattctggagtctccatgcttgttgaggtttacatggactgtaaaggcaggagtgtggatgtattgttagcccattgtacagcttccttgataaaagcaatgacgtattatggaaacctagactcagagaaaccaattttttttgaatcggtatctgctgcaataagtcatatccattcaaataagaatttgagcaaactcagtgaccacagtgaagtctgagacccttttgtcacagtacagctcttgtctttaccaactgcctgaagaggccatatgctggcattttgcacaactttttggttgtttagatcctacagatgacctctgctacaataagtacgatgtgacttagtaactgcatagcagttggaaagaactgccaacttttttttctcatttttgttagtaagaagattcgcttagttattttatgtaaaaatcagtatgtgtttagttttagtgtactgaagggtaaacatggttttattttattttaccatattattttgtgttgttttatttctattgtgctgtaagttgatgtttaaaattgagaaatacttttgtcataggtaatttggaacatttacaagccatttgtaaaattttaagataatctgtaactaatacataaaaacaacttagcaaatgtgccattttcacacaacttctctctgtataggcctctgaaatatcaataaggctaaatattactttacacagtaagatgtgaaattcacaaaaagtaaaccaaacaaaacgaatgaaaaactggaaataattcgtttccatatctttccatacatccatttctgaagtattcaggaatgttttcataatcgaaagaaacgggtatccaaataaaaccaagttcttgacattggtctgttttgctgtgaatattggaaatgcttaggatcttcagacccaatagctctaattttaacatttctacccaataagaggctctgttttccactgaagctttgttggagaaagagaatatgaaaattacacattttataatttttagatgagaaaataccactagcagaatagctttgtgctattccagtataagatgaactgtaataatttttgacttccctatttcagagatagtcaatataatatgtttatctatatccatatggatggataggtaggtagatcttcatagatttttttttcttttgttagaggagagcttgatgtgattatcttcaaacccaccaaaccaacaggataattgacaaataaacgccataggctaggctgaactgtatgttactgttttcatgcttatacatatattttcaatcacatacaagtacatagaatttcacattttaatttagcaaattgatttacctaggaaaaaattatcaccttcaaagataggcatagacacataattatgcttaagcttttaacagcattttaaccgctctaaaaattaccagagtaagaaaaagctaggtactttaaagtgagtttgagaaacaagttgaaactaaaattaaaataccagccatttaggtgctttctctggcatctataaaagtaaattctagtgcctgccaagtgatggattataatggtctctagcaaatgtgtggtaaacattcatatggccattaattttaacattaaatcgtaggtagggcaatgtagtaaaatgaaagagaattaagaaaggttttgaattcttataacatatccagccatttcaattttgattgaaatgaactacaaagaatagtgtttgtccctatggtagcctcagtctctttatcactaacttggattgaaatgagtgaggccaactcacattcccatcaaacactcttccaaggaaaagcagaagtaataattggaggtaaagtttccttagagaaaataattttattctgctttgtccaattaaattattccaatggcggatggtaatattcaccatctctaattcattggtcactggtaggtaagcatgagttaaggaaagtcaaaaatgaaaatatattttgctgtgtataaattgatattttgctatgcaactcctgtaattgaatttgtataatgcaggcacttttattacgccacagggttgtcacagctcagagagctattaaaatatagttcaagttgactggatggtattgcatagcttgttgacttgggt

SEQ ID NO: 322095 - DNA, 2137 bp, Homo sapiens
  misc_feature (896)..(896): n is a, c, g, or t
ggtagaccaacttaacactgaacccattacttttccaagaccagaaaaaaatattacatgaacaggaactacttctccttcagataagaattcaagctttgacattgtaaaccacagacgaattggagcttggcattgaaaggaggtgttctgcaatgattttttttcttgtttagagaagtttacttctacaagaagaaatctgaaaaatgacaggagcaaagaggaaaaagaaaagcatgctttggagcaagatgcataccccccagtgtgaagacattatacagtggtgtagaaggcgactgcccattttggattgggcaccacattacaatctgaaagaaaacttgcttccagacactgtgtctgggataatgttggcagttcaacaggtgacccaaggattggcctttgctgttctctcatctgtgcacccagtgtttggtttatatgggtctctgtttcctgccataatttatgccatatttggaatgggacatcatgttgccacaggcacctttgccttgacatccttaatatcagccaacgccgtggaacggattgtccctcagaacatgcagaatctcaccacacagagtaacacaagcgtgctgggcttatccgactttgaaatgcaaaggatccacgttgctgcagcagtttccttcttgggaggtgtgattcaggtggccatgtttgtgctgcaactgggcagtgccacatttgtggtcacagagcctgtgatcagcgcaatgacaactggggctgccacccatgtggtgacttcacaagtcaaatatctcttgggaatgaaaatgccatatatatccggaccacttggattcttttatatttatgcatatgtttttgaaaacatcaagtctgtgcgactggangcattgcttttatccttgctgagcattgtggtccttgttcttgttaaagagctgaatgaacagtttaaaaggaaaattaaagttgttcttcctgtagatttagttttgattattgctgcatcatttgcttgttattgcaccaatatggaaaacacatatggattagaagtagttggtcatattccacaaggaattccctcacctagagctcccccgatgaacatcctctctgcggtgatcactgaagctttcggagtggcacttgtaggctatgtggcctcactggctcttgctcaaggatctgccaaaaaattcaaatattcaattgatgacaaccaggaatttttggcccatggcctcagcaatatagtttcttcatttttcttctgcataccaagtgctgctgccatgggaaggacggctggcctgtacagcacaggagcgaagacacaggtggcttgtctaatatcttgcattttcgtccttatagtcatctatgcaataggacctttgctttactggctgcccatgtgtgtccttgcaagcattattgttgtgggactgaagggaatgctaatacagttccgagatttaaaaaaatattggaatgtggataaaatcgattggggaatatgggtcagtacatatgtatttacaatatgctttgctgccaatgtgggactgctgtttggtgttgtttgtaccatagctatagtgataggacgcttcccaagagcaatgactgtaagtataaaaaatatgaaagaaatggaatttaaagtgaagacagaaatggacagtgaaaccctgcagcaggtgaaaattatctcaataaacaacccgcttgttttcctgaatgcaaaaaaattttatactgatttaatgaacatgatccaaaaggaaaatgcctgtaatcagccacttgatgatatcagcaagtgtgaacaaaacacattgcttaattccctatccaatggcaactgcaatgaagaagcttcacagtcctgccctaatgagaagtgttatttaatcctggattgcagtggatttaccttttttgactattctggagtctccatgcttgttgaggtttacatggactgtaaaggcaggagtgtggatgtattgttagcccattgtacagcttccttgataaaagcaatgacgcatgtggatcctagacagcgccttatctatgattgagtgtccgtgtaaataaattcctacttagacttaaagaa

SEQ ID NO: 322096 - DNA, 3741 bp, Homo sapiens
ttctgtttcttgtttctctttcagggaatatgggtcagtacatatgtatttacaatatgctttgctgccaatgtgggactgctgtttggtgttgtttgtaccatagctatagtgataggacgcttcccaagagcaatgactgtaagtataaaaaatatgaaagaaatggaatttaaagtgaagacagaaatggacagtgaaaccctgcagcaggtgaaaattatctcaataaacaacccgcttgttttcctgaatgcaaaaaaattttatactgatttaatgaacatgatccaaaaggaaaatgcctgtaatcagccacttgatgatatcagcaagtgtgaacaaaacacattgcttaattccctatccaatggcaactgcaatgaagaagcttcacagtcctgccctaatgagaagtgttatttaatcctggattgcagtggatttaccttttttgactattctggagtctccatgcttgttgaggtttacatggactgtaaaggcaggagtgtggatgtattgttagcccattgtacagcttccttgataaaagcaatgacgtattatggaaacctagactcagagaaaccaattttttttgaatcggtatctgctgcaataagtcatatccattcaaataagaatttgagcaaactcagtgaccacagtgaagtctgagacccttttgtcacagtacagctcttgtctttaccaactgcctgaagaggccatatgctggcattttgcacaactttttggttgtttagatcctacagatgacctctgctacaataagtacgatgtgacttagtaactgcatagcagttggaaagaactgccaacttttttttctcatttttgttagtaagaagattcgcttagttattttatgtaaaaatcagtatgtgtttagttttagtgtactgaagggtaaacatggttttattttattttaccatattattttgtgttgttttatttctattgtgctgtaagttgatgtttaaaattgagaaatacttttgtcataggtaatttggaacatttacaagccatttgtaaaattttaagataatctgtaactaatacataaaaacaacttagcaaatgtgccattttcacacaacttctctctgtataggcctctgaaatatcaataaggctaaatattactttacacagtaagatgtgaaattcacaaaaagtaaaccaaacaaaacgaatgaaaaactggaaataattcgtttccatatctttccatacatccatttctgaagtattcaggaatgttttcataatcgaaagaaacgggtatccaaataaaaccaagttcttgacattggtctgttttgctgtgaatattggaaatgcttaggatcttcagacccaatagctctaattttaacatttctacccaataagaggctctgttttccactgaagctttgttggagaaagagaatatgaaaattacacattttataatttttagatgagaaaataccactagcagaatagctttgtgctattccagtataagatgaactgtaataatttttgacttccctatttcagagatagtcaatataatatgtttatctatatccatatggatggataggtaggtagatcttcatagatttttttttcttttgttagaggagagcttgatgtgattatcttcaaacccaccaaaccaacaggataattgacaaataaacgccataggctaggctgaactgtatgttactgttttcatgcttatacatatattttcaatcacatacaagtacatagaatttcacattttaatttagcaaattgatttacctaggaaaaaattatcaccttcaaagataggcatagacacataattatgcttaagcttttaacagcattttaaccgctctaaaaattaccagagtaagaaaaagctaggtactttaaagtgagtttgagaaacaagttgaaactaaaattaaaataccagccatttaggtgctttctctggcatctataaaagtaaattctagtgcctgccaagtgatggattataatggtctctagcaaatgtgtggtaaacattcatatggccattaattttaacattaaatcgtaggtagggcaatgtagtaaaatgaaagagaattaagaaaggttttgaattcttataacatatccagccatttcaattttgattgaaatgaactacaaagaatagtgtttgtccctatggtagcctcagtctctttatcactaacttggattgaaatgagtgaggccaactcacattcccatcaaacactcttccaaggaaaagcagaagtaataattggaggtaaagtttccttagagaaaataattttattctgctttgtccaattaaattattccaatggcggatggtaatattcaccatctctaattcattggtcactggtaggtaagcatgagttaaggaaagtcaaaaatgaaaatatattttgctgtgtataaattgatattttgctatgcaactcctgtaattgaatttgtataatgcaggcactttctaatttattagagattatggatcagttctgacattaaaatcatagttaattgatggatggtttttatagtttgttgataaagtggacacagtattgtctgagcagttatattttaatgcatttcagtgtttatagtagaagtttagtggataaaactttaagtccaataacttgggggtcaaatgctaatgttttattcaatgtaaaggaagaccaaaccatgtaccttatgaagacctttgttttaagacttccacacaccaaggctacaatgactgttaacctggaggaagtctctggtatggagttctgagagcttaagagctaaacatgagtttagacacacaagattctaaaatgcaaatgtttattttgaagcaggcattgacaacacaaaaactgtgtagtggtcttgatgctggattgtttctagagtcacaatgaattatttttatgagattaccttatttttatatatgacaaactacttctataatgcttattatggtaaaataaaattggaaaaaattaaaactgacctataagagtgttaaggacctaatagagtgacatatataaattaagcataaaatatgtaaccaggaaaagactgttaacattacatttatgcaaattaaatgcccttaaatttcaccatttgtctttcattttaaaggttatttgctcccgattatatgattcaagtgttataagttttagcttgaactactttgcagtaatttatttgacagatctctattctataaatgtgtaatgtgatgaagaaagagatctttcttttttaatgaaaacattaatgtgttaataccctgtatggataatgcttgacatttagtggtttccaaaatatattagtatattgttgaacatacattatgccttagaaatgcacattctgtattttgtgggatgataatctaattcagtatagaatatgctgtttggcaatgagtttgtggccagatttcaaatagggagttaagtggtactttcacaatccaaagatttttagttaaaaatcatgtagtctaatatgctgcagttatttttttatatttttcaatgcatttaattatcttttttataattctttgtactaactcagcatgtaacaaccaatttacatggaaataaatcgaaatatgataactattatgcttaaaaa

SEQ ID NO: 322097 - DNA, 1148 bp, Homo sapiens
ttctgtttcttgtttctctttcagggaatatgggtcagtacatatgtatttacaatatgctttgctgccaatgtgggactgctgtttggtgttgtttgtaccatagctatagtgataggacgcttcccaagagcaatgactgtaagtataaaaaatatgaaagaaatggaatttaaagtgaagacagaaatggacagtgaaaccctgcagcaggtgaaaattatctcaataaacaacccgcttgttttcctgaatgcaaaaaaattttatactgatttaatgaacatgatccaaaaggaaaatgcctgtaatcagccacttgatgatatcagcaagtgtgaacaaaacacattgcttaattccctatccaatggcaactgcaatgaagaagcttcacagtcctgccctaatgagaagtgttatttaatcctggattgcagtggatttaccttttttgactattctggagtctccatgcttgttgaggtttacatggactgtaaaggcaggagtgtggatgtattgttagcccattgtacagcttccttgataaaagcaatgacgtattatggaaacctagactcagagaaaccaattttttttgaatcggtatctgctgcaataagtcatatccattcaaataaggccagttataaactgttgtttgataacttggatcttccaacaatgccaccgctctgaggattgggtggttgcctatcatttgcaaactgcttacttgtacaacaaatgcttcttccaggatctactgtcctggggacttgaatccacctttctcaaatataaaaactctaaatatggccttttaagttttttctgctctgatatcttgcctctaagcttatattgccatctttggaaatactatttgtagaatctagtgctcacatgatctgaagtgtcaaagttattttacaaatgctgggcttatggtttagttttacaactgttcttagagctttaatttcctgcaatttttccttgagttttgaattgttttgcctttcctcacccctagaataacatttggtgcctcgcagagtcatccctattgtatacaatcagaacagtatgtatttacaaaataataataacactattattattaaatctaacatatattgagt

SEQ ID NO: 322098 - DNA, 224 bp, Homo sapiens
ccagtggagtaacaaaatgttgaaaagttccccaagtcgttaaaagaggatcatatataagtgtgggggaagtatagatagatagacaggtagatggatagatagataaatggacagatggataaatagatagatagatagatagatagatagatagatagatagatagatagatagatagaactggatgagtcaagcattacattttagttatatggaaagtt

SEQ ID NO: 322099 - DNA, 417 bp, Homo sapiens
caacaacaaatgcatgctgaaaaaataatgaatgcattgcagcacattgttagcagtcgttattatgaagaaaatggtttgcctctgtctttcgcaaatagaacgtacaacacgctctggcccagccacactcagtatcatcccatagcggaaaagaaggtgaaaaattctgaaaaaatatttgagtgaggaatgcaaactttacagagggtcttttggttggacgtcagtggcacatccacatgcaacacagggaagttggatgtgtacccagacatgagaaatacaaggaaacaatgccacaggggactcctcagtttggtgaggtggggcaagaattcccctgctcctaacggcgcaaaccctatattaaaagtagacaagccaagtgaaccttttcactcaaatccgatctga

SEQ ID NO: 322100 - DNA, 283 bp, Homo sapiens
tgcagatatcaagtaggcaaataaatgtttggagctcagacctagagaggaagaggatcagggatcagcagttctgaaaagatctctaacttaccagcagactgtgatcgccttgtgggaagagacttgcgtttctgaattccctgttgtgtgtttgttttgagagaaaacagagcatatttgtatgctggcagaagtgacagaagtgatagaaaattctagaaagtaaagatgcaggaattaagagtgagataattaaagggtcaacttccttgagaaggtg

SEQ ID NO: 322101 - DNA, 159 bp, Homo sapiens
tatgtagcccaaagtaaatgctcatgattaggacacaggaacactgaaaaatgacaggtagagaagtttcatgaagaagtggtgcacactgggagacacccacagtatttctttcaggggtcctcactctggtccgttactaatcacaaccaacaggac

SEQ ID NO: 322102 - DNA, 360 bp, Homo sapiens
gatgcatactagctctacatattcacaaatatatgcaaaatagtcatttttaaagtaattataaaaaatttgttgttggccgggcgcggtggctcacgcctgtaatcccagcactttgggaggccgaggcaggcggatcacctgaagtcaggagttggagaacagcctggccaacatggtgaaacccgtctttactgaaaatacaaaaaattagctgggcaaggtggtgggcacctgtagtcccagctattcaggaggctgaggcaggagaattgcttcaacccaggaggcagaggttgcagtgagctgagatcgtgccactgcactccagcctgggtgacagagcaagactccatgtcg

SEQ ID NO: 322103 - DNA, 637 bp, Homo sapiens
caagttatccagaagacctagctagtatcattgatgaaggtggctacactaaacaatagattttcaatgaagattacagtggaagaagatgtgatttaggtcttttctaactagagagaagttaacacctggtttcaaggcctcaaaagacaggctgacacctttgttaggaactaataaggctggtgactataagctgaaggcaatgctcatttatcattctgaaaatcccacagccctaaagaggtatgctaaatccactctgcctgtgctttataaatgggataacaaagcctgtgtgatagcccaactgttgacatcatggtttactgaatacttttaagtctatatggatagctactactcagaaaaagagattcctttcaatatactattcctcattaaatatacatttggtcattcaagagctctgacagatgtaaaaagagattaaatttgtcttcatgcctaacacagtatctattctgcggctcatggatcaagaagtaattttgactttaagtcttattatttaagaaatacatttcatttcataagtctatatataactaacacagacagcaattcctctaataaagcaaaggaaagggaaaactttctgaaaaggattcagtca

SEQ ID NO: 322104 - DNA, 200 bp, Homo sapiens
gcggccgcctactactactactactgctcgaattcaagcttctaacgatgtacggggacatgtaagtttaattatctgcatttatcttttttcctagtttttctaatactaatgttatttcttaaaattcagtgagatataggataaaataatgctttgagaagaatgtttaatagaaaattaaaataactttttctggc

SEQ ID NO: 322105 - DNA, 3209 bp, Homo sapiens
  misc_feature (2716)..(2716): n is a, c, g, or t
  misc_feature (2734)..(2734): n is a, c, g, or t
  misc_feature (2750)..(2750): n is a, c, g, or t
  misc_feature (2761)..(2761): n is a, c, g, or t
  misc_feature (2765)..(2765): n is a, c, g, or t
agcggacgcgcctgtgttgccgcccgcggccctggcttcgggcttcagggagctctggtgcagtctccgcctgtcagtgccggcagtcgtccgcggcgcccgccccggtcccgcactggtgcagccatgtcctcttccccgtgggagcctgcgaccctgcgccgggtgttcgtggtgggggttggcatgaccaagtttgtgaagcctggagctgagaattcaagagactaccctgacttggcagaagaagcaggcaagaaggctttagctgatgcacagatcccttattcagcagtggaccaggcatgtgttggctatgtttttggtgactctacctgtgggcagagggctatctatcacagtttgggaatgactggaattcctataatcaatgtcaacaataactgtgctactggttctactgctttgtttatggcccgccagctgattcagggtggtgtggcagaatgtgtcttggctcttgggtttgagaagatgagtaagggaagccttggaataaaattttcagatagaaccattcccactgataagcatgttgacctcctgatcaataagtatggattgtctgctcacccagttgctcctcagatgtttgggtatgctggaaaagaacatatggaaaaatatggaacaaaaattgaacactttgcaaaaattggatggaaaaatcataaacattcagttaataacccgtattcccagttccaagatgaatacagtttagatgaagtgatggcatctaaagaagtttttgattttttgactatcttacaatgttgtcccacttcagatggtgctgcagcagcaattttggccagtgaagcatttgtacagaagtatggcctgcaatccaaagctgtggaaattttggcacaagaaatgatgactgatttgccaagctcgtttgaagaaaaaagcattattaaaatggttggctttgatatgagtaaagaagctgcaagaaaatgctatgagaaatctggcctgacaccaaatgatattgacgtaatagaacttcacgattgcttttctaccaacgaactccttacttatgaagcactgggactctgtccagaaggacaaggtgcaacgctggttgatagaggagataatacatatggaggaaagtgggtcataaatcctagtggtggactgatttcaaagggacacccactaggcgctacaggtcttgctcagtgtgcagaactctgctggcagctgagaggggaagccggaaagaggcaagttcctggtgcaaaggtggctctgcagcataatttaggcattggaggagctgtggttgtaacactctacaagatgggttttccggaagccgccagttcttttagaactcatcaaattgaagctgttccaaccagctctgcaagtgatggatttaaggcaaatcttgtttttaaggagattgagaagaaacttgaagaggaaggggaacagtttgtgaagaaaatcggtggtatttttgccttcaaggtgaaagatggccctgggggtaaagaggccacctgggtggtggatgtgaagaatggcaaaggatcagtgcttcctaactcagataagaaggctgactgcacaatcacaatggctgactcagacttcctggctttaatgactggtaaaatgaatcctcagtcggccttctttcaaggcaaattgaaaatcactggcaacatgggtctcgctatgaagttacaaaatcttcagcttcagccaggcaacgctaagctctgaagaactccctttggctacttttgaaaatcaagatgagatatatagatatatatccatacattttattgtcagaatttagactgaaactacacattggcaaatagcgtgggatagatttgtttcttaatgggtgtgaccaatcctgtttttcctatgctctgggtgaatagagcctgatggtatactactgctttgcggaattgcatacaactgtgcattacaaagttaatatggtaattatggtctggggtaaaattgagtttcagaataaaattaggaacagtaaaatccaaagaactatgtaaacaaaaaagcttttgttttgcttacaaagtatatttaaggattattctgctgaagattcagtttaagagttttccttgggagaactaagtaagaaacacaatgccaacagctggccagtaattagtgttgtgcacttcatgtcattaatcaatttctcaatagttcttaaaattagtgagattaaaaatctaaaaattttgcatttcatgctatcagaaacagtattttcttcccaaatcaaaataaaagaaatatgatcagagcttgaacacaggcttatttttaaaataaaaatatttttaacatgggtttccttattgaaaaatcagtgtattagtcataaaacaccatcattaagaataattgaacaataaagtttgctttcagatgcagttttcaaattataatctcatttcaatttataacgttctcagtcctttgttataattttcctttttcatgtaagtttaattatctgcatttatcttttttcctagtttttctaatactaatgttatttcttaaaattcagtgagatataggataaaataatgctttgagaagaatgtttaatagaaaattaaaataactttttctggcaaaaaaaaaaaaaaaaaaaaaaaaaaaaaaaaaaaaaaanaaaaaaaaaaaaaaaaanaaaaaaaaaaaaaaanaaaaaaaaaanaaanaaacccctgggggggccccgagccccctaggcccttttggggggcgtattacaataaatgggcggccgttttacaacaccgggcctgcgaaaaccccgggggaaccccccaaaaatagctggttgcacaacccccttttttcggcgggggtaatattcaaaaggccccccccaatgggcgttttcaccaatagtgcacccttatgggcgattggcgaattttaggcggcaatattttgttgaaaaccgccccaaaatttttgaaaacccactccatcttttacccaaaagggcgaatatttgtgaaatccctttttatatcataaaaatcccccgcgaaaggctggagggttgtcccaatttttgacacgaagttccctctttatgaaacggggtctccttacttctaaaggcggaaaaggtttttttgggcccaggaggccct

SEQ ID NO: 322106 - DNA, 2676 bp, Homo sapiens
agcggacgcgcctgtgttgccgcccgcggccctggcttcgggcttcagggagctctggtgcagtctccgcctgtcagtgccggcagtcgtccgcggcgcccgccccggtcccgcactggtgcagccatgtcctcttccccgtgggagcctgcgaccctgcgccgggtgttcgtggtgggggttggcatgaccaagtttgtgaagcctggagctgagaattcaagagactaccctgacttggcagaagaagcaggcaagaaggctttagctgatgcacagatcccttattcagcagtggaccaggcatgtgttggctatgtttttggtgactctacctgtgggcagagggctatctatcacagtttgggaatgactggaattcctataatcaatgtcaacaataactgtgctactggttctactgctttgtttatggcccgccagctgattcagggtggtgtggcagaatgtgtcttggctcttgggtttgagaagatgagtaagggaagccttggaataaaattttcagatagaaccattcccactgataagcatgttgacctcctgatcaataagtatggattgtctgctcacccagttgctcctcagatgtttgggtatgctggaaaagaacatatggaaaaatatggaacaaaaattgaacactttgcaaaaattggatggaaaaatcataaacattcagttaataacccgtattcccagttccaagatgaatacagtttagatgaagtgatggcatctaaagaagtttttgattttttgactatcttacaatgttgtcccacttcagatggtgctgcagcagcaattttggccagtgaagcatttgtacagaagtatggcctgcaatccaaagctgtggaaattttggcacaagaaatgatgactgatttgccaagctcgtttgaagaaaaaagcattattaaaatggttggctttgatatgagtaaagaagctgcaagaaaatgctatgagaaatctggcctgacaccaaatgatattgacgtaatagaacttcacgattgcttttctaccaacgaactccttacttatgaagcactgggactctgtccagaaggacaaggtgcaacgctggttgatagaggagataatacatatggaggaaagtgggtcataaatcctagtggtggactgatttcaaagggacacccactaggcgctacaggtcttgctcagtgtgcagaactctgctggcagctgagaggggaagccggaaagaggcaagttcctggtgcaaaggtggctctgcagcataatttaggcattggaggagctgtggttgtaacactctacaagatgggttttccggaagccgccagttcttttagaactcatcaaattgaagctgttccaaccagctctgcaagtgatggatttaaggcaaatcttgtttttaaggagattgagaagaaacttgaagaggaaggggaacagtttgtgaagaaaatcggtggtatttttgccttcaaggtgaaagatggccctgggggtaaagaggccacctgggtggtggatgtgaagaatggcaaaggatcagtgcttcctaactcagataagaaggctgactgcacaatcacaatggctgactcagacttcctggctttaatgactggtaaaatgaatcctcagtcggccttctttcaaggcaaattgaaaatcactggcaacatgggtctcgctatgaagttacaaaatcttcagcttcagccaggcaacgctaagctctgaagaactccctttggctacttttgaaaatcaagatgagatatatagatatatatccatacattttattgtcagaatttagactgaaactacacattggcaaatagcgtgggatagatttgtttcttaatgggtgtgaccaatcctgtttttcctatgctctgggtgaatagagcctgatggtatactactgctttgcggaattgcatacaactgtgcattacaaagttaatatggtaattatggtctggggtaaaattgagtttcagaataaaattaggaacagtaaaatccaaagaactatgtaaacaaaaaagcttttgttttgcttacaaagtatatttaaggattattctgctgaagattcagtttaagagttttccttgggagaactaagtaagaaacacaatgccaacagctggccagtaattagtgttgtgcacttcatgtcattaatcaatttctcaatagttcttaaaattagtgagattaaaaatctaaaaattttgcatttcatgctatcagaaacagtattttcttcccaaatcaaaataaaagaaatatgatcagagcttgaacacaggcttatttttaaaataaaaatatttttaacatgggtttccttattgaaaaatcagtgtattagtcataaaacaccatcattaagaataattgaacaataaagtttgctttcagatgcagttttcaaattataatctcatttcaatttataacgttctcagtcctttgttataattttcctttttcatgtaagtttaattatctgcatttatcttttttcctagtttttctaatactaatgttatttcttaaaattcagtgagatataggataaaataatgctttgagaagaatgtttaatagaaaattaaaataactttttctggc

SEQ ID NO: 322107 - DNA, 2544 bp, Homo sapiens
agcggacgcgcctgtgttgccgcccgcggccctggcttcgggcttcagggagctctggtgcagtctccgcctgtcagtgccggcagtcgtccgcggcgcccgccccggtcccgcactggtgcagccatgtcctcttccccgtgggagcctgcgaccctgcgccgggtgttcgtggtgggggttggcatgaccaagtttgtgaagcctggagctgagaattcaagagactaccctgacttggcagaagaagcaggcaagaaggctttagctgatgcacagatcccttattcagcagtggaccaggcatgtgttggctatgtttttggtgtggcagaatgtgtcttggctcttgggtttgagaagatgagtaagggaagccttggaataaaattttcagatagaaccattcccactgataagcatgttgacctcctgatcaataagtatggattgtctgctcacccagttgctcctcagatgtttgggtatgctggaaaagaacatatggaaaaatatggaacaaaaattgaacactttgcaaaaattggatggaaaaatcataaacattcagttaataacccgtattcccagttccaagatgaatacagtttagatgaagtgatggcatctaaagaagtttttgattttttgactatcttacaatgttgtcccacttcagatggtgctgcagcagcaattttggccagtgaagcatttgtacagaagtatggcctgcaatccaaagctgtggaaattttggcacaagaaatgatgactgatttgccaagctcgtttgaagaaaaaagcattattaaaatggttggctttgatatgagtaaagaagctgcaagaaaatgctatgagaaatctggcctgacaccaaatgatattgacgtaatagaacttcacgattgcttttctaccaacgaactccttacttatgaagcactgggactctgtccagaaggacaaggtgcaacgctggttgatagaggagataatacatatggaggaaagtgggtcataaatcctagtggtggactgatttcaaagggacacccactaggcgctacaggtcttgctcagtgtgcagaactctgctggcagctgagaggggaagccggaaagaggcaagttcctggtgcaaaggtggctctgcagcataatttaggcattggaggagctgtggttgtaacactctacaagatgggttttccggaagccgccagttcttttagaactcatcaaattgaagctgttccaaccagctctgcaagtgatggatttaaggcaaatcttgtttttaaggagattgagaagaaacttgaagaggaaggggaacagtttgtgaagaaaatcggtggtatttttgccttcaaggtgaaagatggccctgggggtaaagaggccacctgggtggtggatgtgaagaatggcaaaggatcagtgcttcctaactcagataagaaggctgactgcacaatcacaatggctgactcagacttcctggctttaatgactggtaaaatgaatcctcagtcggccttctttcaaggcaaattgaaaatcactggcaacatgggtctcgctatgaagttacaaaatcttcagcttcagccaggcaacgctaagctctgaagaactccctttggctacttttgaaaatcaagatgagatatatagatatatatccatacattttattgtcagaatttagactgaaactacacattggcaaatagcgtgggatagatttgtttcttaatgggtgtgaccaatcctgtttttcctatgctctgggtgaatagagcctgatggtatactactgctttgcggaattgcatacaactgtgcattacaaagttaatatggtaattatggtctggggtaaaattgagtttcagaataaaattaggaacagtaaaatccaaagaactatgtaaacaaaaaagcttttgttttgcttacaaagtatatttaaggattattctgctgaagattcagtttaagagttttccttgggagaactaagtaagaaacacaatgccaacagctggccagtaattagtgttgtgcacttcatgtcattaatcaatttctcaatagttcttaaaattagtgagattaaaaatctaaaaattttgcatttcatgctatcagaaacagtattttcttcccaaatcaaaataaaagaaatatgatcagagcttgaacacaggcttatttttaaaataaaaatatttttaacatgggtttccttattgaaaaatcagtgtattagtcataaaacaccatcattaagaataattgaacaataaagtttgctttcagatgcagttttcaaattataatctcatttcaatttataacgttctcagtcctttgttataattttcctttttcatgtaagtttaattatctgcatttatcttttttcctagtttttctaatactaatgttatttcttaaaattcagtgagatataggataaaataatgctttgagaagaatgtttaatagaaaattaaaataactttttctggc

SEQ ID NO: 322108 - DNA, 2661 bp, Homo sapiens
agcggacgcgcctgtgttgccgcccgcggccctggcttcgggcttcagggagctctggtgcagtctccgcctgtcagtgccggcagtcgtccgcggcgcccgccccggtcccgcactggtgcagccatgtcctcttccccgtgggagcctgcgaccctgcgccgggtgttcgtggtgggggttggcatgaccaagtttgtgaagcctggagctgagaattcaagagactaccctgacttggcagaagaagcaggcaagaaggctttagctgatgcacagatcccttattcagcagtggaccaggcatgtgttggctatgtttttggtgactctacctgtgggcagagggctatctatcacagtttgggaatgactggaattcctataatcaatgtcaacaataactgtgctactggttctactgctttgtttatggcccgccagctgattcagggtggtgtggcagaatgtgtcttggctcttgggtttgagaagatgagtaagggaagccttggaataaaattttcagatagaaccattcccactgataagcatgttgacctcctgatcaataagtatggattgtctgctcacccagttgctcctcagatgtttgggtatgctggaaaagaacatatggaaaaatatggaacaaaaattgaacactttgcaaaaattggatggaaaaatcataaacattcagttaataacccgtattcccagttccaagatgaatacagtttagatgaagtgatggcatctaaagaagtttttgattttttgactatcttacaatgttgtcccacttcagatggtgctgcagcagcaattttggccagtgaagcatttgtacagaagtatggcctgcaatccaaagctgtggaaattttggcacaagaaatgatgactgatttgccaagctcgtttgaagaaaaaagcattattaaaatggttggctttgatatgagtaaagaagctgcaagaaaatgctatgagaaatctggcctgacaccaaatgatattgacgtaatagaacttcacgattgcttttctaccaacgaactccttacttatgaagcactgggactctgtccagaaggacaaggtgcaacgctggttgatagaggagataatacatatggaggaaagtgggtcataaatcctagtggtggactgatttcaaagggacacccactaggcgctacaggtcttgctcagtgtgcagaactctgctggcagctgagaggggaagccggaaagaggcaagttcctggtgcaaaggtggctctgcagcataatttaggcattggaggagctgtggttgtaacactctacaagatgggttttccggaagccgccagttcttttagaactcatcaaattgaagctgttccaaccagctctgcaagtgatggatttaaggcaaatcttgtttttaaggagattgagaagaaacttgaagaggaaggggaacagtttgtgaagaaaatcggtggtatttttgccttcaaggtgaaagatggccctgggggtaaagaggccacctgggtggtggatgtgaagaatggcaaaggatcagtgcttcctaactcagataagaaggctgactgcacaatcacaatggctgactcagacttcctggctttaatgactggtaaaatgaatcctcagtcggccttctttcaaggcaaattgaaaatcactggcaacatgggtctcgctatgaagttacaaaatcttcagcttcagccaggcaacgctaagctctgaagaactccctttggctacttttgaaaatcaagatgagatatatagatatatatccatacattttattgtcagaatttagactgaaactacacattggcaaatagcgtgggatagatttgtttcttaatgggtgtgaccaatcctgtttttcctatgctctgggtgaatagagcctgatggtatactactgctttgcggaattgcatacaactgtgcattacaaagttaatatggtaattatggtctggggtaaaattgagtttcagaataaaattaggaacagtaaaatccaaagaactatgtaaacaaaaaagcttttgttttgcttacaaagtatatttaaggattattctgctgaagattcagtttaagagttttccttgggagaactaagtaagaaacacaatgccaacagctggccagtaattagtgttgtgcacttcatgtcattaatcaatttctcaatagttcttaaaattagtgagattaaaaatctaaaaatttcagaaacagtattttcttcccaaatcaaaataaaagaaatatgatcagagcttgaacacaggcttatttttaaaataaaaatatttttaacatgggtttccttattgaaaaatcagtgtattagtcataaaacaccatcattaagaataattgaacaataaagtttgctttcagatgcagttttcaaattataatctcatttcaatttataacgttctcagtcctttgttataattttcctttttcatgtaagtttaattatctgcatttatcttttttcctagtttttctaatactaatgttatttcttaaaattcagtgagatataggataaaataatgctttgagaagaatgtttaatagaaaattaaaataactttttctggc

SEQ ID NO: 322109 - DNA, 2603 bp, Homo sapiens
agcggacgcgcctgtgttgccgcccgcggccctggcttcgggcttcagggagctctggtgcagtctccgcctgtcagtgccggcagtcgtccgcggcgcccgccccggtcccgcactggtgcagccatgtcctcttccccgtgggagcctgcgaccctgcgccgggtgttcgtggtgggggttggcatgaccaagtttgtgaagcctggagctgagaattcaagagactaccctgacttggcagaagaagcaggcaagaaggctttagctgatgcacagatcccttattcagcagtggaccaggcatgtgttggctatgtttttggtgactctacctgtgggcagagggctatctatcacagtttgggaatgactggaattcctataatcaatgtcaacaataactgtgctactggttctactgctttgtttatggcccgccagctgattcagggtggtgtggcagaatgtgtcttggctcttgggtttgagaagatgagtaagggaagccttggaataaaattttcagatagaaccattcccactgataagcatgttgacctcctgatcaataagtatggattgtctgctcacccagttgctcctcagatgtttgggtatgctggaaaagaacatatggaaaaatatggaacaaaaattgaacactttgcaaaaattggatggaaaaatcataaacattcagttaataacccgtattcccagttccaagatgaatacagtttagatgaagtgatggcatctaaagaagtttttgattttttgactatcttacaatgttgtcccacttcagatggtgctgcagcagcaattttggccagtgaagcatttgtacagaagtatggcctgcaatccaaagctgtggaaattttggcacaagaaatgatgactgatttgccaagctcgtttgaagaaaaaagcattattaaaatggttggctttgatatgagtaaagaagctgcaagaaaatgctatgagaaatctggcctgacaccaaatgatattgacgtaatagaacttcacgattgcttttctaccaacgaactccttacttatgaagcactgggactctgtccagaaggacaaggtgcaacgctggttgatagaggagataatacatatggaggaaagtgggtcataaatcctagtggtggactgatttcaaagggacacccactaggcgctacaggtcttgctcagtgtgcagaactctgctggcagctgagaggggaagccggaaagaggcaagttcctggtgcaaaggtggctctgcagcataatttaggcattggaggagctgtggttgtaacactctacaagatgggttttccggaagccgccagttcttttagaactcatcaaattgaagctgttccaaccagctctgcaagtgatggatttaaggcaaatcttgtttttaaggagattgagaagaaacttgaagagaggccacctgggtggtggatgtgaagaatggcaaaggatcagtgcttcctaactcagataagaaggctgactgcacaatcacaatggctgactcagacttcctggctttaatgactggtaaaatgaatcctcagtcggccttctttcaaggcaaattgaaaatcactggcaacatgggtctcgctatgaagttacaaaatcttcagcttcagccaggcaacgctaagctctgaagaactccctttggctacttttgaaaatcaagatgagatatatagatatatatccatacattttattgtcagaatttagactgaaactacacattggcaaatagcgtgggatagatttgtttcttaatgggtgtgaccaatcctgtttttcctatgctctgggtgaatagagcctgatggtatactactgctttgcggaattgcatacaactgtgcattacaaagttaatatggtaattatggtctggggtaaaattgagtttcagaataaaattaggaacagtaaaatccaaagaactatgtaaacaaaaaagcttttgttttgcttacaaagtatatttaaggattattctgctgaagattcagtttaagagttttccttgggagaactaagtaagaaacacaatgccaacagctggccagtaattagtgttgtgcacttcatgtcattaatcaatttctcaatagttcttaaaattagtgagattaaaaatctaaaaattttgcatttcatgctatcagaaacagtattttcttcccaaatcaaaataaaagaaatatgatcagagcttgaacacaggcttatttttaaaataaaaatatttttaacatgggtttccttattgaaaaatcagtgtattagtcataaaacaccatcattaagaataattgaacaataaagtttgctttcagatgcagttttcaaattataatctcatttcaatttataacgttctcagtcctttgttataattttcctttttcatgtaagtttaattatctgcatttatcttttttcctagtttttctaatactaatgttatttcttaaaattcagtgagatataggataaaataatgctttgagaagaatgtttaatagaaaattaaaataactttttctggc

SEQ ID NO: 322110 - DNA, 1488 bp, Homo sapiens
gcgaaatgagagccagttccctgtgtgcacgaacaggtggctactgacagtcaataagttcagtgcatcgagaggaagctgtgtattgataatcactgcgtacaaaggatgaggtgtcttcgcgagtaacgtccagccaagtatcttatatagaaccgtcagtcaaacttgagacgcttgttgccaaaacatgctctgtggaggtgactggagtttaatggcatagagtctctgattctattaagggaggattgagcaagaatacgttgatacgaggaaggggaacagtttgtgaagaaaatcggtggtatttttgccttcaaggtgaaagatggccctgggggtaaagaggccacctgggtggtggatgtgaagaatggcaaaggatcagtgcttcctaactcagataagaaggctgactgcacaatcacaatggctgactcagacttcctggctttaatgactggtaaaatgaatcctcagtcggccttctttcaaggcaaattgaaaatcactggcaacatgggtctcgctatgaagttacaaaatcttcagcttcagccaggcaacgctaagctctgaagaactccctttggctacttttgaaaatcaagatgagatatatagatatatatccatacattttattgtcagaatttagactgaaactacacattggcaaatagcgtgggatagatttgtttcttaatgggtgtgaccaatcctgtttttcctatgctctgggtgaatagagcctgatggtatactactgctttgcggaattgcatacaactgtgcattacaaagttaatatggtaattatggtctggggtaaaattgagtttcagaataaaattaggaacagtaaaatccaaagaactatgtaaacaaaaaagcttttgttttgcttacaaagtatatttaaggattattctgctgaagattcagtttaagagttttccttgggagaactaagtaagaaacacaatgccaacagctggccagtaattagtgttgtgcacttcatgtcattaatcaatttctcaatagttcttaaaattagtgagattaaaaatctaaaaattttgcatttcatgctatcagaaacagtattttcttcccaaatcaaaataaaagaaatatgatcagagcttgaacacaggcttatttttaaaataaaaatatttttaacatgggtttccttattgaaaaatcagtgtattagtcataaaacaccatcattaagaataattgaacaataaagtttgctttcagatgcagttttcaaattataatctcatttcaatttataacgttctcagtcctttgttataattttcctttttcatgtaagtttaattatctgcatttatcttttttcctagtttttctaatactaatgttatttcttaaaattcagtgagatataggataaaataatgctttgagaagaatgtttaatagaaaattaaaataactttttctggc

SEQ ID NO: 322111 - DNA, 2443 bp, Homo sapiens
agcggacgcgcctgtgttgccgcccgcggccctggcttcgggcttcagggagctctggtgcagtctccgcctgtcagtgccggcagtcgtccgcggcgcccgccccggtcccgcactggtgcagccatgtcctcttccccgtgggagcctgcgaccctgcgccgggtgttcgtggtgggggttggcatgaccaagtttgtgaagcctggagctgagaattcaagagactaccctgacttggcagaagaagcaggcaagaaggctttagctgatgcacagatcccttattcagcagtggaccaggcatgtgttggctatgtttttggtgactctacctgtgggcagagggctatctatcacagtttgggaatgactggaattcctataatcaatgtcaacaataactgtgctactggttctactgctttgtttatggcccgccagctgattcagggtggtgtggcagaatgtgtcttggctcttgggtttgagaagatgagtaagggaagccttggaataaaattttcagatagaaccattcccactgataagcatgttgacctcctgatcaataagtatggattgtctgctcacccagttgctcctcagatgtttgggtatgctggaaaagaacatatggaaaaatatggaacaaaaattgaacactttgcaaaaattggatggaaaaatcataaacattcagttaataacccgtattcccagttccaagatgaatacagtttagatgaagtgatggcatctaaagaagtttttgattttttgactatcttacaatgttgtcccacttcagatggtgctgcagcagcaattttggccagtgaagcatttgtacagaagtatggcctgcaatccaaagctgtggaaattttggcacaagaaatgatgactgatttgccaagctcgtttgaagaaaaaagcattattaaaatggttggctttgatatgagtaaagaagctgcaagaaaatgctatgagaaatctggcctgacaccaaatgatattgacgtaatagaacttcacgattgcttttctaccaacgaactccttacttatgaagcactgggactctgtccagaaggacaaggtgcaacgctggttgatagaggagataatacatatggaggaaagtgggtcataaatcctagtggtggactgatttcaaagggacacccactaggcgctacaggtcttgctcagtgtgcagaactctgctggcagctgagaggggaagccggaaagaggcaagttcctggtgcaaaggtggctctgcagcataatttaggcattggaggagctgtggttgtaacactctacaagatgggttttccggaagccgccagataagaaggctgactgcacaatcacaatggctgactcagacttcctggctttaatgactggtaaaatgaatcctcagtcggccttctttcaaggcaaattgaaaatcactggcaacatgggtctcgctatgaagttacaaaatcttcagcttcagccaggcaacgctaagctctgaagaactccctttggctacttttgaaaatcaagatgagatatatagatatatatccatacattttattgtcagaatttagactgaaactacacattggcaaatagcgtgggatagatttgtttcttaatgggtgtgaccaatcctgtttttcctatgctctgggtgaatagagcctgatggtatactactgctttgcggaattgcatacaactgtgcattacaaagttaatatggtaattatggtctggggtaaaattgagtttcagaataaaattaggaacagtaaaatccaaagaactatgtaaacaaaaaagcttttgttttgcttacaaagtatatttaaggattattctgctgaagattcagtttaagagttttccttgggagaactaagtaagaaacacaatgccaacagctggccagtaattagtgttgtgcacttcatgtcattaatcaatttctcaatagttcttaaaattagtgagattaaaaatctaaaaattttgcatttcatgctatcagaaacagtattttcttcccaaatcaaaataaaagaaatatgatcagagcttgaacacaggcttatttttaaaataaaaatatttttaacatgggtttccttattgaaaaatcagtgtattagtcataaaacaccatcattaagaataattgaacaataaagtttgctttcagatgcagttttcaaattataatctcatttcaatttataacgttctcagtcctttgttataattttcctttttcatgtaagtttaattatctgcatttatcttttttcctagtttttctaatactaatgttatttcttaaaattcagtgagatataggataaaataatgctttgagaagaatgtttaatagaaaattaaaataactttttctggc

SEQ ID NO: 322112 - DNA, 5347 bp, Homo sapiens
agcggacgcgcctgtgttgccgcccgcggccctggcttcgggcttcagggagctctggtgcagtctccgcctgtcagtgccggcagtcgtccgcggcgcccgccccggtcccgcactggtgcagccatgtcctcttccccgtgggagcctgcgaccctgcgccgggtgttcgtggtgggggttggcatgaccaagtttgtgaagcctggagctgagaattcaagagactaccctgacttggcagaagaagcaggcaagaaggctttagctgatgcacagatcccttattcagcagtggaccaggcatgtgttggctatgtttttggtgactctacctgtgggcagagggctatctatcacagtttgggaatgactggaattcctataatcaatgtcaacaataactgtgctactggttctactgctttgtttatggcccgccagctgattcagggtggtgtggcagaatgtgtcttggctcttgggtttgagaagatgagtaagggaagccttggaataaaattttcagatagaaccattcccactgataagcatgttgacctcctgatcaataagtatggattgtctgctcacccagttgctcctcagatgtttgggtatgctggaaaagaacatatggaaaaatatggaacaaaaattgaacactttgcaaaaattggatggaaaaatcataaacattcagttaataacccgtattcccagttccaagatgaatacagtttagatgaagtgatggcatctaaagaagtttttgattttttgactatcttacaatgttgtcccacttcagatggtgctgcagcagcaattttggccagtgaagcatttgtacagaagtatggcctgcaatccaaagctgtggaaattttggcacaagaaatgatgactgatttgccaagctcgtttgaagaaaaaagcattattaaaatggttggctttgatatgagtaaagaagctgcaagaaaatgctatgagaaatctggcctgacaccaaatgatattgacgtaatagaacttcacgattgcttttctaccaacgaactccttacttatgaagcactgggactctgtccagaaggacaaggtgcaacgctggttgatagaggagataatacatatggaggaaagtgggtcataaatcctagtggtggactgatttcaaagggacacccactaggcgctacaggtcttgctcagtgtgcagaactctgctggcagctgagaggggaagccggaaagaggcaagttcctggtgcaaaggtggctctgcagcataatttaggcattggaggagctgtggttgtaacactctacaagatgggttttccggaagccgccagttcttttagaactcatcaaattgaagctgttccaaccagctctgcaagtgatggatttaaggcaaatcttgtttttaaggagattgagaagaaacttgaagaggaaggggaacagtttgtgaagaaaatcggtggtatttttgccttcaaggtgaaagatggccctgggggtaaagaggccacctgggtggtggatgtgaagaatggcaaaggatcagtgcttcctaactcagataagaaggctgactgcacaatcacaatggctgactcagacttcctggctttaatgactggtaaaatgaatcctcagtcggtaagtatgatggagcttatatcctgctagtaggtaggtctttcagccctttctactccatctcctgactcagactctaaagtgcaaagtggtcagactcacaaaactcagtgttccccaaacagttgacagacgtctgtggagcaagctgtgtgccacacactgtcttgtgtgctggaagtgcccagaagagtaagaaagttcccacgctcagggcatccacagatgtgtaaaagagtcagtgcagccagagatccaaggtgccacacctggcttgtggtcaggggaggatgaaggcaggagcagccatatctctctgggccatcagggagagcaccacagaggaagcagctcttgagcttagtacccaggcggaaagtaggagtgttccaggaggagggaggggtggcatgaacaaaggcctgaccttttacattccatttatttgcccatgctcttctttttgcctgacctgtccttacctgacaaatgacttgtctttcaaaattagctcagatattatctccaaggacctctttccaagttgctggggagctgtaaccagtccctctcctgagccacgtactggactgccagcttagtgcctgttgtgttatgttagtcataatatgcctctctctcttccctgttaggctgtgagtgtctcaaagcatcaaagcacatcttatttgtctttatgtttccagaatttagcacagtatctgatgtttttaggtattctgtaaacaactgttggactaaattgcatttgtctaaagtgtgtttatgccttgtatagattttcctagtccccaaattgtcaagggtcctcttaggctcttcagctgcagtgttgaatggacttgatatagtgagctttctgtcaacttgatatatactgagctttccattaataaaaaagaaactaagacgtttctttccaatgtaacttaattttttctgttgtctcagtctggtttgttttaggttttattcctgtggttctctggtaatttccaagattggataaaacaactaaatctcactcccacttgcttttttaaaatgctttttctacgtaaccaagcacattttagttgatgccatgacaagtgagaaatttgcatctgtgatgtttcagctgaatacacaccattggcactgacatttccactgagcctgctccagaaatctggacagaacagaggccaccagtataggagctggctgtcatcctccttcccacccactgcacatgccatgcacagctttggcaggctgttcagacttcacacatcagctgccttcattctctcaatttatctttgtactgcccattttgggggcaaggtgtcagcttattttccttcagcacctgttaacacccaaaggaattaaagataaaaatagcagacctttctattaatgtgctaatggacttcccttatgctcagaggatttccagaggatttgactggaaatcgttaaatgcagtggaaattctaatttcagtgtttggctccagcagcaagcgtacatgaagaacacctaggggccagattaaaatcatctttatgtatggactctctgaagggtgaagattcatgttttctctattgttagtaaataaaaagtgattttctttgttaacttacaaaggagaaaggtggcgagtttctcctgtactactggtccgtatttttaaatgatgtttgttcaatatattgtgttctgagacacctgacctttaaggcatcagacagaaggctttgtgccatatagaaaggaaatatttagtttgtccagacagaggaaggggaaaaaaaggaattagtcacccttaccaggaggtacagaaaaaaacagagctccttacattcccatggatgatgtagaagagctcctagcttcttaatgtactgttaaaaacctaggactaccagaagctttttttttaaatctagcccttccttattttaagcattcagttaaaatactgagatcatggcagggaaattatgctacgttcccaattttgctgtttctcttaagttttcctgggattttgttacatggtaaatttagcaaacatcatgtgatctaatcccaggcagttgttaaatggaacaaattgtggctctgcacttcagattggtttgatttttcttgttgagccaaagagtaacacaagcacctcattctcagcaggctctgtgccctctgtagggataagtcctttatcattggtggcatttcattcacatgcatgttggattgaatcccaagagtttctgtgttttttgtgtatgctttttctctcagcagcctgctaaaaatttcagttcatatttcccacctacatggaatgttttaaaacataatcagtgtagtatgaacccactttgaggaggacaggtgaaaacaggctcaatttctatgagaaatttgggaaagctgctcctttctgctgatctgcaaaaagtgtggcctttacaaattcttccttttgaagaatgtggttccaaatctattccagaaagccaagtttcatattttagagaaagtcatgtgacctggataaataaatgatctcagggctagatagtgtagaaacatcagcaatcttaaaacaaaaaaacaccaagtaatgaattttctttcttcttcacaggccttctttcaaggcaaattgaaaatcactggcaacatgggtctcgctatgaagttacaaaatcttcagcttcagccaggcaacgctaagctctgaagaactccctttggctacttttgaaaatcaagatgagatatatagatatatatccatacattttattgtcagaatttagactgaaactacacattggcaaatagcgtgggatagatttgtttcttaatgggtgtgaccaatcctgtttttcctatgctctgggtgaatagagcctgatggtatactactgctttgcggaattgcatacaactgtgcattacaaagttaatatggtaattatggtctggggtaaaattgagtttcagaataaaattaggaacagtaaaatccaaagaactatgtaaacaaaaaagcttttgttttgcttacaaagtatatttaaggattattctgctgaagattcagtttaagagttttccttgggagaactaagtaagaaacacaatgccaacagctggccagtaattagtgttgtgcacttcatgtcattaatcaatttctcaatagttcttaaaattagtgagattaaaaatctaaaaattttgcatttcatgctatcagaaacagtattttcttcccaaatcaaaataaaagaaatatgatcagagcttgaacacaggcttatttttaaaataaaaatatttttaacatgggtttccttattgaaaaatcagtgtattagtcataaaacaccatcattaagaataattgaacaataaagtttgctttcagatgcagttttcaaattataatctcatttcaatttataacgttctcagtcctttgttataattttcctttttcatgtaagtttaattatctgcatttatcttttttcctagtttttctaatactaatgttatttcttaaaattcagtgagatataggataaaataatgctttgagaagaatgtttaatagaaaattaaaataactttttctggc

SEQ ID NO: 322113 - DNA, 3022 bp, Homo sapiens
  misc_feature (2529)..(2529): n is a, c, g, or t
  misc_feature (2547)..(2547): n is a, c, g, or t
  misc_feature (2563)..(2563): n is a, c, g, or t
  misc_feature (2574)..(2574): n is a, c, g, or t
  misc_feature (2578)..(2578): n is a, c, g, or t
agcggacgcgcctgtgttgccgcccgcggccctggcttcgggcttcagggagctctggtgcagtctccgcctgtcagtgccggcagtcgtccgcggcgcccgccccggtcccgcactggtgcagccatgtcctcttccccgtgggagcctgcgaccctgcgccgggtgttcgtggtgggggttggcatgaccaagtttgtgaagcctggagctgagaattcaagagactaccctgacttggcagaagaagcaggcaagaaggctttagctgatgcacagatcccttattcagcagtggaccaggcatgtgttggctatgtttttggtgactctacctgtgggcagagggctatctatcacagtttgggaatgactggaattcctataatcaatgtcaacaataactgtgctactggttctactgctttgtttatggcccgccagctgattcagggtggtgtggcagaatgtgtcttggctcttgggtttgagaagatgagtaagggaagccttggaataaaattttcagatagaaccattcccactgataagcatgttgacctcctgatcaataagtatggattgtctgctcacccagttgctcctcagatgtttgggtatgctggaaaagaacatatggaaaaatatggaacaaaaattgaacactttgcaaaaattggatggaaaaatcataaacattcagttaataacccgtattcccagttccaagatgaatacagtttagatgaagtgatggcatctaaagaagtttttgattttttgactatcttacaatgttgtcccacttcagatggtgctgcagcagcaattttggccagtgaagcatttgtacagaagtatggcctgcaatccaaagctgtggaaattttggcacaagaaatgatgactgatttgccaagctcgtttgaagaaaaaagcattattaaaatggttggctttgatatgagtaaagaagctgcaagaaaatgctatgagaaatctggcctgacaccaaatgatattgacgtaatagaacttcacgattgcttttctaccaacgaactccttacttatgaagcactgggactctgtccagaaggacaaggtgcaacgctggttgatagaggagataatacatatggaggaaagtgggtcataaatcctagtggtggactgatttcaaagggacacccactaggcgctacaggtcttgctcagtgtgcagaactctgctggcagctgagaggggaagccggaaagaggcaagttcctggtgcaaaggtggctctgcagcataatttaggcattggaggagctgtggttgtaacactctacaagatgggttttccggaagccgccagttcttttagaactcatcaaattgaagctgttccaaccagctctgcaagtgatggatttaaggcaaatcttgtttttaaggagattgagaagaaacttgaagagataagaaggctgactgcacaatcacaatggctgactcagacttcctggctttaatgactggtaaaatgaatcctcagtcggccttctttcaaggcaaattgaaaatcactggcaacatgggtctcgctatgaagttacaaaatcttcagcttcagccaggcaacgctaagctctgaagaactccctttggctacttttactgaaactacacattggcaaatagcgtgggatagatttgtttcttaatgggtgtgaccaatcctgtttttcctatgctctgggtgaatagagcctgatggtatactactgctttgcggaattgcatacaactgtgcattacaaagttaatatggtaattatggtctggggtaaaattgagtttcagaataaaattaggaacagtaaaatccaaagaactatgtaaacaaaaaagcttttgttttgcttacaaagtatatttaaggattattctgctgaagattcagtttaagagttttccttgggagaactaagtaagaaacacaatgccaacagctggccagtaattagtgttgtgcacttcatgtcattaatcaatttctcaatagttcttaaaattagtgagattaaaaatctaaaaattttgcatttcatgctatcagaaacagtattttcttcccaaatcaaaataaaagaaatatgatcagagcttgaacacaggcttatttttaaaataaaaatatttttaacatgggtttccttattgaaaaatcagtgtattagtcataaaacaccatcattaagaataattgaacaataaagtttgctttcagatgcagttttcaaattataatctcatttcaatttataacgttctcagtcctttgttataattttcctttttcatgtaagtttaattatctgcatttatcttttttcctagtttttctaatactaatgttatttcttaaaattcagtgagatataggataaaataatgctttgagaagaatgtttaatagaaaattaaaataactttttctggcaaaaaaaaaaaaaaaaaaaaaaaaaaaaaaaaaaaaaaanaaaaaaaaaaaaaaaaanaaaaaaaaaaaaaaanaaaaaaaaaanaaanaaacccctgggggggccccgagccccctaggcccttttggggggcgtattacaataaatgggcggccgttttacaacaccgggcctgcgaaaaccccgggggaaccccccaaaaatagctggttgcacaacccccttttttcggcgggggtaatattcaaaaggccccccccaatgggcgttttcaccaatagtgcacccttatgggcgattggcgaattttaggcggcaatattttgttgaaaaccgccccaaaatttttgaaaacccactccatcttttacccaaaagggcgaatatttgtgaaatccctttttatatcataaaaatcccccgcgaaaggctggagggttgtcccaatttttgacacgaagttccctctttatgaaacggggtctccttacttctaaaggcggaaaaggtttttttgggcccaggaggccct

SEQ ID NO: 322114 - DNA, 975 bp, Homo sapiens
taccaaaaaataattgcttttccaggccgttttccaagggccccagggggcaaaacggctaagctctgaagaactccctttggctacttttgaaaatcaagatgagatatatagatatatatccatacattttattgtcagaatttagactgaaactacacattggcaaatagcgtgggatagatttgtttcttaatgggtgtgaccaatcctgtttttcctatgctctgggtgaatagagcctgatggtatactactgctttgcggaattgcatacaactgtgcattacaaagttaatatggtaattatggtctggggtaaaattgagtttcagaataaaattaggaacagtaaaatccaaagaactatgtaaacaaaaaagcttttgttttgcttacaaagtatatttaaggattattctgctgaagattcagtttaagagttttccttgggagaactaagtaagaaacacaatgccaacagctggccagtaattagtgttgtgcacttcatgtcattaatcaatttctcaatagttcttaaaattagtgagattaaaaatctaaaaattttgcatttcatgctatcagaaacagtattttcttcccaaatcaaaataaaagaaatatgatcagagcttgaacacaggcttatttttaaaataaaaatatttttaacatgggtttccttattgaaaaatcagtgtattagtcataaaacaccatcattaagaataattgaacaataaagtttgctttcagatgcagttttcaaattataatctcatttcaatttataacgttctcagtcctttgttataattttcctttttcatgtaagtttaattatctgcatttatcttttttcctagtttttctaatactaatgttatttcttaaaattcagtgagatataggataaaataatgctttgagaagaatgtttaatagaaaattaaaataactttttctggc

SEQ ID NO: 322115 - DNA, 1733 bp, Homo sapiens
  misc_feature (1689)..(1689): n is a, c, g, or t
agcggacgcgcctgtgttgccgcccgcggccctggcttcgggcttcagggagctctggtgcagtctccgcctgtcagtgccggcagtcgtccgcggcgcccgccccggtcccgcactggtgcagccatgtcctcttccccgtgggagcctgcgaccctgcgccgggtgttcgtggtgggggttggcatgaccaagtttgtgaagcctggagctgagaattcaagagactaccctgacttggcagaagaagcaggcaagaaggctttagctgatgcacagatcccttattcagcagtggaccaggcatgtgttggctatgtttttggtgactctacctgtgggcagagggctatctatcacagtttgggaatgactggaattcctataatcaatgtcaacaataactgtgctactggttctactgctttgtttatggcccgccagctgattcagggtggtgtggcagaatgtgtcttggctcttgggtttgagaagatgagtaagggaagccttggaataaaattttcagatagaaccattcccactgataagcatgttgacctcctgatcaataagtatggattgtctgctcacccagttgctcctcagatgtttgggtatgctggaaaagaacatatggaaaaatatggaacaaaaattgaacactttgcaaaaattggatggaaaaatcataaacattcagttaataacccgtattcccagttccaagatgaatacagtttagatgaagtgatggcatctaaagaagtttttgattttttgactatcttacaatgttgtcccacttcagatggtgctgcagcagcaattttggccagtgaagcatttgtacagaagtatggcctgcaatccaaagctgtggaaattttggcacaagaaatgatgactgatttgccaagctcgtttgaagaaaaaagcattattaaaatggttggctttgatatgagtaaagaagctgcaagaaaatgctatgagaaatctggcctgacaccaaatgatattgacgtaatagaacttcacgattgcttttctaccaacgaactccttacttatgaagcactgggactctgtccagaaggacaaggtgcaacgctggttgatagaggagataatacatatggaggaaagtgggtcataaatcctagtggtggactgatttcaaagggacacccactaggcgctacaggtcttgctcagtgtgcagaactctgctggcagctgagaggggaagccggaaagaggcaagttcctggtgcaaaggtggctctgcagcataatttaggcattggaggagctgtggttgtaacactctacaagatgggttttccggaagccgccagttcttttagaactcatcaaattgaagctgttccaaccagctctgcaagtgatggatttaaggcaaatcttgtttttaaggagattgagaagaaacttgaagaggaaggggaacagtttgtgaagaaaatcggtggtatttttgccttcaaggtgaaagatggccctgggggtaaagaggccacctgggtggtggatgtgaagaatggcaaaggatcagtgcttcctaactcagataagaaggctgactgcacaatcacaatggctgactcagacttcctggctttaatgactggtaaaatgaatcctcagtcggccttctttcaaggnaaattgccagcaacgctaacctcctaagaactccccttggctca

SEQ ID NO: 322116 - DNA, 1652 bp, Homo sapiens
agcggacgcgcctgtgttgccgcccgcggccctggcttcgggcttcagggagctctggtgcagtctccgcctgtcagtgccggcagtcgtccgcggcgcccgccccggtcccgcactggtgcagccatgtcctcttccccgtgggagcctgcgaccctgcgccgggtgttcgtggtgggggttggcatgaccaagtttgtgaagcctggagctgagaattcaagagactaccctgacttggcagaagaagcaggcaagaaggctttagctgatgcacagatcccttattcagcagtggaccaggcatgtgttggctatgtttttggtgactctacctgtgggcagagggctatctatcacagtttgggaatgactggaattcctataatcaatgtcaacaataactgtgctactggttctactgctttgtttatggcccgccagctgattcagggtggtgtggcagaatgtgtcttggctcttgggtttgagaagatgagtaagggaagccttggaataaaattttcagatagaaccattcccactgataagcatgttgacctcctgatcaataagtatggattgtctgctcacccagttgctcctcagatgtttgggtatgctggaaaagaacatatggaaaaatatggaacaaaaattgaacactttgcaaaaattggatggaaaaatcataaacattcagttaataacccgtattcccagttccaagatgaatacagtttagatgaagtgatggcatctaaagaagtttttgattttttgactatcttacaatgttgtcccacttcagatggtgctgcagcagcaattttggccagtgaagcatttgtacagaagtatggcctgcaatccaaagctgtggaaattttggcacaagaaatgatgactgatttgccaagctcgtttgaagaaaaaagcattattaaaatggttggctttgatatgagtaaagaagctgcaagaaaatgctatgagaaatctggcctgacaccaaatgatattgacgtaatagaacttcacgattgcttttctaccaacgaactccttacttatgaagcactgggactctgtccagaaggacaaggtgcaacgctggttgatagaggagataatacatatggaggaaagtgggtcataaatcctagtggtggactgatttcaaagggacacccactaggcgctacaggtcttgctcagtgtgcagaactctgctggcagctgagaggggaagccggaaagaggcaagttcctggtgcaaaggtggctctgcagcataatttaggcattggaggagctgtggttgtaacactctacaagatgggttttccggaagccgccagttcttttagaactcatcaaattgaagctgttccaaccagctctgcaagtgatggatttaaggcaaatcttgtttttaaggagattgagaagaaacttgaagaggaaggggaacagtttgtgaagaaaatcggtggtatttttgccttcaaggtgaaagatggccctgggggtaaagaggccacctgggtggtggatgtgaagaatggcaaaggatcagtgcttcctaactcagataagaaggctgactgcacaatcacaatggacctaaatggacaatggacctaaatgga

SEQ ID NO: 322117 - DNA, 714 bp, Homo sapiens
aaatccaaagaactatgtaaacaaaaaagcttttgttttgcttacaaagtatatttaaggattattctgctgaagattcagtttaagagttttccttgggagaactaagtaagaaacacaatgccaacagctggccagtaattagtgttgtgcacttcatgtcattaatcaatttctcaatagttcttaaaattagtgagattaaaaatctaaaaattttgcatttcatgctatcagaaacagtattttcttcccaaatcaaaataaaagaaatatgatcagagcttgaacacaggcttatttttaaaataaaaatatttttaacatgggtttccttattgaaaaatcagtgtattagtcataaaacaccatcattaagaataattgaacaataaagtttgctttcagatgcagttttcaaattataatctcatttcaatttataacgttctcagtcctttgttataattttcctttttcatgtaagtttaattatctgcatttatcttttttcctagtttttctaatactaatgttatttcttaaaattcagtgagatataggataaaataatgctttgagaagaatgtttaatagaaaattaaaataactttttctggcctctcttgtttttactgtgtatgttcttgctcagggctctctagataatgcagaataaagagaaacgttgggggatttataaactgaatgtta

SEQ ID NO: 322118 - DNA, 2888 bp, Homo sapiens
  misc_feature (2716)..(2716): n is a, c, g, or t
  misc_feature (2734)..(2734): n is a, c, g, or t
  misc_feature (2750)..(2750): n is a, c, g, or t
  misc_feature (2761)..(2761): n is a, c, g, or t
  misc_feature (2765)..(2765): n is a, c, g, or t
agcggacgcgcctgtgttgccgcccgcggccctggcttcgggcttcagggagctctggtgcagtctccgcctgtcagtgccggcagtcgtccgcggcgcccgccccggtcccgcactggtgcagccatgtcctcttccccgtgggagcctgcgaccctgcgccgggtgttcgtggtgggggttggcatgaccaagtttgtgaagcctggagctgagaattcaagagactaccctgacttggcagaagaagcaggcaagaaggctttagctgatgcacagatcccttattcagcagtggaccaggcatgtgttggctatgtttttggtgactctacctgtgggcagagggctatctatcacagtttgggaatgactggaattcctataatcaatgtcaacaataactgtgctactggttctactgctttgtttatggcccgccagctgattcagggtggtgtggcagaatgtgtcttggctcttgggtttgagaagatgagtaagggaagccttggaataaaattttcagatagaaccattcccactgataagcatgttgacctcctgatcaataagtatggattgtctgctcacccagttgctcctcagatgtttgggtatgctggaaaagaacatatggaaaaatatggaacaaaaattgaacactttgcaaaaattggatggaaaaatcataaacattcagttaataacccgtattcccagttccaagatgaatacagtttagatgaagtgatggcatctaaagaagtttttgattttttgactatcttacaatgttgtcccacttcagatggtgctgcagcagcaattttggccagtgaagcatttgtacagaagtatggcctgcaatccaaagctgtggaaattttggcacaagaaatgatgactgatttgccaagctcgtttgaagaaaaaagcattattaaaatggttggctttgatatgagtaaagaagctgcaagaaaatgctatgagaaatctggcctgacaccaaatgatattgacgtaatagaacttcacgattgcttttctaccaacgaactccttacttatgaagcactgggactctgtccagaaggacaaggtgcaacgctggttgatagaggagataatacatatggaggaaagtgggtcataaatcctagtggtggactgatttcaaagggacacccactaggcgctacaggtcttgctcagtgtgcagaactctgctggcagctgagaggggaagccggaaagaggcaagttcctggtgcaaaggtggctctgcagcataatttaggcattggaggagctgtggttgtaacactctacaagatgggttttccggaagccgccagttcttttagaactcatcaaattgaagctgttccaaccagctctgcaagtgatggatttaaggcaaatcttgtttttaaggagattgagaagaaacttgaagaggaaggggaacagtttgtgaagaaaatcggtggtatttttgccttcaaggtgaaagatggccctgggggtaaagaggccacctgggtggtggatgtgaagaatggcaaaggatcagtgcttcctaactcagataagaaggctgactgcacaatcacaatggctgactcagacttcctggctttaatgactggtaaaatgaatcctcagtcggccttctttcaaggcaaattgaaaatcactggcaacatgggtctcgctatgaagttacaaaatcttcagcttcagccaggcaacgctaagctctgaagaactccctttggctacttttgaaaatcaagatgagatatatagatatatatccatacattttattgtcagaatttagactgaaactacacattggcaaatagcgtgggatagatttgtttcttaatgggtgtgaccaatcctgtttttcctatgctctgggtgaatagagcctgatggtatactactgctttgcggaattgcatacaactgtgcattacaaagttaatatggtaattatggtctggggtaaaattgagtttcagaataaaattaggaacagtaaaatccaaagaactatgtaaacaaaaaagcttttgttttgcttacaaagtatatttaaggattattctgctgaagattcagtttaagagttttccttgggagaactaagtaagaaacacaatgccaacagctggccagtaattagtgttgtgcacttcatgtcattaatcaatttctcaatagttcttaaaattagtgagattaaaaatctaaaaattttgcatttcatgctatcagaaacagtattttcttcccaaatcaaaataaaagaaatatgatcagagcttgaacacaggcttatttttaaaataaaaatatttttaacatgggtttccttattgaaaaatcagtgtattagtcataaaacaccatcattaagaataattgaacaataaagtttgctttcagatgcagttttcaaattataatctcatttcaatttataacgttctcagtcctttgttataattttcctttttcatgtaagtttaattatctgcatttatcttttttcctagtttttctaatactaatgttatttcttaaaattcagtgagatataggataaaataatgctttgagaagaatgtttaatagaaaattaaaataactttttctggcaaaaaaaaaaaaaaaaaaaaaaaaaaaaaaaaaaaaaaanaaaaaaaaaaaaaaaaanaaaaaaaaaaaaaaanaaaaaaaaaanaaanaaaaaaagagagggggcgcagcaccgcaagaaatatgacccccgcgcgggggcgaccacatcaagagcacacacgactctgtttcacaagtaaagggacaccccaatagagaggagccataca

SEQ ID NO: 322119 - DNA, 2612 bp, Homo sapiens
agcggacgcgcctgtgttgccgcccgcggccctggcttcgggcttcagggagctctggtgcagtctccgcctgtcagtgccggcagtcgtccgcggcgcccgccccggtcccgcactggtgcagccatgtcctcttccccgtgggagcctgcgaccctgcgccgggtgttcgtggtgggggttggcatgaccaagtttgtgaagcctggagctgagaattcaagagactaccctgacttggcagaagaagcaggcaagaaggctttagctgatgcacagatcccttattcagcagtggaccaggcatgtgttggctatgtttttggtgactctacctgtgggcagagggctatctatcacagtttgggaatgactggaattcctataatcaatgtcaacaataactgtgctactggttctactgctttgtttatggcccgccagctgattcagggtggtgtggcagaatgtgtcttggctcttgggtttgagaagatgagtaagggaagccttggaataaaattttcagatagaaccattcccactgataagcatgttgacctcctgatcaataagtatggattgtctgctcacccagttgctcctcagatgtttgggtatgctggaaaagaacatatggaaaaatatggtattcccagttccaagatgaatacagtttagatgaagtgatggcatctaaagaagtttttgattttttgactatcttacaatgttgtcccacttcagatggtgctgcagcagcaattttggccagtgaagcatttgtacagaagtatggcctgcaatccaaagctgtggaaattttggcacaagaaatgatgactgatttgccaagctcgtttgaagaaaaaagcattattaaaatggttggctttgatatgagtaaagaagctgcaagaaaatgctatgagaaatctggcctgacaccaaatgatattgacgtaatagaacttcacgattgcttttctaccaacgaactccttacttatgaagcactgggactctgtccagaaggacaaggtgcaacgctggttgatagaggagataatacatatggaggaaagtgggtcataaatcctagtggtggactgatttcaaagggacacccactaggcgctacaggtcttgctcagtgtgcagaactctgctggcagctgagaggggaagccggaaagaggcaagttcctggtgcaaaggtggctctgcagcataatttaggcattggaggagctgtggttgtaacactctacaagatgggttttccggaagccgccagttcttttagaactcatcaaattgaagctgttccaaccagctctgcaagtgatggatttaaggcaaatcttgtttttaaggagattgagaagaaacttgaagaggaaggggaacagtttgtgaagaaaatcggtggtatttttgccttcaaggtgaaagatggccctgggggtaaagaggccacctgggtggtggatgtgaagaatggcaaaggatcagtgcttcctaactcagataagaaggctgactgcacaatcacaatggctgactcagacttcctggctttaatgactggtaaaatgaatcctcagtcggccttctttcaaggcaaattgaaaatcactggcaacatgggtctcgctatgaagttacaaaatcttcagcttcagccaggcaacgctaagctctgaagaactccctttggctacttttgaaaatcaagatgagatatatagatatatatccatacattttattgtcagaatttagactgaaactacacattggcaaatagcgtgggatagatttgtttcttaatgggtgtgaccaatcctgtttttcctatgctctgggtgaatagagcctgatggtatactactgctttgcggaattgcatacaactgtgcattacaaagttaatatggtaattatggtctggggtaaaattgagtttcagaataaaattaggaacagtaaaatccaaagaactatgtaaacaaaaaagcttttgttttgcttacaaagtatatttaaggattattctgctgaagattcagtttaagagttttccttgggagaactaagtaagaaacacaatgccaacagctggccagtaattagtgttgtgcacttcatgtcattaatcaatttctcaatagttcttaaaattagtgagattaaaaatctaaaaattttgcatttcatgctatcagaaacagtattttcttcccaaatcaaaataaaagaaatatgatcagagcttgaacacaggcttatttttaaaataaaaatatttttaacatgggtttccttattgaaaaatcagtgtattagtcataaaacaccatcattaagaataattgaacaataaagtttgctttcagatgcagttttcaaattataatctcatttcaatttataacgttctcagtcctttgttataattttcctttttcatgtaagtttaattatctgcatttatcttttttcctagtttttctaatactaatgttatttcttaaaattcagtgagatataggataaaataatgctttgagaagaatgtttaatagaaaattaaaataactttttctggc

SEQ ID NO: 322120 - DNA, 2622 bp, Homo sapiens
agcggacgcgcctgtgttgccgcccgcggccctggcttcgggcttcagggagctctggtgcagtctccgcctgtcagtgccggcagtcgtccgcggcgcccgccccggtcccgcactggtgcagccatgtcctcttccccgtgggagcctgcgaccctgcgccgggtgttcgtggtgggggttggcatgaccaagtttgtgaagcctggagctgagaattcaagagactaccctgacttggcagaagaagcaggcaagaaggctttagctgatgcacagatcccttattcagcagtggaccaggcatgtgttggctatgtttttggtgactctacctgtgggcagagggctatctatcacagtttgggaatgactggaattcctataatcaatgtcaacaataactgtgctactggttctactgctttgtttatggcccgccagctgattcagggtggtgtggcagaatgtgtcttggctcttgggtttgagaagatgagtaagggaagccttggaataaaatatggattgtctgctcacccagttgctcctcagatgtttgggtatgctggaaaagaacatatggaaaaatatggaacaaaaattgaacactttgcaaaaattggatggaaaaatcataaacattcagttaataacccgtattcccagttccaagatgaatacagtttagatgaagtgatggcatctaaagaagtttttgattttttgactatcttacaatgttgtcccacttcagatggtgctgcagcagcaattttggccagtgaagcatttgtacagaagtatggcctgcaatccaaagctgtggaaattttggcacaagaaatgatgactgatttgccaagctcgtttgaagaaaaaagcattattaaaatggttggctttgatatgagtaaagaagctgcaagaaaatgctatgagaaatctggcctgacaccaaatgatattgacgtaatagaacttcacgattgcttttctaccaacgaactccttacttatgaagcactgggactctgtccagaaggacaaggtgcaacgctggttgatagaggagataatacatatggaggaaagtgggtcataaatcctagtggtggactgatttcaaagggacacccactaggcgctacaggtcttgctcagtgtgcagaactctgctggcagctgagaggggaagccggaaagaggcaagttcctggtgcaaaggtggctctgcagcataatttaggcattggaggagctgtggttgtaacactctacaagatgggttttccggaagccgccagttcttttagaactcatcaaattgaagctgttccaaccagctctgcaagtgatggatttaaggcaaatcttgtttttaaggagattgagaagaaacttgaagaggaaggggaacagtttgtgaagaaaatcggtggtatttttgccttcaaggtgaaagatggccctgggggtaaagaggccacctgggtggtggatgtgaagaatggcaaaggatcagtgcttcctaactcagataagaaggctgactgcacaatcacaatggctgactcagacttcctggctttaatgactggtaaaatgaatcctcagtcggccttctttcaaggcaaattgaaaatcactggcaacatgggtctcgctatgaagttacaaaatcttcagcttcagccaggcaacgctaagctctgaagaactccctttggctacttttgaaaatcaagatgagatatatagatatatatccatacattttattgtcagaatttagactgaaactacacattggcaaatagcgtgggatagatttgtttcttaatgggtgtgaccaatcctgtttttcctatgctctgggtgaatagagcctgatggtatactactgctttgcggaattgcatacaactgtgcattacaaagttaatatggtaattatggtctggggtaaaattgagtttcagaataaaattaggaacagtaaaatccaaagaactatgtaaacaaaaaagcttttgttttgcttacaaagtatatttaaggattattctgctgaagattcagtttaagagttttccttgggagaactaagtaagaaacacaatgccaacagctggccagtaattagtgttgtgcacttcatgtcattaatcaatttctcaatagttcttaaaattagtgagattaaaaatctaaaaattttgcatttcatgctatcagaaacagtattttcttcccaaatcaaaataaaagaaatatgatcagagcttgaacacaggcttatttttaaaataaaaatatttttaacatgggtttccttattgaaaaatcagtgtattagtcataaaacaccatcattaagaataattgaacaataaagtttgctttcagatgcagttttcaaattataatctcatttcaatttataacgttctcagtcctttgttataattttcctttttcatgtaagtttaattatctgcatttatcttttttcctagtttttctaatactaatgttatttcttaaaattcagtgagatataggataaaataatgctttgagaagaatgtttaatagaaaattaaaataactttttctggc

SEQ ID NO: 322121 - DNA, 2528 bp, Homo sapiens
agcggacgcgcctgtgttgccgcccgcggccctggcttcgggcttcagggagctctggtgcagtctccgcctgtcagtgccggcagtcgtccgcggcgcccgccccggtcccgcactggtgcagccatgtcctcttccccgtgggagcctgcgaccctgcgccgggtgttcgtggtgggggttggcatgaccaagtttgtgaagcctggagctgagaattcaagagactaccctgacttggcagaagaagcaggcaagaaggctttagctgatgcacagatcccttattcagcagtggaccaggcatgtgttggctatgtttttggtgactctacctgtgggcagagggctatctatcacagtttgggaatgactggaattcctataatcaatgtcaacaataactgtgctactggttctactgctttgtttatggcccgccagctgattcagggtggtgtggcagaatgtgtcttggctcttgggtttgagaagatgagtaagggaagccttggaataaaattttcagatagaaccattcccactgataagcatgttgacctcctgatcaataagtatggattgtctgctcacccagttgctcctcagatgtttgggtatgctggaaaagaacatatggaaaaatatggaacaaaaattgaacactttgcaaaaattggatggaaaaatcataaacattcagttaataacccgtattcccagttccaagatgaatacagtttagatgaagtgatggcatctaaagaagtttttgattttttgactatcttacaatgttgtcccacttcagatggtgctgcagcagcaattttggccagtgaagcatttgtacagaagtatggcctgcaatccaaagctgtggaaattttggcacaagaaatgatgactgatttgccaagctcgtttgaagaaaaaagcattattaaaatggttggctttgatatgagtaaagaagctgcaagaaaatgctatgagaaatctggcctgacaccaaatgatattgacgtaatagaacttcacgattgcttttctaccaacgaactccttacttatgaagcactgggactctgtccagaaggacaaggtgcaacgctggttgatagaggagataatacatatggaggaaagtgggtcataaatcctagtggtggactgatttcaaagggacacccactaggcgctacaggtcttgctcagtgtgcagaactctgctggcagctgagaggggaagccggaaagaggcaagttcctggtgcaaaggtggctctgcagcataatttaggcattggaggagctgtggttgtaacactctacaagatgggttttccggaagccgccagttcttttagaactcatcaaattgaagctgttccaaccagctctgcaagtgatggatttaaggcaaatcttgtttttaaggagattgagaagaaacttgaagaggaaggggaacagtttgtgaagaaaatcggtggtatttttgccttcaaggtgaaagatggccctgggggtaaagaggccacctgggtggtggatgtgaagaatggcaaaggatcagtgcttcctaactcagataagaaggctgactgcacaatcacaatggctgactcagacttcctggctttaatgactggtaaaatgaatcctcagtcggccttctttcaaggcaaattgaaaatcactggcaacatgggtctcgctatgaagttacaaaatcttcagcttcagccaggcaacgctaagctctgaagaactccctttggctacttttgaaaatcaagatgagatatatagatatatatccatacattttattgtcagaatttagactgaaactacacattggcaaatagcgtgggatagatttgtttcttaatgggtgtgaccaatcctgtttttcctatgctctgggtgaatagagcctgatggtatactactgctttgcggaattgcatacaactgtgcattacaaagttaatatggtaattatggtctggggtaaaattgagtttcagaataaaattaggaacagtaaaatccaaagaactatgtaaacaaaaaagcttttgttttgcttacaaagtatatttaaggattattctgctgaagattcagtttaagagttttccttgggagaactaagtaagaaacacaatgccaacagctggccagtaattagtgttgtgcacttcatgtcattaatcaatttctcaatagttcttaaaattagtgagattaaaaatctaaaaattttgcatttcatgctatcagaaacagtcttttccttctggccttcttgatcacatggttctttgcacttcgcggtgtatcgccacttcatgtgctgtggatataccgttattacacgccttacgcgtgtgatatcgtcgagccagtagatcctgtgatataccagatctcactaatcagggacctgcatttgcatgcactcgacatgccagatactgaccgagcgcagcgaatcagtgagtcgagataacaacctg

SEQ ID NO: 322122 - DNA, 2546 bp, Homo sapiens
agcggacgcgcctgtgttgccgcccgcggccctggcttcgggcttcagggagctctggtgcagtctccgcctgtcagtgccggcagtcgtccgcggcgcccgccccggtcccgcactggtgcagccatgtcctcttccccgtgggagcctgcgaccctgcgccgggtgttcgtggtgggggttggcatgaccaagtttgtgaagcctggagctgagaattcaagagactaccctgacttggcagaagaagcaggcaagaaggctttagctgatgcacagatcccttattcagcagtggaccaggcatgtgttggctatgtttttggtgactctacctgtgggcagagggctatctatcacagtttgggaatgactggaattcctataatcaatgtcaacaataactgtgctactggttctactgctttgtttatggcccgccagctgattcagggtggtgtggcagaatgtgtcttggctcttgggtttgagaagatgagtaagggaagccttggaataaaattttcagatagaaccattcccactgataagcatgttgacctcctgatcaataagtatggattgtctgctcacccagttgctcctcagatgtttgggtatgctggaaaagaacatatggaaaaatatggaacaaaaattgaacactttgcaaaaattggatggaaaaatcataaacattcagttaataacccgtattcccagttccaagatgaatacagtttagatgaagtgatggcatctaaagaagtttttgattttttgactatcttacaatgttgtcccacttcagatggtgctgcagcagcaattttggccagtgaagcatttgtacagaagtatggcctgcaatccaaagctgtggaaattttggcacaagaaatgatgactgatttgccaagctcgtttgaagaaaaaagcattattaaaatggttggctttgatatgagtaaagaagctgcaagaaaatgctatgagaaatctggcctgacaccaaatgatattgacgtaatagaacttcacgattgcttttctaccaacgaactccttacttatgaagcactgggactctgtccagaaggacaaggtgcaacgctggttgatagaggagataatacatatggaggaaagtgggtcataaatcctagtggtggactgatttcaaagggacacccactaggcgctacaggtcttgctcagtgtgcagaactctgctggcagctgagaggggaagccggaaagaggcaagttcctggtgcaaaggtggctctgcagcataatttaggcattggaggagctgtggttgtaacactctacaagatgggttttccggaagccgccagttcttttagaactcatcaaattgaagctgttccaaccagctctgcaagtgatggatttaaggcaaatcttgtttttaaggagattgagaagaaacttgaagagataagaaggctgactgcacaatcacaatggctgactcagacttcctggctttaatgactggtaaaatgaatcctcagtcggccttctttcaaggcaaattgaaaatcactggcaacatgggtctcgctatgaagttacaaaatcttcagcttcagccaggcaacgctaagctctgaagaactccctttggctacttttgaaaatcaagatgagatatatagatatatatccatacattttattgtcagaatttagactgaaactacacattggcaaatagcgtgggatagatttgtttcttaatgggtgtgaccaatcctgtttttcctatgctctgggtgaatagagcctgatggtatactactgctttgcggaattgcatacaactgtgcattacaaagttaatatggtaattatggtctggggtaaaattgagtttcagaataaaattaggaacagtaaaatccaaagaactatgtaaacaaaaaagcttttgttttgcttacaaagtatatttaaggattattctgctgaagattcagtttaagagttttccttgggagaactaagtaagaaacacaatgccaacagctggccagtaattagtgttgtgcacttcatgtcattaatcaatttctcaatagttcttaaaattagtgagattaaaaatctaaaaattttgcatttcatgctatcagaaacagtattttcttcccaaatcaaaataaaagaaatatgatcagagcttgaacacaggcttatttttaaaataaaaatatttttaacatgggtttccttattgaaaaatcagtgtattagtcataaaacaccatcattaagaataattgaacaataaagtttgctttcagatgcagttttcaaattataatctcatttcaatttataacgttctcagtcctttgttataattttcctttttcatgtaagtttaattatctgcatttatcttttttcctagtttttctaatactaatgttatttcttaaaattcagtgagatataggataaaataatgctttgagaagaatgtttaatagaaaattaaaataactttttctggc

SEQ ID NO: 322123 - DNA, 3152 bp, Homo sapiens
  misc_feature (2659)..(2659): n is a, c, g, or t
  misc_feature (2677)..(2677): n is a, c, g, or t
  misc_feature (2693)..(2693): n is a, c, g, or t
  misc_feature (2704)..(2704): n is a, c, g, or t
  misc_feature (2708)..(2708): n is a, c, g, or t
agcggacgcgcctgtgttgccgcccgcggccctggcttcgggcttcagggagctctggtgcagtctccgcctgtcagtgccggcagtcgtccgcggcgcccgccccggtcccgcactggtgcagccatgtcctcttccccgtgggagcctgcgaccctgcgccgggtgttcgtggtgggggttggcatgaccaagtttgtgaagcctggagctgagaattcaagagactaccctgacttggcagaagaagcaggcaagaaggctttagctgatgcacagatcccttattcagcagtggaccaggcatgtgttggctatgtttttggtgactctacctgtgggcagagggctatctatcacagtttgggaatgactggaattcctataatcaatgtcaacaataactgtgctactggttctactgctttgtttatggcccgccagctgattcagggtggtgtggcagaatgtgtcttggctcttgggtttgagaagatgagtaagggaagccttggaataaaattttcagatagaaccattcccactgataagcatgttgacctcctgatcaataagtatggattgtctgctcacccagttgctcctcagatgtttgggtatgctggaaaagaacatatggaaaaatatggaacaaaaattgaacactttgcaaaaattggatggaaaaatcataaacattcagttaataacccgtattcccagttccaagatgaatacagtttagatgaagtgatggcatctaaagaagtttttgattttttgactatcttacaatgttgtcccacttcagatggtgctgcagcagcaattttggccagtgaagcatttgtacagaagtatggcctgcaatccaaagctgtggaaattttggcacaagaaatgatgactgatttgccaagctcgtttgaagaaaaaagcattattaaaatggttggctttgatatgagtaaagaagctgcaagaaaatgctatgagaaatctggcctgacaccaaatgatattgacgtaatagaacttcacgattgcttttctaccaacgaactccttacttatgaagcactgggactctgtccagaaggacaaggtgcaacgctggttgatagaggagataatacatatggaggaaagtgggtcataaatcctagtggtggactgatttcaaagggacacccactaggcgctacaggtcttgctcagtgtgcagaactctgctggcagctgagaggggaagccggaaagaggcaagttcctggtgcaaaggtggctctgcagcataatttaggcattggaggagctgtggttgtaacactctacaagatgggttttccggaagccgccagttcttttagaactcatcaaattgaagctgttccaaccagctctgcaagtgatggatttaaggcaaatcttgtttttaaggagattgagaagaaacttgaagaggaaggggaacagtttgtgaagaaaatcggtggtatttttgccttcaaggtgaaagatggccctgggggtaaagaggccacctgggtggtggatgtgaagaatggcaaaggatcagtgcttcctaactcagataagaaggctgactgcacaatcacaatggctgactcagacttcctggctttaatgactggtaaaatgaatcctcagtcggccttctttcaaggcaaattgaaaatcactggcaacatgggtctcgctatgaagttacaaaatcttcagcttcagccaggcaacgctaagctctgaagaactccctttggctacttttactgaaactacacattggcaaatagcgtgggatagatttgtttcttaatgggtgtgaccaatcctgtttttcctatgctctgggtgaatagagcctgatggtatactactgctttgcggaattgcatacaactgtgcattacaaagttaatatggtaattatggtctggggtaaaattgagtttcagaataaaattaggaacagtaaaatccaaagaactatgtaaacaaaaaagcttttgttttgcttacaaagtatatttaaggattattctgctgaagattcagtttaagagttttccttgggagaactaagtaagaaacacaatgccaacagctggccagtaattagtgttgtgcacttcatgtcattaatcaatttctcaatagttcttaaaattagtgagattaaaaatctaaaaattttgcatttcatgctatcagaaacagtattttcttcccaaatcaaaataaaagaaatatgatcagagcttgaacacaggcttatttttaaaataaaaatatttttaacatgggtttccttattgaaaaatcagtgtattagtcataaaacaccatcattaagaataattgaacaataaagtttgctttcagatgcagttttcaaattataatctcatttcaatttataacgttctcagtcctttgttataattttcctttttcatgtaagtttaattatctgcatttatcttttttcctagtttttctaatactaatgttatttcttaaaattcagtgagatataggataaaataatgctttgagaagaatgtttaatagaaaattaaaataactttttctggcaaaaaaaaaaaaaaaaaaaaaaaaaaaaaaaaaaaaaaanaaaaaaaaaaaaaaaaanaaaaaaaaaaaaaaanaaaaaaaaaanaaanaaacccctgggggggccccgagccccctaggcccttttggggggcgtattacaataaatgggcggccgttttacaacaccgggcctgcgaaaaccccgggggaaccccccaaaaatagctggttgcacaacccccttttttcggcgggggtaatattcaaaaggccccccccaatgggcgttttcaccaatagtgcacccttatgggcgattggcgaattttaggcggcaatattttgttgaaaaccgccccaaaatttttgaaaacccactccatcttttacccaaaagggcgaatatttgtgaaatccctttttatatcataaaaatcccccgcgaaaggctggagggttgtcccaatttttgacacgaagttccctctttatgaaacggggtctccttacttctaaaggcggaaaaggtttttttgggcccaggaggccct

SEQ ID NO: 322124 - DNA, 2616 bp, Homo sapiens
agcggacgcgcctgtgttgccgcccgcggccctggcttcgggcttcagggagctctggtgcagtctccgcctgtcagtgccggcagtcgtccgcggcgcccgccccggtcccgcactggtgcagccatgtcctcttccccgtgggagcctgcgaccctgcgccgggtgttcgtggtgggggttggcatgaccaagtttgtgaagcctggagctgagaattcaagagactaccctgacttggcagaagaagcaggcaagaaggctttagctgatgcacagatcccttattcagcagtggaccaggcatgtgttggctatgtttttggtgactctacctgtgggcagagggctatctatcacagtttgggaatgactggaattcctataatcaatgtcaacaataactgtgctactggttctactgctttgtttatggcccgccagctgattcagggtggtgtggcagaatgtgtcttggctcttgggtttgagaagatgagtaagggaagccttggaataaaattttcagatagaaccattcccactgataagcatgttgacctcctgatcaataagtatggattgtctgctcacccagttgctcctcagatgtttgggtatgctggaaaagaacatatggaaaaatatggaacaaaaattgaacactttgcaaaaattggatggaaaaatcataaacattcagttaataacccgtattcccagttccaagatgaatacagtttagatgaagtgatggcatctaaagaagtttttgattttttgactatcttacaatgttgtcccacttcagatggtgctgcagcagcaattttggccagtgaagcatttgtacagaagtatggcctgcaatccaaagctgtggaaattttggcacaagaaatgatgactgatttgccaagctcgtttgaagaaaaaagcattattaaaatggttggctttgatatgagtaaagaagctgcaagaaaatgctatgagaaatctggcctgacaccaaatgatattgacgtaatagaacttcacgattgcttttctaccaacgaactccttacttatgaagcactgggactctgtccagaaggacaaggtgcaacgctggttgatagaggagataatacatatggaggaaagtgggtcataaatcctagtggtggactgatttcaaagggacacccactaggcgctacaggtcttgctcagtgtgcagaactctgctggcagctgagaggggaagccggaaagaggcaagttcctggtgcaaaggtggctctgcagcataatttaggcattggaggagctgtggttgtaacactctacaagatgggttttccggaagccgccagttcttttagaactcatcaaattgaagctgttccaaccagctctgcaagtgatggatttaaggcaaatcttgtttttaaggagattgagaagaaacttgaagaggaaggggaacagtttgtgaagaaaatcggtggtatttttgccttcaaggtgaaagatggccctgggggtaaagaggccacctgggtggtggatgtgaagaatggcaaaggatcagtgcttcctaactcagataagaaggctgactgcacaatcacaatggctgactcagacttcctggctttaatgactggtaaaatgaatcctcagtcggccttctttcaaggcaaattgaaaatcactggcaacatgggtctcgctatgaagttacgaaaatcaagatgagatatatagatatatatccatacattttattgtcagaatttagactgaaactacacattggcaaatagcgtgggatagatttgtttcttaatgggtgtgaccaatcctgtttttcctatgctctgggtgaatagagcctgatggtatactactgctttgcggaattgcatacaactgtgcattacaaagttaatatggtaattatggtctggggtaaaattgagtttcagaataaaattaggaacagtaaaatccaaagaactatgtaaacaaaaaagcttttgttttgcttacaaagtatatttaaggattattctgctgaagattcagtttaagagttttccttgggagaactaagtaagaaacacaatgccaacagctggccagtaattagtgttgtgcacttcatgtcattaatcaatttctcaatagttcttaaaattagtgagattaaaaatctaaaaattttgcatttcatgctatcagaaacagtattttcttcccaaatcaaaataaaagaaatatgatcagagcttgaacacaggcttatttttaaaataaaaatatttttaacatgggtttccttattgaaaaatcagtgtattagtcataaaacaccatcattaagaataattgaacaataaagtttgctttcagatgcagttttcaaattataatctcatttcaatttataacgttctcagtcctttgttataattttcctttttcatgtaagtttaattatctgcatttatcttttttcctagtttttctaatactaatgttatttcttaaaattcagtgagatataggataaaataatgctttgagaagaatgtttaatagaaaattaaaataactttttctggc

SEQ ID NO: 322125 - DNA, 1715 bp, Homo sapiens
agcggacgcgcctgtgttgccgcccgcggccctggcttcgggcttcagggagctctggtgcagtctccgcctgtcagtgccggcagtcgtccgcggcgcccgccccggtcccgcactggtgcagccatgtcctcttccccgtgggagcctgcgaccctgcgccgggtgttcgtggtgggggttggcatgaccaagtttgtgaagcctggagctgagaattcaagagactaccctgacttggcagaagaagcaggcaagaaggctttagctgatgcacagatcccttattcagcagtggaccaggcatgtgttggctatgtttttggtgactctacctgtgggcagagggctatctatcacagtttgggaatgactggaattcctataatcaatgtcaacaataactgtgctactggttctactgctttgtttatggcccgccagctgattcagggtggtgtggcagaatgtgtcttggctcttgggtttgagaagatgagtaagggaagccttggaataaaattttcagatagaaccattcccactgataagcatgttgacctcctgatcaataagtatggattgtctgctcacccagttgctcctcagatgtttgggtatgctggaaaagaacatatggaaaaatatggaacaaaaattgaacactttgcaaaaattggatggaaaaatcataaacattcagttaataacccgtattcccagttccaagatgaatacagtttagatgaagtgatggcatctaaagaagtttttgattttttgactatcttacaatgttgtcccacttcagatggtgctgcagcagcaattttggccagtgaagcatttgtacagaagtatggcctgcaatccaaagctgtggaaattttggcacaagaaatgatgactgatttgccaagctcgtttgaagaaaaaagcattattaaaatggttggctttgatatgagtaaagaagctgcaagaaaatgctatgagaaatctggcctgacaccaaatgatattgacgtaatagaacttcacgattgcttttctaccaacgaactccttacttatgaagcactgggactctgtccagaaggacaaggtgcaacgctggttgatagaggagataatacatatggaggaaagtgggtcataaatcctagtggtggactgatttcaaagggacacccactaggcgctacaggtcttgctcagtgtgcagaactctgctggcagctgagaggggaagccggaaagaggcaagttcctggtgcaaaggtggctctgcagcataatttaggcattggaggagctgtggttgtaacactctacaagatgggttttccggaagccgccagttcttttagaactcatcaaattgaagctgttccaaccagctctgcaagtgatggatttaaggcaaatcttgtttttaaggagattgagaagaaacttgaagaggaaggggaacagtttgtgaagaaaatcggtggtatttttgccttcaaggtgaaagatggccctgggggtaaagaggccacctgggtggtggatgtgaagaatggcaaaggatcagtgcttcctaactcagataagaaggctgactgcacaatcacaatggctgactcagacttcctggctttaatgactggtaaaatgaatcctcagtcggccttctttcaaggcttgtcactggccatgggtctcgcttg

SEQ ID NO: 322126 - DNA, 2181 bp, Homo sapiens
agcggacgcgcctgtgttgccgcccgcggccctggcttcgggcttcagggagctctggtgcagtctccgcctgtcagtgccggcagtcgtccgcggcgcccgccccggtcccgcactggtgcagccatgtcctcttccccgtgggagcctgcgaccctgcgccgggtgttcgtggtgggggttggcatgaccaagtttgtgaagcctggagctgagaattcaagagactaccctgacttggcagaagaagcaggcaagaaggctttagctgatgcacagatcccttattcagcagtggaccaggcatgtgttggctatgtttttggtgactctacctgtgggcagagggctatctatcacagtttgggaatgactggaattcctataatcaatgtcaacaataactgtgctactggttctactgctttgtttatggcccgccagctgattcagggtggtgtggcagaatgtgtcttggctcttgggtttgagaagatgagtaagggaagccttggaataaaattttcagatagaaccattcccactgataagcatgttgacctcctgatcaataagtatggattgtctgctcacccagttgctcctcagatgtttgggtatgctggaaaagaacatatggaaaaatatggaacaaaaattgaacactttgcaaaaattggatggaaaaatcataaacattcagttaataacccgtattcccagttccaagatgaatacagtttagatgaagtgatggcatctaaagaagtttttgattttttgactatcttacaatgttgtcccacttcagatggtgctgcagcagcaattttggccagtgaagcatttgtacagaagtatggcctgcaatccaaagctgtggaaattttggcacaagaaatgatgactgatttgccaagctcgtttgaagaaaaaagcattattaaaatggttggctttgatatgagtaaagaagctgcaagaaaatgctatgagaaatctggcctgacaccaaatgatattgacgtaatagaacttcacgattgcttttctaccaacgaactccttacttatgaagcactgggactctgtccagaaggacaaggtgcaacgctggttgatagaggagataatacatatggaggaaagtgggtcataaatcctagtggtggactgatttcaaagggacacccactaggcgctacaggaggacattcctgctcttgaaatttcctgataacccggacaagttcatggaaagcttgatctacattcatcctaatctttgctgatgcctccatgtatgttaccttaagttgccgtgctaactgccgtccttcttcctgtgttacctgtctttgatgatccagatctgctttattaccaattaaaatcattgggaactcatcacgatcctttactctgagaatctgtctttgaaacttatagatttcttcaaaactgcctctatctgtgactgaaaagaccaacaggaagccctcgccagtcctcatatactgttctctcatggctccaagctcttcttgtcctgctgtatccaaaatatctagccgggctgctctgtcatctatcacacactgctttgtgtaagaatcttcattggttggatcataatccgttacaaaataggactcccaacttaggaaacaaaacatttgtaatatgattgaagactcctgcatgcctcctcaataatattcccctctctcctcccccagcaccaagaggtaatcaatatcctgaaattgggtatctgtcattctcatgcatttatacaacattagtaatcatatgatagtattcctaagctatgttttggagaggacaccactgcaaatcttcagccctatactagcttttatcggtagccatcaattgcagttttaatagaaatacaaatacatcaagtgtctgttctttaatttgtaaagaaaatttgttttctagcgtgacaccctcaaggtaccgtatctgtatgtaaatgttgtgcccaatgctacacagacattattttaaaactattttctgcctttggtaaatagactaaactgttttctttattcctcaaaagaattagatcatacttcagtgttgattttgttgctaatgggacatggagatgtctggatgataataaatattcctgtggtatggtcactg

SEQ ID NO: 322127 - DNA, 1564 bp, Homo sapiens
agcgggctggacctcgtcctgccctggccccctcgccacccctcacaccgcctccctgggctggggctgggactgcgggctggcctcttgggtgggggagtcggagtctgcgccccgctccacgtgtcagccctcaggacacgtcagagcccgaggagaccccgggtcccaccccggcctccacccggcggcccgcctgccgttcctcgccacgtgtcaccatcgctcctcatccctgggacccctaggcgggatggggagaccctcctcacccagggcggcttggggtacgttttccccaccccagagaacccaggtccccgactgtcactccgcccgcagtaagacctatggcaacgtgctggtgttggacggtgtcatccagtgcacggagagagacgagttctcctaccaggagatgatcgccaacctgcctctctgcagccaccccaacccgcgaaaggtgctgatcatcgggggcggagatggaggtgtcctgcgggaggtggtgaagcacccctccgtggagtccgtggtccagtgtgagatcgacgaggatgtcatccaagtctccaagaagttcctgccaggcatggccattggctactctagctcgaagctgaccctacatgtgggtgacggttttgagttcatgaaacagaatcaggatgccttcgacgtgatcatcactgactcctcagaccccatgggccccgccgaaagtctcttcaaggagtcctattaccagctcatgaagacagccctcaaggaagatggtgtcctctgctgccagggcgagtgccagtggctgcacctggacctcatcaaggagatgcggcagttctgccagtccctgttccccgtggtggcctatgcctactgcaccatccccacctaccccagcggccagatcggcttcatgctgtgcagcaagaacccgagcacgaacttccaggagccggtgcagccgctgacacagcagcaggtggcgcagatgcagctgaagtactacaactccgacgtgcaccgcgccgcctttgtgctgcccgagtttgcccgcaaggccctgaatgatgtgagctgagcccaggcgccaccactgatgccacccaggacctcggaccttggagcctgcggggtgcctcggcccctccagccccgggccggacctcctgctggctctcgcccaccaaccaagtgttacaagccccagaatgctgcccggcctgccctgctgggcggactgtctgtgtgtctgtctctctggcgttccacctccaagcctataccagctgtgtacagcgccatctctctgccttctgttgcccctcactcaccaaacacgtgtatttatagcaaaaaaaaaaaaacaaaaaaaacaaacttttggggcgcgccggccagaaaaagttttaaaccccatcgtgtggggcggggcccagggttaggacacgggccaacgggcccaggaaccgggccgacagggtgggttccccaaaaaagccgcgggcccggggttgaacacccagggtcggggctcgggtcaccgggccagggcacccgg

SEQ ID NO: 322128 - DNA, 1059 bp, Homo sapiens
gactctcgaggactttgcaggggtggcgtggtccagtgtgagatcgacgaggatgtcatccaagtctccaagaagttcctgccaggcatggccattggctactctagctcgaagctgaccctacatgtgggtgacggttttgagttcatgaaacagaatcaggatgccttcgacgtgatcatcactgactcctcagaccccatgggccccgccgaaagtctcttcaaggagtcctattaccagctcatgaagacagccctcaaggaagatggtgtcctctgctgccagggcgagtgccagtggctgcacctggacctcatcaaggagatgcggcagttctgccagtccctgttccccgtggtggcctatgcctactgcaccatccccacctaccccagcggccagatcggcttcatgctgtgcagcaagaacccgagcacgaacttccaggagccggtgcagccgctgacacagcagcaggtggcgcagatgcagctgaagtactacaactccgacgtgcaccgcgccgcctttgtgctgcccgagtttgcccgcaaggccctgaatgatgtgagctgagcccaggcgccaccactgatgccacccaggacctcggaccttggagcctgcggggtgcctcggcccctccagccccgggccggacctcctgctggctctcgcccaccaaccaagtgttacaagccccagaatgctgcccggcctgccctgctgggcggactgtctgtgtgtctgtctctctggcgttccacctccaagcctataccagctgtgtacagcgccatctctctgccttctgttgcccctcactcaccaaacacgtgtatttatagcaaaaaaaaaaaaacaaaaaaaacaaacttttggggcgcgccggccagaaaaagttttaaaccccatcgtgtggggcggggcccagggttaggacacgggccaacgggcccaggaaccgggccgacagggtgggttccccaaaaaagccgcgggcccggggttgaacacccagggtcggggctcgggtcaccgggccagggcacccgg

SEQ ID NO: 322129 - DNA, 1325 bp, Homo sapiens
cggcggagctggtcccgttgtgctgcggcgccgcgcggcctgcagtcccgggcccgcgccccgcgccgcccgcccgcccgccatggagcccggccccgacggccccgccgcctccggccccgccgccatccgcgagggctggttccgcgagacctgcagcctgtggcccggccaggccctgtcgctgcaggtggagcagctgctccaccaccggcgctcgcgctaccaggacatcctcgtcttccgcagtaagacctatggcaacgtgctggtgttggacggtgtcatccagtgcacggagagagacgagttctcctaccaggagatgatcgccaacctgcctctctgcagccaccccaacccgcgaaaggtgctgatcatcgggggcggagatggaggtgtcctgcgggaggtggtgaagcacccctccgtggagtccgtggtccagtgtgagatcgacgaggatgtcatccaagtctccaagaagttcctgccaggcatggccattggctactctagctcgaagctgaccctacatgtgggtgacggttttgagttcatgaaacagaatcaggatgccttcgacgtgatcatcactgactcctcagaccccatgggccccgccgaaagtctcttcaaggagtcctattaccagctcatgaagacagccctcaaggaagatggtgtcctctgctgccaggagcacgaacttccaggagccggtgcagccgctgacacagcagcaggtggcgcagatgcagctgaagtactacaactccgacgtgcaccgcgccgcctttgtgctgcccgagtttgcccgcaaggccctgaatgatgtgagctgagcccaggcgccaccactgatgccacccaggacctcggaccttggagcctgcggggtgcctcggcccctccagccccgggccggacctcctgctggctctcgcccaccaaccaagtgttacaagccccagaatgctgcccggcctgccctgctgggcggactgtctgtgtgtctgtctctctggcgttccacctccaagcctataccagctgtgtacagcgccatctctctgccttctgttgcccctcactcaccaaacacgtgtatttatagcaaaaaaaaaaaaacaaaaaaaacaaacttttggggcgcgccggccagaaaaagttttaaaccccatcgtgtggggcggggcccagggttaggacacgggccaacgggcccaggaaccgggccgacagggtgggttccccaaaaaagccgcgggcccggggttgaacacccagggtcggggctcgggtcaccgggccagggcacccgg

SEQ ID NO: 322130 - DNA, 701 bp, Homo sapiens
gcggccgcctactactactactgctcgaattcaagcttctaacgatgtacggggacatgctgtgcagcaagaacccgagcacgaacttccaggagccggtgcagccgctgacacagcagcaggtggcgcagatgcagctgaagtactacaactccgacgtgcaccgcgccgcctttgtgctgcccgagtttgcccgcaaggccctgaatgatgtgagctgagcccaggcgccaccactgatgccacccaggacctcggaccttggagcctgcggggtgcctcggcccctccagccccgggccggacctcctgctggctctcgcccaccaaccaagtgttacaagccccagaatgctgcccggcctgccctgctgggcggactgtctgtgtgtctgtctctctggcgttccacctccaagcctataccagctgtgtacagcgccatctctctgccttctgttgcccctcactcaccaaacacgtgtatttatagcaaaaaaaaaaaaacaaaaaaaacaaacttttggggcgcgccggccagaaaaagttttaaaccccatcgtgtggggcggggcccagggttaggacacgggccaacgggcccaggaaccgggccgacagggtgggttccccaaaaaagccgcgggcccggggttgaacacccagggtcggggctcgggtcaccgggccagggcacccgg

SEQ ID NO: 322131 - DNA, 1471 bp, Homo sapiens
cggcggagctggtcccgttgtgctgcggcgccgcgcggcctgcagtcccgggcccgcgccccgcgccgcccgcccgcccgccatggagcccggccccgacggccccgccgcctccggccccgccgccatccgcgagggctggttccgcgagacctgcagcctgtggcccggccaggccctgtcgctgcaggtggagcagctgctccaccaccggcgctcgcgctaccaggacatcctcgtcttccgcagtaagacctatggcaacgtgctggtgttggacggtgtcatccagtgcacggagagagacgagttctcctaccaggagatgatcgccaacctgcctctctgcagccaccccaacccgcgaaaggtgctgatcatcgggggcggagatggaggtgtcctgcgggaggtggtgaagcacccctccgtggagtccgtggtccagtgtgagatcgacgaggatgtcatccaagtctccaagaagttcctgccaggcatggccattggctactctagctcgaagctgaccctacatgtgggtgacggttttgagttcatgaaacagaatcaggatgccttcgacgtgatcatcactgactcctcagaccccatgggccccgccgaaagtctcttcaaggagtcctattaccagctcatgaagacagccctcaaggaagatggtgtcctctgctgccagggcgagtgccagtggctgcacctggacctcatcaaggagatgcggcagttctgccagtccctgttccccgtggtggcctatgcctactgcaccatccccacctaccccagcggccagatcggcttcatgctgtgcagcaagaacccgagcacgaacttccaggagccggtgcagccgctgacacagcagcaggtggcgcagatgcagctgaagtactacaactccgacgtgcaccgcgccgcctttgtgctgcccgagtttgcccgcaaggccctgaatgatgtgagctgagcccaggcgccaccactgatgccacccaggacctcggaccttggagcctgcggggtgcctcggcccctccagccccgggccggacctcctgctggctctcgcccaccaaccaagtgttacaagccccagaatgctgcccggcctgccctgctgggcggactgtctgtgtgtctgtctctctggcgttccacctccaagcctataccagctgtgtacagcgccatctctctgccttctgttgcccctcactcaccaaacacgtgtatttatagcaaaaaaaaaaaaacaaaaaaaacaaacttttggggcgcgccggccagaaaaagttttaaaccccatcgtgtggggcggggcccagggttaggacacgggccaacgggcccaggaaccgggccgacagggtgggttccccaaaaaagccgcgggcccggggttgaacacccagggtcggggctcgggtcaccgggccagggcacccgg

SEQ ID NO: 322132 - DNA, 1386 bp, Homo sapiens
cggcggagctggtcccgttgtgctgcggcgccgcgcggcctgcagtcccgggcccgcgccccgcgccgcccgcccgcccgccatggagcccggccccgacggccccgccgcctccggccccgccgccatccgcgagggctggttccgcgagacctgcagcctgtggcccggccaggccctgtcgctgcaggtggagcagctgctccaccaccggcgctcgcgctaccaggacatcctcgtcttccgcagtaagacctatggcaacgtgctggtgttggacggtgtcatccagtgcacggagagagacgagttctcctaccaggagatgatcgccaacctgcctctctgcagccaccccaacccgcgaaaggtgctgatcatcgggggcggagatggaggtgtcctgcgggaggtggtgaagcacccctccgtggagtccgtggtccagtgtgagatcgacgaggatgtcatccaagtctccaagaagttcctgccaggcatggccattggctactctagctcgaagctgaccctacatgtgggtgacggttttgagttcatgaaacagaatcaggatgccttcgacgtgatcatcactgactcctcagaccccatgggccccgccgaaagtctcttcaaggagtcctattaccagctcatgaagacagccctcaaggaagatggtgtcctctgctgccagggcgagtgccagtggctgcacctggacctcatcaaggagatgcggcagttctgccagtccctgttccccgtggtggcctatgcctactgcaccatccccacctaccccagcggccagatcggcttcatgctgtgcagcaagaacccgagcacgaacttccaggagccggtgcagccgctgacacagcagcaggtggcgcagatgcagctgaagtactacaactccgacgtgcaccgcgccgcctttgtgctgcccgagtttgcccgcaaggccctgaatgatgtgagctgagcccaggcgccaccactgatgccacccaggacctcggaccttggagcctgcggggtgcctcggcccctccagccccgggccggacctcctgctggctctcgcccaccaaccaagtgttacaagccccagaatgctgcccggcctgccctgctgggcggactgtctgtgtgtctgtctctctggcgttccacctccaagcctataccagctgtgtacagcgccatctctctgccttctgttgcccctcactcaccaaacacgtgtatttatagcaaaaaaaaaaaaagaaaccggggcatatgcggggggcgaaaaaggtataagtggcatggtctaagtgtccggccacgtttgtaacggggatgcggccataggggatacagacgcacaaggag

SEQ ID NO: 322133 - DNA, 1301 bp, Homo sapiens
cggcggagctggtcccgttgtgctgcggcgccgcgcggcctgcagtcccgggcccgcgccccgcgccgcccgcccgcccgccatggagcccggccccgacggccccgccgcctccggccccgccgccatccgcgagggctggttccgcgagacctgcagcctgtggcccggccaggccctgtcgctgcaggtggagcagctgctccaccaccggcgctcgcgctaccaggacatcctcgtcttccgcagtaagacctatggcaacgtgctggtgttggacggtgtcatccagtgcacggagagagacgagttctcctaccaggagatgatcgccaacctgcctctctgcagccaccccaacccgcgaaaggtgctgatcatcgggggcggagatggaggtgtcctgcgggaggtggtgaagcacccctccgtggagtccgtggtccagtgtgagatcgacgaggatgtcatccaagtctccaagaagttcctgccaggcatggccattggctactctagctcgaagctgaccctacatgtgggtgacggttttgagttcatgaaacagaatcaggatgccttcgacgtgatcatcactgactcctcagaccccatgggccccgccgaaagtctcttcaaggagtcctattaccagctcatgaagacagccctcaaggaagatggtgtcctctgctgccaggcagccgctgacacagcagcaggtggcgcagatgcagctgaagtactacaactccgacgtgcaccgcgccgcctttgtgctgcccgagtttgcccgcaaggccctgaatgatgtgagctgagcccaggcgccaccactgatgccacccaggacctcggaccttggagcctgcggggtgcctcggcccctccagccccgggccggacctcctgctggctctcgcccaccaaccaagtgttacaagccccagaatgctgcccggcctgccctgctgggcggactgtctgtgtgtctgtctctctggcgttccacctccaagcctataccagctgtgtacagcgccatctctctgccttctgttgcccctcactcaccaaacacgtgtatttatagcaaaaaaaaaaaaacaaaaaaaacaaacttttggggcgcgccggccagaaaaagttttaaaccccatcgtgtggggcggggcccagggttaggacacgggccaacgggcccaggaaccgggccgacagggtgggttccccaaaaaagccgcgggcccggggttgaacacccagggtcggggctcgggtcaccgggccagggcacccgg

SEQ ID NO: 322134 - DNA, 1547 bp, Homo sapiens
cggcggagctggtcccgttgtgctgcggcgccgcgcggcctgcagtcccgggcccgcgccccgcgccgcccgcccgcccgccatggagcccggccccgacggccccgccgcctccggccccgccgccatccgcgagggctggttccgcgagacctgcagcctgtggcccggccaggccctgtcgctgcaggtggagcagctgctccaccaccggcgctcgcgctaccaggacatcctcgtcttccgcagtaagacctatggcaacgtgctggtgttggacggtgtcatccagtgcacggagagagacgagttctcctaccaggagatgatcgccaacctgcctctctgcagccaccccaacccgcgaaaggtgctgatcatcgggggcggagatggaggtgtcctgcgggaggtggtgaagcacccctccgtggagtccgtggtccagtgtgagatcgacgaggatgtcatccaagtctccaagaagttcctgccaggcatggccattggctactctagctcgaagctgaccctacatgtgggtgacggttttgagttcatgaaacagaatcaggatgccttcgacgtgatcatcactgactcctcagaccccatgggccccgccgaaagtctcttcaaggagtcctattaccagctcatgaagacagccctcaaggaagatggtgtcctctgctgccagggcgagtgccagtggctgcacctggacctcatcaaggagatgcggcagttctgccagtccctgttccccgtggtggcctatgcctactgcaccatccccacctaccccagcggccagatcggcttcatgctgtgcagcaagaacccgagcacgaacttccaggagccggtgcagccgctgacacagcagcaggtggcgcagatgcagctgaagtactacaactccgacgtgcaccgcgccgcctttgtgctgcccgagtttgcccgcaaggtgggtggcctgcggggctgggtggtgggacccagggacccagagcgccctcctgactggcctcatgtccctccaggccctgaatgatgtgagctgagcccaggcgccaccactgatgccacccaggacctcggaccttggagcctgcggggtgcctcggcccctccagccccgggccggacctcctgctggctctcgcccaccaaccaagtgttacaagccccagaatgctgcccggcctgccctgctgggcggactgtctgtgtgtctgtctctctggcgttccacctccaagcctataccagctgtgtacagcgccatctctctgccttctgttgcccctcactcaccaaacacgtgtatttatagcaaaaaaaaaaaaacaaaaaaaacaaacttttggggcgcgccggccagaaaaagttttaaaccccatcgtgtggggcggggcccagggttaggacacgggccaacgggcccaggaaccgggccgacagggtgggttccccaaaaaagccgcgggcccggggttgaacacccagggtcggggctcgggtcaccgggccagggcacccgg

SEQ ID NO: 322135 - DNA, 1197 bp, Homo sapiens
cggcggagctggtcccgttgtgctgcggcgccgcgcggcctgcagtcccgggcccgcgccccgcgccgcccgcccgcccgccatggagcccggccccgacggccccgccgcctccggccccgccgccatccgcgagggctggttccgcgagacctgcagcctgtggcccggccaggccctgtcgctgcaggtggagcagctgctccaccaccggcgctcgcgctaccaggacatcctcgtcttccgcagtaagacctatggcaacgtgctggtgttggacggtgtcatccagtgcacggagagagacgagttctcctaccaggagatgatcgccaacctgcctctctgcagccaccccaacccgcgaaaggtgctgatcatcgggggcggagatggaggtgtcctgcgggaggtggtgaagcacccctccgtggagtccgtggtccagtgtgagatcgacgaggatgtcatccaagtctccaagaagttcctgccaggcatggccattggctactctagctcgaagctgaccctacatgtgggtgacggttttgagttcatgaaacagaatcaggatgccttcgacgtgatcatcactgactcctcagaccccatgggccccgccgaaagtctcttcaaggagtcctattaccagctcatgaagacagccctcaaggaagatggtgtcctctgctgccagggcgagtgccagtggctgcacctggacctcatcaaggagatgcggcagttctgccagtccctgttccccgtggtggcctatgcctactgcaccatccccacctaccccagcggccagatcggcttcatgctgtgcagcaagaacccggtgagatgggggtgtctgggggtgggggttggggggaaggtgggcataaatagagatccctgcccctgccgggcgcggtggctcacacctgtaatcccagcactttgggaggctgaggcgggcagatcacaaggtcaggagatcgagaccatcttggctaacacggtgaaaccccgtctctactaaaaatacaaaaaaattagccaggcatggcagcgcgcgcctgtagtcccagctgctggggaggctgaggcaggagaatggcgtgaacccgggaggcggagcttgcagtgagccgagattgcgccactacattccagcctgggtaacagaggaagattccgactcaa

SEQ ID NO: 322136 - DNA, 510 bp, Homo sapiens
caaacagtgaaagaagagacttattgcaaagcaaaaagtacacactcaagaaaggggagttcgggcatacccgagagagaacaatgggttctggggtttcatcttgattggtttctctaaccaaggagtggaatagtcatgaaaattcctgggtaaaggtggagatttctcggaactgtggtgccatccatttttacatcacatattggtctcagaactgtcatggcactggtgggtgtgtgatttagtatgttaatgagcatataatgagggcctcggtaaaacctacatcaaatccagcaccacattgggtccagtcagtcttagccagcttggtccacaccctggtttttcagcgtcttatcagcccatagcctcaagtcatgtaaatctgctgcctagaatttgttaccctgcggccaccctgtattattcctgcctcaaatctacttgtaaatattcaaatggtctttgacttgggaattccaactttacttacttcacagtgtt

SEQ ID NO: 322137 - DNA, 698 bp, Homo sapiens
agaagatgaggatactcataacaatagattttattattaaaatatagactaatgtttcattactgtgttattcactagtgtattttttaaagcagggatatactggtcatgactactgaacataaatgaaccaaggagttcattactgagggtttaagtggaatatttttcagtctcctggagtagccttttccacttattttgttttccaaatattgcctttgtgtatatatgagttactgaagctggctatcaagggatttcagcaatcgagagtcccttcaagattgtaatcactgccatctggatctcaaagatcatccagtcgcctggttcccagcctgaccttcccattggagtcacctggggactaagttccacctgcagagcttctcatttaattggcatgggctgtgacctggacagtgggatatttttaaacctgcccagatgaatccaatatgcagcagtttgagaaccactcaactagttcaactccatgaatttaaaaataaagcaactgaagccaaaagaggttttgataacagattgaacagaagagtttgagcagcttttgataaacactaagcatggcactttataaagtttttataatccatttttgcattttctgaaaacacaggtcaccccaggctctacctgtgctgtgtttggcctgggaggggtcggcctatctg

SEQ ID NO: 322138 - DNA, 657 bp, Homo sapiens
  misc_feature (500)..(500): n is a, c, g, or t
ctttatgcacttgagcagggaagaaatccacaaggactcaccagtctcctggtctgcagagaagacagaatcaacatgagcacagcaggaaaagtaatcaaatgcaaagcagctgtgctatgggagttaaagaaacccttttccattgaggaggtggaggttgcacctcctaaggcccatgaagttcgtattaagatggtttgacactgaccttggtaggggcagtgggatagttgggcagtcctgcttgagaaccagttaaattgggttgaggagagcaccttagtatggtctgaagcccacttctttgggtgaatttagagggattccttcatcaaatcttctcatttaaatactggcccacacccatatctcaggcgtacgtcactggtgcttgatcctaagagatgattttacaggtacagcattagtatgggccaatgacaatcagcacattcactgtcaatgggatagcacctttgtacacacccttttacctnctttaagtgccaatacttcgacctaagacttgatcaggctgggtgcgggggctcatgcctcgtatcctagcacttttggaggcctaggtgggtcgaatggctgagctcagaagtttgagaccagactgggcaacattgcaaaacccccattctactt

SEQ ID NO: 322139 - DNA, 549 bp, Homo sapiens
ctttatgcacttgagcagggaagaaatccacaaggactcaccagtctcctggtctgcagagaagacagaatcaacatgagcacagcaggaaaagtaatcaaatgcaaaaaaaaaaacaaaaaaaaaaaaaaaaaaaaaaaaaaaaaaaaaaaaaaaaaaaaaaaaaaaaaaaaaaataaaaaacaaaaaaaaaaaaaaatgaaataaattatgacaacatattaaataaagaggaaaattaaaataattggtccaatattcccaatactggggcccattacaccaaagtggcagccttttaccaacgtaatgacggggaaacaactgtggtaaccaatgaaataaacgattgttaataatagcaatttgcctagcagtcaacatatcaatagagatctccctgatgaccctttaaccagttgcgtgacctattagaatcaatgcgaatgtaaaccgtgatatttgttttaaaggcccataaatattggtaaatctatgacattatttaacaaataggcccaattcattaaaaaattcttaaatttacaa

SEQ ID NO: 322140 - DNA, 3360 bp, Homo sapiens
caccattaaagaactctttaatttttagatacttttatattgcgacaaacataccatttgtattactctgtattgttttaataaacacttggtatttctacatcatctcagtaattacatgtttaagcatctgccaagaacattttcaggataatttaaaatacatcaatacatcatcaaaacacttttggaacattcagatggtttgtagtttggttctcacagagaagactggatggtacatctttgtttttggattgggcttcttaggttatttcccaactcccttcacaggaggaatgtaagcaaacattttgatctctcacacatgctcttcttggcaggattccaggctccacagccgctgcaagaccagcaagtatttccgctccctcgacatcttgggcaagttatttaacccccaaaatgaaggatttgaactgaagataatttctgcaagttacagtattctttgtcaggcccatgtaaattatggacctctgcggaaaagaagacagttggatctcttgcagggatgctggtctgtccttctccaggctttggagtcacatcttcgcactgctcatcattacctctgttgcaaacatggccatctaagatctgcgggtaggcacatctccgtctttgatctcagcctggaaaagctatgcaatatatctgctttatgcactcaagcagagaagaaatccacaaagactcacagtctgctggtgggcagagaagacagaaacgacatgagcacagcaggaaaagtaatcaaatgcaaagcagctgtgctatgggaggtaaagaaacccttttccattgaggatgtggaggttgcacctcctaaggcttatgaagttcgcattaagatggtggctgtaggaatctgtcgcacagatgaccacgtggttagtggcaacctggtgaccccccttcctgtgattttaggccatgaggcagccggcatcgtggagagtgttggagaaggggtgactacagtcaaaccaggtgataaagtcatcccgctctttactcctcagtgtggaaaatgcagagtttgtaaaaacccggagagcaactactgcttgaaaaatgatctaggcaatcctcgggggaccctgcaggatggcaccaggaggttcacctgcagggggaagcccattcaccacttccttggcaccagcaccttctcccagtacacggtggtggatgagaatgcagtggccaaaattgatgcagcctcgcccctggagaaagtctgcctcattggctgtggattctcgactggttatgggtctgcagttaacgttgccaaggtcaccccaggctctacctgtgctgtgtttggcctgggaggggtcggcctatctgctgttatgggctgtaaagcagctggagcagccagaatcattgcggtggacatcaacaaggacaaatttgcaaaggccaaagagttgggtgccactgaatgcatcaaccctcaagactacaagaaacccatccaggaagtgctaaaggaaatgactgatggaggtgtggatttttcgtttgaagtcatcggtcggcttgacaccatgatggcttccctgttatgttgtcatgaggcatgtggcacaagcgtcatcgtaggggtacctcctgcttcccagaacctctcaataaaccctatgctgctactgactggacgcacctggaagggggctgtttatggtggctttaagagtaaagaaggtatcccaaaacttgtggctgattttatggctaagaagttttcactggatgcgttaataacccatgttttaccttttgaaaaaataaatgaaggatttgacctgcttcactctgggaaaagtatccgtaccgtcctgacgttttgaggcaatagagatgccttcccctgtagcagtcttcagcctcctctaccctacaagatctggagcaacagctaggaaatatcattaattcagctcttcagagatgttatcaataaattacacatgggggctttccaaagaaatggaaattgatgggaaattatttttcaggaaaatttaaaattcaagtgagaagtaaataaagtgttgaacatcagctggggaattgaagccaacaaaccttccttcttaaccattctactgtgtcacctttgccattgaggaaaaatattcctgtgacttcttgcatttttggtatcttcataatctttagtcatcgaatcccagtggaggggacccttttacttgccctgaacatacacatgctgggccattgtgattgaagtcttctaactctgtctcagttttcactgtcgacattttcctttttctaataaaaatgtaccaaatccctggggtaaaagctagggtaaggtaaaggatagactcacatttacaagtagtgaaggtccgagagttctaaatacaggaaatttcttaggaactcaaataaaatgccccacattttactacagtaaatggcagtgtttttatgacttttatactatttctttatggtcgatatacaattgattttttaaaataatagcagatttcttgcttcatatgacaaagcctcaattactaattgtaaaaactgaactattcccagaatcatgttcaaaaaatctgtaatttttgctgatgaaagtgcttcattgactaaacagtattagtttgtggctataaatgattatttagatgatgactgaaaatgtgtataaagtaattaaaagtaatatggtggctttaagtgtagagatgggatggcaaatgctgtgaatgcagaatgtaaaattggtaactaagaaatggcacaaacaccttaagcaatatattttcctagtagatatatatatacacatacatatatacacatatacaaatgtatatttttgcaaaattgttttcaatctagaacttttctattaactaccatgtcttaaaatcaagtctataatcctagcattagtttaatattttgaatatgtaaagacctgtgttaatgctttgttaatgcttttcccactctcatttgttaatgctttcccactctcaggggaaggatttgcattttgagctttatctctaaatgtgacatgcaaagattattcctggtaaaggaggtagctgtctccaaaaatgctattgttgcaatatctacattctatttcatattatgaaagaccttagacataaagtaaaatagtttatcatttactgtgtgatcttcagtaagtctctcaggctctctgagcttgttcatcctttgttttgaaaaaattactcaaccaatccattacagcttaaccaagattaaatgggatgatgttaatgaaagagcttcgccaattaagaa

SEQ ID NO: 322141 - DNA, 3306 bp, Homo sapiens
caccattaaagaactctttaatttttagatacttttatattgcgacaaacataccatttgtattactctgtattgttttaataaacacttggtatttctacatcatctcagtaattacatgtttaagcatctgccaagaacattttcaggataatttaaaatacatcaatacatcatcaaaacacttttggaacattcagatggtttgtagtttggttctcacagagaagactggatggtacatctttgtttttggattgggcttcttaggttatttcccaactcccttcacaggaggaatgtaagcaaacattttgatctctcacacatgctcttcttggcaggattccaggctccacagccgctgcaagaccagcaagtatttccgctccctcgacatcttgggcaagttatttaacccccaaaatgaaggatttgaactgaagataatttctgcaagttacagtattctttgtcaggcccatgtaaattatggacctctgcggaaaagaagacagttggatctcttgcagggatgctggtctgtccttctccaggctttggagtcacatcttcgcactgctcatcattacctctgttgcaaacatggccatctaagatctgcgggtaggcacatctccgtctttgatctcagcctggaaaagctatgcaatatatctgctttatgcactcaagcagagaagaaatccacaaagactcacagtctgctggtgggcagagaagacagaaacgacatgagcacagcaggaaaagtaatcaaatgcaaagcagctgtgctatgggaggtaaagaaacccttttccattgaggatgtggaggttgcacctcctaaggcttatgaagttcgcattaagatggtggctgtaggaatctgtcgcacagatgaccacgtggttagtggcaacctggtgaccccccttcctgtgattttaggccatgaggcagccggcatcgtggagagtgttggagaaggggtgactacagtcaaaccaggtgataaagtcatcccgctctttactcctcagtgtggaaaatgcagagtttgtaaaaacccggagagcaactactgcttgaaaaatgatctaggcaatcctcgggggaccctgcaggatggcaccaggaggttcacctgcagggggaagcccattcaccacttccttggcaccagcaccttctcccagtacacggtggtggatgagaatgcagtggccaaaattgatgcagcctcgcccctggagaaagtctgcctcattggctgtggattctcgactggttatgggtctgcagttaacgttgccaaggtcaccccaggctctacctgtgctgtgtttggcctgggaggggtcggcctatctgctgttatgggctgtaaagcagctggagcagccagaatcattgcggtggacatcaacaaggacaaatttgcaaaggccaaagagttgggtgccactgaatgcatcaaccctcaagactacaagaaacccatccaggaagtgctaaaggaaatgactgatggaggtgtggatttttcgtttgaagtcatcggtcggcttgacaccatgatggcttccctgttatgttgtcatgaggcatgtggcacaagcgtcatcgtaggggtacctcctgcttcccagaacctctcaataaaccctatgctgctactgactggacgcacctggaagggggctgtttatggtggctttaagagtaaagaaggtatcccaaaacttgtggctgattttatggctaagaagttttcactggatgcgttaataacccatgttttaccttttgaaaaaataaatgaaggatttgacctgcttcactctgggaaaagtatccgtaccgtcctgacgttttgaggcaatagagatgccttcccctgtagcagtcttcagcctcctctaccctacaagatctggagcaacagctaggaaatatcattaattcagctcttcagagatgttatcaataaattacacatgggggctttccaaagaaatggaaattgatgggaaattatttttcaggaaaatttaaaattcaagtgagaagtaaataaagtgttgaacatcagctggggaattgaagccaacaaaccttccttcttaaccattctactgtgtcacctttgccattgaggaaaaatattcctgtgacttcttgcatttttggtatcttcataatctttagtcatcgaatcccagtggaggggacccttttacttgccctgaacatacacatgctgggccattgtgattgaagtcttctaactctgtctcagttttcactgtcgacattttcctttttctaataaaaatgtaccaaatccctggggtaaaagctagggtaaggtaaaggatagactcacatttacaagtagtgaaggtccgagagttctaaatacaggaaatttcttaggaactcaaataaaatgccccacattttactacagtaaatggcagtgtttttatgacttttatactatttctttatggtcgatatacaattgattttttaaaataatagcagatttcttgcttcatatgacaaagcctcaattactaattgtaaaaactgaactattcccagaatcatgttcaaaaaatctgtaatttttgctgatgaaagtgcttcattgactaaacagtattagtttgtggctataaatgattatttagatgatgactgaaaatgtgtataaagtaattaaaaatgtaaaattggtaactaagaaatggcacaaacaccttaagcaatatattttcctagtagatatatatatacacatacatatatacacatatacaaatgtatatttttgcaaaattgttttcaatctagaacttttctattaactaccatgtcttaaaatcaagtctataatcctagcattagtttaatattttgaatatgtaaagacctgtgttaatgctttgttaatgcttttcccactctcatttgttaatgctttcccactctcaggggaaggatttgcattttgagctttatctctaaatgtgacatgcaaagattattcctggtaaaggaggtagctgtctccaaaaatgctattgttgcaatatctacattctatttcatattatgaaagaccttagacataaagtaaaatagtttatcatttactgtgtgatcttcagtaagtctctcaggctctctgagcttgttcatcctttgttttgaaaaaattactcaaccaatccattacagcttaaccaagattaaatgggatgatgttaatgaaagagcttcgccaattaagaa

SEQ ID NO: 322142 - DNA, 3158 bp, Homo sapiens
caccattaaagaactctttaatttttagatacttttatattgcgacaaacataccatttgtattactctgtattgttttaataaacacttggtatttctacatcatctcagtaattacatgtttaagcatctgccaagaacattttcaggataatttaaaatacatcaatacatcatcaaaacacttttggaacattcagatggtttgtagtttggttctcacagagaagactggatggtacatctttgtttttggattgggcttcttaggttatttcccaactcccttcacaggaggaatgtaagcaaacattttgatctctcacacatgctcttcttggcaggattccaggctccacagccgctgcaagaccagcaagtatttccgctccctcgacatcttgggcaagttatttaacccccaaaatgaaggatttgaactgaagataatttctgcaagttacagtattctttgtcaggcccatgtaaattatggacctctgcggaaaagaagacagttggatctcttgcagggatgctggtctgtccttctccaggctttggagtcacatcttcgcactgctcatcattacctctgttgcaaacatggccatctaagatctgcgggtaggcacatctccgtctttgatctcagcctggaaaagctatgcaatatatctgctttatgcactcaagcagagaagaaatccacaaagactcacagtctgctggtgggcagagaagacagaaacgacatgagcacagcaggaaaagtaatcaaatgcaaagcagctgtgctatgggaggtaaagaaacccttttccattgaggatgtggaggttgcacctcctaaggcttatgaagttcgcattaagatggtggctgtaggaatctgtcgcacagatgaccacgtggttagtggcaacctggtgaccccccttcctgtgattttaggccatgaggcagccggcatcgtggagagtgttggagaaggggtgactacagtcaaaccaggtgataaagtcatcccgctctttactcctcagtgtggaaaatgcagagtttgtaaaaacccggagagcaactactgcttgaaaaatgatctaggcaatcctcgggggaccctgcaggatggcaccaggaggttcacctgcagggggaagcccattcaccacttccttggcaccagcaccttctcccagtacacggtggtggatgagaatgcagtggccaaaattgatgcagcctcgcccctggagaaagtctgcctcattggctgtggattctcgactggttatgggtctgcagttaacgttgccaaggtcaccccaggctctacctgtgctgtgtttggcctgggaggggtcggcctatctgctgttatgggctgtaaagcagctggagcagccagaatcattgcggtggacatcaacaaggacaaatttgcaaaggccaaagagttgggtgccactgaatgcatcaaccctcaagactacaagaaacccatccaggaagtgctaaaggaaatgactgatggaggtgtggatttttcgtttgaagtcatcggtcggcttgacaccatgatggcttccctgttatgttgtcatgaggcatgtggcacaagcgtcatcgtaggggtacctcctgcttcccagaacctctcaataaaccctatgctgctactgactggacgcacctggaagggggctgtttatggtggctttaagagtaaagaaggtatcccaaaacttgtggctgattttatggctaagaagttttcactggatgcgttaataacccatgttttaccttttgaaaaaataaatgaaggatttgacctgcttcactctgggaaaagtatccgtaccgtcctgacgttttgaggcaatagagatgccttcccctgtagcagtcttcagcctcctctaccctacaagatctggagcaacagctaggaaatatcattaattcagctcttcagagatgttatcaataaattacacatgggggctttccaaagaaatggaaattgatgggaaattatttttcaggaaaatttaaaattcaagtgagaagtaaataaagtgttgaacatcagctggggaattgaagccaacaaaccttccttcttaaccattctactgtgtcacctttgccattgaggaaaaatattcctgtgacttcttgcatttttggtatcttcataatctttagtcatcgaatcccagtggaggggacccttttacttgccctgaacatacacatgctgggccattgtgattgaagtcttctaactctgtctcagttttcactgtcgacattttcctttttctaataaaaatgtaccaaatccctggggtaaaagaatacaggaaatttcttaggaactcaaataaaatgccccacattttactacagtaaatggcagtgtttttatgacttttatactatttctttatggtcgatatacaattgattttttaaaataatagcagatttcttgcttcatatgacaaagcctcaattactaattgtaaaaactgaactattcccagaatcatgttcaaaaaatctgtaatttttgctgatgaaagtgcttcattgactaaacagtattagtttgtggctataaatgattatttagatgatgactgaaaatgtgtataaagtaattaaaagtaatatggtggctttaagtgtagagatgggatggcaaatgctgtgaatgcagaatgtaaaattggtaactaagaaatggcacaaacaccttaagcaatatattttcctagtagatatatatatacacatacatatatacacatatacaaatgtatatttttgcaaaattgttttcaatctagaacttttctattaactaccatgtcttaaaatcaagtctataatcctagcattagtttaatattttgaatatgtaaagacctgtgttaatgctttgttaatgcttttcccactctcatttgttaatgctttcccactctcaggggaaggatttgcattttgagctttatctctaaatgtgacatgcaaagattattcctggtaaaggaggtagctgtctccaaaaatgctattgttgcaatatctacattctatttcatattatgaaagaccttagacataaagtaaaatagtttatc

SEQ ID NO: 322143 - DNA, 2475 bp, Homo sapiens
caccattaaagaactctttaatttttagatacttttatattgcgacaaacataccatttgtattactctgtattgttttaataaacacttggtatttctacatcatctcagtaattacatgtttaagcatctgccaagaacattttcaggataatttaaaatacatcaatacatcatcaaaacacttttggaacattcagatggtttgtagtttggttctcacagagaagactggatggtacatctttgtttttggattgggcttcttaggttatttcccaactcccttcacaggaggaatgtaagcaaacattttgatctctcacacatgctcttcttggcaggattccaggctccacagccgctgcaagaccagcaagtatttccgctccctcgacatcttgggcaagttatttaacccccaaaatgaaggatttgaactgaagataatttctgcaagttacagtattctttgtcaggcccatgtaaattatggacctctgcggaaaagaagacagttggatctcttgcagggatgctggtctgtccttctccaggctttggagtcacatcttcgcactgctcatcattacctctgttgcaaacatggccatctaagatctgcgggtaggcacatctccgtctttgatctcagcctggaaaagctatgcaatatatctgctttatgcactcaagcagagaagaaatccacaaagactcacagtctgctggtgggcagagaagacagaaacgacatgagcacagcaggaaaagtaatcaaatgcaaagcagctgtgctatgggaggtaaagaaacccttttccattgaggatgtggaggttgcacctcctaaggcttatgaagttcgcattaagatggtggctgtaggaatctgtcgcacagatgaccacgtggttagtggcaacctggtgaccccccttcctgtgattttaggccatgaggcagccggcatcgtggagagtgttggagaaggggtgactacagtcaaaccaggtgataaagtcatcccgctctttactcctcagtgtggaaaatgcagagtttgtaaaaacccggagagcaactactgcttgaaaaatgatctaggcaatcctcgggggaccctgcaggatggcaccaggaggttcacctgcagggggaagcccattcaccacttccttggcaccagcaccttctcccagtacacggtggtggatgagaatgcagtggccaaaattgatgcagcctcgcccctggagaaagtctgcctcattggctgtggattctcgactggttatgggtctgcagttaacgttgccaaggtcaccccaggctctacctgtgctgtgtttggcctgggaggggtcggcctatctgctgttatgggctgtaaagcagctggagcagccagaatcattgcggtggacatcaacaaggacaaatttgcaaaggccaaagagttgggtgccactgaatgcatcaaccctcaagactacaagaaacccatccaggaagtgctaaaggaaatgactgatggaggtgtggatttttcgtttgaagtcatcggtcggcttgacaccatgatggcttccctgttatgttgtcatgaggcatgtggcacaagcgtcatcgtaggggtacctcctgcttcccagaacctctcaataaaccctatgctgctactgactggacgcacctggaagggggctgtttatggtggctttaagagtaaagaaggtatcccaaaacttgtggctgattttatggctaagaagttttcactggatgcgttaataacccatgttttaccttttgaaaaaataaatgaaggatttgacctgcttcactctgggaaaagtatccgtaccgtcctgacgttttgaggcaatagagatgccttcccctgtagcagtcttcagcctcctctaccctacaagatctggagcaacagctaggaaatatcattaattcagctcttcagagatgttatcaataaattacacatgggggctttccaaagaaatggaaattgatgggaaattatttttcaggaaaatttaaaattcaagtgagaagtaaataaagtgttgaacatcagctggggaattgaagccaacaaaccttccttcttaaccattctactgtgtcacctttgccattgaggaaaaatattcctgtgacttcttgcatttttggtatcttcataatctttagtcatcgaatcccagtggaggggacccttttacttgccctgaacatacacatgctgggccattgtgattgaagtcttctaactctgtctcagttttcactgtcgacattttcctttttctaataaaaatgtaccaaatccctggggtaaaagctagggtaaggtaaaggatagactcacatttacaagtagtgaaggtccgagagttctaaatacaggaaatttcttaggaactcaaataaaatgccccacattttactaca

SEQ ID NO: 322144 - DNA, 3168 bp, Homo sapiens
caccattaaagaactctttaatttttagatacttttatattgcgacaaacataccatttgtattactctgtattgttttaataaacacttggtatttctacatcatctcagtaattacatgtttaagcatctgccaagaacattttcaggataatttaaaatacatcaatacatcatcaaaacacttttggaacattcagatggtttgtagtttggttctcacagagaagactggatggtacatctttgtttttggattgggcttcttaggttatttcccaactcccttcacaggaggaatgtaagcaaacattttgatctctcacacatgctcttcttggcaggattccaggctccacagccgctgcaagaccagcaagtatttccgctccctcgacatcttgggcaagttatttaacccccaaaatgaaggatttgaactgaagataatttctgcaagttacagtattctttgtcaggcccatgtaaattatggacctctgcggaaaagaagacagttggatctcttgcagggatgctggtctgtccttctccaggctttggagtcacatcttcgcactgctcatcattacctctgttgcaaacatggccatctaagatctgcgggtaggcacatctccgtctttgatctcagcctggaaaagctatgcaatatatctgctttatgcactcaagcagagaagaaatccacaaagactcacagtctgctggtgggcagagaagacagaaacgacatgagcacagcaggaaaagtaatcaaatgcaaagcagctgtgctatgggaggtaaagaaacccttttccattgaggatgtggaggttgcacctcctaaggcttatgaagttcgcattaagatggtggctgtaggaatctgtcgcacagatgaccacgtggttagtggcaacctggtgaccccccttcctgtgattttaggccatgaggcagccggcatcgtggagagtgttggagaaggggtgactacagtcaaaccaggtgataaagtcatcccgctctttactcctcagtgtggaaaatgcagagtttgtaaaaacccggagagcaactactgcttgaaaaatgatctaggcaatcctcgggggaccctgcaggatggcaccaggaggttcacctgcagggggaagcccattcaccacttccttggcaccagcaccttctcccagtacacggtggtggatgagaatgcagtggccaaaattgatgcagcctcgcccctggagaaagtctgcctcattggctgtggattctcgactggttatgggtctgcagttaacgttgccaaggtcaccccaggctctacctgtgctgtgtttggcctgggaggggtcggcctatctgctgttatgggctgtaaagcagctggagcagccagaatcattgcggtggacatcaacaaggacaaatttgcaaaggccaaagagttgggtgccactgaatgcatcaaccctcaagactacaagaaacccatccaggaagtgctaaaggaaatgactgatggaggtgtggatttttcgtttgaagtcatcggtcggcttgacaccatgatggcttccctgttatgttgtcatgaggcatgtggcacaagcgtcatcgtaggggtacctcctgcttcccagaacctctcaataaaccctatgctgctactgactggacgcacctggaagggggctgtttatggtggctttaagagtaaagaaggtatcccaaaacttgtggctgattttatggctaagaagttttcactggatgcgttaataacccatgttttaccttttgaaaaaataaatgagttttgaggcaatagagatgccttcccctgtagcagtcttcagcctcctctaccctacaagatctggagcaacagctaggaaatatcattaattcagctcttcagagatgttatcaataaattacacatgggggctttccaaagaaatggaaattgatgggaaattatttttcaggaaaatttaaaattcaagtgagaagtaaataaagtgttgaacatcagctggggaattgaagccaacaaaccttccttcttaaccattctactgtgtcacctttgccattgaggaaaaatattcctgtgacttcttgcatttttggtatcttcataatctttagtcatcgaatcccagtggaggggacccttttacttgccctgaacatacacatgctgggccattgtgattgaagtcttctaactctgtctcagttttcactgtcgacattttcctttttctaataaaaatgtaccaaatccctggggtaaaagctagggtaaggtaaaggatagactcacatttacaagtagtgaaggtccgagagttctaaatacaggaaatttcttaggaactcaaataaaatgccccacattttactacagtaaatggcagtgtttttatgacttttatactatttctttatggtcgatatacaattgattttttaaaataatagcagatttcttgcttcatatgacaaagcctcaattactaattgtaaaaactgaactattcccagaatcatgttcaaaaaatctgtaatttttgctgatgaaagtgcttcattgactaaacagtattagtttgtggctataaatgattatttagatgatgactgaaaatgtgtataaagtaattaaaagtaatatggtggctttaagtgtagagatgggatggcaaatgctgtgaatgcagaatgtaaaattggtaactaagaaatggcacaaacaccttaagcaatatattttcctagtagatatatatatacacatacatatatacacatatacaaatgtatatttttgcaaaattgttttcaatctagaacttttctattaactaccatgtcttaaaatcaagtctataatcctagcattagtttaatattttgaatatgtaaagacctgtgttaatgctttgttaatgcttttcccactctcatttgttaatgctttcccactctcaggggaaggatttgcattttgagctttatctctaaatgtgacatgcaaagattattcctggtaaaggaggtagctgtctccaaaaatgctattgttgcaatatctacattctatttcatattatgaaagaccttagacataaagtaaaatagtttatc

SEQ ID NO: 322145 - DNA, 1741 bp, Homo sapiens
ataaacttctgtactattatttctatgggagagacaaaataactaagaaccttcgtttatctgtgattttttttaagtcaagacactgtaaaagcatattgaagtactgtatctcttcttatcctcagttatagcagtctggaatggagcaccttttctaaactttgatttatttggaaaatcttctcttcaattctcctacttaccctagctgaatccaacaatgatactgtcttcttttcaggctttaagagtaaagaaggtatcccaaaacttgtggctgattttatggctaagaagttttcactggatgcgttaataacccatgttttaccttttgaaaaaataaatgaaggatttgacctgcttcactctgggaaaagtatccgtaccgtcctgacgttttgaggcaatagagatgccttcccctgtagcagtcttcagcctcctctaccctacaagatctggagcaacagctaggaaatatcattaattcagctcttcagagatgttatcaataaattacacatgggggctttccaaagaaatggaaattgatgggaaattatttttcaggaaaatttaaaattcaagtgagaagtaaataaagtgttgaacatcagctggggaattgaagccaacaaaccttccttcttaaccattctactgtgtcacctttgccattgaggaaaaatattcctgtgacttcttgcatttttggtatcttcataatctttagtcatcgaatcccagtggaggggacccttttacttgccctgaacatacacatgctgggccattgtgattgaagtcttctaactctgtctcagttttcactgtcgacattttcctttttctaataaaaatgtaccaaatccctggggtaaaagctagggtaaggtaaaggatagactcacatttacaagtagtgaaggtccgagagttctaaatacaggaaatttcttaggaactcaaataaaatgccccacattttactacagtaaatggcagtgtttttatgacttttatactatttctttatggtcgatatacaattgattttttaaaataatagcagatttcttgcttcatatgacaaagcctcaattactaattgtaaaaactgaactattcccagaatcatgttcaaaaaatctgtaatttttgctgatgaaagtgcttcattgactaaacagtattagtttgtggctataaatgattatttagatgatgactgaaaatgtgtataaagtaattaaaagtaatatggtggctttaagtgtagagatgggatggcaaatgctgtgaatgcagaatgtaaaattggtaactaagaaatggcacaaacaccttaagcaatatattttcctagtagatatatatatacacatacatatatacacatatacaaatgtatatttttgcaaaattgttttcaatctagaacttttctattaactaccatgtcttaaaatcaagtctataatcctagcattagtttaatattttgaatatgtaaagacctgtgttaatgctttgttaatgcttttcccactctcatttgttaatgctttcccactctcaggggaaggatttgcattttgagctttatctctaaatgtgacatgcaaagattattcctggtaaaggaggtagctgtctccaaaaatgctattgttgcaatatctacattctatttcatattatgaaagaccttagacataaagtaaaatagtttatc

SEQ ID NO: 322146 - DNA, 3114 bp, Homo sapiens
caccattaaagaactctttaatttttagatacttttatattgcgacaaacataccatttgtattactctgtattgttttaataaacacttggtatttctacatcatctcagtaattacatgtttaagcatctgccaagaacattttcaggataatttaaaatacatcaatacatcatcaaaacacttttggaacattcagatggtttgtagtttggttctcacagagaagactggatggtacatctttgtttttggattgggcttcttaggttatttcccaactcccttcacaggaggaatgtaagcaaacattttgatctctcacacatgctcttcttggcaggattccaggctccacagccgctgcaagaccagcaagtatttccgctccctcgacatcttgggcaagttatttaacccccaaaatgaaggatttgaactgaagataatttctgcaagttacagtattctttgtcaggcccatgtaaattatggacctctgcggaaaagaagacagttggatctcttgcagggatgctggtctgtccttctccaggctttggagtcacatcttcgcactgctcatcattacctctgttgcaaacatggccatctaagatctgcgggtaggcacatctccgtctttgatctcagcctggaaaagctatgcaatatatctgctttatgcactcaagcagagaagaaatccacaaagactcacagtctgctggtgggcagagaagacagaaacgacatgagcacagcaggaaaagtaatcaaatgcaaagcagctgtgctatgggaggtaaagaaacccttttccattgaggatgtggaggttgcacctcctaaggcttatgaagttcgcattaagatggtggctgtaggaatctgtcgcacagatgaccacgtggttagtggcaacctggtgaccccccttcctgtgattttaggccatgaggcagccggcatcgtggagagtgttggagaaggggtgactacagtcaaaccaggtgataaagtcatcccgctctttactcctcagtgtggaaaatgcagagtttgtaaaaacccggagagcaactactgcttgaaaaatgatctaggcaatcctcgggggaccctgcaggatggcaccaggaggttcacctgcagggggaagcccattcaccacttccttggcaccagcaccttctcccagtacacggtggtggatgagaatgcagtggccaaaattgatgcagcctcgcccctggagaaagtctgcctcattggctgtggattctcgactggttatgggtctgcagttaacgttgccaaggtcaccccaggctctacctgtgctgtgtttggcctgggaggggtcggcctatctgctgttatgggctgtaaagcagctggagcagccagaatcattgcggtggacatcaacaaggacaaatttgcaaaggccaaagagttgggtgccactgaatgcatcaaccctcaagactacaagaaacccatccaggaagtgctaaaggaaatgactgatggaggtgtggatttttcgtttgaagtcatcggtcggcttgacaccatgatggcttccctgttatgttgtcatgaggcatgtggcacaagcgtcatcgtaggggtacctcctgcttcccagaacctctcaataaaccctatgctgctactgactggacgcacctggaagggggctgtttatggtggctttaagagtaaagaaggtatcccaaaacttgtggctgattttatggctaagaagttttcactggatgcgttaataacccatgttttaccttttgaaaaaataaatgagttttgaggcaatagagatgccttcccctgtagcagtcttcagcctcctctaccctacaagatctggagcaacagctaggaaatatcattaattcagctcttcagagatgttatcaataaattacacatgggggctttccaaagaaatggaaattgatgggaaattatttttcaggaaaatttaaaattcaagtgagaagtaaataaagtgttgaacatcagctggggaattgaagccaacaaaccttccttcttaaccattctactgtgtcacctttgccattgaggagaatcccagtggaggggacccttttacttgccctgaacatacacatgctgggccattgtgattgaagtcttctaactctgtctcagttttcactgtcgacattttcctttttctaataaaaatgtaccaaatccctggggtaaaagctagggtaaggtaaaggatagactcacatttacaagtagtgaaggtccgagagttctaaatacaggaaatttcttaggaactcaaataaaatgccccacattttactacagtaaatggcagtgtttttatgacttttatactatttctttatggtcgatatacaattgattttttaaaataatagcagatttcttgcttcatatgacaaagcctcaattactaattgtaaaaactgaactattcccagaatcatgttcaaaaaatctgtaatttttgctgatgaaagtgcttcattgactaaacagtattagtttgtggctataaatgattatttagatgatgactgaaaatgtgtataaagtaattaaaagtaatatggtggctttaagtgtagagatgggatggcaaatgctgtgaatgcagaatgtaaaattggtaactaagaaatggcacaaacaccttaagcaatatattttcctagtagatatatatatacacatacatatatacacatatacaaatgtatatttttgcaaaattgttttcaatctagaacttttctattaactaccatgtcttaaaatcaagtctataatcctagcattagtttaatattttgaatatgtaaagacctgtgttaatgctttgttaatgcttttcccactctcatttgttaatgctttcccactctcaggggaaggatttgcattttgagctttatctctaaatgtgacatgcaaagattattcctggtaaaggaggtagctgtctccaaaaatgctattgttgcaatatctacattctatttcatattatgaaagaccttagacataaagtaaaatagtttatc

SEQ ID NO: 322147 - DNA, 1687 bp, Homo sapiens
ataaacttctgtactattatttctatgggagagacaaaataactaagaaccttcgtttatctgtgattttttttaagtcaagacactgtaaaagcatattgaagtactgtatctcttcttatcctcagttatagcagtctggaatggagcaccttttctaaactttgatttatttggaaaatcttctcttcaattctcctacttaccctagctgaatccaacaatgatactgtcttcttttcaggctttaagagtaaagaaggtatcccaaaacttgtggctgattttatggctaagaagttttcactggatgcgttaataacccatgttttaccttttgaaaaaataaatgaaggatttgacctgcttcactctgggaaaagtcttcagcctcctctaccctacaagatctggagcaacagctaggaaatatcattaattcagctcttcagagatgttatcaataaattacacatgggggctttccaaagaaatggaaattgatgggaaattatttttcaggaaaatttaaaattcaagtgagaagtaaataaagtgttgaacatcagctggggaattgaagccaacaaaccttccttcttaaccattctactgtgtcacctttgccattgaggaaaaatattcctgtgacttcttgcatttttggtatcttcataatctttagtcatcgaatcccagtggaggggacccttttacttgccctgaacatacacatgctgggccattgtgattgaagtcttctaactctgtctcagttttcactgtcgacattttcctttttctaataaaaatgtaccaaatccctggggtaaaagctagggtaaggtaaaggatagactcacatttacaagtagtgaaggtccgagagttctaaatacaggaaatttcttaggaactcaaataaaatgccccacattttactacagtaaatggcagtgtttttatgacttttatactatttctttatggtcgatatacaattgattttttaaaataatagcagatttcttgcttcatatgacaaagcctcaattactaattgtaaaaactgaactattcccagaatcatgttcaaaaaatctgtaatttttgctgatgaaagtgcttcattgactaaacagtattagtttgtggctataaatgattatttagatgatgactgaaaatgtgtataaagtaattaaaagtaatatggtggctttaagtgtagagatgggatggcaaatgctgtgaatgcagaatgtaaaattggtaactaagaaatggcacaaacaccttaagcaatatattttcctagtagatatatatatacacatacatatatacacatatacaaatgtatatttttgcaaaattgttttcaatctagaacttttctattaactaccatgtcttaaaatcaagtctataatcctagcattagtttaatattttgaatatgtaaagacctgtgttaatgctttgttaatgcttttcccactctcatttgttaatgctttcccactctcaggggaaggatttgcattttgagctttatctctaaatgtgacatgcaaagattattcctggtaaaggaggtagctgtctccaaaaatgctattgttgcaatatctacattctatttcatattatgaaagaccttagacataaagtaaaatagtttatc

SEQ ID NO: 322148 - DNA, 1838 bp, Homo sapiens
caccattaaagaactctttaatttttagatacttttatattgcgacaaacataccatttgtattactctgtattgttttaataaacacttggtatttctacatcatctcagtaattacatgtttaagcatctgccaagaacattttcaggataatttaaaatacatcaatacatcatcaaaacacttttggaacattcagatggtttgtagtttggttctcacagagaagactggatggtacatctttgtttttggattgggcttcttaggttatttcccaactcccttcacaggaggaatgtaagcaaacattttgatctctcacacatgctcttcttggcaggattccaggctccacagccgctgcaagaccagcaagtatttccgctccctcgacatcttgggcaagttatttaacccccaaaatgaaggatttgaactgaagataatttctgcaagttacagtattctttgtcaggcccatgtaaattatggacctctgcggaaaagaagacagttggatctcttgcagggatgctggtctgtccttctccaggctttggagtcacatcttcgcactgctcatcattacctctgttgcaaacatggccatctaagatctgcgggtaggcacatctccgtctttgatctcagcctggaaaagctatgcaatatatctgctttatgcactcaagcagagaagaaatccacaaagactcacagtctgctggtgggcagagaagacagaaacgacatgagcacagcaggaaaagaaagttgtctgacagaagtttgatgagaggaatttgactcagaagactgaaatatcctttaaccttactataaaatatcttacaaaatactcattgatttcacagcattagaatcatcaaggttaagcaagacatcaacatgcaaattctgattaaaaggggtccattatgatacaattcagggaatttccacaaaaatcctatggaacagtatcttccccatttaaaagttaatatggttttacagaaaatcaatgatacaatttgaataataatacaatttgaatcacttagcactaggaatacagatatttggttttttcttctataaatttgtacttatttgctcaatgtgtttacaggtgcatgtggtcattcaatataatcaattgatttttttaattgtttaattacataaacctgtgcaactatgtccagtcctttttttgtgttaggagtgtaccacactgtaaaatatctcactatgataattcaatttaaaggttctgaggcttctctctgcattgtgtgacaaacaggctcatatcaataagactggttgatggagctagaggacgttattctaagtaaagtaactcatgaatggaacaccaaatatccaatgttctcacttaaaagtggtagctaaactatgaggacacaaaggatgagaatgatataatggactttggggactgagggaaaagggcagtaggaggaataagacataaaagactacatattgggttcagtctacactgcttgtgtgaggggtgcaccaaaatatcagaaatcaccactaaagaacttatccgtgtaaccaaaaaccatctgcaccccaaaaactattgaaattaaaaattaatcaatgaataaattttaagataaaaataatgcatgtaatttacccagcacaggtcacaatgtgcctgtcacatcataagcacctcataataagaatcttcctactattagtaccttctgtctaagtattctggtatttattttggcattgaccatgttgaacatcctacaaagttgaaaattttgacaaataaataatg

SEQ ID NO: 322149 - DNA, 1398 bp, Homo sapiens
caccattaaagaactctttaatttttagatacttttatattgcgacaaacataccatttgtattactctgtattgttttaataaacacttggtatttctacatcatctcagtaattacatgtttaagcatctgccaagaacattttcaggataatttaaaatacatcaatacatcatcaaaacacttttggaacattcagatggtttgtagtttggttctcacagagaagactggatggtacatctttgtttttggattgggcttcttaggttatttcccaactcccttcacaggaggaatgtaagcaaacattttgatctctcacacatgctcttcttggcaggattccaggctccacagccgctgcaagaccagcaagtatttccgctccctcgacatcttgggcaagttatttaacccccaaaatgaaggatttgaactgaagataatttctgcaagttacagtattctttgtcaggcccatgtaaattatggacctctgcggaaaagaagacagttggatctcttgcagggatgctggtctgtccttctccaggctttggagtcacatcttcgcactgctcatcattacctctgttgcaaacatggccatctaagatctgcgggtaggcacatctccgtctttgatctcagcctggaaaagctatgcaatatatctgctttatgcactcaagcagagaagaaatccacaaagactcacagtctgctggtgggcagagaagacagaaacgacatgagcacagcaggaaaagtaatcaaatgcaaagcagctgtgctatgggaggtaaagaaacccttttccattgaggatgtggaggttgcacctcctaaggcttatgaagttcgcattaagatggtggctgtaggaatctgtcgcacagatgaccacgtggttagtggcaacctggtgaccccccttcctgtgattttaggccatgaggcagccggcatcgtggagagtgttggagaaggggtgactacagtcaaaccaggtacaggattcacactcagggaacacgtgtggttcaccatccaggatttcccagcctggataaggaaaccaaggcaatgagagacgaaagggcttgcacaaggtcaccgcgcagccaggacttcaggagtttcctctttccctctctgcctgcctgacccaagcatgtatgcattcaggcactcatgtattgtacccttcaaccattatgtaccgagtatctactagaagccaggcaccaggttagagcctggagatatgtgaggatcaaaagagacacagtgcctaccagtgtggcattcatagtccagtaattctgtgttagtgttggctgaacactgtcttctgtcagggcccagatagaagtagaaacgggaggagggaa

SEQ ID NO: 322150 - DNA, 1348 bp, Homo sapiens
caccattaaagaactctttaatttttagatacttttatattgcgacaaacataccatttgtattactctgtattgttttaataaacacttggtatttctacatcatctcagtaattacatgtttaagcatctgccaagaacattttcaggataatttaaaatacatcaatacatcatcaaaacacttttggaacattcagatggtttgtagtttggttctcacagagaagactggatggtacatctttgtttttggattgggcttcttaggttatttcccaactcccttcacaggaggaatgtaagcaaacattttgatctctcacacatgctcttcttggcaggattccaggctccacagccgctgcaagaccagcaagtatttccgctccctcgacatcttgggcaagttatttaacccccaaaatgaaggatttgaactgaagataatttctgcaagttacagtattctttgtcaggcccatgtaaattatggacctctgcggaaaagaagacagttggatctcttgcagggatgctggtctgtccttctccaggctttggagtcacatcttcgcactgctcatcattacctctgttgcaaacatggccatctaagatctgcgggtaggcacatctccgtctttgatctcagcctggaaaagctatgcaatatatctgctttatgcactcaagcagagaagaaatccacaaagactcacagtctgctggtgggcagagaagacagaaacgacatgagcacagcaggaaaacattgaggatgtggaggttgcacctcctaaggcttatgaagttcgcattaagatggtggctgtaggaatctgtcgcacagatgaccacgtggttagtggcaacctggtgaccccccttcctgtgattttaggccatgaggcagccggcatcgtggagagtgttggagaaggggtgactacagtcaaaccaggtacaggattcacactcagggaacacgtgtggttcaccatccaggatttcccagcctggataaggaaaccaaggcaatgagagacgaaagggcttgcacaaggtcaccgcgcagccaggacttcaggagtttcctctttccctctctgcctgcctgacccaagcatgtatgcattcaggcactcatgtattgtacccttcaaccattatgtaccgagtatctactagaagccaggcaccaggttagagcctggagatatgtgaggatcaaaagagacacagtgcctaccagtgtggcattcatagtccagtaattctgtgttagtgttggctgaacactgtcttctgtcagggcccagatagaagtagaaacgggaggagggaa

SEQ ID NO: 322151 - DNA, 555 bp, Homo sapiens
atggcttccctgttatgttgtcatgaggcatgtggcacaagtgtcatcgtaggggtacctcctgattcccaaaacctctcaatgaaccctatgctgctactgactggacgtacctggaagggagctattcttggtggctttaaaagtaaagaatgtgtcccaaaacttgtggctgattttatggctaagaagttttcattggatgcattaataacccatgttttaccttttgaaaaaataaatgaaggatttgacctgcttcactctgggaaaagtatccgtaccattctgatgttttgagacaatacagatgttttcccttgtggcagtcttcagcctcctctaccctacatgatctggagcaacagctgggaaatatcattaattctgctcatcacagattttatcaataaattacatttgggggctttccaaagaaatggaaattgatgtaaaattatttttcaagcaaatgtttaaaatccaaatgagaactaaataaagtgttgaacatcagctggggaattgaagccaataaaccttccttcttaacca

SEQ ID NO: 322152 - DNA, 345 bp, Homo sapiens
gcacgtagacaatcctagggtcaaggtatcaccctgttgtctacgcgccgaccaccccctagatgtatccgtaccattctgatgttttgagacaatacagatgttttcccttgtggcagtcttcagcctcctctaccctacatgatctggagcaacagctgggaaatatcattaattctgctcatcacagattttatcaataaattacatttgggggctttccaaagaaatggaaattgatgtaaaattatttttcaagcaaatgtttaaaatccaaatgagaactaaataaagtgttgaacatcagctggggaattgaagccaataaaccttccttcttaacca

SEQ ID NO: 322153 - DNA, 527 bp, Homo sapiens
cgttgcagtctggaagcagcatcttttctaaactttcatttatttggaaaatcttctcttcaattctcctacttaccctggttgaatctaacaatgataccatcttcttttcaggctttaaaagtaaagaatgtgtcccaaaacttgtggctgattttatggctaagaagttttcattggatgcattaataacccatgttttaccttttgaaaaaataaatgaaggatttgacctgcttcactctgggaaaaggtagattttttagttagttttctgttttgcttttttttctaccataggggattgtctagcagaaaatgaaaaggtggaaggatgagaaaaattagagtgccttggttcttccattaccagttcagtctttacatggagagcttgtaagagaagtttaaaacctctgtgagatgctaaaaacagttgctttgcatttcctattgtgctgaagccaaattatgttgattacagcaaatccgaatgatcagagacactcagccttctttaaaagaga

SEQ ID NO: 322154 - DNA, 902 bp, Homo sapiens
caactgaagccaaaagaggttttgataaacggttggacaaaagagtctgagtagttcttgataaacacctacgcatggcactttatgaagcttaggcactttctaacaatcatcacttaatctatttttgcattttctgaaaacacaggtcaccccaggctctacctgtgctgtgtttggcctgggaggggtcggcctatctgctgttatgggctgtaaagcagctggagcagccagaatcattgcggtggacatcaacaaggacaaatttgcaaaggccaaagagttgggtgccactgaatgcatcaaccctcaagactacaagaaacccatccaggaagtgctaaaggaaatgactgatggaggtgtggatttttcgtttgaagtcatcggtcggcttgacaccatggtatgtaccatgacatgccctgagatttctgcctctgcaacctggaagatgcatttaggcagcaaaatatatgttttatgtataaaggatatttttaatgatgaatggaaatttcccatcatctgtttgttatgtggcttgtttaatttttgttatgagaaatcttctcttccatcaattacccaaacctgtctcaagtcatatttcctctagaggaaaagaaaagggtttgtttttcttaactgagcaattatagatttactttattaatttttagttaaaaaatataagttcaagtaaacataaataatataaattctgttctcaaattggaatgttttatttttctcctacattcttaacaaaaatggtttaacaattttgcctatgttcttaataaatttcagatttttaacatgttagtatttggccaaaggaaatgagcaattttaggccaactgctgttttattaacaaaaatatgccctaaggaa

SEQ ID NO: 322155 - DNA, 760 bp, Homo sapiens
gaaatccacaaagactcacagtctgctggtgggcagagaagacagaaacgacatgagcacagcaggaaaaagtaagcaaaaaatatattactgttggtaatatattctcatcaatataacaaagaaaggaatacagtatttgatgaataatttaaaattcatatctaaattagaaatgatatgctgaaatatgatatgcaatatacacctcaatatgtaatgtatactgaactgcagtggaaataagctattcttaagtacctttaacaggaatgtatagaacctgtgtctattagtctttatttcctacattaaataaatttacagtaaaatgatagtttattccaagctaatcatgactgatttgtaaatctaaagttagaaaagtctttaatggcaagttatctttataataagaaaccataattcaaatgtgttattatttttattcaaattttttatgaacacaggaaagttgtctgacagaagtttgatgagaggaatttgactcagaagactgaaatatcctttaaccttactataaaatatcttacaaaatactcattgatttcacagcattagaatcatcaaggttaagcaagacatcaacatgcaaattctgattaaaaggggtccattatgatacaattcagggaatttccacaaaaatcctatggaacagtatcttccccatttaaaagttaatatggttttacagaaaatcaatgatacaatttgaataataatacaatttgaatca

SEQ ID NO: 322156 - DNA, 799 bp, Homo sapiens
atggcttccctgttatgttgtcatgaggcatgtggcacaagtgtcatcgtaggggtacctcctgattcccaaaacctctcaatgaaccctatgctgctactgactggacgtacctggaagggagctattcttggtggctttaaacgtcaagaaagagtcccaaaacttgtggctgactctacggctaaaacaccccctatcgaatgcatcaataatccctcgccccccttttcaccaaccaaaagaaggattatcagccgattcactcccggtataagaataccacctactactcgccatcctatcatacaccacaccggctgtccctaaaaatgaactataaaattgatgaacacaaaaaaaaatgcaccaagcagcggtagtagaccaaacaccacgccaatactttccacatatttcccacctttacaccagccacactattcttctcactatttttcccaaacccatttattcgacttgaaccttacaacccaattgatatcgccacaaccgcctacaatattgatatgctccccgttttttttcaaccgtcacactcctgtgtccaagtgtttcaccccaagtccacccactcccgtctcctcccattgcacaatacatgccccggcaacacccattcaacacgcgatgcataagtgcatacgtactcataccgcgccgctatcacacccctataacatttaactgttgcccaccacaccacaatccccatctttttatgtgttcatcgacgctttctaccgtccccctgtcgcagtacctcccacccgcgacc

SEQ ID NO: 322157 - DNA, 3216 bp, Homo sapiens
caccattaaagaactctttaatttttagatacttttatattgcgacaaacataccatttgtattactctgtattgttttaataaacacttggtatttctacatcatctcagtaattacatgtttaagcatctgccaagaacattttcaggataatttaaaatacatcaatacatcatcaaaacacttttggaacattcagatggtttgtagtttggttctcacagagaagactggatggtacatctttgtttttggattgggcttcttaggttatttcccaactcccttcacaggaggaatgtaagcaaacattttgatctctcacacatgctcttcttggcaggattccaggctccacagccgctgcaagaccagcaagtatttccgctccctcgacatcttgggcaagttatttaacccccaaaatgaaggatttgaactgaagataatttctgcaagttacagtattctttgtcaggcccatgtaaattatggacctctgcggaaaagaagacagttggatctcttgcagggatgctggtctgtccttctccaggctttggagtcacatcttcgcactgctcatcattacctctgttgcaaacatggccatctaagatctgcgggtaggcacatctccgtctttgatctcagcctggaaaagctatgcaatatatctgctttatgcactcaagcagagaagaaatccacaaagactcacagtctgctggtgggcagagaagacagaaacgacatgagcacagcaggaaaagtaatcaaatgcaaagcagctgtgctatgggaggtaaagaaacccttttccattgaggatgtggaggttgcacctcctaaggcttatgaagttcgcattaagatggtggctgtaggaatctgtcgcacagatgaccacgtggttagtggcaacctggtgaccccccttcctgtgattttaggccatgaggcagccggcatcgtggagagtgttggagaaggggtgactacagtcaaaccaggtgataaagtcatcccgctctttactcctcagtgtggaaaatgcagagtttgtaaaaacccggagagcaactactgcttgaaaaatgatctaggcaatcctcgggggaccctgcaggatggcaccaggaggttcacctgcagggggaagcccattcaccacttccttggcaccagcaccttctcccagtacacggtggtggatgagaatgcagtggccaaaattgatgcagcctcgcccctggagaaagtctgcctcattggctgtggattctcgactggttatgggtctgcagttaacgttgccaaggtcaccccaggctctacctgtgctgtgtttggcctgggaggggtcggcctatctgctgttatgggctgtaaagcagctggagcagccagaatcattgcggtggacatcaacaaggacaaatttgcaaaggccaaagagttgggtgccactgaatgcatcaaccctcaagactacaagaaacccatccaggaagtgctaaaggaaatgactgatggaggtgtggatttttcgtttgaagtcatcggtcggcttgacaccatgatggcttccctgttatgttgtcatgaggcatgtggcacaagcgtcatcgtaggggtacctcctgcttcccagaacctctcaataaaccctatgctgctactgactggacgcacctggaagggggctgtttatggtggctttaagagtaaagaaggtatcccaaaacttgtggctgattttatggctaagaagttttcactggatgcgttaataacccatgttttaccttttgaaaaaataaatgaaggatttgacctgcttcactctgggaaaagtatccgtaccgtcctgacgttttgaggcaatagagatgccttcccctgtagcagtcttcagcctcctctaccctacaagatctggagcaacagctaggaaatatcattaattcagctcttcagagatgttatcaataaattacacatgggggctttccaaagaaatggaaattgatgggaaattatttttcaggaaaatttaaaattcaagtgagaagtaaataaagtgttgaacatcagctggggaattgaagccaacaaaccttccttcttaaccattctactgtgtcacctttgccattgaggaaaaatattcctgtgacttcttgcatttttggtatcttcataatctttagtcatcgaatcccagtggaggggacccttttacttgccctgaacatacacatgctgggccattgtgattgaagtcttctaactctgtctcagttttcactgtcgacattttcctttttctaataaaaatgtaccaaatccctggggtaaaagctagggtaaggtaaaggatagactcacatttacaagtagtgaaggtccgagagttctaaatacaggaaatttcttaggaactcaaataaaatgccccacattttactacagtaaatggcagtgtttttatgacttttatactatttctttatggtcgatatacaattgattttttaaaataatagcagatttcttgcttcatatgacaaagcctcaattactaattgtaaaaactgaactattcccagaatcatgttcaaaaaatctgtaatttttgctgatgaaagtgcttcattgactaaacagtattagtttgtggctataaatgattatttagatgatgactgaaaatgtgtataaagtaattaaaagtaatatggtggctttaagtgtagagatgggatggcaaatgctgtgaatgcagaatgtaaaattggtaactaagaaatggcacaaacaccttaagcaatatattttcctagtagatatatatatacacatacatatatacacatatacaaatgtatatttttgcaaaattgttttcaatctagaacttttctattaactaccatgtcttaaaatcaagtctataatcctagcattagtttaatattttgaatatgtaaagacctgtgttaatgctttgttaatgcttttcccactctcatttgttaatgctttcccactctcaggggaaggatttgcattttgagctttatctctaaatgtgacatgcaaagattattcctggtaaaggaggtagctgtctccaaaaatgctattgttgcaatatctacattctatttcatattatgaaagaccttagacataaagtaaaatagtttatc

SEQ ID NO: 322158 - DNA, 3303 bp, Homo sapiens
caccattaaagaactctttaatttttagatacttttatattgcgacaaacataccatttgtattactctgtattgttttaataaacacttggtatttctacatcatctcagtaattacatgtttaagcatctgccaagaacattttcaggataatttaaaatacatcaatacatcatcaaaacacttttggaacattcagatggtttgtagtttggttctcacagagaagactggatggtacatctttgtttttggattgggcttcttaggttatttcccaactcccttcacaggaggaatgtaagcaaacattttgatctctcacacatgctcttcttggcaggattccaggctccacagccgctgcaagaccagcaagtatttccgctccctcgacatcttgggcaagttatttaacccccaaaatgaaggatttgaactgaagataatttctgcaagttacagtattctttgtcaggcccatgtaaattatggacctctgcggaaaagaagacagttggatctcttgcagggatgctggtctgtccttctccaggctttggagtcacatcttcgcactgctcatcattacctctgttgcaaacatggccatctaagatctgcgggtaggcacatctccgtctttgatctcagcctggaaaagctatgcaatatatctgctttatgcactcaagcagagaagaaatccacaaagactcacagtctgctggtgggcagagaagacagaaacgacatgagcacagcaggaaaagtaatcaaatgcaaagcagctgtgctatgggaggtaaagaaacccttttccattgaggatgtggaggttgcacctcctaaggcttatgaagttcgcattaagatggtggctgtaggaatctgtcgcacagatgaccacgtggttagtggcaacctggtgaccccccttcctgtgattttaggccatgaggcagccggcatcgtggagagtgttggagaaggggtgactacagtcaaaccaggtgataaagtcatcccgctctttactcctcagtgtggaaaatgcagagtttgtaaaaacccggagagcaactactgcttgaaaaatgatctaggcaatcctcgggggaccctgcaggatggcaccaggaggttcacctgcagggggaagcccattcaccacttccttggcaccagcaccttctcccagtacacggtggtggatgagaatgcagtggccaaaattgatgcagcctcgcccctggagaaagtctgcctcattggctgtggattctcgactggttatgggtctgcagttaacgttgccaaggtcaccccaggctctacctgtgctgtgtttggcctgggaggggtcggcctatctgctgttatgggctgtaaagcagctggagcagccagaatcattgcggtggacatcaacaaggacaaatttgcaaaggccaaagagttgggtgccactgaatgcatcaaccctcaagactacaagaaacccatccaggaagtgctaaaggaaatgactgatggaggtgtggatttttcgtttgaagtcatcggtcggcttgacaccatgatggcttccctgttatgttgtcatgaggcatgtggcacaagcgtcatcgtaggggtacctcctgcttcccagaacctctcaataaaccctatgctgctactgactggacgcacctggaagggggctgtttatggtggctttaagagtaaagaaggtatcccaaaacttgtggctgattttatggctaagaagttttcactggatgcgttaataacccatgttttaccttttgaaaaaataaatgaaggatttgacctgcttcactctgggaaaagtatccgtaccgtcctgacgttttgaggcaatagagatgccttcccctgtagcagtcttcagcctcctctaccctacaagatctggagcaacagctaggaaatatcattaattcagctcttcagagatgttatcaataaattacacatgggggctttccaaagaaatggaaattgatgggaaattatttttcaggaaaatttaaaattcaagtgagaagtaaataaagtgttgaacatcagctggggaattgaagccaacaaaccttccttcttaaccattctactgtgtcacctttgccattgaggaaaaatattcctgtgacttcttgcatttttggtatcttcataatctttagtcatcgaatcccagtggaggggacccttttacttgccctgaacatacacatgctgggccattgtgattgaagtcttctaactctgtctcagttttcactgtcgacattttcctttttctaataaaaatgtaccaaatccctggggtaaaagctagggtaaggtaaaggatagactcacatttacaagtagtgaaggtccgagagttctaaatacaggaaatttcttaggaactcaaataaaatgccccacattttactacagtaaatggcagtgtttttatgacttttatactatttctttatggtcgatatacaattgattttttaaaataatagcagatttcttgcttcatatgacaaagcctcaattactaattgtaaaaactgaactattcccagaatcatgttcaaaaaatctgtaatttttgctgatgaaagtgcttcattgactaaacagtattagtttgtggctataaatgattatttagatgatgactgaaaatgtgtataaagtaattaaaagtaatatggtggctttaagtgtagagatgggatggcaaatgctgtgaatgcagatagatatatatatacacatacatatatacacatatacaaatgtatatttttgcaaaattgttttcaatctagaacttttctattaactaccatgtcttaaaatcaagtctataatcctagcattagtttaatattttgaatatgtaaagacctgtgttaatgctttgttaatgcttttcccactctcatttgttaatgctttcccactctcaggggaaggatttgcattttgagctttatctctaaatgtgacatgcaaagattattcctggtaaaggaggtagctgtctccaaaaatgctattgttgcaatatctacattctatttcatattatgaaagaccttagacataaagtaaaatagtttatcatttactgtgtgatcttcagtaagtctctcaggctctctgagcttgttcatcctttgttttgaaaaaattactcaaccaatccattacagcttaaccaagattaaatgggatgatgttaatgaaagagcttcgccaattaagaa

SEQ ID NO: 322159 - DNA, 3162 bp, Homo sapiens
caccattaaagaactctttaatttttagatacttttatattgcgacaaacataccatttgtattactctgtattgttttaataaacacttggtatttctacatcatctcagtaattacatgtttaagcatctgccaagaacattttcaggataatttaaaatacatcaatacatcatcaaaacacttttggaacattcagatggtttgtagtttggttctcacagagaagactggatggtacatctttgtttttggattgggcttcttaggttatttcccaactcccttcacaggaggaatgtaagcaaacattttgatctctcacacatgctcttcttggcaggattccaggctccacagccgctgcaagaccagcaagtatttccgctccctcgacatcttgggcaagttatttaacccccaaaatgaaggatttgaactgaagataatttctgcaagttacagtattctttgtcaggcccatgtaaattatggacctctgcggaaaagaagacagttggatctcttgcagggatgctggtctgtccttctccaggctttggagtcacatcttcgcactgctcatcattacctctgttgcaaacatggccatctaagatctgcgggtaggcacatctccgtctttgatctcagcctggaaaagctatgcaatatatctgctttatgcactcaagcagagaagaaatccacaaagactcacagtctgctggtgggcagagaagacagaaacgacatgagcacagcaggaaaagtaatcaaatgcaaagcagctgtgctatgggaggtaaagaaacccttttccattgaggatgtggaggttgcacctcctaaggcttatgaagttcgcattaagatggtggctgtaggaatctgtcgcacagatgaccacgtggttagtggcaacctggtgaccccccttcctgtgattttaggccatgaggcagccggcatcgtggagagtgttggagaaggggtgactacagtcaaaccaggtgataaagtcatcccgctctttactcctcagtgtggaaaatgcagagtttgtaaaaacccggagagcaactactgcttgaaaaatgatctaggcaatcctcgggggaccctgcaggatggcaccaggaggttcacctgcagggggaagcccattcaccacttccttggcaccagcaccttctcccagtacacggtggtggatgagaatgcagtggccaaaattgatgcagcctcgcccctggagaaagtctgcctcattggctgtggattctcgactggttatgggtctgcagttaacgttgccaaggtcaccccaggctctacctgtgctgtgtttggcctgggaggggtcggcctatctgctgttatgggctgtaaagcagctggagcagccagaatcattgcggtggacatcaacaaggacaaatttgcaaaggccaaagagttgggtgccactgaatgcatcaaccctcaagactacaagaaacccatccaggaagtgctaaaggaaatgactgatggaggtgtggatttttcgtttgaagtcatcggtcggcttgacaccatgatggcttccctgttatgttgtcatgaggcatgtggcacaagcgtcatcgtaggggtacctcctgcttcccagaacctctcaataaaccctatgctgctactgactggacgcacctggaagggggctgtttatggtggctttaagagtaaagaaggtatcccaaaacttgtggctgattttatggctaagaagttttcactggatgcgttaataacccatgttttaccttttgaaaaaataaatgaaggatttgacctgcttcactctgggaaaagtatccgtaccgtcctgacgttttgaggcaatagagatgccttcccctgtagcagtcttcagcctcctctaccctacaagatctggagcaacagctaggaaatatcattaattcagctcttcagagatgttatcaataaattacacatgggggctttccaaagaaatggaaattgatgggaaattatttttcaggaaaatttaaaattcaagtgagaagtaaataaagtgttgaacatcagctggggaattgaagccaacaaaccttccttcttaaccattctactgtgtcacctttgccattgaggagaatcccagtggaggggacccttttacttgccctgaacatacacatgctgggccattgtgattgaagtcttctaactctgtctcagttttcactgtcgacattttcctttttctaataaaaatgtaccaaatccctggggtaaaagctagggtaaggtaaaggatagactcacatttacaagtagtgaaggtccgagagttctaaatacaggaaatttcttaggaactcaaataaaatgccccacattttactacagtaaatggcagtgtttttatgacttttatactatttctttatggtcgatatacaattgattttttaaaataatagcagatttcttgcttcatatgacaaagcctcaattactaattgtaaaaactgaactattcccagaatcatgttcaaaaaatctgtaatttttgctgatgaaagtgcttcattgactaaacagtattagtttgtggctataaatgattatttagatgatgactgaaaatgtgtataaagtaattaaaagtaatatggtggctttaagtgtagagatgggatggcaaatgctgtgaatgcagaatgtaaaattggtaactaagaaatggcacaaacaccttaagcaatatattttcctagtagatatatatatacacatacatatatacacatatacaaatgtatatttttgcaaaattgttttcaatctagaacttttctattaactaccatgtcttaaaatcaagtctataatcctagcattagtttaatattttgaatatgtaaagacctgtgttaatgctttgttaatgcttttcccactctcatttgttaatgctttcccactctcaggggaaggatttgcattttgagctttatctctaaatgtgacatgcaaagattattcctggtaaaggaggtagctgtctccaaaaatgctattgttgcaatatctacattctatttcatattatgaaagaccttagacataaagtaaaatagtttatc

SEQ ID NO: 322160 - DNA, 3162 bp, Homo sapiens
caccattaaagaactctttaatttttagatacttttatattgcgacaaacataccatttgtattactctgtattgttttaataaacacttggtatttctacatcatctcagtaattacatgtttaagcatctgccaagaacattttcaggataatttaaaatacatcaatacatcatcaaaacacttttggaacattcagatggtttgtagtttggttctcacagagaagactggatggtacatctttgtttttggattgggcttcttaggttatttcccaactcccttcacaggaggaatgtaagcaaacattttgatctctcacacatgctcttcttggcaggattccaggctccacagccgctgcaagaccagcaagtatttccgctccctcgacatcttgggcaagttatttaacccccaaaatgaaggatttgaactgaagataatttctgcaagttacagtattctttgtcaggcccatgtaaattatggacctctgcggaaaagaagacagttggatctcttgcagggatgctggtctgtccttctccaggctttggagtcacatcttcgcactgctcatcattacctctgttgcaaacatggccatctaagatctgcgggtaggcacatctccgtctttgatctcagcctggaaaagctatgcaatatatctgctttatgcactcaagcagagaagaaatccacaaagactcacagtctgctggtgggcagagaagacagaaacgacatgagcacagcaggaaaagtaatcaaatgcaaagcagctgtgctatgggaggtaaagaaacccttttccattgaggatgtggaggttgcacctcctaaggcttatgaagttcgcattaagatggtggctgtaggaatctgtcgcacagatgaccacgtggttagtggcaacctggtgaccccccttcctgtgattttaggccatgaggcagccggcatcgtggagagtgttggagaaggggtgactacagtcaaaccaggtgataaagtcatcccgctctttactcctcagtgtggaaaatgcagagtttgtaaaaacccggagagcaactactgcttgaaaaatgatctaggcaatcctcgggggaccctgcaggatggcaccaggaggttcacctgcagggggaagcccattcaccacttccttggcaccagcaccttctcccagtacacggtggtggatgagaatgcagtggcctcgactggttatgggtctgcagttaacgttgccaaggtcaccccaggctctacctgtgctgtgtttggcctgggaggggtcggcctatctgctgttatgggctgtaaagcagctggagcagccagaatcattgcggtggacatcaacaaggacaaatttgcaaaggccaaagagttgggtgccactgaatgcatcaaccctcaagactacaagaaacccatccaggaagtgctaaaggaaatgactgatggaggtgtggatttttcgtttgaagtcatcggtcggcttgacaccatgatggcttccctgttatgttgtcatgaggcatgtggcacaagcgtcatcgtaggggtacctcctgcttcccagaacctctcaataaaccctatgctgctactgactggacgcacctggaagggggctgtttatggtggctttaagagtaaagaaggtatcccaaaacttgtggctgattttatggctaagaagttttcactggatgcgttaataacccatgttttaccttttgaaaaaataaatgaaggatttgacctgcttcactctgggaaaagtatccgtaccgtcctgacgttttgaggcaatagagatgccttcccctgtagcagtcttcagcctcctctaccctacaagatctggagcaacagctaggaaatatcattaattcagctcttcagagatgttatcaataaattacacatgggggctttccaaagaaatggaaattgatgggaaattatttttcaggaaaatttaaaattcaagtgagaagtaaataaagtgttgaacatcagctggggaattgaagccaacaaaccttccttcttaaccattctactgtgtcacctttgccattgaggaaaaatattcctgtgacttcttgcatttttggtatcttcataatctttagtcatcgaatcccagtggaggggacccttttacttgccctgaacatacacatgctgggccattgtgattgaagtcttctaactctgtctcagttttcactgtcgacattttcctttttctaataaaaatgtaccaaatccctggggtaaaagctagggtaaggtaaaggatagactcacatttacaagtagtgaaggtccgagagttctaaatacaggaaatttcttaggaactcaaataaaatgccccacattttactacagtaaatggcagtgtttttatgacttttatactatttctttatggtcgatatacaattgattttttaaaataatagcagatttcttgcttcatatgacaaagcctcaattactaattgtaaaaactgaactattcccagaatcatgttcaaaaaatctgtaatttttgctgatgaaagtgcttcattgactaaacagtattagtttgtggctataaatgattatttagatgatgactgaaaatgtgtataaagtaattaaaagtaatatggtggctttaagtgtagagatgggatggcaaatgctgtgaatgcagaatgtaaaattggtaactaagaaatggcacaaacaccttaagcaatatattttcctagtagatatatatatacacatacatatatacacatatacaaatgtatatttttgcaaaattgttttcaatctagaacttttctattaactaccatgtcttaaaatcaagtctataatcctagcattagtttaatattttgaatatgtaaagacctgtgttaatgctttgttaatgcttttcccactctcatttgttaatgctttcccactctcaggggaaggatttgcattttgagctttatctctaaatgtgacatgcaaagattattcctggtaaaggaggtagctgtctccaaaaatgctattgttgcaatatctacattctatttcatattatgaaagaccttagacataaagtaaaatagtttatc

SEQ ID NO: 322161 - DNA, 3162 bp, Homo sapiens
caccattaaagaactctttaatttttagatacttttatattgcgacaaacataccatttgtattactctgtattgttttaataaacacttggtatttctacatcatctcagtaattacatgtttaagcatctgccaagaacattttcaggataatttaaaatacatcaatacatcatcaaaacacttttggaacattcagatggtttgtagtttggttctcacagagaagactggatggtacatctttgtttttggattgggcttcttaggttatttcccaactcccttcacaggaggaatgtaagcaaacattttgatctctcacacatgctcttcttggcaggattccaggctccacagccgctgcaagaccagcaagtatttccgctccctcgacatcttgggcaagttatttaacccccaaaatgaaggatttgaactgaagataatttctgcaagttacagtattctttgtcaggcccatgtaaattatggacctctgcggaaaagaagacagttggatctcttgcagggatgctggtctgtccttctccaggctttggagtcacatcttcgcactgctcatcattacctctgttgcaaacatggccatctaagatctgcgggtaggcacatctccgtctttgatctcagcctggaaaagctatgcaatatatctgctttatgcactcaagcagagaagaaatccacaaagactcacagtctgctggtgggcagagaagacagaaacgacatgagcacagcaggaaaagtaatcaaatgcaaagcagctgtgctatgggaggtaaagaaacccttttccattgaggatgtggaggttgcacctcctaaggcttatgaagttcgcattaagatggtggctgtaggaatctgtcgcacagatgaccacgtggttagtggcaacctggtgaccccccttcctgtgattttaggccatgaggcagccggcatcgtggagagtgttggagaaggggtgactacagtcaaaccaggtgataaagtcatcccgctctttactcctcagtgtggaaaatgcagagtttgtaaaaacccggagagcaactactgcttgaaaaatgatctaggcaatcctcgggggaccctgcaggatggcaccaggaggttcacctgcagggggaagcccattcaccacttccttggcaccagcaccttctcccagtacacggtggtggatgagaatgcagtggccaaaattgatgcagcctcgcccctggagaaagtctgcctcattggctgtggattctcgactggttatgggtctgcagttaacgttgccaaggtcaccccaggctctacctgtgctgtgtttggcctgggaggggtcggcctatctgctgttatgggctgtaaagcagctggagcagccagaatcattgcggtggacatcaacaaggacaaatttgcaaaggccaaagagttgggtgccactgaatgcatcaaccctcaagactacaagaaacccatccaggaagtgctaaaggaaatgactgatggaggtgtggatttttcgtttgaagtcatcggtcggcttgacaccatgatggcttccctgttatgttgtcatgaggcatgtggcacaagcgtcatcgtaggggtacctcctgcttcccagaacctctcaataaaccctatgctgctactgactggacgcacctggaagggggctgtttatggtggctttaagagtaaagaaggtatcccaaaacttgtggctgattttatggctaagaagttttcactggatgcgttaataacccatgttttaccttttgaaaaaataaatgaaggatttgacctgcttcactctgggaaaagtatccgtaccgtcctgacgttttgaggcaatagagatgccttcccctgtagcagtcttcagcctcctctaccctacaagatctggagcaacagctaggaaatatcattaattcagctcttcagagatgttatcaataaattacacatgggggctttccaaagaaatggaaattgatgggaaattatttttcaggaaaatttcaacaaaccttccttcttaaccattctactgtgtcacctttgccattgaggaaaaatattcctgtgacttcttgcatttttggtatcttcataatctttagtcatcgaatcccagtggaggggacccttttacttgccctgaacatacacatgctgggccattgtgattgaagtcttctaactctgtctcagttttcactgtcgacattttcctttttctaataaaaatgtaccaaatccctggggtaaaagctagggtaaggtaaaggatagactcacatttacaagtagtgaaggtccgagagttctaaatacaggaaatttcttaggaactcaaataaaatgccccacattttactacagtaaatggcagtgtttttatgacttttatactatttctttatggtcgatatacaattgattttttaaaataatagcagatttcttgcttcatatgacaaagcctcaattactaattgtaaaaactgaactattcccagaatcatgttcaaaaaatctgtaatttttgctgatgaaagtgcttcattgactaaacagtattagtttgtggctataaatgattatttagatgatgactgaaaatgtgtataaagtaattaaaagtaatatggtggctttaagtgtagagatgggatggcaaatgctgtgaatgcagaatgtaaaattggtaactaagaaatggcacaaacaccttaagcaatatattttcctagtagatatatatatacacatacatatatacacatatacaaatgtatatttttgcaaaattgttttcaatctagaacttttctattaactaccatgtcttaaaatcaagtctataatcctagcattagtttaatattttgaatatgtaaagacctgtgttaatgctttgttaatgcttttcccactctcatttgttaatgctttcccactctcaggggaaggatttgcattttgagctttatctctaaatgtgacatgcaaagattattcctggtaaaggaggtagctgtctccaaaaatgctattgttgcaatatctacattctatttcatattatgaaagaccttagacataaagtaaaatagtttatc

SEQ ID NO: 322162 - DNA, 3104 bp, Homo sapiens
caccattaaagaactctttaatttttagatacttttatattgcgacaaacataccatttgtattactctgtattgttttaataaacacttggtatttctacatcatctcagtaattacatgtttaagcatctgccaagaacattttcaggataatttaaaatacatcaatacatcatcaaaacacttttggaacattcagatggtttgtagtttggttctcacagagaagactggatggtacatctttgtttttggattgggcttcttaggttatttcccaactcccttcacaggaggaatgtaagcaaacattttgatctctcacacatgctcttcttggcaggattccaggctccacagccgctgcaagaccagcaagtatttccgctccctcgacatcttgggcaagttatttaacccccaaaatgaaggatttgaactgaagataatttctgcaagttacagtattctttgtcaggcccatgtaaattatggacctctgcggaaaagaagacagttggatctcttgcagggatgctggtctgtccttctccaggctttggagtcacatcttcgcactgctcatcattacctctgttgcaaacatggccatctaagatctgcgggtaggcacatctccgtctttgatctcagcctggaaaagctatgcaatatatctgctttatgcactcaagcagagaagaaatccacaaagactcacagtctgctggtgggcagagaagacagaaacgacatgagcacagcaggaaaagtaatcaaatgcaaagcagctgtgctatgggaggtaaagaaacccttttccattgaggatgtggaggttgcacctcctaaggcttatgaagttcgcattaagatggtggctgtaggaatctgtcgcacagatgaccacgtggttagtggcaacctggtgaccccccttcctgtgattttaggccatgaggcagccggcatcgtggagagtgttggagaaggggtgactacagtcaaaccaggtgataaagtcatcccgctctttactcctcagtgtggaaaatgcagagtttgtaaaaacccggagagcaactactgcttgaaaaatgatctaggcaatcctcgggggaccctgcaggatggcaccaggaggttcacctgcagggggaagcccattcaccacttccttggcaccagcaccttctcccagtacacggtggtggatgagaatgcagtggccaaaattgatgcagcctcgcccctggagaaagtctgcctcattggctgtggattctcgactggttatgggtctgcagttaacgttgccaaggtcaccccaggctctacctgtgctgtgtttggcctgggaggggtcggcctatctgctgttatgggctgtaaagcagctggagcagccagaatcattgcggtggacatcaacaaggacaaatttgcaaaggccaaagagttgggtgccactgaatgcatcaaccctcaagactacaagaaacccatccaggaagtgctaaaggaaatgactgatggaggtgtggatttttcgtttgaagtcatcggtcggcttgacaccatgatggcttccctgttatgttgtcatgaggcatgtggcacaagcgtcatcgtaggggtacctcctgcttcccagaacctctcaataaaccctatgctgctactgactggacgcacctggaagggggctgtttatggtggctttaagagtaaagaaggtatcccaaaacttgtggctgattttatggctaagaagttttcactggatgcgttaataacccatgttttaccttttgaaaaaataaatgaaggatttgacctgcttcactctgggaaaagtcttcagcctcctctaccctacaagatctggagcaacagctaggaaatatcattaattcagctcttcagagatgttatcaataaattacacatgggggctttccaaagaaatggaaattgatgggaaattatttttcaggaaaatttaaaattcaagtgagaagtaaataaagtgttgaacatcagctggggaattgaagccaacaaaccttccttcttaaccattctactgtgtcacctttgccattgaggaaaaatattcctgtgacttcttgcatttttggtatcttcataatctttagtcatcgaatcccagtggaggggacccttttacttgccctgaacatacacatgctgggccattgtgattgaagtcttctaactctgtctcagttttcactgtcgacattttcctttttctaataaaaatgtaccaaatccctggggtaaaagaatacaggaaatttcttaggaactcaaataaaatgccccacattttactacagtaaatggcagtgtttttatgacttttatactatttctttatggtcgatatacaattgattttttaaaataatagcagatttcttgcttcatatgacaaagcctcaattactaattgtaaaaactgaactattcccagaatcatgttcaaaaaatctgtaatttttgctgatgaaagtgcttcattgactaaacagtattagtttgtggctataaatgattatttagatgatgactgaaaatgtgtataaagtaattaaaagtaatatggtggctttaagtgtagagatgggatggcaaatgctgtgaatgcagaatgtaaaattggtaactaagaaatggcacaaacaccttaagcaatatattttcctagtagatatatatatacacatacatatatacacatatacaaatgtatatttttgcaaaattgttttcaatctagaacttttctattaactaccatgtcttaaaatcaagtctataatcctagcattagtttaatattttgaatatgtaaagacctgtgttaatgctttgttaatgcttttcccactctcatttgttaatgctttcccactctcaggggaaggatttgcattttgagctttatctctaaatgtgacatgcaaagattattcctggtaaaggaggtagctgtctccaaaaatgctattgttgcaatatctacattctatttcatattatgaaagaccttagacataaagtaaaatagtttatc

SEQ ID NO: 322163 - DNA, 591 bp, Homo sapiens
atggcttccctgttatgttgtcatgaggcatgtggcacaagtgtcatcgtaggggtacctcctgattcccaaaacctctcaatgaaccctatgctgctactgactggacgtacctggaagggagctattcttggtggctttaaaagtaaagaatgtgtcccaaaacttgtggctgattttatggctaagaagttttcattggatgcattaataacccatgttttaccttttgaaaaaataaatgaaggatttgacctgcttcactctgggaaaaggtagattttttagttagttttctgttttgcttttttttctaccataggggattgtctagcagaaaatgaaaaggtggaaggatgagaaaaattagagtgccttggttcttccattaccagttcagtctttacatggagagcttgtaagagaagtttaaaacctctgtgagatgctaaaaacagttgctttgcatttcctattgtgctgaagccaaattatgttgattacagcaaatccgaatgatcagagacactcagccttctttaaaagagaacaatcacctttgccaaaaaaaaaaaagtctttttaaataac

SEQ ID NO: 322164 - DNA, 2843 bp, Homo sapiens
ttcatttcttcgcggcgcggggcggggctgggcgcggggtgaaagaggcgaagcgagagcggaggccgcactccagcactgcgcagggaccgccttggaccgcagttgccggccaggaatcccagtgtcacggtggacacgcctccctcgcgcccttgccgcccacctgctcacccagctcaggggctttggaattctgtggccacactgcgaggagatcggttctgggtcggaggctacaggaagactcccactccctgaaatctggagtgaagaacgccgccatccagccaccattccaaggaggtgcaggagaacagctctgtgataccatttaacttgttgacattacttttatttgaaggaacgtatattagagcttactttgcaaagaaggaagatggttgtttccgaagtggacatcgcaaaagctgatccagctgctgcatcccaccctctattactgaatggagatgctactgtggcccagaaaaatccaggctcggtggctgagaacaacctgtgcagccagtatgaggagaaggtgcgcccctgcatcgacctcattgactccctgcgggctctaggtgtggagcaggacctggccctgccagccatcgccgtcatcggggaccagagctcgggcaagagctccgtgttggaggcactgtcaggagttgcccttcccagaggcagcgggatcgtgaccagatgcccgctggtgctgaaactgaagaaacttgtgaacgaagataagtggagaggcaaggtcagttaccaggactacgagattgagatttcggatgcttcagaggtagaaaaggaaattaataaagcccagaatgccatcgccggggaaggaatgggaatcagtcatgagctaatcaccctggagatcagctcccgagatgtcccggatctgactctaatagaccttcctggcataaccagagtggctgtgggcaatcagcctgctgacattgggtataagatcaagacactcatcaagaagtacatccagaggcaggagacaatcagcctggtggtggtccccagtaatgtggacattgccaccacagaggctctcagcatggcccaggaggtggaccccgagggagacaggaccatcggaatcttgacgaagcctgatctggtggacaaaggaactgaagacaaggttgtggacgtggtgcggaacctcgtgttccacctgaagaagggttacatgattgtcaagtgccggggccagcaggagatccaggaccagctgagcctgtccgaagccctgcagagagagaagatcttctttgagaaccacccatatttcagggatctgctggaggaaggaaaggccacggttccctgcctggcagaaaaacttaccagcgagctcatcacacatatctgtaaatctctgcccctgttagaaaatcaaatcaaggagactcaccagagaataacagaggagctacaaaagtatggtgtcgacataccggaagacgaaaatgaaaaaatgttcttcctgatagataaaattaatgcctttaatcaggacatcactgctctcatgcaaggagaggaaactgtaggggaggaagacattcggctgtttaccagactccgacacgagttccacaaatggagtacaataattgaaaacaattttcaagaaggccataaaattttgagtagaaaaatccagaaatttgaaaatcagtatcgtggtagagagctgccaggctttgtgaattacaggacatttgagacaatcgtgaaacagcaaatcaaggcactggaagagccggctgtggatatgctacacaccgtgacggatatggtccggcttgctttcacagatgtttcgataaaaaattttgaagagttttttaacctccacagaaccgccaagtccaaaattgaagacattagagcagaacaagagagagaaggtgagaagctgatccgcctccacttccagatggaacagattgtctactgccaggaccaggtatacaggggtgcattgcagaaggtcagagagaaggagctggaagaagaaaagaagaagaaatcctgggattttggggctttccaatccagctcggcaacagactcttccatggaggagatctttcagcacctgatggcctatcaccaggaggccagcaagcgcatctccagccacatccctttgatcatccagttcttcatgctccagacgtacggccagcagcttcagaaggccatgctgcagctcctgcaggacaaggacacctacagctggctcctgaaggagcggagcgacaccagcgacaagcggaagttcctgaaggagcggcttgcacggctgacgcaggctcggcgccggcttgcccagttccccggttaaccacactctgtccagccccgtagacgtgcacgcacactgtctgcccccgttcccgggtagccactggactgacgacttgagtgctcagtagtcagactggatagtccgtctctgcttatccgttagccgtggtgatttagcaggaagctgtgagagcagtttggtttctagcatgaagacagagccccaccctcagatgcacatgagctggcgggattgaaggatgctgtcttcgtactgggaaagggattttcagccctcagaatcgctccaccttgcagctctccccttctctgtattcctagaaactgacacatgctgaacatcacagcttatttcctcatttttataatgtcccttcacaaacccagtgttttaggagcatgagtgccgtgtgtgtgcgtcctgtcggagccctgtctcctctctctgtaataaactcatttctagcaga

SEQ ID NO: 322165 - DNA, 473 bp, Homo sapiens
ggttaaaacccaacaactctggtcccaagcccaccgttagaatggcaccgcacactgttttagagacgttcccgggtagccactggactgacgacttgagtgctcagtagtcagactggatagtccgtctctgcttatccgttagccgtggtgatttagcaggaagctgtgagagcagtttggtttctagcatgaagacagagccccaccctcagatgcacatgagctggcgggattgaaggatgctgtcttcgtactgggaaagggattttcagccctcagaatcgctccaccttgcagctctccccttctctgtattcctagaaactgacacatgctgaacatcacagcttatttcctcatttttataatgtcccttcacaaacccagtgttttaggagcatgagtgccgtgtgtgtgcgtcctgtcggagccctgtctcctctctctgtaataaactcatttctagcaga

SEQ ID NO: 322166 - DNA, 579 bp, Homo sapiens
accttgtattacaataaaattctgtgaggaagtagaatagaaatgagtttcaaaaattaaagataaataatataaattttttaaactaagagcttgttcttgtatttttttcaaatggataatgtagacactcaaattccattgatatatttaagagtgatttgacttatattaagagttgtattataaaatattaatatttataatttaaaagaaattacattctttgcagctatttaggataaaaagtttaaatatcaaataaatgtatgccaggggtcatttgcttttaagattcttccagcaaattattaagcaaaaagagcatgccttgctttttcatggtaaagagaagaagggagcagggagaggggaaactttacttcataccatttgatcctcatatttttttgcatcttaagaagagaacaaatgatcctaccaatattgaactatttttctctctttgattagatatggtccggcttgctttcacagatgtttcgataaaaaattttgaagagttttttaacctccacagaaccgccaaggtaaaaccaaccatgtgttgtttaaaaa

SEQ ID NO: 322167 - DNA, 2868 bp, Homo sapiens
gggcagcgcccagtaaccgcgctaggagcgcggagaagggcattgggagagcggcgttcgtggcggagactagcgctccggagcacgggcacgacgggggcaccttctcggctgctaccttggaccgcagttgccggccaggaatcccagtgtcacggtggacacgcctccctcgcgcccttgccgcccacctgctcacccagctcaggggctttggaattctgtggccacactgcgaggagatcggttctgggtcggaggctacaggaagactcccactccctgaaatctggagtgaagaacgccgccatccagccaccattccaaggaggtgcaggagaacagctctgtgataccatttaacttgttgacattacttttatttgaaggaacgtatattagagcttactttgcaaagaaggaagatggttgtttccgaagtggacatcgcaaaagctgatccagctgctgcatcccaccctctattactgaatggagatgctactgtggcccagaaaaatccaggctcggtggctgagaacaacctgtgcagccagtatgaggagaaggtgcgcccctgcatcgacctcattgactccctgcgggctctaggtgtggagcaggacctggccctgccagccatcgccgtcatcggggaccagagctcgggcaagagctccgtgttggaggcactgtcaggagttgcccttcccagaggcagcgggatcgtgaccagatgcccgctggtgctgaaactgaagaaacttgtgaacgaagataagtggagaggcaaggtcagttaccaggactacgagattgagatttcggatgcttcagaggtagaaaaggaaattaataaagcccagaatgccatcgccggggaaggaatgggaatcagtcatgagctaatcaccctggagatcagctcccgagatgtcccggatctgactctaatagaccttcctggcataaccagagtggctgtgggcaatcagcctgctgacattgggtataagatcaagacactcatcaagaagtacatccagaggcaggagacaatcagcctggtggtggtccccagtaatgtggacattgccaccacagaggctctcagcatggcccaggaggtggaccccgagggagacaggaccatcggaatcttgacgaagcctgatctggtggacaaaggaactgaagacaaggttgtggacgtggtgcggaacctcgtgttccacctgaagaagggttacatgattgtcaagtgccggggccagcaggagatccaggaccagctgagcctgtccgaagccctgcagagagagaagatcttctttgagaaccacccatatttcagggatctgctggaggaaggaaaggccacggttccctgcctggcagaaaaacttaccagcgagctcatcacacatatctgtaaatctctgcccctgttagaaaatcaaatcaaggagactcaccagagaataacagaggagctacaaaagtatggtgtcgacataccggaagacgaaaatgaaaaaatgttcttcctgatagataaaattaatgcctttaatcaggacatcactgctctcatgcaaggagaggaaactgtaggggaggaagacattcggctgtttaccagactccgacacgagttccacaaatggagtacaataattgaaaacaattttcaagaaggccataaaattttgagtagaaaaatccagaaatttgaaaatcagtatcgtggtagagagctgccaggctttgtgaattacaggacatttgagacaatcgtgaaacagcaaatcaaggcactggaagagccggctgtggatatgctacacaccgtgacggatatggtccggcttgctttcacagatgtttcgataaaaaattttgaagagttttttaacctccacagaaccgccaagtccaaaattgaagacattagagcagaacaagagagagaaggtgagaagctgatccgcctccacttccagatggaacagattgtctactgccaggaccaggtatacaggggtgcattgcagaaggtcagagagaaggagctggaagaagaaaagaagaagaaatcctgggattttggggctttccaatccagctcggcaacagactcttccatggaggagatctttcagcacctgatggcctatcaccaggaggccagcaagcgcatctccagccacatccctttgatcatccagttcttcatgctccagacgtacggccagcagcttcagaaggccatgctgcagctcctgcaggacaaggacacctacagctggctcctgaaggagcggagcgacaccagcgacaagcggaagttcctgaaggagcggcttgcacggctgacgcaggctcggcgccggcttgcccagttccccggttaaccacactctgtccagccccgtagacgtgcacgcacactgtctgcccccgttcccgggtagccactggactgacgacttgagtgctcagtagtcagactggatagtccgtctctgcttatccgttagccgtggtgatttagcaggaagctgtgagagcagtttggtttctagcatgaagacagagccccaccctcagatgcacatgagctggcgggattgaaggatgctgtcttcgtactgggaaagggattttcagccctcagaatcgctccaccttgcagctctccccttctctgtattcctagaaactgacacatgctgaacatcacagcttatttcctcatttttataatgtcccttcacaaacccagtgttttaggagcatgagtgccgtgtgtgtgcgtcctgtcggagccctgtctcctctctctgtaataaactcatttctagcaga

SEQ ID NO: 322168 - DNA, 3318 bp, Homo sapiens
gaccagggccggccttccgattccccattcattccagaagcaccgaaccacgctgtgcccggatcccaagtgcagcggcacccagcgtgggcctggggttgccggttgacccggtcctcagcctggtagcagaggccaggccagtgccacaaggcacctaagtccacctgggcctggagcaggacaggttgcaaaagaaaatatctcgggacccccaaactccttatgctaagggaaacatcgagcctgggaactgagccatcaacgctgccattctttttcccaaacagaaccctgttgtcagaggtacacccagagcaactccacaccgggtgcatgccacagcaactccatcttaaataggagctggtaaaacgaggctgatacctactgggctgcattcccagacggcatagcgaggaggtgctgaagagcgcaggtttggagaatgatcacctggattggaaccatagctctaccaatatggaacccagctccttaggcctcggtcttctcatggagaacatggtgtgataatcctactcctctgggagggtggctgttaagccttggaccgcagttgccggccaggaatcccagtgtcacggtggacacgcctccctcgcgcccttgccgcccacctgctcacccagctcaggggctttggaattctgtggccacactgcgaggagatcggttctgggtcggaggctacaggaagactcccactccctgaaatctggagtgaagaacgccgccatccagccaccattccaaggaggtgcaggagaacagctctgtgataccatttaacttgttgacattacttttatttgaaggaacgtatattagagcttactttgcaaagaaggaagatggttgtttccgaagtggacatcgcaaaagctgatccagctgctgcatcccaccctctattactgaatggagatgctactgtggcccagaaaaatccaggctcggtggctgagaacaacctgtgcagccagtatgaggagaaggtgcgcccctgcatcgacctcattgactccctgcgggctctaggtgtggagcaggacctggccctgccagccatcgccgtcatcggggaccagagctcgggcaagagctccgtgttggaggcactgtcaggagttgcccttcccagaggcagcgggatcgtgaccagatgcccgctggtgctgaaactgaagaaacttgtgaacgaagataagtggagaggcaaggtcagttaccaggactacgagattgagatttcggatgcttcagaggtagaaaaggaaattaataaagcccagaatgccatcgccggggaaggaatgggaatcagtcatgagctaatcaccctggagatcagctcccgagatgtcccggatctgactctaatagaccttcctggcataaccagagtggctgtgggcaatcagcctgctgacattgggtataagatcaagacactcatcaagaagtacatccagaggcaggagacaatcagcctggtggtggtccccagtaatgtggacattgccaccacagaggctctcagcatggcccaggaggtggaccccgagggagacaggaccatcggaatcttgacgaagcctgatctggtggacaaaggaactgaagacaaggttgtggacgtggtgcggaacctcgtgttccacctgaagaagggttacatgattgtcaagtgccggggccagcaggagatccaggaccagctgagcctgtccgaagccctgcagagagagaagatcttctttgagaaccacccatatttcagggatctgctggaggaaggaaaggccacggttccctgcctggcagaaaaacttaccagcgagctcatcacacatatctgtaaatctctgcccctgttagaaaatcaaatcaaggagactcaccagagaataacagaggagctacaaaagtatggtgtcgacataccggaagacgaaaatgaaaaaatgttcttcctgatagataaaattaatgcctttaatcaggacatcactgctctcatgcaaggagaggaaactgtaggggaggaagacattcggctgtttaccagactccgacacgagttccacaaatggagtacaataattgaaaacaattttcaagaaggccataaaattttgagtagaaaaatccagaaatttgaaaatcagtatcgtggtagagagctgccaggctttgtgaattacaggacatttgagacaatcgtgaaacagcaaatcaaggcactggaagagccggctgtggatatgctacacaccgtgacggatatggtccggcttgctttcacagatgtttcgataaaaaattttgaagagttttttaacctccacagaaccgccaagtccaaaattgaagacattagagcagaacaagagagagaaggtgagaagctgatccgcctccacttccagatggaacagattgtctactgccaggaccaggtatacaggggtgcattgcagaaggtcagagagaaggagctggaagaagaaaagaagaagaaatcctgggattttggggctttccaatccagctcggcaacagactcttccatggaggagatctttcagcacctgatggcctatcaccaggaggccagcaagcgcatctccagccacatccctttgatcatccagttcttcatgctccagacgtacggccagcagcttcagaaggccatgctgcagctcctgcaggacaaggacacctacagctggctcctgaaggagcggagcgacaccagcgacaagcggaagttcctgaaggagcggcttgcacggctgacgcaggctcggcgccggcttgcccagttccccggttaaccacactctgtccagccccgtagacgtgcacgcacactgtctgcccccgttcccgggtagccactggactgacgacttgagtgctcagtagtcagactggatagtccgtctctgcttatccgttagccgtggtgatttagcaggaagctgtgagagcagtttggtttctagcatgaagacagagccccaccctcagatgcacatgagctggcgggattgaaggatgctgtcttcgtactgggaaagggattttcagccctcagaatcgctccaccttgcagctctccccttctctgtattcctagaaactgacacatgctgaacatcacagcttatttcctcatttttataatgtcccttcacaaacccagtgttttaggagcatgagtgccgtgtgtgtgcgtcctgtcggagccctgtctcctctctctgtaataaactcatttctagcaga

SEQ ID NO: 322169 - DNA, 2862 bp, Homo sapiens
ttcatttcttcgcggcgcggggcggggctgggcgcggggtgaaagaggcgaagcgagagcggaggccgcactccagcactgcgcagggaccgccttggaccgcagttgccggccaggaatcccagtgtcacggtggacacgcctccctcgcgcccttgccgcccacctgctcacccagctcaggggctttggaattctgtggccacactgcgaggagatcggttctgggtcggaggctacaggaagactcccactccctgaaatctggagtgaagaacgccgccatccagccaccattccaaggaggtgcaggagaacagctctgtgataccatttaacttgttgacattacttttatttgaaggaacgtatattagaggcatctgctttattttaagcttactttgcaaagaaggaagatggttgtttccgaagtggacatcgcaaaagctgatccagctgctgcatcccaccctctattactgaatggagatgctactgtggcccagaaaaatccaggctcggtggctgagaacaacctgtgcagccagtatgaggagaaggtgcgcccctgcatcgacctcattgactccctgcgggctctaggtgtggagcaggacctggccctgccagccatcgccgtcatcggggaccagagctcgggcaagagctccgtgttggaggcactgtcaggagttgcccttcccagaggcagcgggatcgtgaccagatgcccgctggtgctgaaactgaagaaacttgtgaacgaagataagtggagaggcaaggtcagttaccaggactacgagattgagatttcggatgcttcagaggtagaaaaggaaattaataaagcccagaatgccatcgccggggaaggaatgggaatcagtcatgagctaatcaccctggagatcagctcccgagatgtcccggatctgactctaatagaccttcctggcataaccagagtggctgtgggcaatcagcctgctgacattgggtataagatcaagacactcatcaagaagtacatccagaggcaggagacaatcagcctggtggtggtccccagtaatgtggacattgccaccacagaggctctcagcatggcccaggaggtggaccccgagggagacaggaccatcggaatcttgacgaagcctgatctggtggacaaaggaactgaagacaaggttgtggacgtggtgcggaacctcgtgttccacctgaagaagggttacatgattgtcaagtgccggggccagcaggagatccaggaccagctgagcctgtccgaagccctgcagagagagaagatcttctttgagaaccacccatatttcagggatctgctggaggaaggaaaggccacggttccctgcctggcagaaaaacttaccagcgagctcatcacacatatctgtaaatctctgcccctgttagaaaatcaaatcaaggagactcaccagagaataacagaggagctacaaaagtatggtgtcgacataccggaagacgaaaatgaaaaaatgttcttcctgatagataaaattaatgcctttaatcaggacatcactgctctcatgcaaggagaggaaactgtaggggaggaagacattcggctgtttaccagactccgacacgagttccacaaatggagtacaataattgaaaacaattttcaagaaggccataaaattttgagtagaaaaatccagaaatttgaaaatcagtatcgtggtagagagctgccaggctttgtgaattacaggacatttgagacaatcgtgaaacagcaaatcaaggcactggaagagccggctgtggatatgctacacaccgtgacggatatggtccggcttgctttcacagatgtttcgataaaaaattttgaagagttttttaacctccacagaaccgccaagtccaaaattgaagacattagagcagaacaagagagagaaggtgagaagctgatccgcctccacttccagatggaacagattgtctactgccaggaccaggtatacaggggtgcattgcagaaggtcagagagaaggagctggaagaagaaaagaagaagaaatcctgggattttggggctttccaatccagctcggcaacagactcttccatggaggagatctttcagcacctgatggcctatcaccaggaggccagcaagcgcatctccagccacatccctttgatcatccagttcttcatgctccagacgtacggccagcagcttcagaaggccatgctgcagctcctgcaggacaaggacacctacagctggctcctgaaggagcggagcgacaccagcgacaagcggaagttcctgaaggagcggcttgcacggctgacgcaggctcggcgccggcttgcccagttccccggttaaccacactctgtccagccccgtagacgtgcacgcacactgtctgcccccgttcccgggtagccactggactgacgacttgagtgctcagtagtcagactggatagtccgtctctgcttatccgttagccgtggtgatttagcaggaagctgtgagagcagtttggtttctagcatgaagacagagccccaccctcagatgcacatgagctggcgggattgaaggatgctgtcttcgtactgggaaagggattttcagccctcagaatcgctccaccttgcagctctccccttctctgtattcctagaaactgacacatgctgaacatcacagcttatttcctcatttttataatgtcccttcacaaacccagtgttttaggagcatgagtgccgtgtgtgtgcgtcctgtcggagccctgtctcctctctctgtaataaactcatttctagcaga

SEQ ID NO: 322170 - DNA, 2787 bp, Homo sapiens
ttcatttcttcgcggcgcggggcggggctgggcgcggggtgaaagaggcgaagcgagagcggaggccgcactccagcactgcgcagggaccgccttggaccgcagttgccggccaggaatcccagtgtcacggtggacacgcctccctcgcgcccttgccgcccacctgctcacccagctcaggggctttggaattctgtggccacactgcgaggagatcggttctgggtcggaggctacaggaagactcccactccctgaaatctggagtgaagaacgccgccatccagccaccattccaaggaggtgcaggagaacagctctgtgataccatttaacttgttgacattacttttatttgaaggaacgtatattagagcttactttgcaaagaaggaagatggttgtttccgaagtggacatcgcaaaagctgatccagctgctgcatcccaccctctattactgaatggagatgctactgtggcccagaaaaatccaggctcggtggctgagaacaacctgtgcagccagtatgaggagaaggtgcgcccctgcatcgacctcattgactccctgcgggctctaggtgtggagcaggacctggccctgccagccatcgccgtcatcggggaccagagctcgggcaagagctccgtgttggaggcactgtcaggagttgcccttcccagaggcagcgggatcgtgaccagatgcccgctggtgctgaaactgaagaaacttgtgaacgaagataagtggagaggcaaggtcagttaccaggactacgagattgagatttcggatgcttcagaggtagaaaaggaaattaataaagcccagaatgccatcgccggggaaggaatgggaatcagtcatgagctaatcaccctggagatcagctcccgagatgtcccggatctgactctaatagaccttcctggcataaccagagtggctgtgggcaatcagcctgctgacattgggtataagatcaagacactcatcaagaagtacatccagaggcaggagacaatcagcctggtggtggtccccagtaatgtggacattgccaccacagaggctctcagcatggcccaggaggtggaccccgagggagacaggaccatcggaatcttgacgaagcctgatctggtggacaaaggaactgaagacaaggttgtggacgtggtgcggaacctcgtgttccacctgaagaagggttacatgattgtcaagtgccggggccagcaggagatccaggaccagctgagcctgtccgaagccctgcagagagagaagatcttctttgagaaccacccatatttcagggatctgctggaggaaggaaaggccacggttccctgcctggcagaaaaacttaccagcgagctcatcacacatatctgtaaatctctgcccctgttagaaaatcaaatcaaggagactcaccagagaataacagaggagctacaaaagtatggtgtcgacataccggaagacgaaaatgaaaaaatgttcttcctgatagataaaattaatgcctttaatcaggacatcactgctctcatgcaaggagaggaaactgtaggggaggaagacattcggctgtttaccagactccgacacgagttccacaaatggagtacaataattgaaaacaattttcaagaaggccataaaattttgagtagaaaaatccagaaatttgaaaatcagtatcgtggtagagagctgccaggctttgtgaattacaggacatttgagacaatcgtgaaacagcaaatcaaggcactggaagagccggctgtggatatgctacacaccgtgacggatatggtccggcttgctttcacagatgtttcgataaaaaattttgaagagttttttaacctccacagaaccgccaagcctccacttccagatggaacagattgtctactgccaggaccaggtatacaggggtgcattgcagaaggtcagagagaaggagctggaagaagaaaagaagaagaaatcctgggattttggggctttccaatccagctcggcaacagactcttccatggaggagatctttcagcacctgatggcctatcaccaggaggccagcaagcgcatctccagccacatccctttgatcatccagttcttcatgctccagacgtacggccagcagcttcagaaggccatgctgcagctcctgcaggacaaggacacctacagctggctcctgaaggagcggagcgacaccagcgacaagcggaagttcctgaaggagcggcttgcacggctgacgcaggctcggcgccggcttgcccagttccccggttaaccacactctgtccagccccgtagacgtgcacgcacactgtctgcccccgttcccgggtagccactggactgacgacttgagtgctcagtagtcagactggatagtccgtctctgcttatccgttagccgtggtgatttagcaggaagctgtgagagcagtttggtttctagcatgaagacagagccccaccctcagatgcacatgagctggcgggattgaaggatgctgtcttcgtactgggaaagggattttcagccctcagaatcgctccaccttgcagctctccccttctctgtattcctagaaactgacacatgctgaacatcacagcttatttcctcatttttataatgtcccttcacaaacccagtgttttaggagcatgagtgccgtgtgtgtgcgtcctgtcggagccctgtctcctctctctgtaataaactcatttctagcaga

SEQ ID NO: 322171 - DNA, 1824 bp, Homo sapiens
tataaaaacatatctatacatgtctgtgtatttttgtgatgaccaagtctatagtcaaacaccatgatacacatttattatatcagctggaagagctcattccatatcattgtggaaatatcctagattgctaaaattcagtcataatcctattcaatccagttctgagtatttgttgggtaccaactgcaagacattccatccagttgtaagcaactgaaatttgccttgactttccccaacagcaaaaaggcagacatgcgtgttctggctacatcaaggtggaaatcggtcctgtgttctcttctagggatctgctggaggaaggaaaggccacggttccctgcctggcagaaaaacttaccagcgagctcatcacacatatctgtaaatctctgcccctgttagaaaatcaaatcaaggagactcaccagagaataacagaggagctacaaaagtatggtgtcgacataccggaagacgaaaatgaaaaaatgttcttcctgatagataaaattaatgcctttaatcaggacatcactgctctcatgcaaggagaggaaactgtaggggaggaagacattcggctgtttaccagactccgacacgagttccacaaatggagtacaataattgaaaacaattttcaagaaggccataaaattttgagtagaaaaatccagaaatttgaaaatcagtatcgtggtagagagctgccaggctttgtgaattacaggacatttgagacaatcgtgaaacagcaaatcaaggcactggaagagccggctgtggatatgctacacaccgtgacggatatggtccggcttgctttcacagatgtttcgataaaaaattttgaagagttttttaacctccacagaaccgccaagtccaaaattgaagacattagagcagaacaagagagagaaggtgagaagctgatccgcctccacttccagatggaacagattgtctactgccaggaccaggtatacaggggtgcattgcagaaggtcagagagaaggagctggaagaagaaaagaagaagaaatcctgggattttggggctttccaatccagctcggcaacagactcttccatggaggagatctttcagcacctgatggcctatcaccaggaggccagcaagcgcatctccagccacatccctttgatcatccagttcttcatgctccagacgtacggccagcagcttcagaaggccatgctgcagctcctgcaggacaaggacacctacagctggctcctgaaggagcggagcgacaccagcgacaagcggaagttcctgaaggagcggcttgcacggctgacgcaggctcggcgccggcttgcccagttccccggttaaccacactctgtccagccccgtagacgtgcacgcacactgtctgcccccgttcccgggtagccactggactgacgacttgagtgctcagtagtcagactggatagtccgtctctgcttatccgttagccgtggtgatttagcaggaagctgtgagagcagtttggtttctagcatgaagacagagccccaccctcagatgcacatgagctggcgggattgaaggatgctgtcttcgtactgggaaagggattttcagccctcagaatcgctccaccttgcagctctccccttctctgtattcctagaaactgacacatgctgaacatcacagcttatttcctcatttttataatgtcccttcacaaacccagtgttttaggagcatgagtgccgtgtgtgtgcgtcctgtcggagccctgtctcctctctctgtaataaactcatttctagcaga

SEQ ID NO: 322172 - DNA, 1485 bp, Homo sapiens
accttgtattacaataaaattctgtgaggaagtagaatagaaatgagtttcaaaaattaaagataaataatataaattttttaaactaagagcttgttcttgtatttttttcaaatggataatgtagacactcaaattccattgatatatttaagagtgatttgacttatattaagagttgtattataaaatattaatatttataatttaaaagaaattacattctttgcagctatttaggataaaaagtttaaatatcaaataaatgtatgccaggggtcatttgcttttaagattcttccagcaaattattaagcaaaaagagcatgccttgctttttcatggtaaagagaagaagggagcagggagaggggaaactttacttcataccatttgatcctcatatttttttgcatcttaagaagagaacaaatgatcctaccaatattgaactatttttctctctttgattagatatggtccggcttgctttcacagatgtttcgataaaaaattttgaagagttttttaacctccacagaaccgccaagtccaaaattgaagacattagagcagaacaagagagagaaggtgagaagctgatccgcctccacttccagatggaacagattgtctactgccaggaccaggtatacaggggtgcattgcagaaggtcagagagaaggagctggaagaagaaaagaagaagaaatcctgggattttggggctttccaatccagctcggcaacagactcttccatggaggagatctttcagcacctgatggcctatcaccaggaggccagcaagcgcatctccagccacatccctttgatcatccagttcttcatgctccagacgtacggccagcagcttcagaaggccatgctgcagctcctgcaggacaaggacacctacagctggctcctgaaggagcggagcgacaccagcgacaagcggaagttcctgaaggagcggcttgcacggctgacgcaggctcggcgccggcttgcccagttccccggttaaccacactctgtccagccccgtagacgtgcacgcacactgtctgcccccgttcccgggtagccactggactgacgacttgagtgctcagtagtcagactggatagtccgtctctgcttatccgttagccgtggtgatttagcaggaagctgtgagagcagtttggtttctagcatgaagacagagccccaccctcagatgcacatgagctggcgggattgaaggatgctgtcttcgtactgggaaagggattttcagccctcagaatcgctccaccttgcagctctccccttctctgtattcctagaaactgacacatgctgaacatcacagcttatttcctcatttttataatgtcccttcacaaacccagtgttttaggagcatgagtgccgtgtgtgtgcgtcctgtcggagccctgtctcctctctctgtaataaactcatttctagcaga

SEQ ID NO: 322173 - DNA, 1695 bp, Homo sapiens
aaaactttccatccagagtgaggaaagagcctacaggaaatgagcctgggggacagactgggccaagagaccagacttagccactcttagaaataggtgtccccggcacagatgaggagcctggccccatgattcaccagctggaggccttgggatgtgccacttccagcctgtgcccctgactcctcattcataaaagaagactgataaggccttcctcagaaggttgagatggacgtggagtaagatgtttaggatgcacctgccactgtgcactgtgcctctcctcaaggcctggagggtccaggggtgaagtttctcctcctcaggttttggcaaccagtttctctaaaccccgggaacataaaacataattttctgacttaaacatggctttcctgctcatccctgtggattatctgatggatatgacaatcctcgccatcagatatagaagcccctaaaagagaaaggaaagaagctgagttacggggcctgaaagcaagcctgtgcaggtccccaggccccgggatgggggtccggcccatctgtggctcaagcctcctgggaagctctgaccctcagccagggctagaaacctgccttagatacaccagggcgcggcccagagggctgttccaggaaacgtgctgtttcactcacgttgggtaacctggtatttacggacttcttacctactttcctgtgactcaggaatttgtgtcttgagggaaactgtatttatttattttttactgtagtccaaaattgaagacattagagcagaacaagagagagaaggtgagaagctgatccgcctccacttccagatggaacagattgtctactgccaggaccaggtatacaggggtgcattgcagaaggtcagagagaaggagctggaagaagaaaagaagaagaaatcctgggattttggggctttccaatccagctcggcaacagactcttccatggaggagatctttcagcacctgatggcctatcaccaggaggccagcaagcgcatctccagccacatccctttgatcatccagttcttcatgctccagacgtacggccagcagcttcagaaggccatgctgcagctcctgcaggacaaggacacctacagctggctcctgaaggagcggagcgacaccagcgacaagcggaagttcctgaaggagcggcttgcacggctgacgcaggctcggcgccggcttgcccagttccccggttaaccacactctgtccagccccgtagacgtgcacgcacactgtctgcccccgttcccgggtagccactggactgacgacttgagtgctcagtagtcagactggatagtccgtctctgcttatccgttagccgtggtgatttagcaggaagctgtgagagcagtttggtttctagcatgaagacagagccccaccctcagatgcacatgagctggcgggattgaaggatgctgtcttcgtactgggaaagggattttcagccctcagaatcgctccaccttgcagctctccccttctctgtattcctagaaactgacacatgctgaacatcacagcttatttcctcatttttataatgtcccttcacaaacccagtgttttaggagcatgagtgccgtgtgtgtgcgtcctgtcggagccctgtctcctctctctgtaataaactcatttctagcaga

SEQ ID NO: 322174 - DNA, 1169 bp, Homo sapiens
  misc_feature (891)..(891): n is a, c, g, or t
gaccagggccggccttccgattccccattcattccagaagcaccgaaccacgctgtgcccggatcccaagtgcagcggcacccagcgtgggcctggggttgccggttgacccggtcctcagcctggtagcagaggccaggccagtgccacaaggcacctaagtccacctgggcctggagcaggacaggttgcaaaagaaaatatctcgggacccccaaactccttatgctaagggaaacatcgagcctgggaactgagccatcaacgctgccattctttttcccaaacagaaccctgttgtcagaggtacacccagagcaactccacaccgggtgcatgccacagcaactccatcttaaataggagctggtaaaacgaggctgatacctactgggctgcattcccagacggcatagcgaggaggtgctgaagagcgcaggtttggagaatgatcacctggattggaaccatagctctaccaatatggaacccagctccttaggcctcggtcttctcatggagaacatggtgtgataatcctactcctctgggagggtggctgttaagccttggaccgcagttgccggccaggaatcccagtgtcacggtggacacgcctccctcgcgcccttgccgcccacctgctcacccagctcaggggctttggaattctgtggccacactgcgaggagatcggttctgggtcggaggctacaggaagactcccactccctgaaatctggagtgaagaacgccgccatccagccaccattccaaggtaaggcagaaatgaagtgggccgttgggttctttcttttctttctttcttttttttgagacaaggtctcgctccagcctggacaacagagggagactctgtctcaaaaaaanaaaaaaaaacctacagctgttcaaggaccagctgacaggtcaagtgtggccttttctggtctttgaacacatcatagaaagtgacaaatgctgcaaagccatgaagaacatgaactataaacgggtagactaactgcccagcttagacacttatctatgccacaaaacagctgaatttgtcacatttatatattgcaatatgggaagtattgagatcaaaacaggattccattgatctaattatattaagctaataaactaattttttgaatttttga

SEQ ID NO: 322175 - DNA, 821 bp, Homo sapiens
cgcgggcgcgggcaggcggacggacttgcaggaaatgcagccgggaggatgggcaggttgtgggatgctccgccgttccgcgaccacccgcctccccggcccagcagaaccgggtccaggctgggggaggtgctagcggtgtatgcacctaagtccacctgggcctggagcaggacagaaccctgttgtcagaggtacacccagagcaactccacaccgggtgcatgccacagcaactccatcttaaataggagctggtaaaacgaggctgatacctactgggctgcattcccagacggcatagcgaggaggtgctgaagagcgcaggtttggagaatgatcacctggattggaaccatagctctaccaatatggaacccagctccttaggcctcggtcttctcatggagaacatggtgtgataatcctactcctctgggagggtggctgttaaggtgagtgattgcacacgagtccctctagctgatgttaccgagcggtccttgtttttagagctcccaagagggtggcgggccacttccaagatggcggcaagcctcttgttctctgacctggggttcttggcctcacagattccaaggaatggaatcttggggcatgtggtgagtgttctcattaggacgaacccaggcacttagacatgcgggaacaatggcgagcctttagcccgaatgggagcggcaatgggtgcctcgctggatcaggagcacagcggacacactgccggatccagaggggtggacatcagtggtgggtctgtgatggcggcaaacaacagcagacagcaaatggcagtggtg

SEQ ID NO: 322176 - DNA, 3309 bp, Homo sapiens
cgcgggcgcgggcaggcggacggacttgcaggaaatgcagccgggaggatgggcaggttgtgggatgctccgccgttccgcgaccacccgcctccccggcccagcagaaccgggtccaggctgggggaggtgctagcggtgtatgcacctaagtccacctgggcctggagcaggacaggttgcaaaagaaaatatctcgggacccccaaactccttatgctaagggaaacatcgagcctgggaactgagccatcaacgctgccattctttttcccaaacagaaccctgttgtcagaggtacacccagagcaactccacaccgggtgcatgccacagcaactccatcttaaataggagctggtaaaacgaggctgatacctactgggctgcattcccagacggcatagcgaggaggtgctgaagagcgcaggtttggagaatgatcacctggattggaaccatagctctaccaatatggaacccagctccttaggcctcggtcttctcatggagaacatggtgtgataatcctactcctctgggagggtggctgttaagccttggaccgcagttgccggccaggaatcccagtgtcacggtggacacgcctccctcgcgcccttgccgcccacctgctcacccagctcaggggctttggaattctgtggccacactgcgaggagatcggttctgggtcggaggctacaggaagactcccactccctgaaatctggagtgaagaacgccgccatccagccaccattccaaggaggtgcaggagaacagctctgtgataccatttaacttgttgacattacttttatttgaaggaacgtatattagagcttactttgcaaagaaggaagatggttgtttccgaagtggacatcgcaaaagctgatccagctgctgcatcccaccctctattactgaatggagatgctactgtggcccagaaaaatccaggctcggtggctgagaacaacctgtgcagccagtatgaggagaaggtgcgcccctgcatcgacctcattgactccctgcgggctctaggtgtggagcaggacctggccctgccagccatcgccgtcatcggggaccagagctcgggcaagagctccgtgttggaggcactgtcaggagttgcccttcccagaggcagcgggatcgtgaccagatgcccgctggtgctgaaactgaagaaacttgtgaacgaagataagtggagaggcaaggtcagttaccaggactacgagattgagatttcggatgcttcagaggtagaaaaggaaattaataaagcccagaatgccatcgccggggaaggaatgggaatcagtcatgagctaatcaccctggagatcagctcccgagatgtcccggatctgactctaatagaccttcctggcataaccagagtggctgtgggcaatcagcctgctgacattgggtataagatcaagacactcatcaagaagtacatccagaggcaggagacaatcagcctggtggtggtccccagtaatgtggacattgccaccacagaggctctcagcatggcccaggaggtggaccccgagggagacaggaccatcggaatcttgacgaagcctgatctggtggacaaaggaactgaagacaaggttgtggacgtggtgcggaacctcgtgttccacctgaagaagggttacatgattgtcaagtgccggggccagcaggagatccaggaccagctgagcctgtccgaagccctgcagagagagaagatcttctttgagaaccacccatatttcagggatctgctggaggaaggaaaggccacggttccctgcctggcagaaaaacttaccagcgagctcatcacacatatctgtaaatctctgcccctgttagaaaatcaaatcaaggagactcaccagagaataacagaggagctacaaaagtatggtgtcgacataccggaagacgaaaatgaaaaaatgttcttcctgatagataaaattaatgcctttaatcaggacatcactgctctcatgcaaggagaggaaactgtaggggaggaagacattcggctgtttaccagactccgacacgagttccacaaatggagtacaataattgaaaacaattttcaagaaggccataaaattttgagtagaaaaatccagaaatttgaaaatcagtatcgtggtagagagctgccaggctttgtgaattacaggacatttgagacaatcgtgaaacagcaaatcaaggcactggaagagccggctgtggatatgctacacaccgtgacggatatggtccggcttgctttcacagatgtttcgataaaaaattttgaagagttttttaacctccacagaaccgccaagtccaaaattgaagacattagagcagaacaagagagagaaggtgagaagctgatccgcctccacttccagatggaacagattgtctactgccaggaccaggtatacaggggtgcattgcagaaggtcagagagaaggagctggaagaagaaaagaagaagaaatcctgggattttggggctttccaatccagctcggcaacagactcttccatggaggagatctttcagcacctgatggcctatcaccaggaggccagcaagcgcatctccagccacatccctttgatcatccagttcttcatgctccagacgtacggccagcagcttcagaaggccatgctgcagctcctgcaggacaaggacacctacagctggctcctgaaggagcggagcgacaccagcgacaagcggaagttcctgaaggagcggcttgcacggctgacgcaggctcggcgccggcttgcccagttccccggttaaccacactctgtccagccccgtagacgtgcacgcacactgtctgcccccgttcccgggtagccactggactgacgacttgagtgctcagtagtcagactggatagtccgtctctgcttatccgttagccgtggtgatttagcaggaagctgtgagagcagtttggtttctagcatgaagacagagccccaccctcagatgcacatgagctggcgggattgaaggatgctgtcttcgtactgggaaagggattttcagccctcagaatcgctccaccttgcagctctccccttctctgtattcctagaaactgacacatgctgaacatcacagcttatttcctcatttttataatgtcccttcacaaacccagtgttttaggagcatgagtgccgtgtgtgtgcgtcctgtcggagccctgtctcctctctctgtaataaactcatttctagcaga

SEQ ID NO: 322177 - DNA, 2744 bp, Homo sapiens
ttcatttcttcgcggcgcggggcggggctgggcgcggggtgaaagaggcgaagcgagagcggaggccgcactccagcactgcgcagggaccggaattctgtggccacactgcgaggagatcggttctgggtcggaggctacaggaagactcccactccctgaaatctggagtgaagaacgccgccatccagccaccattccaaggaggtgcaggagaacagctctgtgataccatttaacttgttgacattacttttatttgaaggaacgtatattagagcttactttgcaaagaaggaagatggttgtttccgaagtggacatcgcaaaagctgatccagctgctgcatcccaccctctattactgaatggagatgctactgtggcccagaaaaatccaggctcggtggctgagaacaacctgtgcagccagtatgaggagaaggtgcgcccctgcatcgacctcattgactccctgcgggctctaggtgtggagcaggacctggccctgccagccatcgccgtcatcggggaccagagctcgggcaagagctccgtgttggaggcactgtcaggagttgcccttcccagaggcagcgggatcgtgaccagatgcccgctggtgctgaaactgaagaaacttgtgaacgaagataagtggagaggcaaggtcagttaccaggactacgagattgagatttcggatgcttcagaggtagaaaaggaaattaataaagcccagaatgccatcgccggggaaggaatgggaatcagtcatgagctaatcaccctggagatcagctcccgagatgtcccggatctgactctaatagaccttcctggcataaccagagtggctgtgggcaatcagcctgctgacattgggtataagatcaagacactcatcaagaagtacatccagaggcaggagacaatcagcctggtggtggtccccagtaatgtggacattgccaccacagaggctctcagcatggcccaggaggtggaccccgagggagacaggaccatcggaatcttgacgaagcctgatctggtggacaaaggaactgaagacaaggttgtggacgtggtgcggaacctcgtgttccacctgaagaagggttacatgattgtcaagtgccggggccagcaggagatccaggaccagctgagcctgtccgaagccctgcagagagagaagatcttctttgagaaccacccatatttcagggatctgctggaggaaggaaaggccacggttccctgcctggcagaaaaacttaccagcgagctcatcacacatatctgtaaatctctgcccctgttagaaaatcaaatcaaggagactcaccagagaataacagaggagctacaaaagtatggtgtcgacataccggaagacgaaaatgaaaaaatgttcttcctgatagataaaattaatgcctttaatcaggacatcactgctctcatgcaaggagaggaaactgtaggggaggaagacattcggctgtttaccagactccgacacgagttccacaaatggagtacaataattgaaaacaattttcaagaaggccataaaattttgagtagaaaaatccagaaatttgaaaatcagtatcgtggtagagagctgccaggctttgtgaattacaggacatttgagacaatcgtgaaacagcaaatcaaggcactggaagagccggctgtggatatgctacacaccgtgacggatatggtccggcttgctttcacagatgtttcgataaaaaattttgaagagttttttaacctccacagaaccgccaagtccaaaattgaagacattagagcagaacaagagagagaaggtgagaagctgatccgcctccacttccagatggaacagattgtctactgccaggaccaggtatacaggggtgcattgcagaaggtcagagagaaggagctggaagaagaaaagaagaagaaatcctgggattttggggctttccaatccagctcggcaacagactcttccatggaggagatctttcagcacctgatggcctatcaccaggaggccagcaagcgcatctccagccacatccctttgatcatccagttcttcatgctccagacgtacggccagcagcttcagaaggccatgctgcagctcctgcaggacaaggacacctacagctggctcctgaaggagcggagcgacaccagcgacaagcggaagttcctgaaggagcggcttgcacggctgacgcaggctcggcgccggcttgcccagttccccggttaaccacactctgtccagccccgtagacgtgcacgcacactgtctgcccccgttcccgggtagccactggactgacgacttgagtgctcagtagtcagactggatagtccgtctctgcttatccgttagccgtggtgatttagcaggaagctgtgagagcagtttggtttctagcatgaagacagagccccaccctcagatgcacatgagctggcgggattgaaggatgctgtcttcgtactgggaaagggattttcagccctcagaatcgctccaccttgcagctctccccttctctgtattcctagaaactgacacatgctgaacatcacagcttatttcctcatttttataatgtcccttcacaaacccagtgttttaggagcatgagtgccgtgtgtgtgcgtcctgtcggagccctgtctcctctctctgtaataaactcatttctagcaga

SEQ ID NO: 322178 - DNA, 2705 bp, Homo sapiens
ttcatttcttcgcggcgcggggcggggctgggcgcggggtgaaagaggcgaagcgagagcggaggccgcactccagcactgcgcagggaccgccttggaccgcagttgccggccaggaatcccagtgtcacggtggacacgcctccctcgcgcccttgccgcccacctgctcacccagctcaggggctttggaattctgtggccacactgcgaggagatcggttctgggtcggaggctacaggaagactcccactccctgaaatctggagtgaagaacgccgccatccagccaccattccaaggaggtgcaggagaacagctctgtgataccatttaacttgttgacattacttttatttgaaggaacgtatattagagcttactttgcaaagaaggaagatggttgtttccgaagtggacatcgcaaaagctgatccagctgctgcatcccaccctctattactgaatggagatgctactgtggcccagaaaaatccaggctcggtggctgagaacaacctgtgcagccagtatgaggagaaggtgcgcccctgcatcgacctcattgactccctgcgggctctaggtgtggagcaggacctggccctgccagccatcgccgtcatcggggaccagagctcgggcaagagctccgtgttggaggcactgtcaggagttgcccttcccagaggcagcgcccagaatgccatcgccggggaaggaatgggaatcagtcatgagctaatcaccctggagatcagctcccgagatgtcccggatctgactctaatagaccttcctggcataaccagagtggctgtgggcaatcagcctgctgacattgggtataagatcaagacactcatcaagaagtacatccagaggcaggagacaatcagcctggtggtggtccccagtaatgtggacattgccaccacagaggctctcagcatggcccaggaggtggaccccgagggagacaggaccatcggaatcttgacgaagcctgatctggtggacaaaggaactgaagacaaggttgtggacgtggtgcggaacctcgtgttccacctgaagaagggttacatgattgtcaagtgccggggccagcaggagatccaggaccagctgagcctgtccgaagccctgcagagagagaagatcttctttgagaaccacccatatttcagggatctgctggaggaaggaaaggccacggttccctgcctggcagaaaaacttaccagcgagctcatcacacatatctgtaaatctctgcccctgttagaaaatcaaatcaaggagactcaccagagaataacagaggagctacaaaagtatggtgtcgacataccggaagacgaaaatgaaaaaatgttcttcctgatagataaaattaatgcctttaatcaggacatcactgctctcatgcaaggagaggaaactgtaggggaggaagacattcggctgtttaccagactccgacacgagttccacaaatggagtacaataattgaaaacaattttcaagaaggccataaaattttgagtagaaaaatccagaaatttgaaaatcagtatcgtggtagagagctgccaggctttgtgaattacaggacatttgagacaatcgtgaaacagcaaatcaaggcactggaagagccggctgtggatatgctacacaccgtgacggatatggtccggcttgctttcacagatgtttcgataaaaaattttgaagagttttttaacctccacagaaccgccaagtccaaaattgaagacattagagcagaacaagagagagaaggtgagaagctgatccgcctccacttccagatggaacagattgtctactgccaggaccaggtatacaggggtgcattgcagaaggtcagagagaaggagctggaagaagaaaagaagaagaaatcctgggattttggggctttccaatccagctcggcaacagactcttccatggaggagatctttcagcacctgatggcctatcaccaggaggccagcaagcgcatctccagccacatccctttgatcatccagttcttcatgctccagacgtacggccagcagcttcagaaggccatgctgcagctcctgcaggacaaggacacctacagctggctcctgaaggagcggagcgacaccagcgacaagcggaagttcctgaaggagcggcttgcacggctgacgcaggctcggcgccggcttgcccagttccccggttaaccacactctgtccagccccgtagacgtgcacgcacactgtctgcccccgttcccgggtagccactggactgacgacttgagtgctcagtagtcagactggatagtccgtctctgcttatccgttagccgtggtgatttagcaggaagctgtgagagcagtttggtttctagcatgaagacagagccccaccctcagatgcacatgagctggcgggattgaaggatgctgtcttcgtactgggaaagggattttcagccctcagaatcgctccaccttgcagctctccccttctctgtattcctagaaactgacacatgctgaacatcacagcttatttcctcatttttataatgtcccttcacaaacccagtgttttaggagcatgagtgccgtgtgtgtgcgtcctgtcggagccctgtctcctctctctgtaataaactcatttctagcaga

SEQ ID NO: 322179 - DNA, 1678 bp, Homo sapiens
ttcatttcttcgcggcgcggggcggggctgggcgcggggtgaaagaggcgaagcgagagcggaggccgcactccagcactgcgcagggaccgccaggaccagctgagcctgtccgaagccctgcagagagagaagatcttctttgagaaccacccatatttcagggatctgctggaggaaggaaaggccacggttccctgcctggcagaaaaacttaccagcgagctcatcacacatatctgtaaatctctgcccctgttagaaaatcaaatcaaggagactcaccagagaataacagaggagctacaaaagtatggtgtcgacataccggaagacgaaaatgaaaaaatgttcttcctgatagataaaattaatgcctttaatcaggacatcactgctctcatgcaaggagaggaaactgtaggggaggaagacattcggctgtttaccagactccgacacgagttccacaaatggagtacaataattgaaaacaattttcaagaaggccataaaattttgagtagaaaaatccagaaatttgaaaatcagtatcgtggtagagagctgccaggctttgtgaattacaggacatttgagacaatcgtgaaacagcaaatcaaggcactggaagagccggctgtggatatgctacacaccgtgacggatatggtccggcttgctttcacagatgtttcgataaaaaattttgaagagttttttaacctccacagaaccgccaagtccaaaattgaagacattagagcagaacaagagagagaaggtgagaagctgatccgcctccacttccagatggaacagattgtctactgccaggaccaggtatacaggggtgcattgcagaaggtcagagagaaggagctggaagaagaaaagaagaagaaatcctgggattttggggctttccaatccagctcggcaacagactcttccatggaggagatctttcagcacctgatggcctatcaccaggaggccagcaagcgcatctccagccacatccctttgatcatccagttcttcatgctccagacgtacggccagcagcttcagaaggccatgctgcagctcctgcaggacaaggacacctacagctggctcctgaaggagcggagcgacaccagcgacaagcggaagttcctgaaggagcggcttgcacggctgacgcaggctcggcgccggcttgcccagttccccggttaaccacactctgtccagccccgtagacgtgcacgcacactgtctgcccccgttcccgggtagccactggactgacgacttgagtgctcagtagtcagactggatagtccgtctctgcttatccgttagccgtggtgatttagcaggaagctgtgagagcagtttggtttctagcatgaagacagagccccaccctcagatgcacatgagctggcgggattgaaggatgctgtcttcgtactgggaaagggattttcagccctcagaatcgctccaccttgcagctctccccttctctgtattcctagaaactgacacatgctgaacatcacagcttatttcctcatttttataatgtcccttcacaaacccagtgttttaggagcatgagtgccgtgtgtgtgcgtcctgtcggagccctgtctcctctctctgtaataaactcatttctagcaga

SEQ ID NO: 322180 - DNA, 3105 bp, Homo sapiens
  misc_feature (3051)..(3051): n is a, c, g, or t
ttcatttcttcgcggcgcggggcggggctgggcgcggggtgaaagaggcgaagcgagagcggaggccgcactccagcactgcgcagggaccgccttggaccgcagttgccggccaggaatcccagtgtcacggtggacacgcctccctcgcgcccttgccgcccacctgctcacccagctcaggggctttggaattctgtggccacactgcgaggagatcggttctgggtcggaggctacaggaagactcccactccctgaaatctggagtgaagaacgccgccatccagccaccattccaaggaggtgcaggagaacagctctgtgataccatttaacttgttgacattacttttatttgaaggaacgtatattagagcttactttgcaaagaaggaagatggttgtttccgaagtggacatcgcaaaagctgatccagctgctgcatcccaccctctattactgaatggagatgctactgtggcccagaaaaatccaggctcggtggctgagaacaacctgtgcagccagtatgaggagaaggtgcgcccctgcatcgacctcattgactccctgcgggctctaggtgtggagcaggacctggccctgccagccatcgccgtcatcggggaccagagctcgggcaagagctccgtgttggaggcactgtcaggagttgcccttcccagaggcagcgggatcgtgaccagatgcccgctggtgctgaaactgaagaaacttgtgaacgaagataagtggagaggcaaggtcagttaccaggactacgagattgagatttcggatgcttcagaggtagaaaaggaaattaataaagcccagaatgccatcgccggggaaggaatgggaatcagtcatgagctaatcaccctggagatcagctcccgagatgtcccggatctgactctaatagaccttcctggcataaccagagtggctgtgggcaatcagcctgctgacattgggtataagatcaagacactcatcaagaagtacatccagaggcaggagacaatcagcctggtggtggtccccagtaatgtggacattgccaccacagaggctctcagcatggcccaggaggtggaccccgagggagacaggaccatcggaatcttgacgaagcctgatctggtggacaaaggaactgaagacaaggttgtggacgtggtgcggaacctcgtgttccacctgaagaagggttacatgattgtcaagtgccggggccagcaggagatccaggaccagctgagcctgtccgaagccctgcagagagagaagatcttctttgagaaccacccatatttcagggatctgctggaggaaggaaaggccacggttccctgcctggcagaaaaacttaccagcgagctcatcacacatatctgtaaatctctgcccctgttagaaaatcaaatcaaggagactcaccagagaataacagaggagctacaaaagtatggtgtcgacataccggaagacgaaaatgaaaaaatgttcttcctgatagataaaattaatgcctttaatcaggacatcactgctctcatgcaaggagaggaaactgtaggggaggaagacattcggctgtttaccagactccgacacgagttccacaaatggagtacaataattgaaaacaattttcaagaaggccataaaattttgagtagaaaaatccagaaatttgaaaatcagtatcgtggtagagagctgccaggctttgtgaattacaggacatttgagacaatcgtgaaacagcaaatcaaggcactggaagagccggctgtggatatgctacacaccgtgacggatatggtccggcttgctttcacagatgtttcgataaaaaattttgaagagttttttaacctccacagaaccgccaagtccaaaattgaagacattagagcagaacaagagagagaaggtgagaagctgatccgcctccacttccagatggaacagattgtctactgccaggaccaggtatacaggggtgcattgcagaaggtcagagagaaggagctggaagaagaaaagaagaagaaatcctgggattttggggctttccaatccagctcggcaacagactcttccatggaggagatctttcagcacctgatggcctatcaccaggaggccagcaagcgcatctccagccacatccctttgatcatccagttcttcatgctccagacgtacggccagcagcttcagaaggccatgctgcagctcctgcaggacaaggacacctacagctggctcctgaaggagcggagcgacaccagcgacaagcggaagttcctgaaggagcggcttgcacggctgacgcaggctcggcgccggcttgcccagttccccggttaaccacactctgtccagccccgtagacgtgcacgcacactgtctgcccccgttcccgggtagccactggactgacgacttgagtgctcagtagtcagactggatagtccgtctctgcttatccgttagccgtggtgatttagcaggaagctgtgagagcagtttggtttctagcatgaagacagagccccaccctcagatgcacatgagctggcgggattgaaggatgctgtcttcgtactgggaaagggattttcagccctcagaatcgctccaccttgcagctctccccttctctgtattcctagaaactgacacatgctgaacatcacagcttatttcctcatttttataatgtcccttcacaaacccagtgttttaggagcatgagtgccgtgtgtgtgcgtcctgtcggagccctgtctcctctctctgtaataaactcatttctagcagaaaaaaaaaaaaaaaaactcgagttttttttttttttttttttttgcagtcagcaggtttactatgtttattaaagtcacataaatggtttgacaaaagtgcacaatagaatgacatcaccgttttgttataaatcacagtgaattactagaatacaacagtgtagttcctctgcacggaggattgcaggatggggtgaaaaacacaangtcttttccatcgattaggccagtcagattttactccccaactgtgtacctttg

SEQ ID NO: 322181 - DNA, 1372 bp, Homo sapiens
ttcatttcttcgcggcgcggggcggggctgggcgcggggtgaaagaggcgaagcgagagcggaggccgcactccagcactgcgcagggaccgccttggaccgcagttgccggccaggaatcccagtgtcacggtggacacgcctccctcgcgcccttgccgcccacctgctcacccagctcaggggctttggaattctgtggccacactgcgaggagatcggttctgggtcggaggctacaggaagactcccactccctgaaatctggagtgaagaacgccgccatccagccaccattccaaggaggtgcaggagaacagctctgtgataccatttaacttgttgacattacttttatttgaaggaacgtatattagagcttactttgcaaagaaggaagatggttgtttccgaagtggacatcgcaaaagctgatccagctgctgcatcccaccctctattactgaatggagatgctactgtggcccagaaaaatccaggctcggtggctgagaacaacctgtgcagccagtatgaggagaaggtgcgcccctgcatcgacctcattgactccctgcgggctctaggtgtggagcaggacctggccctgccagccatcgccgtcatcggggaccagagctcgggcaagagctccgtgttggaggcactgtcaggagttgcccttcccagaggcagcgggatcgtgaccagatgcccgctggtgctgaaactgaagaaacttgtgaacgaagataagtggagaggcaaggtcagttaccaggactacgagattgagatttcggatgcttcagaggtagaaaaggaaattaataaagcccagaatgccatcgccggggaaggaatgggaatcagtcatgagctaatcaccctggagatcagctcccgagatgtcccggatctgactctaatagaccttcctggcataaccagagtggctgtgggcaatcagcctgctgacattgggtataagatcaagacactcatcaagaagtacatccagaggcaggagacaatcagcctggtggtggtccccagtaatgtggacattgccaccacagaggctctcagcatggcccaggaggtggaccccgagggagacaggaccatcggaatcttgacgaagcctgatctggtggacaaaggaactgaagacaaggttgtggacgtggtgcggaacctcgtgttccacctgaagaagggttacatgattgtcaagtgccggggccagcaggagatccaggaccagctgagcctgtccgaagccctgcagagagagaagatcttctttgagaaccacccatatttcaggtgcgcttgcctgggtttcatcatggatcagtccaagcccagg

SEQ ID NO: 322182 - DNA, 2782 bp, Homo sapiens
cggggacatgaggtggatactgttcattggggcccttattgggtccagcatctgtggccgagaaaaattttttggggaccaagttttgaggattaatgtcagaaatggagacgagatcagcaaattgagtcaactagtgaattcaaacaacttgaagctcaatttctggaaatctccctcctccttcaatcggcctgtggatgtcctggtcccatctgtcagtctgcaggcatttaaatccttcctgagatcccagggcttagagtacgcagtgacaattgaggacctgcaggcccttttagacaatgaagatgatgaaatgcaacacaatgaagggcaagaacggagcagtaataacttcaactacggggcttaccattccctggaagctatttaccacgagatggacaacattgccgcagactttcctgacctggcgaggagggtgaagattggacattcgtttgaaaaccggccgatgtatgtactgaagttcagcactgggaaaggcgtgaggcggccggccgtttggctgaatgcaggcatccattcccgagagtggatctcccaggccactgcaatctggacggcaaggaagattgtatctgattaccagagggatccagctatcacctccatcttggagaaaatggatattttcttgttgcctgtggccaatcctgatggatatgtgtatactcaaactcaaaaccgattatggaggaagacgcggtcccgaaatcctggaagctcctgcattggtgctgacccaaatagaaactggaacgctagttttgcaggaaagggagccagcgacaacccttgctccgaagtgtaccatggaccccacgccaattcggaagtggaggtgaaatcagtggtagatttcatccaaaaacatgggaatttcaagggcttcatcgacctgcacagctactcgcagctgctgatgtatccatatgggtactcagtcaaaaaggccccagatgccgaggaactcgacaaggtggcgaggcttgcggccaaagctctggcttctgtgtcgggcactgagtaccaagtgggtcccacctgcaccactgtctatccagctagcgggagcagcatcgactgggcgtatgacaacggcatcaaatttgcattcacatttgagttgagagataccgggacctatggcttcctcctgccagctaaccagatcatccccactgcagaggagacgtggctggggctgaagaccatcatggagcatgtgcgggacaacctctactaggcgatggctctgctctgtctacatttatttgtacccacacgtgcacgcactgaggccattgttaaaggagctctttcctacctgtgtgagtcagagccctctgggtttgtggagcacacaggcctgcccctctccagccagctccctggagtcgtgtgtcctggcggtgtccctgcaagaactggttctgccagcctgctcaattttggtcctgctgtttttgatgagccttttgtctgtttctccttccaccctgctggctgggcggctgcactcagcatcaccccttcctgggtggcatgtctctctctacctcatttttagaaccaaagaacatctgagatgattctctaccctcatccacatctagccaagccagtgaccttgctctggtggcactgtgggagacaccacttgtctttaggtgggtctcaaagatgatgtagaatttcctttaatttctcgcagtcttcctggaaaatattttcctttgagcagcaaatcttgtagggatatcagtgaaggtctctccctccctcctctcctgttttttttttttggagacagagttttgctcttgttgcccaggctggagtgtgatggctcgatcttggctcaccacaacctctgcctcctgggttcaagcaattctcctgcctcagcctcttgagtagcttggtttataggcgcatgccaccatgcctggctaattttgtgtttttagtagagacagggtttctccatgttggtcaggctggtctcaaactcccaacctcaggtgatctgccctccttggcctcccagagtgctgggattacaggtgtgagccactgtgccgggcccgtcccctccttttttaggcctgaatacaaagtagaagatcactttccttcactgtgctgagaatttctagatactacagttcttactcctctcttccctttgttattcagtgtgaccaggatggcgggaggggatctgtgtcactgtaggtactgtgcccaggaaggctgggtgaagtgaccatctaaattgcaggatggtgaaattatccccatctgtcctaatgggcttacctcctctttgccttttgaactcacttcaaagatctaggcctcatcttacaggtcctaaatcactcatctggcctggataatctcactgccctggcacattcccatttgtgctgtggtgtatcctgtgtttccttgtcctggtttgtgtgtgtgtgtgtgtgtgtgtgtgtgtgtgtgtgtttgtgtgtgtgtgtctgtctattttgtatcctggaccacaagttcctaagtagagcaagaattcatcaaccagctgcctcttgtttcatttcacctcagcacgtaccatctgtccttttgttgttgttgttttgtttttgtttttttgcttttaccaaacatgtctgtaaatcttaacctcctgcctaggatttgtacagcatctggtgtgtgcttataagccaataaatattcaatgtgagtttcatgatca

SEQ ID NO: 322183 - DNA, 1123 bp, Homo sapiens
cttgggactgacctatgggaggatcaacttggactcctgtgttcacctgtgccctcttcactctttactaatttacttggatggcgacttccacttcatatagctcctagatgaggccagtgctgctgttcctctgatcacactccgaatggcaaagccccagataacttggacccaggtgctggccaataatgagtaatttagcaacatatgcctcaaaaaccatgcactacataagagacaataagttacttcgtgacaagtactatgatgagagttctaaggcaataaaatgtcagaaaatttccctaagatgaccccaggaataaggaatggagcctgtaaaaacactctttgggaggccgaggctggtctcaaactcccaacctcaggtgatctgccctccttggcctcccagagtgctgggattacaggtgtgagccactgtgccgggcccgtcccctccttttttaggcctgaatacaaagtagaagatcactttccttcactgtgctgagaatttctagatactacagttcttactcctctcttccctttgttattcagtgtgaccaggatggcgggaggggatctgtgtcactgtaggtactgtgcccaggaaggctgggtgaagtgaccatctaaattgcaggatggtgaaattatccccatctgtcctaatgggcttacctcctctttgccttttgaactcacttcaaagatctaggcctcatcttacaggtcctaaatcactcatctggcctggataatctcactgccctggcacattcccatttgtgctgtggtgtatcctgtgtttccttgtcctggtttgtgtgtgtgtgtgtgtgtgtgtgtgtgtgtgtgtgtttgtgtgtgtgtgtctgtctattttgtatcctggaccacaagttcctaagtagagcaagaattcatcaaccagctgcctcttgtttcatttcacctcagcacgtaccatctgtccttttgttgttgttgttttgtttttgtttttttgcttttaccaaacatgtctgtaaatcttaacctcctgcctaggatttgtacagcatctggtgtgtgcttataagccaataaatattcaatgtgagtttcatgatca

SEQ ID NO: 322184 - DNA, 1686 bp, Homo sapiens
cggggacatgaggtggatactgttcattggggcccttattgggtccagcatctgtggccgagaaaaattttttggggaccaagttttgaggattaatgtcagaaatggagacgagatcagcaaattgagtcaactagtgaattcaaacaacttgaagctcaatttctggaaatctccctcctccttcaatcggcctgtggatgtcctggtcccatctgtcagtctgcaggcatttaaatccttcctgagatcccagggcttagagtacgcagtgacaattgaggacctgcaggcccttttagacaatgaagatgatgaaatgcaacacaatgaagggcaagaacggagcagtaataacttcaactacggggcttaccattccctggaagctatttaccacgagatggacaacattgccgcagactttcctgacctggcgaggagggtgaagattggacattcgtttgaaaaccggccgatgtatgtactgaagttcagcactgggaaaggcgtgaggcggccggccgtttggctgaatgcaggcatccattcccgagagtggatctcccaggccactgcaatctggacggcaaggaagattgtatctgattaccagagggatccagctatcacctccatcttggagaaaatggatattttcttgttgcctgtggccaatcctgatggatatgtgtatactcaaactcaaaaccgattatggaggaagacgcggtcccgaaatcctggaagctcctgcattggtgctgacccaaatagaaactggaacgctagttttgcaggaaagggagccagcgacaacccttgctccgaagtgtaccatggaccccacgccaattcggaagtggaggtgaaatcagtggtagatttcatccaaaaacatgggaatttcaagggcttcatcgacctgcacagctactcgcagctgctgatgtatccatatgggtactcagtcaaaaaggccccagatgccgaggaactcgacaaggtggcgaggcttgcggccaaagctctggcttctgtgtcgggcactgagtaccaagtgggtcccacctgcaccactgtctatccagctagcgggagcagcatcgactgggcgtatgacaacggcatcaaatttgcattcacatttgagttgagagataccgggacctatggcttcctcctgccagctaaccagatcatccccactgcagaggagacgtggctggggctgaagaccatcatggagcatgtgcgggacaacctctactaggcgatggctctgctctgtctacatttatttgtacccacacgtgcacgcactgaggccattgttaaaggagctctttcctacctgtgtgagtcagagccctctgggtttgtggagcacacaggcctgcccctctccagccagctcccgtgtgtgtgtgtgtttgtgtgtgtgtgtctgtctattttgtatcctggaccacaagttcctaagtagagcaagaattcatcaaccagctgcctcttgtttcatttcacctcagcacgtaccatctgtccttttgttgttgttgttttgtttttgtttttttgcttttaccaaacatgtctgtaaatcttaacctcctgcctaggatttgtacagcatctggtgtgtgcttataagccaataaatattcaatgtgagtttcatgatca

SEQ ID NO: 322185 - DNA, 1603 bp, Homo sapiens
cggggacatgaggtggatactgttcattggggcccttattgggtccagcatctgtggccgagaaaaattttttggggaccaagttttgaggattaatgtcagaaatggagacgagatcagcaaattgagtcaactagtgaattcaaacaacttgaagctcaatttctggaaatctccctcctccttcaatcggcctgtggatgtcctggtcccatctgtcagtctgcaggcatttaaatccttcctgagatcccagggcttagagtacgcagtgacaattgaggacctgcaggcccttttagacaatgaagatgatgaaatgcaacacaatgaagggcaagaacggagcagtaataacttcaactacggggcttaccattccctggaagctatttaccacgagatggacaacattgccgcagactttcctgacctggcgaggagggtgaagattggacattcgtttgaaaaccggccgatgtatgtactgaagttcagcactgggaaaggcgtgaggcggccggccgtttggctgaatgcaggcatccattcccgagagtggatctcccaggccactgcaatctggacggcaaggaagattgtatctgattaccagagggatccagctatcacctccatcttggagaaaatggatattttcttgttgcctgtggccaatcctgatggatatgtgtatactcaaactcaaaaccgattatggaggaagacgcggtcccgaaatcctggaagctcctgcattggtgctgacccaaatagaaactggaacgctagttttgcaggaaagggagccagcgacaacccttgctccgaagtgtaccatggaccccacgccaattcggaagtggaggtgaaatcagtggtagatttcatccaaaaacatgggaatttcaagggcttcatcgacctgcacagctactcgcagctgctgatgtatccatatgggtactcagtcaaaaaggccccagatgccgaggaactcgacaaggtggcgaggcttgcggccaaagctctggcttctgtgtcgggcactgagtaccaagtgggtcccacctgcaccactgtctatccagctagcgggagcagcatcgactgggcgtatgacaacggcatcaaatttgcattcacatttgagttgagagataccgggacctatggcttcctcctgccagctaaccagatcatccccactgcagaggagacgtggctggggctgaagaccatcatggagcatgtgcgggacaacctctactaggcgatggctctgctctgtctacatttatttgtacccacacgtgcacgcactgaggccattgttaaaggagctctttcctacctgtgtgagtcagagccctctgggtttgtggagcacacaggcctgcccctctccagccagctccctgggcaacagagcaagactctgtcttaaaaaaagaaagaaagaaagtctgctgggagcggaggaggggtgcatgtggaggacacatcttccttccctcttcattggaggttcaaattcctaaaaactattacacgtgtggctcctcctcctggaacggaaggaataaagcacatacgcccagaa

SEQ ID NO: 322186 - DNA, 558 bp, Homo sapiens
agggggtgcagcaggcagactggggacccataggtcttcgtggaggctccaagccatgaaagccaggatactgctaaccatgcccagccccaggctcctccaacagctggtgacaaccggaagctccgggctgagcaaacattgaactcctaggcctggattgtggatgggaggagggagggttcaatcctggggtcagaattgggtggagaaagatgatgctcagcgtcagctctcttggtgaggcagttggccagagacaggtttgtggtccttgataagaggctgacagtgggaagacccctcaggcgaagatcatctcattcagccgccgcctccagacaggaggaggcagaattggcaggggtgtgctggctcctggccctggaatcagccctctcagtcaggcagggtggtgcagtgatatgaggagaacctctggggccagccggctccatgtggattccagctctgccaccaccaacttggggaccctgggaggccctctgttaaatttctgtgcttcggtgtctccatctgtttttgttgttgttgaga

SEQ ID NO: 322187 - DNA, 2867 bp, Homo sapiens
cctccccctccccctccccctctttcttctcctccctcgtcgccgccgccgccgccgccgcctcagccttcgcctcagccgccgcccgctcccgcccgcgcgcggcgggatggacgatcaatccaggatgctgcagactctggccggggtgaacctggctggccactcggtgcaggggggcatggccctgccgcctcccccgcacggccacgaaggggcggacggcgacggcaggaagcaggacatcggcgacatcctccaccagatcatgaccatcaccgaccagagcttggacgaggcgcaagcaaagaaacatgccctgaactgtcacagaatgaaaccagcgctcttcagcgtcctgtgtgagatcaaagagaaaacaggtctcagcatcagaggagcccaggaggaggaccctcccgatccccagctaatgagactggacaatatgcttttggcagaaggggtttcaggtcctgagaaaggtgggggatcggcggcagcagctgcagccgcggcagcctctggaggttcttcagataactctattgaacactcagattacagagccaaattgacccagatcagacaaatctatcacacagaactggagaaatatgaacaggcatgtaatgaatttactacacatgtgatgaaccttctccgagaacagagtagaacacgtcccatttctccaaaagagattgaaagaatggtgggcatcatccatcgaaaatttagttccattcagatgcagctcaaacaaagcacttgtgaagcagttatgattttaagatcaaggttccttgatgccagacggaaaaggcgtaacttcagtaaacaggccacagaaatcttgaatgaatatttttactcacacctcagcaacccctaccccagtgaagaagccaaagaggagctggccaagaaatgcagcatcacagtgtcacaggtatccaattggtttggcaacaaacgaatcaggtacaagaagaacattggcaagtttcaggaagaagccaacctctatgctgcaaagacggccgtgacagctgcacacgcagtagcagcagctgtgcagaacaaccagaccaattcgcccaccacaccaaattccggttcttctggttcttttaacctcccaaattctggggacatgttcatgaacatgcagagtctgaatggggattcttaccaagggtcccaagtcggagccaatgtgcaatcacaggtggataccctccgtcatgttatcaatcagacgggaggctacagtgatggccttggaggaaattcactgtacagtccacataatttaaatgctaatggaggctggcaggacgcaacaactccatcttctgtgacttctcctacagaaggcccaggaagtgtgcactcggatacctctaactaatctctggccacacttttccctgagctacatgccttgataagtgcattcagagcaataggaggaaaaggaaagcgtttttgtagcccaccatctacagctttactgtaaaaccttgtcttattcgagaacttggtaaatctgttttttaaggaatcataatcatttgtatttatacttaaaaacacacaatgttaaaaaaaataaagcactttatccaattaggccaagatttaacattgttgacagtcctgtagctattttatcataatttattatcaatattttacattaatggtttcacagttgccaattacttggccttaagggtaaaaagtacaatatacactaaacctcaaccgttaaagcagatgcaaaaattcacctcacctaaattgaacttcttgcatatttccattactgacttggattgtctttctttcatatcactaatggagttggaataaagagctgtttgcctatccctgttaatgatggttgtgtttaagaatcttcctcgtcacgtttgtgttcagatctcttatgttataattagatcagagactggtagcatcgtttctctctctgaaagcaccagtgcccagagtctgctcggtaataaaattatggatccagattgttctgagagacgaagatacttgctgctgatagaggtgaaaacgagattgatccgtctggggttttacggtgtgcactgggtgctgcacagacttgtcaaggtttgctacgtcctctgggcatctgcaaaaggccctgctctctggagtgttgtatatagtgtagcaaaagagtatttatacatcccaccaatcaaaacacagctttattacctcatgcgaactcatacaaaccaatagaatttcaacatgttctgtagcttagagtgctcacttactacctctgaacaatactcacgctgtagtttgtctctttcttatctttttgcatcttgtaattaactctttgtttcccttcataaaatgtaatgtacattgtaatcttttaaaagaaaaatcagggttgcacttgcaacttttaaaaaaccgagtgtggaaacattgggtcttaattcaacacaggatcggtaaaactgttgtaaatactgagaaacattttgaatgttcttcatcttattactaatccatgcaaaaaaaaaaaaaaagcagcgactaattgtgatgcattcagatttcagtattcagtactgtatatttcaccctgtgtaatggggccccctctcctttctctctttttgtattgtatgcgattctgaaactgattgagtcatgaaaataatttgtggcggtgattctaatgtattaaaaacgtttcgtgttcctttctaactggattacaccctggattgaaaaagtcttcctcgtggtagttatatgtagtttcaaacatgaataaactttttgctttcatgattaaa

SEQ ID NO: 322188 - DNA, 2512 bp, Homo sapiens
cctccccctccccctccccctctttcttctcctccctcgtcgccgccgccgccgccgccgcctcagccttcgcctcagccgccgcccgctcccgcccgcgcgcggcgggatggacgatcaatccaggatgctgcagactctggccggggtgaacctggctggccactcggtgcaggggggcatggccctgccgcctcccccgcacggccacgaaggggcggacggcgacggcaggaagcaggacatcggcgacatcctccaccagatcatgaccatcaccgaccagagcttggacgaggcgcaagcaaagaaacatgccctgaactgtcacagaatgaaaccagcgctcttcagcgtcctgtgtgagatcaaagagaaaacaggcatgtaatgaatttactacacatgtgatgaaccttctccgagaacagagtagaacacgtcccatttctccaaaagagattgaaagaatggtgggcatcatccatcgaaaatttagttccattcagatgcagctcaaacaaagcacttgtgaagcagttatgattttaagatcaaggttccttgatgccagacggaaaaggcgtaacttcagtaaacaggccacagaaatcttgaatgaatatttttactcacacctcagcaacccctaccccagtgaagaagccaaagaggagctggccaagaaatgcagcatcacagtgtcacaggtatccaattggtttggcaacaaacgaatcaggtacaagaagaacattggcaagtttcaggaagaagccaacctctatgctgcaaagacggccgtgacagctgcacacgcagtagcagcagctgtgcagaacaaccagaccaattcgcccaccacaccaaattccggtggataccctccgtcatgttatcaatcagacgggaggctacagtgatggccttggaggaaattcactgtacagtccacataatttaaatgctaatggaggctggcaggacgcaacaactccatcttctgtgacttctcctacagaaggcccaggaagtgtgcactcggatacctctaactaatctctggccacacttttccctgagctacatgccttgataagtgcattcagagcaataggaggaaaaggaaagcgtttttgtagcccaccatctacagctttactgtaaaaccttgtcttattcgagaacttggtaaatctgttttttaaggaatcataatcatttgtatttatacttaaaaacacacaatgttaaaaaaaataaagcactttatccaattaggccaagatttaacattgttgacagtcctgtagctattttatcataatttattatcaatattttacattaatggtttcacagttgccaattacttggccttaagggtaaaaagtacaatatacactaaacctcaaccgttaaagcagatgcaaaaattcacctcacctaaattgaacttcttgcatatttccattactgacttggattgtctttctttcatatcactaatggagttggaataaagagctgtttgcctatccctgttaatgatggttgtgtttaagaatcttcctcgtcacgtttgtgttcagatctcttatgttataattagatcagagactggtagcatcgtttctctctctgaaagcaccagtgcccagagtctgctcggtaataaaattatggatccagattgttctgagagacgaagatacttgctgctgatagaggtgaaaacgagattgatccgtctggggttttacggtgtgcactgggtgctgcacagacttgtcaaggtttgctacgtcctctgggcatctgcaaaaggccctgctctctggagtgttgtatatagtgtagcaaaagagtatttatacatcccaccaatcaaaacacagctttattacctcatgcgaactcatacaaaccaatagaatttcaacatgttctgtagcttagagtgctcacttactacctctgaacaatactcacgctgtagtttgtctctttcttatctttttgcatcttgtaattaactctttgtttcccttcataaaatgtaatgtacattgtaatcttttaaaagaaaaatcagggttgcacttgcaacttttaaaaaaccgagtgtggaaacattgggtcttaattcaacacaggatcggtaaaactgttgtaaatactgagaaacattttgaatgttcttcatcttattactaatccatgcaaaaaaaaaaaaaaagcagcgactaattgtgatgcattcagatttcagtattcagtactgtatatttcaccctgtgtaatggggccccctctcctttctctctttttgtattgtatgcgattctgaaactgattgagtcatgaaaataatttgtggcggtgattctaatgtattaaaaacgtttcgtgttcctttctaactggattacaccctggattgaaaaagtcttcctcgtggtagttatatgtagtttcaaacatgaataaactttttgctttcatgattaaa

SEQ ID NO: 322189 - DNA, 2625 bp, Homo sapiens
cctccccctccccctccccctctttcttctcctccctcgtcgccgccgccgccgccgccgcctcagccttcgcctcagccgccgcccgctcccgcccgcgcgcggcgggatggacgatcaatccaggatgctgcagactctggccggggtgaacctggctggccactcggtgcaggggggcatggccctgccgcctcccccgcacggccacgaaggggcggacggcgacggcaggaagcaggacatcggcgacatcctccaccagatcatgaccatcaccgaccagagcttggacgaggcgcaagcaaagaaacatgccctgaactgtcacagaatgaaaccagcgctcttcagcgtcctgtgtgagatcaaagagaaaacaggcatgtaatgaatttactacacatgtgatgaaccttctccgagaacagagtagaacacgtcccatttctccaaaagagattgaaagaatggtgggcatcatccatcgaaaatttagttccattcagatgcagctcaaacaaagcacttgtgaagcagttatgattttaagatcaaggttccttgatgccagacggaaaaggcgtaacttcagtaaacaggccacagaaatcttgaatgaatatttttactcacacctcagcaacccctaccccagtgaagaagccaaagaggagctggccaagaaatgcagcatcacagtgtcacaggtatccaattggtttggcaacaaacgaatcaggtacaagaagaacattggcaagtttcaggaagaagccaacctctatgctgcaaagacggccgtgacagctgcacacgcagtagcagcagctgtgcagaacaaccagaccaattcgcccaccacaccaaattccggttcttctggttcttttaacctcccaaattctggggacatgttcatgaacatgcagagtctgaatggggattcttaccaagggtcccaagtcggagccaatgtgcaatcacaggtggataccctccgtcatgttatcaatcagacgggaggctacagtgatggccttggaggaaattcactgtacagtccacataatttaaatgctaatggaggctggcaggacgcaacaactccatcttctgtgacttctcctacagaaggcccaggaagtgtgcactcggatacctctaactaatctctggccacacttttccctgagctacatgccttgataagtgcattcagagcaataggaggaaaaggaaagcgtttttgtagcccaccatctacagctttactgtaaaaccttgtcttattcgagaacttggtaaatctgttttttaaggaatcataatcatttgtatttatacttaaaaacacacaatgttaaaaaaaataaagcactttatccaattaggccaagatttaacattgttgacagtcctgtagctattttatcataatttattatcaatattttacattaatggtttcacagttgccaattacttggccttaagggtaaaaagtacaatatacactaaacctcaaccgttaaagcagatgcaaaaattcacctcacctaaattgaacttcttgcatatttccattactgacttggattgtctttctttcatatcactaatggagttggaataaagagctgtttgcctatccctgttaatgatggttgtgtttaagaatcttcctcgtcacgtttgtgttcagatctcttatgttataattagatcagagactggtagcatcgtttctctctctgaaagcaccagtgcccagagtctgctcggtaataaaattatggatccagattgttctgagagacgaagatacttgctgctgatagaggtgaaaacgagattgatccgtctggggttttacggtgtgcactgggtgctgcacagacttgtcaaggtttgctacgtcctctgggcatctgcaaaaggccctgctctctggagtgttgtatatagtgtagcaaaagagtatttatacatcccaccaatcaaaacacagctttattacctcatgcgaactcatacaaaccaatagaatttcaacatgttctgtagcttagagtgctcacttactacctctgaacaatactcacgctgtagtttgtctctttcttatctttttgcatcttgtaattaactctttgtttcccttcataaaatgtaatgtacattgtaatcttttaaaagaaaaatcagggttgcacttgcaacttttaaaaaaccgagtgtggaaacattgggtcttaattcaacacaggatcggtaaaactgttgtaaatactgagaaacattttgaatgttcttcatcttattactaatccatgcaaaaaaaaaaaaaaagcagcgactaattgtgatgcattcagatttcagtattcagtactgtatatttcaccctgtgtaatggggccccctctcctttctctctttttgtattgtatgcgattctgaaactgattgagtcatgaaaataatttgtggcggtgattctaatgtattaaaaacgtttcgtgttcctttctaactggattacaccctggattgaaaaagtcttcctcgtggtagttatatgtagtttcaaacatgaataaactttttgctttcatgattaaa

SEQ ID NO: 322190 - DNA, 2930 bp, Homo sapiens
cctccccctccccctccccctctttcttctcctccctcgtcgccgccgccgccgccgccgcctcagccttcgcctcagccgccgcccgctcccgcccgcgcgcggcgggatggacgatcaatccaggatgctgcagactctggccggggtgaacctggctggccactcggtgcaggggggcatggccctgccgcctcccccgcacggccacgaaggggcggacggcgacggcaggaagcaggacatcggcgacatcctccaccagatcatgaccatcaccgaccagagcttggacgaggcgcaagcaaagaaacatgccctgaactgtcacagaatgaaaccagcgctcttcagcgtcctgtgtgagatcaaagagaaaacaggtctcagcatcagaggagcccaggaggaggaccctcccgatccccagctaatgagactggacaatatgcttttggcagaaggggtttcaggtcctgagaaaggtgggggatcggcggcagcagctgcagccgcggcagcctctggaggttcttcagataactctattgaacactcagattacagagccaaattgacccagatcagacaaatctatcacacagaactggagaaatatgaacaggcatgtaatgaatttactacacatgtgatgaaccttctccgagaacagagtagaacacgtcccatttctccaaaagagattgaaagaatggtgggcatcatccatcgaaaatttagttccattcagatgcagctcaaacaaagcacttgtgaagcagttatgattttaagatcaaggttccttgatgccagacggaaaaggcgtaacttcagtaaacaggccacagaaatcttgaatgaatatttttactcacacctcagcaacccctaccccagtgaagaagccaaagaggagctggccaagaaatgcagcatcacagtgtcacagagtcttgtaaaggatccaaaagaaagagggagcaaaggttctgacatccagccaactagcgtggtatccaattggtttggcaacaaacgaatcaggtacaagaagaacattggcaagtttcaggaagaagccaacctctatgctgcaaagacggccgtgacagctgcacacgcagtagcagcagctgtgcagaacaaccagaccaattcgcccaccacaccaaattccggttcttctggttcttttaacctcccaaattctggggacatgttcatgaacatgcagagtctgaatggggattcttaccaagggtcccaagtcggagccaatgtgcaatcacaggtggataccctccgtcatgttatcaatcagacgggaggctacagtgatggccttggaggaaattcactgtacagtccacataatttaaatgctaatggaggctggcaggacgcaacaactccatcttctgtgacttctcctacagaaggcccaggaagtgtgcactcggatacctctaactaatctctggccacacttttccctgagctacatgccttgataagtgcattcagagcaataggaggaaaaggaaagcgtttttgtagcccaccatctacagctttactgtaaaaccttgtcttattcgagaacttggtaaatctgttttttaaggaatcataatcatttgtatttatacttaaaaacacacaatgttaaaaaaaataaagcactttatccaattaggccaagatttaacattgttgacagtcctgtagctattttatcataatttattatcaatattttacattaatggtttcacagttgccaattacttggccttaagggtaaaaagtacaatatacactaaacctcaaccgttaaagcagatgcaaaaattcacctcacctaaattgaacttcttgcatatttccattactgacttggattgtctttctttcatatcactaatggagttggaataaagagctgtttgcctatccctgttaatgatggttgtgtttaagaatcttcctcgtcacgtttgtgttcagatctcttatgttataattagatcagagactggtagcatcgtttctctctctgaaagcaccagtgcccagagtctgctcggtaataaaattatggatccagattgttctgagagacgaagatacttgctgctgatagaggtgaaaacgagattgatccgtctggggttttacggtgtgcactgggtgctgcacagacttgtcaaggtttgctacgtcctctgggcatctgcaaaaggccctgctctctggagtgttgtatatagtgtagcaaaagagtatttatacatcccaccaatcaaaacacagctttattacctcatgcgaactcatacaaaccaatagaatttcaacatgttctgtagcttagagtgctcacttactacctctgaacaatactcacgctgtagtttgtctctttcttatctttttgcatcttgtaattaactctttgtttcccttcataaaatgtaatgtacattgtaatcttttaaaagaaaaatcagggttgcacttgcaacttttaaaaaaccgagtgtggaaacattgggtcttaattcaacacaggatcggtaaaactgttgtaaatactgagaaacattttgaatgttcttcatcttattactaatccatgcaaaaaaaaaaaaaaagcagcgactaattgtgatgcattcagatttcagtattcagtactgtatatttcaccctgtgtaatggggccccctctcctttctctctttttgtattgtatgcgattctgaaactgattgagtcatgaaaataatttgtggcggtgattctaatgtattaaaaacgtttcgtgttcctttctaactggattacaccctggattgaaaaagtcttcctcgtggtagttatatgtagtttcaaacatgaataaactttttgctttcatgattaaa

SEQ ID NO: 322191 - DNA, 2816 bp, Homo sapiens
ggccgcagtcggccggcctcctctgcacaggagcggacgcgggagcccctccgcacccgtcccctcccccgggtcgccttcgcctgcccccggggcgaggctccccgcgcgggttcgcgtcgcgtctgcagtggccgaggctgctgcctgccgggcagatgggtccgccttgttccggctgcagctttcgccgccggggcttgctggctgtcgggaactagtcaactggagtttttgttgacttcccacggttcaaaagggccttccagaatggggggctggaattaaatcttgggtctaacttaaaggaaggcgccatattattccataggtgatgctaatacctttgtgtttcgttatttgttttttaggaaacatgccctgaactgtcacagaatgaaaccagcgctcttcagcgtcctgtgtgagatcaaagagaaaacaggtctcagcatcagaggagcccaggaggaggaccctcccgatccccagctaatgagactggacaatatgcttttggcagaaggggtttcaggtcctgagaaaggtgggggatcggcggcagcagctgcagccgcggcagcctctggaggttcttcagataactctattgaacactcagattacagagccaaattgacccagatcagacaaatctatcacacagaactggagaaatatgaacaggcatgtaatgaatttactacacatgtgatgaaccttctccgagaacagagtagaacacgtcccatttctccaaaagagattgaaagaatggtgggcatcatccatcgaaaatttagttccattcagatgcagctcaaacaaagcacttgtgaagcagttatgattttaagatcaaggttccttgatgccagacggaaaaggcgtaacttcagtaaacaggccacagaaatcttgaatgaatatttttactcacacctcagcaacccctaccccagtgaagaagccaaagaggagctggccaagaaatgcagcatcacagtgtcacaggtatccaattggtttggcaacaaacgaatcaggtacaagaagaacattggcaagtttcaggaagaagccaacctctatgctgcaaagacggccgtgacagctgcacacgcagtagcagcagctgtgcagaacaaccagaccaattcgcccaccacaccaaattccggtggataccctccgtcatgttatcaatcagacgggaggctacagtgatggccttggaggaaattcactgtacagtccacataatttaaatgctaatggaggctggcaggacgcaacaactccatcttctgtgacttctcctacagaaggcccaggaagtgtgcactcggatacctctaactaatctctggccacacttttccctgagctacatgccttgataagtgcattcagagcaataggaggaaaaggaaagcgtttttgtagcccaccatctacagctttactgtaaaaccttgtcttattcgagaacttggtaaatctgttttttaaggaatcataatcatttgtatttatacttaaaaacacacaatgttaaaaaaaataaagcactttatccaattaggccaagatttaacattgttgacagtcctgtagctattttatcataatttattatcaatattttacattaatggtttcacagttgccaattacttggccttaagggtaaaaagtacaatatacactaaacctcaaccgttaaagcagatgcaaaaattcacctcacctaaattgaacttcttgcatatttccattactgacttggattgtctttctttcatatcactaatggagttggaataaagagctgtttgcctatccctgttaatgatggttgtgtttaagaatcttcctcgtcacgtttgtgttcagatctcttatgttataattagatcagagactggtagcatcgtttctctctctgaaagcaccagtgcccagagtctgctcggtaataaaattatggatccagattgttctgagagacgaagatacttgctgctgatagaggtgaaaacgagattgatccgtctggggttttacggtgtgcactgggtgctgcacagacttgtcaaggtttgctacgtcctctgggcatctgcaaaaggccctgctctctggagtgttgtatatagtgtagcaaaagagtatttatacatcccaccaatcaaaacacagctttattacctcatgcgaactcatacaaaccaatagaatttcaacatgttctgtagcttagagtgctcacttactacctctgaacaatactcacgctgtagtttgtctctttcttatctttttgcatcttgtaattaactctttgtttcccttcataaaatgtaatgtacattgtaatcttttaaaagaaaaatcagggttgcacttgcaacttttaaaaaaccgagtgtggaaacattgggtcttaattcaacacaggatcggtaaaactgttgtaaatactgagaaacattttgaatgttcttcatcttattactaatccatgcaaaaaaaaaaaaaaagcagcgactaattgtgatgcattcagatttcagtattcagtactgtatatttcaccctgtgtaatggggccccctctcctttctctctttttgtattgtatgcgattctgaaactgattgagtcatgaaaataatttgtggcggtgattctaatgtattaaaaacgtttcgtgttcctttctaactggattacaccctggattgaaaaagtcttcctcgtggtagttatatgtagtttcaaacatgaataaactttttgctttcatgattaaa

SEQ ID NO: 322192 - DNA, 2302 bp, Homo sapiens
gccagtctccaaaaaagccgttcaatagtattattgagcatctgtcagtggtattatcatgaccatcaccgaccagagcttggacgaggcgcaagcaaagaaacatgccctgaactgtcacagaatgaaaccagcgctcttcagcgtcctgtgtgagatcaaagagaaaacaggcatgtaatgaatttactacacatgtgatgaaccttctccgagaacagagtagaacacgtcccatttctccaaaagagattgaaagaatggtgggcatcatccatcgaaaatttagttccattcagatgcagctcaaacaaagcacttgtgaagcagttatgattttaagatcaaggttccttgatgccagacggaaaaggcgtaacttcagtaaacaggccacagaaatcttgaatgaatatttttactcacacctcagcaacccctaccccagtgaagaagccaaagaggagctggccaagaaatgcagcatcacagtgtcacaggtatccaattggtttggcaacaaacgaatcaggtacaagaagaacattggcaagtttcaggaagaagccaacctctatgctgcaaagacggccgtgacagctgcacacgcagtagcagcagctgtgcagaacaaccagaccaattcgcccaccacaccaaattccggtggataccctccgtcatgttatcaatcagacgggaggctacagtgatggccttggaggaaattcactgtacagtccacataatttaaatgctaatggaggctggcaggacgcaacaactccatcttctgtgacttctcctacagaaggcccaggaagtgtgcactcggatacctctaactaatctctggccacacttttccctgagctacatgccttgataagtgcattcagagcaataggaggaaaaggaaagcgtttttgtagcccaccatctacagctttactgtaaaaccttgtcttattcgagaacttggtaaatctgttttttaaggaatcataatcatttgtatttatacttaaaaacacacaatgttaaaaaaaataaagcactttatccaattaggccaagatttaacattgttgacagtcctgtagctattttatcataatttattatcaatattttacattaatggtttcacagttgccaattacttggccttaagggtaaaaagtacaatatacactaaacctcaaccgttaaagcagatgcaaaaattcacctcacctaaattgaacttcttgcatatttccattactgacttggattgtctttctttcatatcactaatggagttggaataaagagctgtttgcctatccctgttaatgatggttgtgtttaagaatcttcctcgtcacgtttgtgttcagatctcttatgttataattagatcagagactggtagcatcgtttctctctctgaaagcaccagtgcccagagtctgctcggtaataaaattatggatccagattgttctgagagacgaagatacttgctgctgatagaggtgaaaacgagattgatccgtctggggttttacggtgtgcactgggtgctgcacagacttgtcaaggtttgctacgtcctctgggcatctgcaaaaggccctgctctctggagtgttgtatatagtgtagcaaaagagtatttatacatcccaccaatcaaaacacagctttattacctcatgcgaactcatacaaaccaatagaatttcaacatgttctgtagcttagagtgctcacttactacctctgaacaatactcacgctgtagtttgtctctttcttatctttttgcatcttgtaattaactctttgtttcccttcataaaatgtaatgtacattgtaatcttttaaaagaaaaatcagggttgcacttgcaacttttaaaaaaccgagtgtggaaacattgggtcttaattcaacacaggatcggtaaaactgttgtaaatactgagaaacattttgaatgttcttcatcttattactaatccatgcaaaaaaaaaaaaaaagcagcgactaattgtgatgcattcagatttcagtattcagtactgtatatttcaccctgtgtaatggggccccctctcctttctctctttttgtattgtatgcgattctgaaactgattgagtcatgaaaataatttgtggcggtgattctaatgtattaaaaacgtttcgtgttcctttctaactggattacaccctggattgaaaaagtcttcctcgtggtagttatatgtagtttcaaacatgaataaactttttgctttcatgattaaa

SEQ ID NO: 322193 - DNA, 1598 bp, Homo sapiens
cctccgcctccattagcatttaaattcactgtacagtccacataatttaaatgctaatggaggctggcaggacgcaacaactccatcttctgtgacttctcctacagaaggcccaggaagtgtgcactcggatacctctaactaatctctggccacacttttccctgagctacatgccttgataagtgcattcagagcaataggaggaaaaggaaagcgtttttgtagcccaccatctacagctttactgtaaaaccttgtcttattcgagaacttggtaaatctgttttttaaggaatcataatcatttgtatttatacttaaaaacacacaatgttaaaaaaaataaagcactttatccaattaggccaagatttaacattgttgacagtcctgtagctattttatcataatttattatcaatattttacattaatggtttcacagttgccaattacttggccttaagggtaaaaagtacaatatacactaaacctcaaccgttaaagcagatgcaaaaattcacctcacctaaattgaacttcttgcatatttccattactgacttggattgtctttctttcatatcactaatggagttggaataaagagctgtttgcctatccctgttaatgatggttgtgtttaagaatcttcctcgtcacgtttgtgttcagatctcttatgttataattagatcagagactggtagcatcgtttctctctctgaaagcaccagtgcccagagtctgctcggtaataaaattatggatccagattgttctgagagacgaagatacttgctgctgatagaggtgaaaacgagattgatccgtctggggttttacggtgtgcactgggtgctgcacagacttgtcaaggtttgctacgtcctctgggcatctgcaaaaggccctgctctctggagtgttgtatatagtgtagcaaaagagtatttatacatcccaccaatcaaaacacagctttattacctcatgcgaactcatacaaaccaatagaatttcaacatgttctgtagcttagagtgctcacttactacctctgaacaatactcacgctgtagtttgtctctttcttatctttttgcatcttgtaattaactctttgtttcccttcataaaatgtaatgtacattgtaatcttttaaaagaaaaatcagggttgcacttgcaacttttaaaaaaccgagtgtggaaacattgggtcttaattcaacacaggatcggtaaaactgttgtaaatactgagaaacattttgaatgttcttcatcttattactaatccatgcaaaaaaaaaaaaaaagcagcgactaattgtgatgcattcagatttcagtattcagtactgtatatttcaccctgtgtaatggggccccctctcctttctctctttttgtattgtatgcgattctgaaactgattgagtcatgaaaataatttgtggcggtgattctaatgtattaaaaacgtttcgtgttcctttctaactggattacaccctggattgaaaaagtcttcctcgtggtagttatatgtagtttcaaacatgaataaactttttgctttcatgattaaa

SEQ ID NO: 322194 - DNA, 2260 bp, Homo sapiens
cctccccctccccctccccctctttcttctcctccctcgtcgccgccgccgccgccgccgcctcagccttcgcctcagccgccgcccgctcccgcccgcgcgcggcgggatggacgatcaatccaggatgctgcagactctggccggggtgaacctggctggccactcggtgcaggggggcatggccctgccgcctcccccgcacggccacgaaggggcggacggcgacggcaggaagcaggacatcggcgacatcctccaccagatcatgaccatcaccgaccagagcttggacgaggcgcaagcaaagaaacatgccctgaactgtcacagaatgaaaccagcgctcttcagcgtcctgtgtgagatcaaagagaaaacaggcatgtaatgaatttactacacatgtgatgaaccttctccgagaacagagtagaacacgtcccatttctccaaaagagattgaaagaatggtgggcatcatccatcgaaaatttagttccattcagatgcagctcaaacaaagcacttgtgaagcagttatgattttaagatcaaggttccttgatgccagacggaaaaggcgtaacttcagtaaacaggccacagaaatcttgaatgaatatttttactcacacctcagcaacccctaccccagtgaagaagccaaagaggagctggccaagaaatgcagcatcacagtgtcacaggtatccaattggtttggcaacaaacgaatcaggtacaagaagaacattggcaagtttcaggaagaagccaacctctatgctgcaaagacggccgtgacagctgcacacgcagtagcagcagctgtgcagaacaaccagaccaattcgcccaccacaccaaattccggtggataccctccgtcatgttatcaatcagacgggaggctacagtgatggccttggaggaaattcactgtacagtccacataatttaaatgctaatggaggctggcaggacgcaacaactccatcttctgtgacttctcctacagaaggcccaggaagtgtgcactcggatacctctaactaatctctggccacacttttccctgagctacatgccttgataagtgcattcagagcaataggaggaaaaggaaagcgtttttgtagcccaccatctacagctttactgtaaaaccttgtcttattcgagaacttggtaaatctgttttttaaggaatcataatcatttgtatttatacttaaaaacacacaatgttaaaaaaaataaagcactttatccaattaggccaagatttaacattgttgacagtcctgtagctattttatcataatttattatcaatattttacattaatggtttcacagttgccaattacttggccttaagggtaaaaagtacaatatacactaaacctcaaccgttaaagcagatgcaaaaattcacctcacctaaattgaacttcttgcatatttccattactgacttggattgtctttctttcatatcactaatggagttggaataaagagctgtttgcctatccctgttaatgatggttgtgtttaagaatcttcctcgtcacgtttgtgttcagatctcttatgttataattagatcagagactggtagcatcgtttctctctctgaaagcaccagtgcccagagtctgctcggtaataaaattatggatccagattgttctgagagacgaagatacttgctgctgatagaggtgaaaacgagattgatccgtctggggttttacggtgtgcactgggtgctgcacagacttgtcaaggtttgctacgtcctctgggcatctgcaaaaggccctgctctctggagtgttgtatatagtgtagcaaaagagtatttatacatcccaccaatcaaaacacagctttattacctcatgcgaactcatacaaaccaatagaatttcaacatgttctgtagacgctagagacgtatcacgttaactgacacttctaggacttactagctacatcgacgggtacggtatgatctccattctctagtcttattggcatcctctgtaacctatcttctcgtttcccattcataagaagtagttatgtacatgtagtagtctcatgaaagtaatatgcaggcgtgtgcatctcgcaactatttaaaaacgccgtacgtgtgcacatcacttggctcgtttatcccacacaggtatcggtatcaccgctcgtaatactgaacacagttgtgaagttcgtatcttcatcccct

SEQ ID NO: 322195 - DNA, 1602 bp, Homo sapiens
cctccccctccccctccccctctttcttctcctccctcgtcgccgccgccgccgccgccgcctcagccttcgcctcagccgccgcccgctcccgcccgcgcgcggcgggatggacgatcaatccaggatgctgcagactctggccggggtgaacctggctggccactcggtgcaggggggcatggccctgccgcctcccccgcacggccacgaaggggcggacggcgacggcaggaagcaggacatcggcgacatcctccaccagatcatgaccatcaccgaccagagcttggacgaggcgcaagcaaagaaacatgccctgaactgtcacagaatgaaaccagcgctcttcagcgtcctgtgtgagatcaaagagaaaacaggcatgtaatgaatttactacacatgtgatgaaccttctccgagaacagagtagaacacgtcccatttctccaaaagagattgaaagaatggtgggcatcatccatcgaaaatttagttccattcagatgcagctcaaacaaagcacttgtgaagcagttatgattttaagatcaaggttccttgatgccagacggaaaaggcgtaacttcagtaaacaggccacagaaatcttgaatgaatatttttactcacacctcagcaacccctaccccagtgaagaagccaaagaggagctggccaagaaatgcagcatcacagtgtcacaggtatccaattggtttggcaacaaacgaatcaggtacaagaagaacattggcaagtttcaggaagaagccaacctctatgctgcaaagacggccgtgacagctgcacacgcagtagcagcagctgtgcagaacaaccagaccaattcgcccaccacaccaaattccggttcttctggttcttttaacctcccaaattctggggacatgttcatgaacatgcagagtctgaatggggattcttaccaagggtcccaagtcggagccaatgtgcaatcacaggtggataccctccgtcatgttatcaatcagacgggaggctacagtgatggccttggaggaaattcactgtacagtccacataatttaaatgctaatggaggctggcaggacgcaacaactccatcttctgtgacttctcctacagaaggcccaggaagtgtgcactcggatacctctaactaatctctggccacacttttccctgagctacatgccttgataagtgcattcagagcaataggaggaaaaggaaagcgtttttgtagcccaccatctacagctttactgtaaaaccttgtcttattcgagaacttggtaaatctgttttttaaggaatcataatcatttgtatttatacttaaaaacacacaatgttatagctattttatcataatttattatcaatattttacattaatggtttcacagttgccaattacttggccttaagggtaaaaagtacaatatacactaaacctcaaccgttaaagcagatgcaaaaattcacctcacctaaattgaacttcttgcatatttccattactgacttggattgtctttctttcatatcactaatggagttggaataaagagctgtttgcctatccctgtt

SEQ ID NO: 322196 - DNA, 509 bp, Homo sapiens
cctccccctccccctccccctctttcttctcctccctcgtcgccgccgccgccgccgccgcctcagccttcgcctcagccgccgcccgctcccgcccgcgcgcggcgggatggacgatcaatccaggatgctgcagactctggccggggtgaacctggctggccactcggtgcaggggggcatggccctgccgcctcccccgcacggccacgaaggggcggacggcgacggcaggaagcaggacatcggcgacatcctccaccagatcatgaccatcaccgaccagagcttggacgaggcgcaagcaaagaaacatgccctgaactgtcacagaatgaaaccagcgctcttcagcgtcctgtgtgagatcaaagagaaaacagaatgtcctcatttaaacttttttttaacaactcatggatttggtctctgagttactttacctctactcaagccagagctctgtgtccctacccaaatctcaccttgaattgaataatctccatgtg

SEQ ID NO: 322197 - DNA, 534 bp, Homo sapiens
cctccccctccccctccccctctttcttctcctccctcgtcgccgccgccgccgccgccgcctcagccttcgcctcagccgccgcccgctcccgcccgcgcgcggcgggatggacgatcaatccaggatgctgcagactctggccggggtgaacctggctggccactcggtgcaggggggcatggccctgccgcctcccccgcacggccacgaaggggcggacggcgacggcaggaagcaggacatcggcgacatcctccaccagatcatgaccatcaccgaccagagcttggacgaggcgcaagcaaagaaacatgccctgaactgtcacagaatgaaaccagcgctcttcagcgtcctgtgtgagatcaaagagaaaacaggtaagacgctgcgccccgcagtgggcctggagacccccgaggtgggggtcggagctactccttcgactctccagttgagagctgctgcttttgggcaccgccatctttgatcattctctccttcccacgtcctgatcttgagaaaaaactg

SEQ ID NO: 322198 - DNA, 543 bp, Homo sapiens
ctcgatgccagcatgggcctcgctgaagcccttcttcggcgtgttgatttattgccaagactttacttgatgggatggatttgttttacatgcatttaatcccactttaacacatgctgccaactcctgccacagtgggtttagaaaatacattttgctaatgcatctctgctctcatgttgtcatccgggtgttttaaattggggagtagaattaatatgtagacgtgcacccgttgaactgtgtttctcctttcaggctaatggaggctggcaggacgcaacaactccatcttctgtgacttctcctacagaaggcccaggaagtgtgcactcggatacctctaactaatctctggccacacttttccctgagctacatgccttgataagtgcattcagagcaataggaggaaaaggaaagcgtttttgtagcccaccatctacagctttactgtaaaaccttgtcttattcgagaacttggtaaatctgttttttaaggaatcataatcatttgtatttatacttaaaaacacacaatgt

SEQ ID NO: 322199 - DNA, 2847 bp, Homo sapiens
aagctgtccggccgggatttatggatcgccgccgccgccgcctcagccttcgcctcagccgccgcccgctcccgcccgcgcgcggcgggatggacgatcaatccaggatgctgcagactctggccggggtgaacctggctggccactcggtgcaggggggcatggccctgccgcctcccccgcacggccacgaaggggcggacggcgacggcaggaagcaggacatcggcgacatcctccaccagatcatgaccatcaccgaccagagcttggacgaggcgcaagcaaagaaacatgccctgaactgtcacagaatgaaaccagcgctcttcagcgtcctgtgtgagatcaaagagaaaacaggtctcagcatcagaggagcccaggaggaggaccctcccgatccccagctaatgagactggacaatatgcttttggcagaaggggtttcaggtcctgagaaaggtgggggatcggcggcagcagctgcagccgcggcagcctctggaggttcttcagataactctattgaacactcagattacagagccaaattgacccagatcagacaaatctatcacacagaactggagaaatatgaacaggcatgtaatgaatttactacacatgtgatgaaccttctccgagaacagagtagaacacgtcccatttctccaaaagagattgaaagaatggtgggcatcatccatcgaaaatttagttccattcagatgcagctcaaacaaagcacttgtgaagcagttatgattttaagatcaaggttccttgatgccagacggaaaaggcgtaacttcagtaaacaggccacagaaatcttgaatgaatatttttactcacacctcagcaacccctaccccagtgaagaagccaaagaggagctggccaagaaatgcagcatcacagtgtcacaggtatccaattggtttggcaacaaacgaatcaggtacaagaagaacattggcaagtttcaggaagaagccaacctctatgctgcaaagacggccgtgacagctgcacacgcagtagcagcagctgtgcagaacaaccagaccaattcgcccaccacaccaaattccggttcttctggttcttttaacctcccaaattctggggacatgttcatgaacatgcagagtctgaatggggattcttaccaagggtcccaagtcggagccaatgtgcaatcacaggtggataccctccgtcatgttatcaatcagacgggaggctacagtgatggccttggaggaaattcactgtacagtccacataatttaaatgctaatggaggctggcaggacgcaacaactccatcttctgtgacttctcctacagaaggcccaggaagtgtgcactcggatacctctaactaatctctggccacacttttccctgagctacatgccttgataagtgcattcagagcaataggaggaaaaggaaagcgtttttgtagcccaccatctacagctttactgtaaaaccttgtcttattcgagaacttggtaaatctgttttttaaggaatcataatcatttgtatttatacttaaaaacacacaatgttaaaaaaaataaagcactttatccaattaggccaagatttaacattgttgacagtcctgtagctattttatcataatttattatcaatattttacattaatggtttcacagttgccaattacttggccttaagggtaaaaagtacaatatacactaaacctcaaccgttaaagcagatgcaaaaattcacctcacctaaattgaacttcttgcatatttccattactgacttggattgtctttctttcatatcactaatggagttggaataaagagctgtttgcctatccctgttaatgatggttgtgtttaagaatcttcctcgtcacgtttgtgttcagatctcttatgttataattagatcagagactggtagcatcgtttctctctctgaaagcaccagtgcccagagtctgctcggtaataaaattatggatccagattgttctgagagacgaagatacttgctgctgatagaggtgaaaacgagattgatccgtctggggttttacggtgtgcactgggtgctgcacagacttgtcaaggtttgctacgtcctctgggcatctgcaaaaggccctgctctctggagtgttgtatatagtgtagcaaaagagtatttatacatcccaccaatcaaaacacagctttattacctcatgcgaactcatacaaaccaatagaatttcaacatgttctgtagcttagagtgctcacttactacctctgaacaatactcacgctgtagtttgtctctttcttatctttttgcatcttgtaattaactctttgtttcccttcataaaatgtaatgtacattgtaatcttttaaaagaaaaatcagggttgcacttgcaacttttaaaaaaccgagtgtggaaacattgggtcttaattcaacacaggatcggtaaaactgttgtaaatactgagaaacattttgaatgttcttcatcttattactaatccatgcaaaaaaaaaaaaaaagcagcgactaattgtgatgcattcagatttcagtattcagtactgtatatttcaccctgtgtaatggggccccctctcctttctctctttttgtattgtatgcgattctgaaactgattgagtcatgaaaataatttgtggcggtgattctaatgtattaaaaacgtttcgtgttcctttctaactggattacaccctggattgaaaaagtcttcctcgtggtagttatatgtagtttcaaacatgaataaactttttgctttcatgattaaa

SEQ ID NO: 322200 - DNA, 2754 bp, Homo sapiens
cctccccctccccctccccctctttcttctcctccctcgtcgccgccgccgccgccgccgcctcagccttcgcctcagccgccgcccgctcccgcccgcgcgcggcgggatggacgatcaatccaggatgctgcagactctggccggggtgaacctggctggccactcggtgcaggggggcatggccctgccgcctcccccgcacggccacgaaggggcggacggcgacggcaggaagcaggacatcggcgacatcctccaccagatcatgaccatcaccgaccagagcttggacgaggcgcaagcaaagaaacatgccctgaactgtcacagaatgaaaccagcgctcttcagcgtcctgtgtgagatcaaagagaaaacaggtctcagcatcagaggagcccaggaggaggaccctcccgatccccagctaatgagactggacaatatgcttttggcagaaggggtttcaggtcctgagaaaggtgggggatcggcggcagcagctgcagccgcggcagcctctggaggttcttcagataactctattgaacactcagattacagagccaaattgacccagatcagacaaatctatcacacagaactggagaaatatgaacaggcatgtaatgaatttactacacatgtgatgaaccttctccgagaacagagtagaacacgtcccatttctccaaaagagattgaaagaatggtgggcatcatccatcgaaaatttagttccattcagatgcagctcaaacaaagcacttgtgaagcagttatgattttaagatcaaggttccttgatgccagacggaaaaggcgtaacttcagtaaacaggccacagaaatcttgaatgaatatttttactcacacctcagcaacccctaccccagtgaagaagccaaagaggagctggccaagaaatgcagcatcacagtgtcacaggtatccaattggtttggcaacaaacgaatcaggtacaagaagaacattggcaagtttcaggaagaagccaacctctatgctgcaaagacggccgtgacagctgcacacgcagtagcagcagctgtgcagaacaaccagaccaattcgcccaccacaccaaattccggtggataccctccgtcatgttatcaatcagacgggaggctacagtgatggccttggaggaaattcactgtacagtccacataatttaaatgctaatggaggctggcaggacgcaacaactccatcttctgtgacttctcctacagaaggcccaggaagtgtgcactcggatacctctaactaatctctggccacacttttccctgagctacatgccttgataagtgcattcagagcaataggaggaaaaggaaagcgtttttgtagcccaccatctacagctttactgtaaaaccttgtcttattcgagaacttggtaaatctgttttttaaggaatcataatcatttgtatttatacttaaaaacacacaatgttaaaaaaaataaagcactttatccaattaggccaagatttaacattgttgacagtcctgtagctattttatcataatttattatcaatattttacattaatggtttcacagttgccaattacttggccttaagggtaaaaagtacaatatacactaaacctcaaccgttaaagcagatgcaaaaattcacctcacctaaattgaacttcttgcatatttccattactgacttggattgtctttctttcatatcactaatggagttggaataaagagctgtttgcctatccctgttaatgatggttgtgtttaagaatcttcctcgtcacgtttgtgttcagatctcttatgttataattagatcagagactggtagcatcgtttctctctctgaaagcaccagtgcccagagtctgctcggtaataaaattatggatccagattgttctgagagacgaagatacttgctgctgatagaggtgaaaacgagattgatccgtctggggttttacggtgtgcactgggtgctgcacagacttgtcaaggtttgctacgtcctctgggcatctgcaaaaggccctgctctctggagtgttgtatatagtgtagcaaaagagtatttatacatcccaccaatcaaaacacagctttattacctcatgcgaactcatacaaaccaatagaatttcaacatgttctgtagcttagagtgctcacttactacctctgaacaatactcacgctgtagtttgtctctttcttatctttttgcatcttgtaattaactctttgtttcccttcataaaatgtaatgtacattgtaatcttttaaaagaaaaatcagggttgcacttgcaacttttaaaaaaccgagtgtggaaacattgggtcttaattcaacacaggatcggtaaaactgttgtaaatactgagaaacattttgaatgttcttcatcttattactaatccatgcaaaaaaaaaaaaaaagcagcgactaattgtgatgcattcagatttcagtattcagtactgtatatttcaccctgtgtaatggggccccctctcctttctctctttttgtattgtatgcgattctgaaactgattgagtcatgaaaataatttgtggcggtgattctaatgtattaaaaacgtttcgtgttcctttctaactggattacaccctggattgaaaaagtcttcctcgtggtagttatatgtagtttcaaacatgaataaactttttgctttcatgattaaa

SEQ ID NO: 322201 - DNA, 2406 bp, Homo sapiens
ttgtttcctggagaataagtcaggagcaattacatgtctcagcatcagaggagcccaggaggaggaccctcccgatccccagctaatgagactggacaatatgcttttggcagaaggggtttcaggtcctgagaaaggtgggggatcggcggcagcagctgcagccgcggcagcctctggaggttcttcagataactctattgaacactcagattacagagccaaattgacccagatcagacaaatctatcacacagaactggagaaatatgaacaggcatgtaatgaatttactacacatgtgatgaaccttctccgagaacagagtagaacacgtcccatttctccaaaagagattgaaagaatggtgggcatcatccatcgaaaatttagttccattcagatgcagctcaaacaaagcacttgtgaagcagttatgattttaagatcaaggttccttgatgccagacggaaaaggcgtaacttcagtaaacaggccacagaaatcttgaatgaatatttttactcacacctcagcaacccctaccccagtgaagaagccaaagaggagctggccaagaaatgcagcatcacagtgtcacaggtatccaattggtttggcaacaaacgaatcaggtacaagaagaacattggcaagtttcaggaagaagccaacctctatgctgcaaagacggccgtgacagctgcacacgcagtagcagcagctgtgcagaacaaccagaccaattcgcccaccacaccaaattccggtggataccctccgtcatgttatcaatcagacgggaggctacagtgatggccttggaggaaattcactgtacagtccacataatttaaatgctaatggaggctggcaggacgcaacaactccatcttctgtgacttctcctacagaaggcccaggaagtgtgcactcggatacctctaactaatctctggccacacttttccctgagctacatgccttgataagtgcattcagagcaataggaggaaaaggaaagcgtttttgtagcccaccatctacagctttactgtaaaaccttgtcttattcgagaacttggtaaatctgttttttaaggaatcataatcatttgtatttatacttaaaaacacacaatgttaaaaaaaataaagcactttatccaattaggccaagatttaacattgttgacagtcctgtagctattttatcataatttattatcaatattttacattaatggtttcacagttgccaattacttggccttaagggtaaaaagtacaatatacactaaacctcaaccgttaaagcagatgcaaaaattcacctcacctaaattgaacttcttgcatatttccattactgacttggattgtctttctttcatatcactaatggagttggaataaagagctgtttgcctatccctgttaatgatggttgtgtttaagaatcttcctcgtcacgtttgtgttcagatctcttatgttataattagatcagagactggtagcatcgtttctctctctgaaagcaccagtgcccagagtctgctcggtaataaaattatggatccagattgttctgagagacgaagatacttgctgctgatagaggtgaaaacgagattgatccgtctggggttttacggtgtgcactgggtgctgcacagacttgtcaaggtttgctacgtcctctgggcatctgcaaaaggccctgctctctggagtgttgtatatagtgtagcaaaagagtatttatacatcccaccaatcaaaacacagctttattacctcatgcgaactcatacaaaccaatagaatttcaacatgttctgtagcttagagtgctcacttactacctctgaacaatactcacgctgtagtttgtctctttcttatctttttgcatcttgtaattaactctttgtttcccttcataaaatgtaatgtacattgtaatcttttaaaagaaaaatcagggttgcacttgcaacttttaaaaaaccgagtgtggaaacattgggtcttaattcaacacaggatcggtaaaactgttgtaaatactgagaaacattttgaatgttcttcatcttattactaatccatgcaaaaaaaaaaaaaaagcagcgactaattgtgatgcattcagatttcagtattcagtactgtatatttcaccctgtgtaatggggccccctctcctttctctctttttgtattgtatgcgattctgaaactgattgagtcatgaaaataatttgtggcggtgattctaatgtattaaaaacgtttcgtgttcctttctaactggattacaccctggattgaaaaagtcttcctcgtggtagttatatgtagtttcaaacatgaataaactttttgctttcatgattaaa

SEQ ID NO: 322202 - DNA, 2269 bp, Homo sapiens
cgggaaagtgcaccagtgagctgtccgaggtcgtgaagctcacgggcgcggcggggcgagcacacggaaacatgccctgaactgtcacagaatgaaaccagcgctcttcagcgtcctgtgtgagatcaaagagaaaacaggcatgtaatgaatttactacacatgtgatgaaccttctccgagaacagagtagaacacgtcccatttctccaaaagagattgaaagaatggtgggcatcatccatcgaaaatttagttccattcagatgcagctcaaacaaagcacttgtgaagcagttatgattttaagatcaaggttccttgatgccagacggaaaaggcgtaacttcagtaaacaggccacagaaatcttgaatgaatatttttactcacacctcagcaacccctaccccagtgaagaagccaaagaggagctggccaagaaatgcagcatcacagtgtcacaggtatccaattggtttggcaacaaacgaatcaggtacaagaagaacattggcaagtttcaggaagaagccaacctctatgctgcaaagacggccgtgacagctgcacacgcagtagcagcagctgtgcagaacaaccagaccaattcgcccaccacaccaaattccggtggataccctccgtcatgttatcaatcagacgggaggctacagtgatggccttggaggaaattcactgtacagtccacataatttaaatgctaatggaggctggcaggacgcaacaactccatcttctgtgacttctcctacagaaggcccaggaagtgtgcactcggatacctctaactaatctctggccacacttttccctgagctacatgccttgataagtgcattcagagcaataggaggaaaaggaaagcgtttttgtagcccaccatctacagctttactgtaaaaccttgtcttattcgagaacttggtaaatctgttttttaaggaatcataatcatttgtatttatacttaaaaacacacaatgttaaaaaaaataaagcactttatccaattaggccaagatttaacattgttgacagtcctgtagctattttatcataatttattatcaatattttacattaatggtttcacagttgccaattacttggccttaagggtaaaaagtacaatatacactaaacctcaaccgttaaagcagatgcaaaaattcacctcacctaaattgaacttcttgcatatttccattactgacttggattgtctttctttcatatcactaatggagttggaataaagagctgtttgcctatccctgttaatgatggttgtgtttaagaatcttcctcgtcacgtttgtgttcagatctcttatgttataattagatcagagactggtagcatcgtttctctctctgaaagcaccagtgcccagagtctgctcggtaataaaattatggatccagattgttctgagagacgaagatacttgctgctgatagaggtgaaaacgagattgatccgtctggggttttacggtgtgcactgggtgctgcacagacttgtcaaggtttgctacgtcctctgggcatctgcaaaaggccctgctctctggagtgttgtatatagtgtagcaaaagagtatttatacatcccaccaatcaaaacacagctttattacctcatgcgaactcatacaaaccaatagaatttcaacatgttctgtagcttagagtgctcacttactacctctgaacaatactcacgctgtagtttgtctctttcttatctttttgcatcttgtaattaactctttgtttcccttcataaaatgtaatgtacattgtaatcttttaaaagaaaaatcagggttgcacttgcaacttttaaaaaaccgagtgtggaaacattgggtcttaattcaacacaggatcggtaaaactgttgtaaatactgagaaacattttgaatgttcttcatcttattactaatccatgcaaaaaaaaaaaaaaagcagcgactaattgtgatgcattcagatttcagtattcagtactgtatatttcaccctgtgtaatggggccccctctcctttctctctttttgtattgtatgcgattctgaaactgattgagtcatgaaaataatttgtggcggtgattctaatgtattaaaaacgtttcgtgttcctttctaactggattacaccctggattgaaaaagtcttcctcgtggtagttatatgtagtttcaaacatgaataaactttttgctttcatgattaaa

SEQ ID NO: 322203 - DNA, 1546 bp, Homo sapiens
cctccccctccccctccccctctttcttctcctccctcgtcgccgccgccgccgccgccgcctcagccttcgcctcagccgccgcccgctcccgcccgcgcgcggcgggatggacgatcaatccaggatgctgcagactctggccggggtgaacctggctggccactcggtgcaggggggcatggccctgccgcctcccccgcacggccacgaaggggcggacggcgacggcaggaagcaggacatcggcgacatcctccaccagatcatgaccatcaccgaccagagcttggacgaggcgcaagcaaagaaacatgccctgaactgtcacagaatgaaaccagcgctcttcagcgtcctgtgtgagatcaaagagaaaacaggcatgtaatgaatttactacacatgtgatgaaccttctccgagaacagagtagaacacgtcccatttctccaaaagagattgaaagaatggtgggcatcatccatcgaaaatttagttccattcagatgcagctcaaacaaagcacttgtgaagcagttatgattttaagatcaaggttccttgatgccagacggaaaaggcgtaacttcagtaaacaggccacagaaatcttgaatgaatatttttactcacacctcagcaacccctaccccagtgaagaagccaaagaggagctggccaagaaatgcagcatcacagtgtcacaggtatccaattggtttggcaacaaacgaatcaggtacaagaagaacattggcaagtttcaggaagaagccaacctctatgctgcaaagacggccgtgacagctgcacacgcagtagcagcagctgtgcagaacaaccagaccaattcgcccaccacaccaaattccggtggataccctccgtcatgttatcaatcagacgggaggctacagtgatggccttggaggaaattcactgtacagtccacataatttaaatgctaatggaggctggcaggacgcaacaactccatcttctgtgacttctcctacagaaggcccaggaagtgtgcactcggatacctctaactaatctctggccacacttttccctgagctacatgccttgataagtgcattcagagcaataggaggaaaaggaaagcgtttttgtagcccaccatctacagctttactgtaaaaccttgtcttattcgagaacttggtaaatctgttttttaaggaatcataatcatttgtatttatacttaaaaacacacaatgttaaaaaaaataaagcactttatccaattaggccaagatttaacattgttgacagtcctgtagctattttatcataatttattatcaatattttacattaatggtttcacagttgccaattacttggccttaagggtaaaaagtacaatatacactaaacctcaaccgttaaagcagatgcaaaaattcacctcacctaaattgaacttcttgcatatttccattactgacttggattgtctttctttcatatcactaatggagttggaataaagagctgtttgcctatccctgtt

SEQ ID NO: 322204 - DNA, 867 bp, Homo sapiens
cctccccctccccctccccctctttcttctcctccctcgtcgccgccgccgccgccgccgcctcagccttcgcctcagccgccgcccgctcccgcccgcgcgcggcgggatggacgatcaatccaggatgctgcagactctggccggggtgaacctggctggccactcggtgcaggggggcatggccctgccgcctcccccgcacggccacgaaggggcggacggcgacggcaggaagcaggacatcggcgacatcctccaccagatcatgaccatcaccgaccagagcttggacgaggcgcaagcaaacttagagtgctcacttactacctctgaacaatactcacgctgtagtttgtctctttcttatctttttgcatcttgtaattaactctttgtttcccttcataaaatgtaatgtacattgtaatcttttaaaagaaaaatcagggttgcacttgcaacttttaaaaaaccgagtgtggaaacattgggtcttaattcaacacaggatcggtaaaactgttgtaaatactgagaaacattttgaatgttcttcatcttattactaatccatgcaaaaaaaaaaaaaaagcagcgactaattgtgatgcattcagatttcagtattcagtactgtatatttcaccctgtgtaatggggccccctctcctttctctctttttgtattgtatgcgattctgaaactgattgagtcatgaaaataatttgtggcggtgattctaatgtattaaaaacgtttcgtgttcctttctaactggattacaccctggattgaaaaagtcttcctcgtggtagttatatgtagtttcaaacatgaataaactttttgctttcatgattaaa

SEQ ID NO: 322205 - DNA, 822 bp, Homo sapiens
tgatacacttatgtgagattttgaaaagtgaaaaatcaaaggtggaattgaccagtagatgtaaaagtacaacaaataaacaaaaatggcaatgttgaaagtgaaactgaaattcaacagaaataaaagaaatagcagactggggggatattgactttgacaccatgatgccagaggaacttagtgatggcaaacttatcaatataaaatgaggatattggttgtcaactaggttgtgtggtggtccttgatcttgtccatcaagtcctttttcccaaaggataactgaagaagatcacatacattccaacttattgagtctgataggtattcatctgatgagctcctcttcaactgaggattgaaatgctgtttttcttccctggtacaatgttaaagctttaaactcttgtcaatgatgtgatgtttcatctgcaatgatctacactagaaaaataaaaatgtagttactgacaaaaaagcaggaactactgctctaaggaaaaaaggacagctacatgaggaccacacaactcctggaagaggtttccctggcaacacaacttttccattcatctggttgcagtgttttcatccagtagcctgtcacctcactcaaaagcagggcaatggagagaaagaaacttaccaagttttttcttttaactagagagtagcctacttattgggccctgcaattaatttcagtactccaggcagatttataaaggaagctgctggaaggaattcattccctttttgctgttctgccttccaccttccactgtgtgaggacactgcaagaaagccctcatcagacac

SEQ ID NO: 322206 - DNA, 689 bp, Homo sapiens
tccggttctttattccggaagttgctctcagaggcagcgtgcgggtgtgctctttgtgaaattccaccatggcgtaccgtggccagggtcagaaagtgcagaaggttatggtgcagcccatcaacctcatcttcagatacttacaaaatagatcgcggattcaggtgtggctctatgagcaagtgaatatgcggatagaaggctgtatcattggttttgatgagtatatgaaccttgtattagatgatgcagaagagattcattctaaaacaaagtcaagaaaacaactgggtcggatcatgctaaaaggagataatattactctgctacaaagtgtctccaactagaaatgatcaatgaagtgagaaattgttgagaaggatacagtttgtttttagatgtcctttgtccaatgtgaacatttattcatattgttttgattaccctcgtgttactacaagatggcaataaatactatgggattgtttgtattaaaaaacaacttttatttcagattgaaggggtacatgtacaggtttgttacattgcgtatatatggtacattgcataatggtgaagtttgggcttctagtggacccatcactcaaacagtgaacattgtacccatacatattttgtcaaccctcatgtccttcccatctgatatggttaggctttctgaacctgcc

SEQ ID NO: 322207 - DNA, 385 bp, Homo sapiens
ttctttttttaacgtttccacttttatgattatttcagaagatcgcggattcaggtgtggctctatgagcaagtgaatatgcggatagaaggctgtatcattggttttgatgagtatatgaaccttgtattagatgatgcagaagagattcattctaaaacaaagtcaagaaaacaactgggtcggatcatgctaaaaggagataatattactctgctacaaagtgtctccaactagaaatgatcaatgaagtgagaaattgttgagaaggatacagtttgtttttagatgtcctttgtccaatgtgaacatttattcatattgttttgattaccctcgtgttactacaagatggcaataaatactatgggattgtttgtattaa

SEQ ID NO: 322208 - DNA, 459 bp, Homo sapiens
  misc_feature (15)..(15): n is a, c, g, or t
aaaaaaaaaaatttntttttttttccccccccccccccttgggggttttttaaaaaaatagtgagcatctgctgttagctagacactgttgaatcaatacagtgaaacagacaggtaagcaggtggttttaatgcctcattctaagtgctatttaaattggatcttgaaagatgaataaggcctgccttaagttctgctaaaggcaatgttgttattaaggacgggtgaggaaggaccaagaagtctggctcctgcttttctacatgcctgtgaaggagacttttcatgaaactgaataaaagaaatcctttccgagatagaggagatttgtaggtgaatgcagaagtgtatccagctttgaaccatgcattccatctatattcctcctgtctgaactcatgctcttttgattatgttttgaaataaagggctgcattagttcttttaaaaaaaaaaaa

SEQ ID NO: 322209 - DNA, 661 bp, Homo sapiens
tccggttctttattccggaagttgctctcagaggcagcgtgcgggtgtgctctttgtgaaattccaccatggcgtaccgtggccagggtcagaaagtgcagaaggttatggtgcagcccatcaacctcatcttcagatacttacaaaatagatcgcggattcaggtgtggctctatgagcaagtgaatatgcggatagaaggctgtatcattggttttgatgagtatatgaaccttgtattagatgatgcagaagagattcattctaaaacaaagtcaagaaaacaactgggtcggatcatgctaaaaggagataatattactctgctacaaagtgtctccaactagaaatgatcaatgaagtgagaaattgttgagaaggatacagtttgtttttagatgtcctttgtccaatgtgaacatttattcatattgttttgattaccctcgtgttactacaagatggcaataaatactatgggattgtttgtattaaaacaaaaaaaacaaaaacaaaaaaaacaacacaacaacaacaaaacagaaccacaccaccaaacaaaaaaccacgaccaaagcccacacaccaatcaccaccagcccccaacaccactgcgctaaacctgtagacccacacgacagagcaagccacaccacgcacc

SEQ ID NO: 322210 - DNA, 2061 bp, Homo sapiens
tccggttctttattccggaagttgctctcagaggcagcgtgcgggtgtgctctttgtgaaattccaccatggcgtaccgtggccagggtcagaaagtgcagaaggttatggtgcagcccatcgtatcctacgcaggatgtcaggactaggaggttcgggtcagaatacggggtgcgaaggcgcaggctgagggcaggcctgggatagtggagtacggatccacatcccatgagcccccggggctaccaagactggaagaaagcgcgggtagttgaaccgtgatggtggggaggtggtcttggggggacccctgccgtggggaatgcaggaatggacgcggcaaaaggagggaagagaacttcaggtgcggagtgaaaacgggagttaacggttttgggaaactccagggggatgaaagtggaatggatgttctttagtctttagaagacccgtaacgaatgcccagctgggcacttgttgtttgcgtaagcaccagacctcgcgtttagtaaacaaaggtgagacgggaatagcgtcgtccggttgtttcaggaagcagagtctatgctgcttttgtattttttccttagccactgtggtgcagaacctcatcttcagatacttacaaaatagatcgcggattcaggtgtggctctatgagcaagtgaatatgcggatagaaggctgtatcattggttttgatgagtatatgaaccttgtattagatgatgcagaagagattcattctaaaacaaagtcaagaaaacaactgggtcggatcatgctaaaaggagataatattactctgctacaaagtgtctccaactagaaatgatcaatgaagtgagaaattgttgagaaggatacagtttgtttttagatgtcctttgtccaatgtgaacatttattcatattgttttgattaccctcgtgttactacaagatggcaataaatactatgggattgtttgtattaaaaaatttacattgcttcttactattcagcagtagaaactttttacacagtaacaccattcgttgttggtatttagttttctgaagggtcgcagttgccttgagcacttggtattcgcagagcttggacctgtagattttgaggcagattaggaattctgcctgatgggtaagcttccagtattgggaggtggagaaggggagggttcagaaaaataaataagagttattgcactaacaaaagtcttcatcacttgtagttctggatgctggaataccagagtttctaacctaaatacgttgggtacattatttaatgggggtccagtattgctcaacactctcattgagtcactgtgaggtctttgtgaattttatcgctaagatcagaatgtgagaagtatttggatatagggaaagaatgaagtgcctttcaagtacattaaaaatcagttaagagtttacaggaaagagactgagattggtaatctgaaaaggaccacaagcatagctggtaggcaaattgttaggcagaataatggtatgttggagaaatacacctgtctcttattcttatctcttaagaattttggttcttcccccagtgattgctggttgaattcttatatggacaggtttcccttcccccagtatcgcacatggttctagttagaatcctgttagatagtgagcatctgctgttagctagacactgttgaatcaatacagtgaaacagacaggtaagcaggtggttttaatgcctcattctaagtgctatttaaattggatcttgaaagatgaataaggcctgccttaagttctgctaaaggcaatgttgttattaaggacgggtgaggaaggaccaagaagtctggctcctgcttttctacatgcctgtgaaggagacttttcatgaaactgaataaaagaaatcctttccgagatagaggagatttgtaggtgaatgcagaagtgtatccagctttgaaccatgcattccatctatattcctcctgtctgaactcatgctcttttgattatgttttgaaataaagggctgcattagttcttttaaaaaaaaaaaa

SEQ ID NO: 322211 - DNA, 1794 bp, Homo sapiens
tccggttctttattccggaagttgctctcagaggcagcgtgcgggtgtgctctttgtgaaattccaccatggcgtaccgtggccagggtcagaaagtgcagaaggttatggtgcagcccatcgtatcctacgcaggatgtcaggactaggaggttcgggtcagaatacggggtgcgaaggcgcaggctgagggcaggcctgggatagtggagtacggatccacatcccatgagcccccggggctaccaagactggaagaaagcgcgggtagttgaaccgtgatggtggggaggtggtcttggggggacccctgccgtggggaatgcaggaatggacgcggcaaaaggagggaagagaacttcagagatcgcggattcaggtgtggctctatgagcaagtgaatatgcggatagaaggctgtatcattggttttgatgagtatatgaaccttgtattagatgatgcagaagagattcattctaaaacaaagtcaagaaaacaactgggtcggatcatgctaaaaggagataatattactctgctacaaagtgtctccaactagaaatgatcaatgaagtgagaaattgttgagaaggatacagtttgtttttagatgtcctttgtccaatgtgaacatttattcatattgttttgattaccctcgtgttactacaagatggcaataaatactatgggattgtttgtattaaaaaatttacattgcttcttactattcagcagtagaaactttttacacagtaacaccattcgttgttggtatttagttttctgaagggtcgcagttgccttgagcacttggtattcgcagagcttggacctgtagattttgaggcagattaggaattctgcctgatgggtaagcttccagtattgggaggtggagaaggggagggttcagaaaaataaataagagttattgcactaacaaaagtcttcatcacttgtagttctggatgctggaataccagagtttctaacctaaatacgttgggtacattatttaatgggggtccagtattgctcaacactctcattgagtcactgtgaggtctttgtgaattttatcgctaagatcagaatgtgagaagtatttggatatagggaaagaatgaagtgcctttcaagtacattaaaaatcagttaagagtttacaggaaagagactgagattggtaatctgaaaaggaccacaagcatagctggtaggcaaattgttaggcagaataatggtatgttggagaaatacacctgtctcttattcttatctcttaagaattttggttcttcccccagtgattgctggttgaattcttatatggacaggtttcccttcccccagtatcgcacatggttctagttagaatcctgttagatagtgagcatctgctgttagctagacactgttgaatcaatacagtgaaacagacaggtaagcaggtggttttaatgcctcattctaagtgctatttaaattggatcttgaaagatgaataaggcctgccttaagttctgctaaaggcaatgttgttattaaggacgggtgaggaaggaccaagaagtctggctcctgcttttctacatgcctgtgaaggagacttttcatgaaactgaataaaagaaatcctttccgagatagaggagatttgtaggtgaatgcagaagtgtatccagctttgaaccatgcattccatctatattcctcctgtctgaactcatgctcttttgattatgttttgaaataaagggctgcattagttcttttaaaaaaaaaaaa

SEQ ID NO: 322212 - DNA, 415 bp, Homo sapiens
tccggttctttattccggaagttgctctcagaggcagcgtgcgggtgtgctctttgtgaaattccaccatggcgtaccgtggccagggtcagaaagtgcagaaggttatggtgcagcccatcaacctcatcttcagatacttacaaaatagatcgcggattcaggtgtggctctatgagcaagtgaatatgcggatagaaggctgtatcattggttttgatgagtatatgaaccttgtattagatgatgcagaagagattcattctaaaacaaagtcaagaaaacaactgggtcggatcatgctaaaaggagataatattactctgctacaaagtgtctccaactagaaatgatcaatgaagtgagaaattgttgagaaggatacagtttctcaacctgggagggggtcctctga

SEQ ID NO: 322213 - DNA, 710 bp, Homo sapiens
tccggttctttattccggaagttgctctcagaggcagcgtgcgggtgtgctctttgtgaaattccaccatggcgtaccgtggccagggtcagaaagtgcagaaggttatggtgcagcccatcgtatcctacgcaggatgtcaggactaggaggttcgggtcagaatacggggtgcgaaggcgcaggctgagggcaggcctgggatagtggagtacggatccacatcccatgagcccccggggctaccaagactggaagaaagcgcgggtagttgaaccgtgatggtggggaggtggtcttggggggacccctgccgtggggaatgcaggaatggacgcggcaaaaggagggaagagaacttcagagatcgcggattcaggtgtggctctatgagcaagtgaatatgcggatagaaggctgtatcattggttttgatgagtatatgaaccttgtattagatgatgcagaagagattcattctaaaacaaagtcaagaaaacaactgggtcggatcatgctaaaaggagataatattactctgctacaaagtgtctccaactagaaatgatcaatgaagtgagaaattgttgagaaggatacagtttgtttttagatgtcctttgtccaatgtgaacatttattcatattgttttgattaccctcgtgttactacaagatggcaataaatactatgggattgtttgtattaa

SEQ ID NO: 322214 - DNA, 490 bp, Homo sapiens
tccggttctttattccggaagttgctctcagaggcagcgtgcgggtgtgctctttgtgaaattccaccatggcgtaccgtggccagggtcagaaagtgcagaaggttatggtgcagcccatcaacctcatcttcagatacttacaaaatagatcgcggattcaggtgtggctctatgagcaagtgaatatgcggatagaaggctgtatcattggttttgatgagtatatgaaccttgtattagatgatgcagaagagattcattctaaaacaaagtcaagaaaacaactgggtcggatcatgctaaaaggagataatattactctgctacaaagtgtctccaactagcagtgaatggtgaagtctgtaggatgttgagaagaccccttgagcgtgtttaaagatgtctgctgcaacctgcatttactcaacttgttttacttgcacattattattaggtgacaataaatgctgtaggaagtttttgttaa

SEQ ID NO: 322215 - DNA, 380 bp, Homo sapiens
tccggttctttattccggaagttgctctcagaggcagcgtgcgggtgtgctctttgtgaaattccaccatggcgtaccgtggccagggtcagaaagtgcagaaggttatggtgcagcccatcaacctcatcttcagatacttacaaaatagatcgcggattcaggtgtggctctatgagcaagtgaatatgcggatagaaggctgtatcattaatgaccagtccatgggtgagatgcagataatcggaggcgatgatctttcaacgctggctggaaagaaaacacttggtagacgggactcgagtgatgattgggagattcctgatgggcagattacagtgggacaaagaattggatctggatcatttggaacagtctac

SEQ ID NO: 322216 - DNA, 977 bp, Homo sapiens
tccggttctttattccggaagttgctctcagaggcagcgtgcgggtgtgctctttgtgaaattccaccatggcgtaccgtggccagggtcagaaagtgcagaaggttatggtgcagcccatcgtatcctacgcaggatgtcaggactaggaggttcgggtcagaatacggggtgcgaaggcgcaggctgagggcaggcctgggatagtggagtacggatccacatcccatgagcccccggggctaccaagactggaagaaagcgcgggtagttgaaccgtgatggtggggaggtggtcttggggggacccctgccgtggggaatgcaggaatggacgcggcaaaaggagggaagagaacttcaggtgcggagtgaaaacgggagttaacggttttgggaaactccagggggatgaaagtggaatggatgttctttagtctttagaagacccgtaacgaatgcccagctgggcacttgttgtttgcgtaagcaccagacctcgcgtttagtaaacaaaggtgagacgggaatagcgtcgtccggttgtttcaggaagcagagtctatgctgcttttgtattttttccttagccactgtggtgcagaacctcatcttcagatacttacaaaatagatcgcggattcaggtgtggctctatgagcaagtgaatatgcggatagaaggctgtatcattggttttgatgagtatatgaaccttgtattagatgatgcagaagagattcattctaaaacaaagtcaagaaaacaactgggtcggatcatgctaaaaggagataatattactctgctacaaagtgtctccaactagaaatgatcaatgaagtgagaaattgttgagaaggatacagtttgtttttagatgtcctttgtccaatgtgaacatttattcatattgttttgattaccctcgtgttactacaagatggcaataaatactatgggattgtttgtattaa

SEQ ID NO: 322217 - DNA, 1579 bp, Homo sapiens
tccggttctttattccggaagttgctctcagaggcagcgtgcgggtgtgctctttgtgaaattccaccatggcgtaccgtggccagggtcagaaagtgcagaaggttatggtgcagcccatcaacctcatcttcagatacttacaaaatagatcgcggattcaggtgtggctctatgagcaagtgaatatgcggatagaaggctgtatcattggttttgatgagtatatgaaccttgtattagatgatgcagaagagattcattctaaaacaaagtcaagaaaacaactgggtcggatcatgctaaaaggagataatattactctgctacaaagtgtctccaactagaaatgatcaatgaagtgagaaattgttgagaaggatacagtttgtttttagatgtcctttgtccaatgtgaacatttattcatattgttttgattaccctcgtgttactacaagatggcaataaatactatgggattgtttgtattaaaaaatttacattgcttcttactattcagcagtagaaactttttacacagtaacaccattcgttgttggtatttagttttctgaagggtcgcagttgccttgagcacttggtattcgcagagcttggacctgtagattttgaggcagattaggaattctgcctgatgggtaagcttccagtattgggaggtggagaaggggagggttcagaaaaataaataagagttattgcactaacaaaagtcttcatcacttgtagttctggatgctggaataccagagtttctaacctaaatacgttgggtacattatttaatgggggtccagtattgctcaacactctcattgagtcactgtgaggtctttgtgaattttatcgctaagatcagaatgtgagaagtatttggatatagggaaagaatgaagtgcctttcaagtacattaaaaatcagttaagagtttacaggaaagagactgagattggtaatctgaaaaggaccacaagcatagctggtaggcaaattgttaggcagaataatggtatgttggagaaatacacctgtctcttattcttatctcttaagaattttggttcttcccccagtgattgctggttgaattcttatatggacaggtttcccttcccccagtatcgcacatggttctagttagaatcctgttagatagtgagcatctgctgttagctagacactgttgaatcaatacagtgaaacagacaggtaagcaggtggttttaatgcctcattctaagtgctatttaaattggatcttgaaagatgaataaggcctgccttaagttctgctaaaggcaatgttgttattaaggacgggtgaggaaggaccaagaagtctggctcctgcttttctacatgcctgtgaaggagacttttcatgaaactgaataaaagaaatcctttccgagatagaggagatttgtaggtgaatgcagaagtgtatccagctttgaaccatgcattccatctatattcctcctgtctgaactcatgctcttttgattatgttttgaaataaagggctgcattagttcttttaaaaaaaaaaaa

SEQ ID NO: 322218 - DNA, 495 bp, Homo sapiens
tccggttctttattccggaagttgctctcagaggcagcgtgcgggtgtgctctttgtgaaattccaccatggcgtaccgtggccagggtcagaaagtgcagaaggttatggtgcagcccatcaacctcatcttcagatacttacaaaatagatcgcggattcaggtgtggctctatgagcaagtgaatatgcggatagaaggctgtatcattggttttgatgagtatatgaaccttgtattagatgatgcagaagagattcattctaaaacaaagtcaagaaaacaactgggtcggatcatgctaaaaggagataatattactctgctacaaagtgtctccaactagaaatgatcaatgaagtgagaaattgttgagaaggatacagtttgtttttagatgtcctttgtccaatgtgaacatttattcatattgttttgattaccctcgtgttactacaagatggcaataaatactatgggattgtttgtattaa

SEQ ID NO: 322219 - DNA, 2520 bp, Homo sapiens
tgcggcccccgcctgccctttaaaagagcggggcctgcgccggccgcgccacaccgcggggaccaggaggcacgctggttttccggggccgctccatcgcgccttcctcctgcgcctcgcttctccggtccagccgccatcttcctttccgcacaggggccgccgagcggggccatgcagccaacgctgcttctcagcctcctgggagccgtggggctggcggctgtcaattccatgccagtggataacaggaaccacaatgaaggaatggtgactcgctgcatcattgaggtcctctcaaatgccttgtcgaagtccagcgctccacccatcacccctgagtgccgccaagtcctgaagacgagtagaaaagacgtcaaagacaaagagacaactgaaaatgaaaacacaaagtttgaagtaagattgttaagagacccagctgatgcctcggaagcccacgagtcctccagcaggggagaggcaggagccccaggggaggaggacatccaaggcccaacaaaggcagacacagagaaatgggcagagggaggcgggcacagccgagagcgagcggatgagccccagtggagcctctatccctccgacagccaagtctctgaagaagtgaagacacgccattctgagaagagccagagagaggatgaggaggaggaggagggagagaactatcaaaaaggggagcgaggggaagatagcagtgaagagaaacaccttgaagagccaggagagacacaaaacgcttttctcaatgaaagaaagcaggcttcagctataaaaaaagaggagttagtggccagatcggaaacacatgctgccgggcattctcaggagaagacacatagccgagagaagagtagccaggagagtggagaggaggcagggagccaggagaatcacccccaggagtctaaaggccaaccccgaagccaggaagaatctgaggaaggtgaggaagatgccacctctgaggtggacaaacgacgcacgaggcccagacaccaccacgggaggagcaggcccgacaggtcctctcaaggagggagtcttccctctgaggaaaagggacacccccaggaggaatctgaggagtcaaacgtcagcatggccagtttaggggaaaagagggaccaccattcaacccactacagggcttcagaggaagaacctgaatatggagaagaaataaagggttatccaggcgtccaggcccctgaggacctggagtgggagcgctataggggcagaggaagtgaagaatacagggctccaagacctcagagtgaggagagttgggatgaggaggacaagagaaactaccccagcttagagcttgataagatggcacatggatatggtgaagaaagtgaggaagagaggggccttgagccgggaaagggacgccatcacagaggcaggggaggggagccacgtgcctatttcatgtctgacaccagagaagagaaaaggttcttgggtgaaggacaccaccgtgtccaagaaaaccagatggacaaggcaaggaggcatccacaaggtgcgtggaaagagctggacagaaattatctcaactacggtgaggaaggagccccagggaagtggcagcagcagggagacctgcaggacactaaagaaaacagggaggaagctaggtttcaagataaacaatatagctcccatcacacagctgaaaagaggaagagattaggggaactgttcaacccatactacgaccctctccagtggaagagcagccattttgaaagaagagacaacatgaatgacaattttctcgagggtgaggaggaaaatgagctgaccttgaacgagaagaatttcttcccagaatacaactatgactggtgggagaaaaagcccttctctgaggatgtgaactgggggtatgagaagagaaacctcgccagggtccccaagctggacctgaaaaggcaatatgacagggtggcccaactggaccagctccttcactacaggaagaagtcagctgagtttccagacttctatgattctgaggagccggtgagcacccaccaggaggcagaaaatgaaaaggacagggctgaccagacagtcctgacagaggacgagaaaaaagaactcgaaaacttggctgcaatggatttggaactacagaagatagctgagaaattcagccaaaggggctgactgtcattggagcggtgggcactgttaagaagcagccatcacatgatctgtttttcaccacttcactgaaagacaccatttatctacccaagggcagaaagtagaacttactattcattaaatgtttgacacaattggaattgtctttaatttctgtcagaatgctattgaaaatgtgaattgcatgacttgtagcatattcttttctgcaaaatagacatattaacatgcttatgacaatgactgtgctactgtctttggaaaaatgtttgtctcagttggaaataataaaagattcacctgagaccaaaa

SEQ ID NO: 322220 - DNA, 547 bp, Homo sapiens
  misc_feature (12)..(12): n is a, c, g, or t
  misc_feature (32)..(32): n is a, c, g, or t
  misc_feature (49)..(49): n is a, c, g, or t
  misc_feature (57)..(57): n is a, c, g, or t
  misc_feature (63)..(63): n is a, c, g, or t
taagtgccccantataaaaatccccaatcccntgcccaagatcatctcnacaagagnccaatnacacccaaccccacccctgtgagaagaatccacccaccaggaggcagaaaatgaaaaggacagggctgaccagacagtcctgacagaggacgagaaaaaagaactcgaaaacttggctgcaatggatttggaactacagaagatagctgagaaattcagccaaaggggctgactgtcattggagcggtgggcactgttaagaagcagccatcacatgatctgtttttcaccacttcactgaaagacaccatttatctacccaagggcagaaagtagaacttactattcattaaatgtttgacacaattggaattgtctttaatttctgtcagaatgctattgaaaatgtgaattgcatgacttgtagcatattcttttctgcaaaatagacatattaacatgcttatgacaatgactgtgctactgtctttggaaaaatgtttgtctcagttggaaataataaaagattcacctgagaccaaaa

SEQ ID NO: 322221 - DNA, 2616 bp, Homo sapiens
tgcggcccccgcctgccctttaaaagagcggggcctgcgccggccgcgccacaccgcggggaccaggaggcacgctggttttccggggccgctccatcgcgccttcctcctgcgcctcgcttctccggtccagccgccatcttcctttccgcacaggggccgccgagcggggccatgcagccaacgctgcttctcagcctcctgggagccgtggggctggcggtcatttatttgcagaagatattacagatttccagcggaaagagaaagtgctgaaatgggtgtgttctcaagtagccatttggaggatgaaagaacactgtcaattccatgccagtggataacaggaaccacaatgaaggaatggtgactcgctgcatcattgaggtcctctcaaatgccttgtcgaagtccagcgctccacccatcacccctgagtgccgccaagtcctgaagacgagtagaaaagacgtcaaagacaaagagacaactgaaaatgaaaacacaaagtttgaagtaagattgttaagagacccagctgatgcctcggaagcccacgagtcctccagcaggggagaggcaggagccccaggggaggaggacatccaaggcccaacaaaggcagacacagagaaatgggcagagggaggcgggcacagccgagagcgagcggatgagccccagtggagcctctatccctccgacagccaagtctctgaagaagtgaagacacgccattctgagaagagccagagagaggatgaggaggaggaggagggagagaactatcaaaaaggggagcgaggggaagatagcagtgaagagaaacaccttgaagagccaggagagacacaaaacgcttttctcaatgaaagaaagcaggcttcagctataaaaaaagaggagttagtggccagatcggaaacacatgctgccgggcattctcaggagaagacacatagccgagagaagagtagccaggagagtggagaggaggcagggagccaggagaatcacccccaggagtctaaaggccaaccccgaagccaggaagaatctgaggaaggtgaggaagatgccacctctgaggtggacaaacgacgcacgaggcccagacaccaccacgggaggagcaggcccgacaggtcctctcaaggagggagtcttccctctgaggaaaagggacacccccaggaggaatctgaggagtcaaacgtcagcatggccagtttaggggaaaagagggaccaccattcaacccactacagggcttcagaggaagaacctgaatatggagaagaaataaagggttatccaggcgtccaggcccctgaggacctggagtgggagcgctataggggcagaggaagtgaagaatacagggctccaagacctcagagtgaggagagttgggatgaggaggacaagagaaactaccccagcttagagcttgataagatggcacatggatatggtgaagaaagtgaggaagagaggggccttgagccgggaaagggacgccatcacagaggcaggggaggggagccacgtgcctatttcatgtctgacaccagagaagagaaaaggttcttgggtgaaggacaccaccgtgtccaagaaaaccagatggacaaggcaaggaggcatccacaaggtgcgtggaaagagctggacagaaattatctcaactacggtgaggaaggagccccagggaagtggcagcagcagggagacctgcaggacactaaagaaaacagggaggaagctaggtttcaagataaacaatatagctcccatcacacagctgaaaagaggaagagattaggggaactgttcaacccatactacgaccctctccagtggaagagcagccattttgaaagaagagacaacatgaatgacaattttctcgagggtgaggaggaaaatgagctgaccttgaacgagaagaatttcttcccagaatacaactatgactggtgggagaaaaagcccttctctgaggatgtgaactgggggtatgagaagagaaacctcgccagggtccccaagctggacctgaaaaggcaatatgacagggtggcccaactggaccagctccttcactacaggaagaagtcagctgagtttccagacttctatgattctgaggagccggtgagcacccaccaggaggcagaaaatgaaaaggacagggctgaccagacagtcctgacagaggacgagaaaaaagaactcgaaaacttggctgcaatggatttggaactacagaagatagctgagaaattcagccaaaggggctgactgtcattggagcggtgggcactgttaagaagcagccatcacatgatctgtttttcaccacttcactgaaagacaccatttatctacccaagggcagaaagtagaacttactattcattaaatgtttgacacaattggaattgtctttaatttctgtcagaatgctattgaaaatgtgaattgcatgacttgtagcatattcttttctgcaaaatagacatattaacatgcttatgacaatgactgtgctactgtctttggaaaaatgtttgtctcagttggaaataataaaagattcacctgagaccaaaa

SEQ ID NO: 322222 - DNA, 2463 bp, Homo sapiens
tgcggcccccgcctgccctttaaaagagcggggcctgcgccggccgcgccacaccgcggggaccaggaggcacgctggttttccggggccgctccatcgcgccttcctcctgcgcctcgcttctccggtccagccgccatcttcctttccgcacaggggccgccgagcggggccatgcagccaacgctgcttctcagcctcctgggagccgtggggctggcggctgtcaattccatgccagtggataacaggaaccacaatgaaggaatggtgactcgctgcatcattgaggtcctctcaaatgccttgtcgaagtccagcgctccacccatcacccctgagtgccgccaagtcctgaagacgagtagaaaagacgtcaaagacaaagagacaactgaaaatgaaaacacaaagtttgaagtaagattgttaagagacccagctgatgcctcggaagcccacgagtcctccagcaggggagaggcaggagccccaggggaggaggacatccaaggcccaacaaaggcagacacagagaaatgggcagagggaggcgggcacagccgagagcgagcggatgagccccagtggagcctctatccctccgacagccaagtctctgaagaagtgaagacacgccattctgagaagagccagagagaggatgaggaggaggaggagggagagaactatcaaaaaggggagcgaggggaagatagcagtgaagagaaacaccttgaagagccaggagagacacaaaacgcttttctcaatgaaagaaagcaggcttcagctataaaaaaagaggagttagtggccagatcggaaacacatgctgccgggcattctcaggagaagacacatagccgagagaagagtagccaggagagtggagaggaggcagggagccaggagaatcacccccaggagtctaaaggccaaccccgaagccaggaagaatctgaggaaggtgaggaagatgccacctctgaggtggacaaacgacgcacgaggcccagacaccaccacgggaggagcaggcccgacaggtcctctcaaggagggagtcttccctctgaggaaaagggacacccccaggaggaatctgaggagtcaaacgtcagcatggccagtttaggggaaaagagggaccaccattcaacccactacagggcttcagaggaagaacctgaatatggagaagaaataaagggttatccaggcgtccaggcccctgaggacctggagtgggagcgctataggggcagaggaagtgaagaatacagggctccaagacctcagagtgaggagagttgggatgaggaggacaagagaaactaccccagcttagagcttgataagatggcacatggatatggtgaagaaagtgaggaagagaggggccttgagccgggaaagggacgccatcacagaggcaggggaggggagccacgtgcctatttcatgtctgacaccagagaagagaaaaggttcttgggtgaaggacaccaccgtgtccaagaaaaccagatggacaaggcaaggaggcatccacaaggtgcgtggaaagagctggacagaaattatctcaactacggtgaggaaggagccccagggaagtggcagcagcagggagacctgcaggacactaaagaaaacagggaggaagctaggtttcaagataaacaatatagctcccatcacacagctgaaaagaggaagagattaggggaactgttcaacccatactacgaccctctccagtggaagagcagccattttgaaagaagagacaacatgaatgacaattttctcgagggtgaggaggaaaatgagctgaccttgaacgagaagaatttcttcccagaatacaactatgactggtgggagaaaaagcccttctctgaggatgtgaactgggggtatgagaagagaaacctcgccagggtccccaagctggacctgaaaaggcaatatgacagggtggcccaactggaccagctccttcactacaggaagaagtcagctgagtttccagacttctatgattctgaggagccggtgagcacccaccaggaggcagaaaatgaaaaggacagggctgaccagacagtcctgacagaggacgagaaattcagccaaaggggctgactgtcattggagcggtgggcactgttaagaagcagccatcacatgatctgtttttcaccacttcactgaaagacaccatttatctacccaagggcagaaagtagaacttactattcattaaatgtttgacacaattggaattgtctttaatttctgtcagaatgctattgaaaatgtgaattgcatgacttgtagcatattcttttctgcaaaatagacatattaacatgcttatgacaatgactgtgctactgtctttggaaaaatgtttgtctcagttggaaataataaaagattcacctgagaccaaaa

SEQ ID NO: 322223 - DNA, 1723 bp, Homo sapiens
tgcggcccccgcctgccctttaaaagagcggggcctgcgccggccgcgccacaccgcggggaccaggaggcacgctggttttccggggccgctccatcgcgccttcctcctgcgcctcgcttctccggtccagccgccatcttcctttccgcacaggggccgccgagcggggccatgcagccaacgctgcttctcagcctcctgggagccgtggggctggcggctgtcaattccatgccagtggataacaggaaccacaatgaaggaatggtgactcgctgcatcattgaggtcctctcaaatgccttgtcgaagtccagcgctccacccatcacccctgagtgccgccaagtcctgaagacgagtagaaaagacgtcaaagacaaagagacaactgaaaatgaaaacacaaagtttgaagtaagattgttaagagacccagctgatgcctcggaagcccacgagtcctccagcaggggagaggcaggagccccaggggaggaggacatccaaggcccaacaaaggcagacacagagaaatgggcagagggaggcgggcacagccgagagcgagcggatgagccccagtggagcctctatccctccgacagccaagtctctgaagaagtgaagacacgccattctgagaagagccagagagaggatgaggaggaggaggagggagagaactatcaaaaaggggagcgaggggaagatagcagtgaagagaaacaccttgaagagccaggagagacacaaaacgcttttctcaatgaaagaaagcaggcttcagctataaaaaaagaggagttagtggccagatcggaaacacatgctgccgggcattctcaggagaagacacatagccgagagaagagtagccaggagagtggagaggaggcagggagccaggagaatcacccccaggagtctaaaggccaaccccgaagccaggaagaatctgaggaaggtgaggaagatgccacctctgaggtggacaaacgacgcacgaggcccagacaccaccacgggaggagcaggcccgacaggtcctctcaaggagggagtcttccctctgaggaaaagggacacccccaggaggaatctgaggagtcaaacgtcagcatggccagtttaggggaaaagagggaccaccattcaacccactacagggcttcagaggaagaacctgaatatggagaagaaataaagggttatccaggcgtccaggcccctgaggacctggagtgggagcgctataggggcagaggaagtgaagaatacagggctccaagacctcagagtgaggagagttgggatgaggaggacaagagaaactaccccagcttagagcttgataagatggcacatggatatggtgaagaaagtgaggaagagaggggccttgagccgggaaagggacgccatcacagaggcaggggaggggagccacgtgccaatccggtaggaaccagacaagaaacggacgggcaaagaccacgcgccagaaacccaggacggaaggcgcccaacggcgtcaaacgaacaacacacacagaaagaacccgagaatatacgaccccgcgactaagagcgcatcgacagaagacccacccagacagacgctcccatccgccgactagaaccaagcggaacggaacacgaaccgtgaactccatgagcgcaaacccagcgacgcagccgcaccacgcgccacccccgc

SEQ ID NO: 322224 - DNA, 837 bp, Homo sapiens
tgcggcccccgcctgccctttaaaagagcggggcctgcgccggccgcgccacaccgcggggaccaggaggcacgctggttttccggggccgctccatcgcgccttcctcctgcgcctcgcttctccggtccagccgccatcttcctttccgcacaggggccgccgagcggggccatgcagccaacgctgcttctcagcctcctgggagccgtggggctggcggctgtcaattccatgccagtggataacagaaacctcgccagggtccccaagctggacctgaaaaggcaatatgacagggtggcccaactggaccagctccttcactacaggaagaagtcagctgagtttccagacttctatgattctgaggagccggtgagcacccaccaggaggcagaaaatgaaaaggacagggctgaccagacagtcctgacagaggacgagaaaaaagaactcgaaaacttggctgcaatggatttggaactacagaagatagctgagaaattcagccaaaggggctgactgtcattggagcggtgggcactgttaagaagcagccatcacatgatctgtttttcaccacttcactgaaagacaccatttatctacccaagggcagaaagtagaacttactattcattaaatgtttgacacaattggaattgtctttaatttctgtcagaatgctattgaaaatgtgaattgcatgacttgtagcatattcttttctgcaaaatagacatattaacatgcttatgacaatgactgtgctactgtctttggaaaaatgtttgtctcagttggaaataataaaagattcacctgagaccaaaa

SEQ ID NO: 322225 - DNA, 508 bp, Homo sapiens
gaggtaggttgactaatgcagcttctaacatgcctaaaattcccctttgcactcatgctccatcaaactacagcaaaagaaattggttcgggacctcatgcctccacttttctgtattttccagaaaaaagaactcgaaaacttggctgcaatggatttggaactacagaagatagctgagaaattcagccaaaggggctgactgtcattggagcggtgggcactgttaagaagcagccatcacatgatctgtttttcaccacttcactgaaagacaccatttatctacccaagggcagaaagtagaacttactattcattaaatgtttgacacaattggaattgtctttaatttctgtcagaatgctattgaaaatgtgaattgcatgacttgtagcatattcttttctgcaaaatagacatattaacatgcttatgacaatgactgtgctactgtctttggaaaaatgtttgtctcagttggaaataataaaagattcacctgaga

SEQ ID NO: 322226 - DNA, 2466 bp, Homo sapiens
tgcggcccccgcctgccctttaaaagagcggggcctgcgccggccgcgccacaccgcggggaccaggaggcacgctggttttccggggccgctccatcgcgccttcctcctgcgcctcgcttctccggtccagccgccatcttcctttccgcacaggggccgccgagcggggccatgcagccaacgctgcttctcagcctcctgggagccgtggggctggcggctgtcaattccatgccagtggataacaggaaccacaatgaaggaatggtgactcgctgcatcattgaggtcctctcaaatgccttgtcgaagtccagcgctccacccatcacccctgagtgccgccaagtcctgaagacgagtagaaaagacgtcaaagacaaagagacaactgaaaatgaaaacacaaagtttgaagtaagattgttaagagacccagctgatgcctcggaagcccacgagtcctccagcaggggagaggcaggagccccaggggaggaggacatccaaggcccaacaaaggcagacacagagaaatgggcagagggaggcgggcacagccgagagcgagcggatgagccccagtggagcctctatccctccgacagccaagtctctgaagaagtgaagacacgccattctgagaagagccagagagaggatgaggaggaggaggagggagagaactatcaaaaaggggagcgaggggaagatagcagtgaagagaaacaccttgaagagccaggagagacacaaaacgcttttctcaatgaaagaaagcaggcttcagctataaaaaaagaggagttagtggccagatcggaaacacatgctgccgggcattctcaggagaagacacatagccgagagaagagtagccaggagagtggagaggaggcagggagccaggagaatcacccccaggagtctaaaggccaaccccgaagccaggaagaatctgaggaaggtgaggaagatgccacctctgaggtggacaaacgacgcacgaggcccagacaccaccacgggaggagcaggcccgacaggtcctctcaaggagggagtcttccctctgaggaaaagggacacccccaggaggaatctgaggagtcaaacgtcagcatggccagtttaggggatggagaagaaataaagggttatccaggcgtccaggcccctgaggacctggagtgggagcgctataggggcagaggaagtgaagaatacagggctccaagacctcagagtgaggagagttgggatgaggaggacaagagaaactaccccagcttagagcttgataagatggcacatggatatggtgaagaaagtgaggaagagaggggccttgagccgggaaagggacgccatcacagaggcaggggaggggagccacgtgcctatttcatgtctgacaccagagaagagaaaaggttcttgggtgaaggacaccaccgtgtccaagaaaaccagatggacaaggcaaggaggcatccacaaggtgcgtggaaagagctggacagaaattatctcaactacggtgaggaaggagccccagggaagtggcagcagcagggagacctgcaggacactaaagaaaacagggaggaagctaggtttcaagataaacaatatagctcccatcacacagctgaaaagaggaagagattaggggaactgttcaacccatactacgaccctctccagtggaagagcagccattttgaaagaagagacaacatgaatgacaattttctcgagggtgaggaggaaaatgagctgaccttgaacgagaagaatttcttcccagaatacaactatgactggtgggagaaaaagcccttctctgaggatgtgaactgggggtatgagaagagaaacctcgccagggtccccaagctggacctgaaaaggcaatatgacagggtggcccaactggaccagctccttcactacaggaagaagtcagctgagtttccagacttctatgattctgaggagccggtgagcacccaccaggaggcagaaaatgaaaaggacagggctgaccagacagtcctgacagaggacgagaaaaaagaactcgaaaacttggctgcaatggatttggaactacagaagatagctgagaaattcagccaaaggggctgactgtcattggagcggtgggcactgttaagaagcagccatcacatgatctgtttttcaccacttcactgaaagacaccatttatctacccaagggcagaaagtagaacttactattcattaaatgtttgacacaattggaattgtctttaatttctgtcagaatgctattgaaaatgtgaattgcatgacttgtagcatattcttttctgcaaaatagacatattaacatgcttatgacaatgactgtgctactgtctttggaaaaatgtttgtctcagttggaaataataaaagattcacctgagaccaaaa

SEQ ID NO: 322227 - DNA, 2443 bp, Homo sapiens
tgcggcccccgcctgccctttaaaagagcggggcctgcgccggccgcgccacaccgcggggaccaggaggcacgctggttttccggggccgctccatcgcgccttcctcctgcgcctcgcttctccggtccagccgccatcttcctttccgcacaggggccgccgagcggggccatgcagccaacgctgcttctcagcctcctgggagccgtggggctggcggctgtcaattccatgccagtggataacaggaaccacaatgaaggaatggtgactcgctgcatcattgaggtcctctcaaatgccttgtcgaagtccagcgctccacccatcacccctgagtgccgccaagtcctgaagacgagtagaaaagacgtcaaagacaaagagacaactgaaaatgaaaacacaaagtttgaagtaagattgttaagagacccagctgatgcctcggaagcccacgagtcctccagcaggggagaggcaggagccccaggggaggaggacatccaaggcccaacaaaggcagacacagagaaatgggcagagggaggcgggcacagccgagagcgagcggatgagccccagtggagcctctatccctccgacagccaagtctctgaagaagtgaagacacgccattctgagaagagccagagagaggatgaggaggaggaggagggagagaactatcaaaaaggggagcgaggggaagatagcagtgaagagaaacaccttgaagagccaggagagacacaaaacgcttttctcaatgaaagaaagcaggcttcagctataaaaaaagaggagttagtggccagatcggaaacacatgctgccgggcattctcaggagaagacacatagccgagagaagagtagccaggagagtggagaggaggcagggagccaggagaatcacccccaggagtctaaaggccaaccccgaagccaggaagaatctgaggaaggtgaggaagatgccacctctgaggtggacaaacgacgcacgaggcccagacaccaccacgggaggagcaggcccgacaggtcctctcaaggagggagtcttccctctgaggaaaagggacacccccaggaggaatctgaggagtcaaacgtcagcatggccagtttaggggaaaagagggaccaccattcaacccactacagggcttcagaggaagaacctgaatatggagaagaaataaagggttatccaggcgtccaggcccctgaggacctggagtgggagcgctataggggcagaggaagtgaagaatacagggctccaagacctcagagtgaggagagttgggatgaggaggacaagagaaactaccccagcttagagcttgataagatggcacatggatatggtgaagaaagtgaggaagagaggggccttgagccgggaaagggacgccatcacagaggcaggggaggggagccacgtgcctatttcatgtctgacaccagagaagagaaaaggttcttgggtgaaggacaccaccgtgtccaagaaaaccagatggacaaggcaaggaggcatccacaaggtgcgtggaaagagctggacagaaattatctcaactacggtgaggaaggagccccagggaagtggcagcagcagggagacctgcaggacactaaagaaaacagggaggaagctaggtttcaagataaacaatatagctcccatcacacagctgaaaagaggaagagattaggggaactgttcaacccatactacgaccctctccagtggaagagcagccattttgaaagaagagacaacatgaatgacaattttctcgagggtgaggaggaaaatgagctgaccttgaacgagaagaatttcttcccagaatacaactatgactggtgggagaaaaagcccttctctgaggatgtgaactgggggtatgagaagagaaacctcgccagggtccccaagctggacctgaaaaggcaatatgacagggtggcccaactggaccagctccttcactacaggaagaagtcagctgagtttccagacttctatgattctgaggagccggtgagcacccaccaggaggcagaaaatgaaaaggacagggctgaccagacagtcctgacagaggacgagaaaaaagaactcgaaaacttggctgcaatggatttggaactacagaagatagctgagaaattcagccaaaggggctgactgtcattggagcggtgggcactgttaagaagcagccatcacatgatctgtttttcaccacttcactgaaagacaccatttatctacccaagggcagaaagtagaacttactattcattaaatgtttgacacaattggaattgtctttaatttctgtcggtattgagcaggtgatggctgactggagcatatctttctggaaatgacttttactggtttttgatggggcgcctgg

SEQ ID NO: 322228 - DNA, 1359 bp, Homo sapiens
tgcggcccccgcctgccctttaaaagagcggggcctgcgccggccgcgccacaccgcggggaccaggaggcacgctggttttccggggccgctccatcgcgccttcctcctgcgcctcgcttctccggtccagccgccatcttcctttccgcacaggggccgccgagcggggccatgcagccaacgctgcttctcagcctcctgggagccgtggggctggcggctgtcaattccatgccagtggataacaggaaccacaatgaaggaatggtgactcgctgcatcattgaggtcctctcaaatgccttgtcgaagtccagcgctccacccatcacccctgagtgccgccaagtcctgaagacgagtagaaaagacgtcaaagacaaagagacaactgaaaatgaaaacacaaagtttgaagtaagattgttaagagacccagctgatgcctcggaagcccacgagtcctccagcaggggagaggcaggagccccaggggaggaggacatccaaggcccaacaaaggcagacacagagaaatgggcagagggaggcgggcacagccgagagcgagcggatgagccccagtggagcctctatccctccgacagccaagtctctgaagaagtgaagacacgccattctgagaagagccagagagaggatgaggaggaggaggagggagagaactatcaaaaaggggagcgaggggaagatagcagtgaagagaaaaagcccttctctgaggatgtgaactgggggtatgagaagagaaacctcgccagggtccccaagctggacctgaaaaggcaatatgacagggtggcccaactggaccagctccttcactacaggaagaagtcagctgagtttccagacttctatgattctgaggagccggtgagcacccaccaggaggcagaaaatgaaaaggacagggctgaccagacagtcctgacagaggacgagaaaaaagaactcgaaaacttggctgcaatggatttggaactacagaagatagctgagaaattcagccaaaggggctgactgtcattggagcggtgggcactgttaagaagcagccatcacatgatctgtttttcaccacttcactgaaagacaccatttatctacccaagggcagaaagtagaacttactattcattaaatgtttgacacaattggaattgtctttaatttctgtcagaatgctattgaaaatgtgaattgcatgacttgtagcatattcttttctgcaaaatagacatattaacatgcttatgacaatgactgtgctactgtctttggaaaaatgtttgtctcagttggaaataataaaagattcacctgagaccaaaa

SEQ ID NO: 322229 - DNA, 585 bp, Homo sapiens
tgacagaaacagaggaacagacattttaacaagaagaaaggtatcgtacagcgccattatcaatgaaagaaatgtaaatttaaatttaagatacaattgtaaagttgcagtgatgacttttgtgaaacaaaaacttatgtatcattttagtgatactcttaagattatttgttttttggcagtaaatgtgaaaattctttgttgttctactttatgaatagaacttaaggaaataactccaaaacaatgtaatttgtataagaaggttcataaaaatcctgtaaggtttaaattagtttagaagaaaaataatagtttgctgtaactttttctccctaaagaaacaaggtccaactaatccaatgctgtttcatcttgttcgagacgtcaaacaggtaagagattattttttgcttttgaaaaatgttattttaaaaaatcatttatatttcatgttttttaaaaaaaaaatcatttaaatacattttagaaataccaataaaattacagtttacagaacaagataaaatatgggctgaatttgtggtaagagaggagtaaagagcataatgtatcagaaaacaa

SEQ ID NO: 322230 - DNA, 578 bp, Homo sapiens
agaggtggaggttgcagtgagcctagattgctgccactgcactccagcctgggtgacagcagaactctgtctcaaaaaaaagatgtggaattcttttctgcaaatgttctctaatagtataccttcttcagtctgtcgatatatgtatgctattattttacaagtaatacatgttgattgtattggaaattatagaaaagattatattggattgtttagaaaatatttttaaatgtgaagaaaaatataaaaattactcccttgttccactttccccactctcaagtcagactatgttgttttcatagttagtagctagcagtctaccccactagattatatgcttcacagagggaagggaccctcaagacttcactggattgagtagcacccaataccttgcttgctgcctggtttgtgatgggcatactgtaagaaaaaaaaatctgaatgacaaaatgtttttccataataccagacttcctcttgaagagatgggtcgtaatgttgtagtcttacatgcttacgtagacaatcaaagcaagaatactcaataaatggctatttaccacttgaaa

SEQ ID NO: 322231 - DNA, 300 bp, Homo sapiens
  misc_feature (1)..(3): n is a, c, g, or t
  misc_feature (10)..(10): n is a, c, g, or t
nnnccgtccncagccccgtcgccggcggaggcgggcgcgggcgcgtccctgtggccagtcacccggaggagttggtcgcacaattatgaaagactcggcttctgctgctagcgccggagctgagttagttctgagaaggtttccctgggcgttccttgtccggcggcctctgctgccgcctccggagacgcttcccgatagatggctacaggccgcggaggaggaggaggtggagttgctgcccttcccgagatcgcgccactgcactctagcctgggggacagagcgagactccgtctc

SEQ ID NO: 322232 - DNA, 8087 bp, Homo sapiens
  misc_feature (1)..(3): n is a, c, g, or t
  misc_feature (10)..(10): n is a, c, g, or t
nnnccgtccncagccccgtcgccggcggaggcgggcgcgggcgcgtccctgtggccagtcacccggaggagttggtcgcacaattatgaaagactcggcttctgctgctagcgccggagctgagttagttctgagaaggtttccctgggcgttccttgtccggcggcctctgctgccgcctccggagacgcttcccgatagatggctacaggccgcggaggaggaggaggtggagttgctgcccttccggagtccgccccgtgaggagaatgtcccagaaatcctggatagaaagcactttgaccaagagggaatgtgtatatattataccaagttccaaggaccctcacagatgccttccaggatgtcaaatttgtcagcaactcgtcaggtgtttttgtggtcgcttggtcaagcaacatgcttgttttactgcaagtcttgccatgaaatactcagatgtgaaattgggtgaccattttaatcaggcaatagaagaatggtctgtggaaaagcatacagaacagagcccaacggatgcttatggagtcataaattttcaagggggttctcattcctacagagctaagtatgtgaggctatcatatgacaccaaacctgaagtcattctgcaacttctgcttaaagaatggcaaatggagttacccaaacttgttatctctgtacatgggggcatgcagaaatttgagcttcacccacgaatcaagcagttgcttggaaaaggtcttattaaagctgcagttacaactggagcctggattttaactggaggagtaaacacaggtgtggcaaaacatgttggagatgccctcaaagaacatgcttccagatcatctcgaaagatttgcactatcggaatagctccatggggagtgattgaaaacagaaatgatcttgttgggagagatgtggttgctccttatcaaaccttattgaaccccctgagcaaattgaatgttttgaataatctgcattcccatttcatattggtggatgatggcactgttggaaagtatggggcggaagtcagactgagaagagaacttgaaaaaactattaatcagcaaagaattcatgctaggattggccagggtgtccctgtggtggcacttatatttgagggtgggccaaatgttatcctcacagttcttgaataccttcaggaaagcccccctgttccagtagttgtgtgtgaaggaacaggcagagctgcagatctgctagcgtatattcataaacaaacagaagaaggagggaatcttcctgatgcagcagagcccgatattatttccactatcaaaaaaacatttaactttggccagaatgaagcacttcatttatttcaaacactgatggagtgcatgaaaagaaaggagcttatcactgttttccatattgggtcagatgaacatcaagatatagatgtagcaatacttactgcactgctaaaaggtactaatgcatctgcatttgaccagcttatccttacattggcatgggatagagttgacattgccaaaaatcatgtatttgtttatggacagcagtggctggttggatccttggaacaagctatgcttgatgctcttgtaatggatagagttgcatttgtaaaacttcttattgaaaatggagtaagcatgcataaattccttaccattccgagactggaagaactttacaacactaaacaaggtccaactaatccaatgctgtttcatcttgttcgagacgtcaaacagggaaatcttcctccaggatataagatcactctgattgatataggacttgttattgaatatctcatgggaggaacctacagatgcacctatactaggaaacgttttcgattaatatataatagtcttggtggaaataatcggaggtctggccgaaatacctccagcagcactcctcagttgcgaaagagtcatgaatcttttggcaatagggcagataaaaaggaaaaaatgaggcataaccatttcattaagacagcacagccctaccgaccaaagattgatacagttatggaagaaggaaagaagaaaagaaccaaagatgaaattgtagacattgatgatccagaaaccaagcgctttccttatccacttaatgaacttttaatttgggcttgccttatgaagaggcaggtcatggcccgttttttatggcaacatggtgaagaatcaatggctaaagcattagttgcctgtaagatctatcgttcaatggcatatgaagcaaagcagagtgacctggtagatgatacttcagaagaactaaaacagtattccaatgattttggtcagttggccgttgaattattagaacagtccttcagacaagatgaaaccatggctatgaaattgctcacttatgaactgaagaactggagtaattcaacctgccttaagttagcagtttcttcaagacttagaccttttgtagctcacacctgtacacaaatgttgttatctgatatgtggatgggaaggctgaatatgaggaaaaattcctggtacaaggtcatactaagcattttagttccacctgccatattgctgttagagtataaaactaaggctgaaatgtcccatatcccacaatctcaagatgctcatcagatgacaatggatgacagcgaaaacaactttcagaacataacagaagagatccccatggaagtgtttaaagaagtacggattttggatagtaatgaaggaaagaatgagatggagatacaaatgaaatcaaaaaagcttccaattacgcgaaagttttatgccttttatcatgcaccaattgtaaaattctggtttaacacgttggcatatttaggatttctgatgctttatacatttgtggttcttgtacaaatggaacagttaccttcagttcaagaatggattgttattgcttatatttttacttatgccattgagaaagtccgtgagatctttatgtctgaagctgggaaagtaaaccagaagattaaagtatggtttagtgattacttcaacatcagtgatacaattgccataatttctttcttcattggatttggactaagatttggagcaaaatggaactttgcaaatgcatatgataatcatgttttgtggctggaagattaatttactgtcttaacataatattttggtatgtgcgtttgctagattttctagctgtaaatcaacaggcaggaccttatgtaatgatgattggaaaaatggtggccaatatgttctacattgtagtgattatggctcttgtattacttagttttggtgttcccagaaaggcaatactttatcctcatgaagcaccatcttggactcttgctaaagatatagtttttcacccatactggatgatttttggtgaagtttatgcatacgaaattgatgtgtgtgcaaatgattctgttatccctcaaatctgtggtcctgggacgtggttgactccatttcttcaagcagtctacctctttgtacagtatatcattatggttaatcttcttattgcatttttcaacaatgtgtatttacaagtgaaggcaatttccaatattgtatggaagtaccagcgttatcattttattatggcttatcatgagaaaccagttctgcctcctccacttatcattcttagccatatagtttctctgttttgctgcatatgtaagagaagaaagaaagataagacttccgatggaccaaaacttttcttaacagaagaagatcaaaagaaacttcatgattttgaagagcagtgtgttgaaatgtatttcaatgaaaaagatgacaaatttcattctgggagtgaagagagaattcgtgtcacttttgaaagagtggaacagatgtgcattcagattaaagaagttggagatcgtgtcaactacataaaaagatcattacaatcattagattctcaaattggccatttgcaagatctttcagccctgacggtagatacattaaaaacactcactgcccagaaagcgtcggaagctagcaaagttcataatgaaatcacacgagaactgagcatttccaaacacttggctcaaaaccttattgatgatggtcctgtaagaccttctgtatggaaaaagcatggtgttgtaaatacacttagctcctctcttcctcaaggtgatcttgaaagtaataatccttttcattgtaatattttaatgaaagatgacaaagatccccagtgtaatatatttggccaagacttacctgcagtaccccagagaaaagaatttaattttccagaggctggttcctcttctggtgccttattcccaagtgctgtttcccctccagaactgcgacagagactacatggggtagaactcttaaaaatatttaataaaaatcaaaaattaggcagttcatctactagcataccacatctgtcatccccaccaaccaaattttttgttagtacaccacctcagccaagttgcaaaagccacttggaaactggaaccaaagatcaagaaactgtttgctctaaagctacagaaggagataatacagaatttggagcatttgtaggacacagagatagcatggatttacagaggtttaaagaaacatcaaacaagataaaaatactatccaataacaatacttctgaaaacactttgaaacgagcgagttctcttgctggatttactgactgtcacagaacttccattcctgttcattcagaacaagaaaaaatcagtagaaggccatctaccgaagacactcatgaagtagattccaaagcagctttaataccggattggttacaagatagaccatcaaacagagaaatgccatctgaagaaggaacattaaatggtctcacttctccatttaagccagctatggatacaaattactattattcagctgtggaaagaaataacttgatgaggttatcacagagcattccatttacacctgtgcctccaagaggggagcctgtcacagtgtatcgtttggaagagagttcacccaacatactaaataacagcatgtcttcttggtcacaactaggcctctgtgccaaaatagagtttttaagcaaagaggagatgggaggaggtttacgaagagctgtcaaagtacagtgtacctggtcagaacatgatatcctcaaatcagggcatctttatattatcaaatcttttcttccagaggtggttaatacatggtcaagtatttataaagaagatacagttctgcatctctgtctgagagaaattcaacaacagagagcagcacaaaagcttacgtttgcctttaatcaaatgaaacccaaatccataccatattctccaaggttccttgaagttttcctgctgtattgccattcagcaggacagtggtttgctgtggaagaatgtatgactggagaatttagaaaatacaacaataataatggagatgagattattccaactaatactctggaagagatcatgctagcctttagccactggacttacgaatatacaagaggggagttactggtacttgatttgcaaggtgttggtgaaaatttgactgacccatctgtgataaaagcagaagaaaagagatcctgtgatatggtttttggcccagcaaatctaggagaagatgcaattaaaaacttcagagcaaaacatcactgtaattcttgctgtagaaagcttaaacttccagatctgaagaggaatgattatacgcctgataaaattatatttcctcaggatgagccttcagatttgaatcttcagcctggaaattccaccaaagaatcagaatcaactaattctgttcgtctgatgttataatattaatattactgaatcattggttttgcctgcacctcacagaaatgttactgtgtcacttttccctcgggaggaaattgtttggtaatatagaaaggtgtatgcaagttgaatttgctgactccagcacagttaaaaggtcaatattcttttgacctgattaatcagtcagaaagtccctataggatagagctggcagctgagaaattttaaaggtaattgataattagtatttataactttttaaagggctctttgtatagcagaggatctcatttgactttgttttgatgagggtgatgccctctcttatgtggtacaataccattaaccaaaggtaggtgtccatgcagattttattggcagctgttttattgccattcaactagggaaatgaagaaatcacgcagccttttggttaaatggcagtcaaaattttcctcagtgtatttagtgtgttcagtgatgatatcactggttcccaactagatgcttgttggccacgggaagggaaatgacttgttctaattctaggttcacagaggtatgagaagcctgaactgaagaccattttcaagagggacggtatttatgaatcagggttaggctccatatttaaagatagagccagttttttttttaaatagaacccaaattgtgtaaaaatgttaattgggttttttaaacattgttttatcaagtcactgttaagtagaagaaagccatggtaaactgatacataacctaaattataaaagcagaaacctaactcactcgtcaagggaagttaccttttgaggaaagttaaagtacttttttccctatctgtatctatagcaacaacccagaacttacaaacttctccaaagattttattgattgttatatcaaatcagaatgtaaacatgaactcttgcatatatttaaaattgtgttggaacatttgaacatgaatgctgtttgtggtacttaagaaattaattcagttggattatcattatgtgatactggcagattgcagtgcaaccttatgccaataaaatgtaatttaacagccccagatattgttgaatattcaacaataacaagaaaagcttttcatctaagttttatgctttaattttttttctttttttttctttttcttttgtttccttggtactaattttaatttttatttggaagggagcagtataaagcttatttgtatttagtagtgtatctcatagatacagacaaggcaagagatgataagctgtttaaatagtgtttaatattgattgggggtggggagaaagaaaaagtgtattacttaaagatactatatacgttttgtatatcattaaatctttaaaagaaatgaaataaatttattgtttaccagatgtttagtgagtttaatcattctgaaaaattatctgacattttcagggtgtcaatttgagtatcagtttttttaaatgaaccatttgtatacctgtgcttttgatctcctgtcctgtacaatgtttaaattaatactgatttcttactgtcttcttagaaatctgttttttgttaggccaaaaaagggcaatatgggctgtctgttgatttttaattttatattgattattttcacaggattataatagtagctatacttttttttttttttttttttttgagacggagtctcgctcttgcactccagcctgggtgacagcagaactctgtctcaaaaaaaagatgtggaattcttttctgcaaatgttctctaatagtataccttcttcagtctgtcgatatatgtatgctattattttacaagtaatacatgttgattgtattggaaattatagaaaagattatattggattgtttagaaaatatttttaaatgtgaagaaaaatataaaaattactcccttgttccactttccccactctcaagtcagactatgttgttttcatagttagtagctagcagtctaccccactagattatatgcttcacagagggaagggaccctcaagacttcactggattgagtagcacccaataccttgcttgctgcctggtttgtgatgggcatactgtaagaaaaaaaaatctgaatgacaaaatgtttttccataataccagacttcctcttgaagagatgggtcgtaatgttgtagtcttacatgcttacgtagacaatcaaagcaagaatactcaataaatggctatttaccacttgaaa

SEQ ID NO: 322233 - DNA, 7679 bp, Homo sapiens
  misc_feature (1)..(3): n is a, c, g, or t
  misc_feature (10)..(10): n is a, c, g, or t
nnnccgtccncagccccgtcgccggcggaggcgggcgcgggcgcgtccctgtggccagtcacccggaggagttggtcgcacaattatgaaagactcggcttctgctgctagcgccggagctgagttagttctgagaaggtttccctgggcgttccttgtccggcggcctctgctgccgcctccggagacgcttcccgatagatggctacaggccgcggaggaggaggaggtggagttgctgcccttccggagtccgccccgtgaggagaatgtcccagaaatcctggatagaaagcactttgaccaagagggaatgtgtatatattataccaagttccaaggaccctcacagatgccttccaggatgtcaaatttgtcagcaactcgtcaggtgtttttgtggtcgcttggtcaagcaacatgcttgttttactgcaagtcttgccatgaaatactcagatgtgaaattgggtgaccattttaatcaggcaatagaagaatggtctgtggaaaagcatacagaacagagcccaacggatgcttatggagtcataaattttcaagggggttctcattcctacagagctaagtatgtgaggctatcatatgacaccaaacctgaagtcattctgcaacttctgcttaaagaatggcaaatggagttacccaaacttgttatctctgtacatgggggcatgcagaaatttgagcttcacccacgaatcaagcagttgcttggaaaaggtcttattaaagctgcagttacaactggagcctggattttaactggaggagtaaacacaggtgtggcaaaacatgttggagatgccctcaaagaacatgcttccagatcatctcgaaagatttgcactatcggaatagctccatggggagtgattgaaaacagaaatgatcttgttgggagagatgtggttgctccttatcaaaccttattgaaccccctgagcaaattgaatgttttgaataatctgcattcccatttcatattggtggatgatggcactgttggaaagtatggggcggaagtcagactgagaagagaacttgaaaaaactattaatcagcaaagaattcatgctaggattggccagggtgtccctgtggtggcacttatatttgagggtgggccaaatgttatcctcacagttcttgaataccttcaggaaagcccccctgttccagtagttgtgtgtgaaggaacaggcagagctgcagatctgctagcgtatattcataaacaaacagaagaaggagggaatcttcctgatgcagcagagcccgatattatttccactatcaaaaaaacatttaactttggccagaatgaagcacttcatttatttcaaacactgatggagtgcatgaaaagaaaggagcttatcactgttttccatattgggtcagatgaacatcaagatatagatgtagcaatacttactgcactgctaaaaggtactaatgcatctgcatttgaccagcttatccttacattggcatgggatagagttgacattgccaaaaatcatgtatttgtttatggacagcagtggctggttggatccttggaacaagctatgcttgatgctcttgtaatggatagagttgcatttgtaaaacttcttattgaaaatggagtaagcatgcataaattccttaccattccgagactggaagaactttacaacactaaacaaggtccaactaatccaatgctgtttcatcttgttcgagacgtcaaacagggaaatcttcctccaggatataagatcactctgattgatataggacttgttattgaatatctcatgggaggaacctacagatgcacctatactaggaaacgttttcgattaatatataatagtcttggtggaaataatcggaggtctggccgaaatacctccagcagcactcctcagttgcgaaagagtcatgaatcttttggcaatagggcagataaaaaggaaaaaatgaggcataaccatttcattaagacagcacagccctaccgaccaaagattgatacagttatggaagaaggaaagaagaaaagaaccaaagatgaaattgtagacattgatgatccagaaaccaagcgctttccttatccacttaatgaacttttaatttgggcttgccttatgaagaggcaggtcatggcccgttttttatggcaacatggtgaagaatcaatggctaaagcattagttgcctgtaagatctatcgttcaatggcatatgaagcaaagcagagtgacctggtagatgatacttcagaagaactaaaacagtattccaatgattttggtcagttggccgttgaattattagaacagtccttcagacaagatgaaaccatggctatgaaattgctcacttatgaactgaagaactggagtaattcaacctgccttaagttagcagtttcttcaagacttagaccttttgtagctcacacctgtacacaaatgttgttatctgatatgtggatgggaaggctgaatatgaggaaaaattcctggtacaaggtcatactaagcattttagttccacctgccatattgctgttagagtataaaactaaggctgaaatgtcccatatcccacaatctcaagatgctcatcagatgacaatggatgacagcgaaaacaactttcagaacataacagaagagatccccatggaagtgtttaaagaagtacggattttggatagtaatgaaggaaagaatgagatggagatacaaatgaaatcaaaaaagcttccaattacgcgaaagttttatgccttttatcatgcaccaattgtaaaattctggtttaacacgttggcatatttaggatttctgatgctttatacatttgtggttcttgtacaaatggaacagttaccttcagttcaagaatggattgttattgcttatatttttacttatgccattgagaaagtccgtgagatctttatgtctgaagctgggaaagtaaaccagaagattaaagtatggtttagtgattacttcaacatcagtgatacaattgccataatttctttcttcattggatttggactaagatttggagcaaaatggaactttgcaaatgcatatgataatcatgttttgtggctggaagattaatttactgtcttaacataatattttggtatgtgcgtttgctagattttctagctgtaaatcaacaggcaggaccttatgtaatgatgattggaaaaatggtggccaatatgttctacattgtagtgattatggctcttgtattacttagttttggtgttcccagaaaggcaatactttatcctcatgaagcaccatcttggactcttgctaaagatatagtttttcacccatactggatgatttttggtgaagtttatgcatacgaaattgatgtgtgtgcaaatgattctgttatccctcaaatctgtggtcctgggacgtggttgactccatttcttcaagcagtctacctctttgtacagtatatcattatggttaatcttcttattgcatttttcaacaatgtgtatttacaagtgaaggcaatttccaatattgtatggaagtaccagcgttatcattttattatggcttatcatgagaaaccagttctgcctcctccacttatcattcttagccatatagtttctctgttttgctgcatatgtaagagaagaaagaaagataagacttccgatggaccaaaacttttcttaacagaagaagatcaaaagaaacttcatgattttgaagagcagtgtgttgaaatgtatttcaatgaaaaagatgacaaatttcattctgggagtgaagagagaattcgtgtcacttttgaaagagtggaacagatgtgcattcagattaaagaagttggagatcgtgtcaactacataaaaagatcattacaatcattagattctcaaattggccatttgcaagatctttcagccctgacggtagatacattaaaaacactcactgcccagaaagcgtcggaagctagcaaagttcataatgaaatcacacgagaactgagcatttccaaacacttggctcaaaaccttattgatgatggtcctgtaagaccttctgtatggaaaaagcatggtgttgtaaatacacttagctcctctcttcctcaaggtgatcttgaaagtaataatccttttcattgtaatattttaatgaaagatgacaaagatccccagtgtaatatatttggccaagacttacctgcagtaccccagagaaaagaatttaattttccagaggctggttcctcttctggtgccttattcccaagtgctgtttcccctccagaactgcgacagagactacatggggtagaactcttaaaaatatttaataaaaatcaaaaattaggcagttcatctactagcataccacatctgtcatccccaccaaccaaattttttgttagtacaccacctcagccaagttgcaaaagccacttggaaactggaaccaaagatcaagaaactgtttgctctaaagctacagaaggagataatacagaatttggagcatttgtaggacacagagatagcatggatttacagaggtttaaagaaacatcaaacaagataaaaatactatccaataacaatacttctgaaaacactttgaaacgagcgagttctcttgctggatttactgactgtcacagaacttccattcctgttcattcagaacaagaaaaaatcagtagaaggccatctaccgaagacactcatgaagtagattccaaagcagctttaataccggattggttacaagatagaccatcaaacagagaaatgccatctgaagaaggaacattaaatggtctcacttctccatttaagccagctatggatacaaattactattattcagctgtggaaagaaataacttgatgaggttatcacagagcattccatttacacctgtgcctccaagaggggagcctgtcacagtgtatcgtttggaagagagttcacccaacatactaaataacagcatgtcttcttggtcacaactaggcctctgtgccaaaatagagtttttaagcaaagaggagatgggaggaggtttacgaagagctgtcaaagtacagtgtacctggtcagaacatgatatcctcaaatcagggcatctttatattatcaaatcttttcttccagaggtggttaatacatggtcaagtatttataaagaagatacagttctgcatctctgtctgagagaaattcaacaacagagagcagcacaaaagcttacgtttgcctttaatcaaatgaaacccaaatccataccatattctccaaggttccttgaagttttcctgctgtattgccattcagcaggacagtggtttgctgtggaagaatgtatgactggagaatttagaaaatacaacaataataatggagatgagattattccaactaatactctggaagagatcatgctagcctttagccactggacttacgaatatacaagaggggagttactggtacttgatttgcaaggtgttggtgaaaatttgactgacccatctgtgataaaagcagaagaaaagagatcctgtgatatggtttttggcccagcaaatctaggagaagatgcaattaaaaacttcagagcaaaacatcactgtaattcttgctgtagaaagcttaaacttccagatctgaagaggaatgattatacgcctgataaaattatatttcctcaggatgagccttcagatttgaatcttcagcctggaaattccaccaaagaatcagaatcaactaattctgttcgtctgatgttataatattaatattactgaatcattggttttgcctgcacctcacagaaatgttactgtgtcacttttccctcgggaggaaattgtttggtaatatagaaaggtgtatgcaagttgaatttgctgactccagcacagttaaaaggtcaatattcttttgacctgattaatcagtcagaaagtccctataggatagagctggcagctgagaaattttaaaggtaattgataattagtatttataactttttaaagggctctttgtatagcagaggatctcatttgactttgttttgatgagggtgatgccctctcttatgtggtacaataccattaaccaaaggtaggtgtccatgcagattttattggcagctgttttattgccattcaactagggaaatgaagaaatcacgcagccttttggttaaatggcagtcaaaattttcctcagtgtatttagtgtgttcagtgatgatatcactggttcccaactagatgcttgttggccacgggaagggaaatgacttgttctaattctaggttcacagaggtatgagaagcctgaactgaagaccattttcaagagggacggtatttatgaatcagggttaggctccatatttaaagatagagccagttttttttttaaatagaacccaaattgtgtaaaaatgttaattgggttttttaaacattgttttatcaagtcactgttaagtagaagaaagccatggtaaactgatacataacctaaattataaaagcagaaacctaactcactcgtcaagggaagttaccttttgaggaaagttaaagtacttttttccctatctgtatctatagcaacaacccagaacttacaaacttctccaaagattttattgattgttatatcaaatcagaatgtaaacatgaactcttgcatatatttaaaattgtgttggaacatttgaacatgaatgctgtttgtggtacttaagaaattaattcagttggattatcattatgtgatactggcagattgcagtgcaaccttatgccaataaaatgtaatttaacagccccagatattgttgaatattcaacaataacaagaaaagcttttcatctaagttttatgctttaattttttttctttttttttctttttcttttgtttccttggtactaattttaatttttatttggaagggagcagtataaagcttatttgtatttagtagtgtatctcatagatacagacaaggcaagagatgataagctgtttaaatagtgtttaatattgattgggggtggggagaaagaaaaagtgtattacttaaagatactatatacgttttgtatatcattaaatctttaaaagaaatgaaataaatttattgtttaccagatgtttagtgagtttaatcattctgaaaaattatctgacattttcagggtgtcaatttgagtatcagtttttttaaatgaaccatttgtatacctgtgcttttgatctcctgtcctgtacaatgtttaaattaatactgatttcttactgtcttcttagaaatctgttttttgttaggccaaaaaagggcaatatgggctgtctgttgatttttaattttatattgattattttcacaggattataatagtagctatacttttttttttttttttttttttgagacggagtctcgctctgttgcttgggctggagtgcagtggtgcgatctcagctcaccacaaccgccgccttccgggtttaagtgattctcctgcctcagcctcccgagtagctgggactacaggcacacgccaccatgcccagctaatt

SEQ ID NO: 322234 - DNA, 4817 bp, Homo sapiens
  misc_feature (1)..(3): n is a, c, g, or t
  misc_feature (10)..(10): n is a, c, g, or t
nnnccgtccncagccccgtcgccggcggaggcgggcgcgggcgcgtccctgtggccagtcacccggaggagttggtcgcacaattatgaaagactcggcttctgctgctagcgccggagctgagttagttctgagaaggtttccctgggcgttccttgtccggcggcctctgctgccgcctccggagacgcttcccgatagatggctacaggccgcggaggaggaggaggtggagttgctgcccttccggagtccgccccgtgaggagaatgtcccagaaatcctggatagaaagcactttgaccaagagggaatgtgtatatattataccaagttccaaggaccctcacagatgccttccaggatgtcaaatttgtcagcaactcgtcaggtgtttttgtggtcgcttggtcaagcaacatgcttgttttactgcaagtcttgccatgaaatactcagatgtgaaattgggtgaccattttaatcaggcaatagaagaatggtctgtggaaaagcatacagaacagagcccaacggatgcttatggagtcataaattttcaagggggttctcattcctacagagctaagtatgtgaggctatcatatgacaccaaacctgaagtcattctgcaacttctgcttaaagaatggcaaatggagttacccaaacttgttatctctgtacatgggggcatgcagaaatttgagcttcacccacgaatcaagcagttgcttggaaaaggtcttattaaagctgcagttacaactggagcctggattttaactggaggagtaaacacaggtgtggcaaaacatgttggagatgccctcaaagaacatgcttccagatcatctcgaaagatttgcactatcggaatagctccatggggagtgattgaaaacagaaatgatcttgttgggagagatgtggttgctccttatcaaaccttattgaaccccctgagcaaattgaatgttttgaataatctgcattcccatttcatattggtggatgatggcactgttggaaagtatggggcggaagtcagactgagaagagaacttgaaaaaactattaatcagcaaagaattcatgctaggattggccagggtgtccctgtggtggcacttatatttgagggtgggccaaatgttatcctcacagttcttgaataccttcaggaaagcccccctgttccagtagttgtgtgtgaaggaacaggcagagctgcagatctgctagcgtatattcataaacaaacagaagaaggagggaatcttcctgatgcagcagagcccgatattatttccactatcaaaaaaacatttaactttggccagaatgaagcacttcatttatttcaaacactgatggagtgcatgaaaagaaaggagcttatcactgttttccatattgggtcagatgaacatcaagatatagatgtagcaatacttactgcactgctaaaaggtactaatgcatctgcatttgaccagcttatccttacattggcatgggatagagttgacattgccaaaaatcatgtatttgtttatggacagcagtggctggttggatccttggaacaagctatgcttgatgctcttgtaatggatagagttgcatttgtaaaacttcttattgaaaatggagtaagcatgcataaattccttaccattccgagactggaagaactttacaacactaaacaaggtccaactaatccaatgctgtttcatcttgttcgagacgtcaaacagggaaatcttcctccaggatataagatcactctgattgatataggacttgttattgaatatctcatgggaggaacctacagatgcacctatactaggaaacgttttcgattaatatataatagtcttggtggaaataatcggaggtctggccgaaatacctccagcagcactcctcagttgcgaaagagtcatgaatcttttggcaatagggcagataaaaaggaaaaaatgaggcataaccatttcattaagacagcacagccctaccgaccaaagattgatacagttatggaagaaggaaagaagaaaagaaccaaagatgaaattgtagacattgatgatccagaaaccaagcgctttccttatccacttaatgaacttttaatttgggcttgccttatgaagaggcaggtcatggcccgttttttatggcaacatggtgaagaatcaatggctaaagcattagttgcctgtaagatctatcgttcaatggcatatgaagcaaagcagagtgacctggtagatgatacttcagaagaactaaaacagtattccaatgattttggtcagttggccgttgaattattagaacagtccttcagacaagatgaaaccatggctatgaaattgctcacttatgaactgaagaactggagtaattcaacctgccttaagttagcagtttcttcaagacttagaccttttgtagctcacacctgtacacaaatgttgttatctgatatgtggatgggaaggctgaatatgaggaaaaattcctggtacaaggtcatactaagcattttagttccacctgccatattgctgttagagtataaaactaaggctgaaatgtcccatatcccacaatctcaagatgctcatcagatgacaatggatgacagcgaaaacaactttcagaacataacagaagagatccccatggaagtgtttaaagaagtacggattttggatagtaatgaaggaaagaatgagatggagatacaaatgaaatcaaaaaagcttccaattacgcgaaagttttatgccttttatcatgcaccaattgtaaaattctggtttaacacgttggcatatttaggatttctgatgctttatacatttgtggttcttgtacaaatggaacagttaccttcagttcaagaatggattgttattgcttatatttttacttatgccattgagaaagtccgtgagatctttatgtctgaagctgggaaagtaaaccagaagattaaagtatggtttagtgattacttcaacatcagtgatacaattgccataatttctttcttcattggatttggactaagatttggagcaaaatggaactttgcaaatgcatatgataatcatgttttgtggctggaagattaatttactgtcttaacataatattttggtatgtgcgtttgctagattttctagctgtaaatcaacaggcaggaccttatgtaatgatgattggaaaaatggtggccaatatgttctacattgtagtgattatggctcttgtattacttagttttggtgttcccagaaaggcaatactttatcctcatgaagcaccatcttggactcttgctaaagatatagtttttcacccatactggatgatttttggtgaagtttatgcatacgaaattgatgtgtgtgcaaatgattctgttatccctcaaatctgtggtcctgggacgtggttgactccatttcttcaagcagtctacctctttgtacagtatatcattatggttaatcttcttattgcatttttcaacaatgtgtatttacaagtgaaggcaatttccaatattgtatggaagtaccagcgttatcattttattatggcttatcatgagaaaccagttctgcctcctccacttatcattcttagccatatagtttctctgttttgctgcatatgtaagagaagaaagaaagataagacttccgatggaccaaaacttttcttaacagaagaagatcaaaagaaacttcatgattttgaagagcagtgtgttgaaatgtatttcaatgaaaaagatgacaaatttcattctgggagtgaagagagaattcgtgtcacttttgaaagagtggaacagatgtgcattcagattaaagaagttggagatcgtgtcaactacataaaaagatcattacaatcattagattctcaaattggccatttgcaagatctttcagccctgacggtagatacattaaaaacactcactgcccagaaagcgtcggaagctagcaaagttcataatgaaatcacacgagaactgagcatttccaaacacttggctcaaaaccttattgatgatggtcctgtaagaccttctgtatggaaaaagcatggtgttgtaaatacacttagctcctctcttcctcaaggtgatcttgaaagtaataatccttttcattgtaatattttaatgaaagatgacaaagatccccagtgtaatatatttggccaagacttacctgcagtaccccagagaaaagaatttaattttccagaggctggttcctcttctggtgccttattcccaagtgctgtttcccctccagaactgcgacagagactacatggggtagaactcttaaaaatatttaataaaaatcaaaaattaggcagttcatctactagcataccacatctgtcatccccaccaaccaaattttttgttagtacaccacctcagccaagttgcaaaagccacttggaaactggaaccaaagatcaagaaactgtttgctctaaagctacagaaggagataatacagaatttggagcatttgtaggacacagagatagcatggatttacagaggtttaaagaaacatcaaacaagataaaaatactatccaataacaatacttctgaaaacactttgaaacgagcgagttctcttgctggatttactgactgtcacagaacttccattcctgttcattcagaacaagcagaaaaaaaaagtcgacgcggccgcgaatttagtagtagtagtagtagtagtaggcggccgc

SEQ ID NO: 322235 - DNA, 4336 bp, Homo sapiens
ggaaattgattccctaaatctgtctgtgtctctgtacttcttgaaaatcttcacgtaccacagagataggtacacttcagtttgaaccagtgatacaattcattatgtagataaagatgcccatgacttgcttagcttaatagatttttttttacgtaatctcctagatgttaagatttatatagtgatgaaattcttctgaaagctatcactaggaacaaaaagaatctcaaagattttttgtgtttaatggatttttttggtctattagaacattagaagcttttagaaagatttgtcatagtgtttaaacttccttgtattttaacagtgttcattttttaacaggtggccaatatgttctacattgtagtgattatggctcttgtattacttagttttggtgttcccagaaaggcaatactttatcctcatgaagcaccatcttggactcttgctaaagatatagtttttcacccatactggatgatttttggtgaagtttatgcatacgaaattgatgtgtgtgcaaatgattctgttatccctcaaatctgtggtcctgggacgtggttgactccatttcttcaagcagtctacctctttgtacagtatatcattatggttaatcttcttattgcatttttcaacaatgtgtatttacaagtgaaggcaatttccaatattgtatggaagtaccagcgttatcattttattatggcttatcatgagaaaccagttctgcctcctccacttatcattcttagccatatagtttctctgttttgctgcatatgtaagagaagaaagaaagataagacttccgatggaccaaaacttttcttaacagaagaagatcaaaagaaacttcatgattttgaagagcagtgtgttgaaatgtatttcaatgaaaaagatgacaaatttcattctgggagtgaagagagaattcgtgtcacttttgaaagagtggaacagatgtgcattcagattaaagaagttggagatcgtgtcaactacataaaaagatcattacaatcattagattctcaaattggccatttgcaagatctttcagccctgacggtagatacattaaaaacactcactgcccagaaagcgtcggaagctagcaaagttcataatgaaatcacacgagaactgagcatttccaaacacttggctcaaaaccttattgatgatggtcctgtaagaccttctgtatggaaaaagcatggtgttgtaaatacacttagctcctctcttcctcaaggtgatcttgaaagtaataatccttttcattgtaatattttaatgaaagatgacaaagatccccagtgtaatatatttggccaagacttacctgcagtaccccagagaaaagaatttaattttccagaggctggttcctcttctggtgccttattcccaagtgctgtttcccctccagaactgcgacagagactacatggggtagaactcttaaaaatatttaataaaaatcaaaaattaggcagttcatctactagcataccacatctgtcatccccaccaaccaaattttttgttagtacaccacctcagccaagttgcaaaagccacttggaaactggaaccaaagatcaagaaactgtttgctctaaagctacagaaggagataatacagaatttggagcatttgtaggacacagagatagcatggatttacagaggtttaaagaaacatcaaacaagataaaaatactatccaataacaatacttctgaaaacactttgaaacgagcgagttctcttgctggatttactgactgtcacagaacttccattcctgttcattcagaacaagaaaaaatcagtagaaggccatctaccgaagacactcatgaagtagattccaaagcagctttaataccggattggttacaagatagaccatcaaacagagaaatgccatctgaagaaggaacattaaatggtctcacttctccatttaagccagctatggatacaaattactattattcagctgtggaaagaaataacttgatgaggttatcacagagcattccatttacacctgtgcctccaagaggggagcctgtcacagtgtatcgtttggaagagagttcacccaacatactaaataacagcatgtcttcttggtcacaactaggcctctgtgccaaaatagagtttttaagcaaagaggagatgggaggaggtttacgaagagctgtcaaagtacagtgtacctggtcagaacatgatatcctcaaatcagggcatctttatattatcaaatcttttcttccagaggtggttaatacatggtcaagtatttataaagaagatacagttctgcatctctgtctgagagaaattcaacaacagagagcagcacaaaagcttacgtttgcctttaatcaaatgaaacccaaatccataccatattctccaaggttccttgaagttttcctgctgtattgccattcagcaggacagtggtttgctgtggaagaatgtatgactggagaatttagaaaatacaacaataataatggagatgagattattccaactaatactctggaagagatcatgctagcctttagccactggacttacgaatatacaagaggggagttactggtacttgatttgcaaggtgttggtgaaaatttgactgacccatctgtgataaaagcagaagaaaagagatcctgtgatatggtttttggcccagcaaatctaggagaagatgcaattaaaaacttcagagcaaaacatcactgtaattcttgctgtagaaagcttaaacttccagatctgaagaggaatgattatacgcctgataaaattatatttcctcaggatgagccttcagatttgaatcttcagcctggaaattccaccaaagaatcagaatcaactaattctgttcgtctgatgttataatattaatattactgaatcattggttttgcctgcacctcacagaaatgttactgtgtcacttttccctcgggaggaaattgtttggtaatatagaaaggtgtatgcaagttgaatttgctgactccagcacagttaaaaggtcaatattcttttgacctgattaatcagtcagaaagtccctataggatagagctggcagctgagaaattttaaaggtaattgataattagtatttataactttttaaagggctctttgtatagcagaggatctcatttgactttgttttgatgagggtgatgccctctcttatgtggtacaataccattaaccaaaggtaggtgtccatgcagattttattggcagctgttttattgccattcaactagggaaatgaagaaatcacgcagccttttggttaaatggcagtcaaaattttcctcagtgtatttagtgtgttcagtgatgatatcactggttcccaactagatgcttgttggccacgggaagggaaatgacttgttctaattctaggttcacagaggtatgagaagcctgaactgaagaccattttcaagagggacggtatttatgaatcagggttaggctccatatttaaagatagagccagttttttttttaaatagaacccaaattgtgtaaaaatgttaattgggttttttaaacattgttttatcaagtcactgttaagtagaagaaagccatggtaaactgatacataacctaaattataaaagcagaaacctaactcactcgtcaagggaagttaccttttgaggaaagttaaagtacttttttccctatctgtatctatagcaacaacccagaacttacaaacttctccaaagattttattgattgttatatcaaatcagaatgtaaacatgaactcttgcatatatttaaaattgtgttggaacatttgaacatgaatgctgtttgtggtacttaagaaattaattcagttggattatcattatgtgatactggcagattgcagtgcaaccttatgccaataaaatgtaatttaacagccccagatattgttgaatattcaacaataacaagaaaagcttttcatctaagttttatgctttaattttttttctttttttttctttttcttttgtttccttggtactaattttaatttttatttggaagggagcagtataaagcttatttgtatttagtagtgtatctcatagatacagacaaggcaagagatgataagctgtttaaatagtgtttaatattgattgggggtggggagaaagaaaaagtgtattacttaaagatactatatacgttttgtatatcattaaatctttaaaagaaatgaaataaatttattgtttac

SEQ ID NO: 322236 - DNA, 7190 bp, Homo sapiens
  misc_feature (1)..(3): n is a, c, g, or t
  misc_feature (10)..(10): n is a, c, g, or t
nnnccgtccncagccccgtcgccggcggaggcgggcgcgggcgcgtccctgtggccagtcacccggaggagttggtcgcacaattatgaaagactcggcttctgctgctagcgccggagctgagttagttctgagaaggtttccctgggcgttccttgtccggcggcctctgctgccgcctccggagacgcttcccgatagatggctacaggccgcggaggaggaggaggtggagttgctgcccttccggagtccgccccgtgaggagaatgtcccagaaatcctggatagaaagcactttgaccaagagggaatgtgtatatattataccaagttccaaggaccctcacagatgccttccaggatgtcaaatttgtcagcaactcgtcaggtgtttttgtggtcgcttggtcaagcaacatgcttgttttactgcaagtcttgccatgaaatactcagatgtgaaattgggtgaccattttaatcaggcaatagaagaatggtctgtggaaaagcatacagaacagagcccaacggatgcttatggagtcataaattttcaagggggttctcattcctacagagctaagtatgtgaggctatcatatgacaccaaacctgaagtcattctgcaacttctgcttaaagaatggcaaatggagttacccaaacttgttatctctgtacatgggggcatgcagaaatttgagcttcacccacgaatcaagcagttgcttggaaaaggtcttattaaagctgcagttacaactggagcctggattttaactggaggagtaaacacaggtgtggcaaaacatgttggagatgccctcaaagaacatgcttccagatcatctcgaaagatttgcactatcggaatagctccatggggagtgattgaaaacagaaatgatcttgttgggagagatgtggttgctccttatcaaaccttattgaaccccctgagcaaattgaatgttttgaataatctgcattcccatttcatattggtggatgatggcactgttggaaagtatggggcggaagtcagactgagaagagaacttgaaaaaactattaatcagcaaagaattcatgctaggattggccagggtgtccctgtggtggcacttatatttgagggtgggccaaatgttatcctcacagttcttgaataccttcaggaaagcccccctgttccagtagttgtgtgtgaaggaacaggcagagctgcagatctgctagcgtatattcataaacaaacagaagaaggagggaatcttcctgatgcagcagagcccgatattatttccactatcaaaaaaacatttaactttggccagaatgaagcacttcatttatttcaaacactgatggagtgcatgaaaagaaaggagcttatcactgttttccatattgggtcagatgaacatcaagatatagatgtagcaatacttactgcactgctaaaaggtactaatgcatctgcatttgaccagcttatccttacattggcatgggatagagttgacattgccaaaaatcatgtatttgtttatggacagcagtggctggttggatccttggaacaagctatgcttgatgctcttgtaatggatagagttgcatttgtaaaacttcttattgaaaatggagtaagcatgcataaattccttaccattccgagactggaagaactttacaacactaaacaaggtccaactaatccaatgctgtttcatcttgttcgagacgtcaaacagggaaatcttcctccaggatataagatcactctgattgatataggacttgttattgaatatctcatgggaggaacctacagatgcacctatactaggaaacgttttcgattaatatataatagtcttggtggaaataatcggaggtctggccgaaatacctccagcagcactcctcagttgcgaaagagtcatgaatcttttggcaatagggcagataaaaaggaaaaaatgaggcataaccatttcattaagacagcacagccctaccgaccaaagattgatacagttatggaagaaggaaagaagaaaagaaccaaagatgaaattgtagacattgatgatccagaaaccaagcgctttccttatccacttaatgaacttttaatttgggcttgccttatgaagaggcaggtcatggcccgttttttatggcaacatggtgaagaatcaatggctaaagcattagttgcctgtaagatctatcgttcaatggcatatgaagcaaagcagagtgacctggtagatgatacttcagaagaactaaaacagtattccaatgattttggtcagttggccgttgaattattagaacagtccttcagacaagatgaaaccatggctatgaaattgctcacttatgaactgaagaactggagtaattcaacctgccttaagttagcagtttcttcaagacttagaccttttgtagctcacacctgtacacaaatgttgttatctgatatgtggatgggaaggctgaatatgaggaaaaattcctggtacaaggtcatactaagcattttagttccacctgccatattgctgttagagtataaaactaaggctgaaatgtcccatatcccacaatctcaagatgctcatcagatgacaatggatgacagcgaaaacaactttcagaacataacagaagagatccccatggaagtgtttaaagaagtacggattttggatagtaatgaaggaaagaatgagatggagatacaaatgaaatcaaaaaagcttccaattacgcgaaagttttatgccttttatcatgcaccaattgtaaaattctggtttaacacgttggcatatttaggatttctgatgctttatacatttgtggttcttgtacaaatggaacagttaccttcagttcaagaatggattgttattgcttatatttttacttatgccattgagaaagtccgtgagatctttatgtctgaagctgggaaagtaaaccagaagattaaagtatggtttagtgattacttcaacatcagtgatacaattgccataatttctttcttcattggatttggactaagatttggagcaaaatggaactttgcaaatgcatatgataatcatgttttgtggctggaagattaatttactgtcttaacataatattttggtatgtgcgtttgctagattttctagctgtaaatcaacaggcaggaccttatgtaatgatgattggaaaaatggtggccaatatgttctacattgtagtgattatggctcttgtattacttagttttggtgttcccagaaaggcaatactttatcctcatgaagcaccatcttggactcttgctaaagatatagtttttcacccatactggatgatttttggtgaagtttatgcatacgaaattgatgtgtgtgcaaatgattctgttatccctcaaatctgtggtcctgggacgtggttgactccatttcttcaagcagtctacctctttgtacagtatatcattatggttaatcttcttattgcatttttcaacaatgtgtatttacaagtgaaggcaatttccaatattgtatggaagtaccagcgttatcattttattatggcttatcatgagaaaccagttctgcctcctccacttatcattcttagccatatagtttctctgttttgctgcatatgtaagagaagaaagaaagataagacttccgatggaccaaaacttttcttaacagaagaagatcaaaagaaacttcatgattttgaagagcagtgtgttgaaatgtatttcaatgaaaaagatgacaaatttcattctgggagtgaagagagaattcgtgtcacttttgaaagagtggaacagatgtgcattcagattaaagaagttggagatcgtgtcaactacataaaaagatcattacaatcattagattctcaaattggccatttgcaagatctttcagccctgacggtagatacattaaaaacactcactgcccagaaagcgtcggaagctagcaaagttcataatgaaatcacacgagaactgagcatttccaaacacttggctcaaaaccttattgatgatggtcctgtaagaccttctgtatggaaaaagcatggtgttgtaaatacacttagctcctctcttcctcaaggtgatcttgaaagtaataatccttttcattgtaatattttaatgaaagatgacaaagatccccagtgtaatatatttggccaagacttacctgcagtaccccagagaaaagaatttaattttccagaggctggttcctcttctggtgccttattcccaagtgctgtttcccctccagaactgcgacagagactacatggggtagaactcttaaaaatatttaataaaaatcaattttttgttagtacaccacctcagccaagttgcaaaagccacttggaaactggaaccaaagatcaagaaactgtttgctctaaagctacagaaggagataatacagaatttggagcatttgtaggacacagagatagcatggatttacagaggtttaaagaaacatcaaacaagataaaaatactatccaataacaatacttctgaaaacactttgaaacgagcgagttctcttgctggatttactgactgtcacagaacttccattcctgttcattcagaacaagaaaaaatcagtagaaggccatctaccgaagacactcatgaagtagattccaaagcagctttaataccggattggttacaagatagaccatcaaacagagaaatgccatctgaagaaggaacattaaatggtctcacttctccatttaagccagctatggatacaaattactattattcagctgtggaaagaaataacttgatgaggttatcacagagcattccatttacacctgtgcctccaagaggggagcctgtcacagtgtatcgtttggaagagagttcacccaacatactaaataacagcatgtcttcttggtcacaactaggcctctgtgccaaaatagagtttttaagcaaagaggagatgggaggaggtttacgaagagctgtcaaagtacagtgtacctggtcagaacatgatatcctcaaatcagggcatctttatattatcaaatcttttcttccagaggtggttaatacatggtcaagtatttataaagaagatacagttctgcatctctgtctgagagaaattcaacaacagagagcagcacaaaagcttacgtttgcctttaatcaaatgaaacccaaatccataccatattctccaaggttccttgaagttttcctgctgtattgccattcagcaggacagtggtttgctgtggaagaatgtatgactggagaatttagaaaatacaacaataataatggagatgagattattccaactaatactctggaagagatcatgctagcctttagccactggacttacgaatatacaagaggggagttactggtacttgatttgcaaggtgttggtgaaaatttgactgacccatctgtgataaaagcagaagaaaagagatcctgtgatatggtttttggcccagcaaatctaggagaagatgcaattaaaaacttcagagcaaaacatcactgtaattcttgctgtagaaagcttaaacttccagatctgaagaggaatgattatacgcctgataaaattatatttcctcaggatgagccttcagatttgaatcttcagcctggaaattccaccaaagaatcagaatcaactaattctgttcgtctgatgttataatattaatattactgaatcattggttttgcctgcacctcacagaaatgttactgtgtcacttttccctcgggaggaaattgtttggtaatatagaaaggtgtatgcaagttgaatttgctgactccagcacagttaaaaggtcaatattcttttgacctgattaatcagtcagaaagtccctataggatagagctggcagctgagaaattttaaaggtaattgataattagtatttataactttttaaagggctctttgtatagcagaggatctcatttgactttgttttgatgagggtgatgccctctcttatgtggtacaataccattaaccaaaggtaggtgtccatgcagattttattggcagctgttttattgccattcaactagggaaatgaagaaatcacgcagccttttggttaaatggcagtcaaaattttcctcagtgtatttagtgtgttcagtgatgatatcactggttcccaactagatgcttgttggccacgggaagggaaatgacttgttctaattctaggttcacagaggtatgagaagcctgaactgaagaccattttcaagagggacggtatttatgaatcagggttaggctccatatttaaagatagagccagttttttttttaaatagaacccaaattgtgtaaaaatgttaattgggttttttaaacattgttttatcaagtcactgttaagtagaagaaagccatggtaaactgatacataacctaaattataaaagcagaaacctaactcactcgtcaagggaagttaccttttgaggaaagttaaagtacttttttccctatctgtatctatagcaacaacccagaacttacaaacttctccaaagattttattgattgttatatcaaatcagaatgtaaacatgaactcttgcatatatttaaaattgtgttggaacatttgaacatgaatgctgtttgtggtacttaagaaattaattcagttggattatcattatgtgatactggcagattgcagtgcaaccttatgccaataaaatgtaatttaacagccccagatattgttgaatattcaacaataacaagaaaagcttttcatctaagttttatgctttaattttttttctttttttttctttttcttttgtttccttggtactaattttaatttttatttggaagggagcagtataaagcttatttgtatttagtagtgtatctcatagatacagacaaggcaagagatgataagctgtttaaatagtgtttaatattgattgggggtggggagaaagaaaaagtgtattacttaaagatactatatacgttttgtatatcattaaatctttaaaagaaatgaaataaatttattgtttac

SEQ ID NO: 322237 - DNA, 4887 bp, Homo sapiens
  misc_feature (1)..(3): n is a, c, g, or t
  misc_feature (10)..(10): n is a, c, g, or t
nnnccgtccncagccccgtcgccggcggaggcgggcgcgggcgcgtccctgtggccagtcacccggaggagttggtcgcacaattatgaaagactcggcttctgctgctagcgccggagctgagttagttctgagaaggtttccctgggcgttccttgtccggcggcctctgctgccgcctccggagacgcttcccgatagatggctacaggccgcggaggaggaggaggtggagttgctgcccttccggagtccgccccgtgaggagaatgtcccagaaatcctggatagaaagcactttgaccaagagggaatgtgtatatattataccaagttccaaggaccctcacagatgccttccaggatgtcaaatttgtcagcaactcgtcaggtgtttttgtggtcgcttggtcaagcaacatgcttgttttactgcaagtcttgccatgaaatactcagatgtgaaattgggtgaccattttaatcaggcaatagaagaatggtctgtggaaaagcatacagaacagagcccaacggatgcttatggagtcataaattttcaagggggttctcattcctacagagctaagtatgtgaggctatcatatgacaccaaacctgaagtcattctgcaacttctgcttaaagaatggcaaatggagttacccaaacttgttatctctgtacatgggggcatgcagaaatttgagcttcacccacgaatcaagcagttgcttggaaaaggtcttattaaagctgcagttacaactggagcctggattttaactggaggagtaaacacaggtgtggcaaaacatgttggagatgccctcaaagaacatgcttccagatcatctcgaaagatttgcactatcggaatagctccatggggagtgattgaaaacagaaatgatcttgttgggagagatgtggttgctccttatcaaaccttattgaaccccctgagcaaattgaatgttttgaataatctgcattcccatttcatattggtggatgatggcactgttggaaagtatggggcggaagtcagactgagaagagaacttgaaaaaactattaatcagcaaagaattcatgctaggattggccagggtgtccctgtggtggcacttatatttgagggtgggccaaatgttatcctcacagttcttgaataccttcaggaaagcccccctgttccagtagttgtgtgtgaaggaacaggcagagctgcagatctgctagcgtatattcataaacaaacagaagaaggagggaatcttcctgatgcagcagagcccgatattatttccactatcaaaaaaacatttaactttggccagaatgaagcacttcatttatttcaaacactgatggagtgcatgaaaagaaaggagcttatcactgttttccatattgggtcagatgaacatcaagatatagatgtagcaatacttactgcactgctaaaaggtactaatgcatctgcatttgaccagcttatccttacattggcatgggatagagttgacattgccaaaaatcatgtatttgtttatggacagcagtggctggttggatccttggaacaagctatgcttgatgctcttgtaatggatagagttgcatttgtaaaacttcttattgaaaatggagtaagcatgcataaattccttaccattccgagactggaagaactttacaacactaaacaaggtccaactaatccaatgctgtttcatcttgttcgagacgtcaaacagggaaatcttcctccaggatataagatcactctgattgatataggacttgttattgaatatctcatgggaggaacctacagatgcacctatactaggaaacgttttcgattaatatataatagtcttggtggaaataatcggaggtctggccgaaatacctccagcagcactcctcagttgcgaaagagtcatgaatcttttggcaatagggcagataaaaaggaaaaaatgaggcataaccatttcattaagacagcacagccctaccgaccaaagattgatacagttatggaagaaggaaagaagaaaagaaccaaagatgaaattgtagacattgatgatccagaaaccaagcgctttccttatccacttaatgaacttttaatttgggcttgccttatgaagaggcaggtcatggcccgttttttatggcaacatggtgaagaatcaatggctaaagcattagttgcctgtaagatctatcgttcaatggcatatgaagcaaagcagagtgacctggtagatgatacttcagaagaactaaaacagtattccaatgattttggtcagttggccgttgaattattagaacagtccttcagacaagatgaaaccatggctatgaaattgctcacttatgaactgaagaactggagtaattcaacctgccttaagttagcagtttcttcaagacttagaccttttgtagctcacacctgtacacaaatgttgttatctgatatgtggatgggaaggctgaatatgaggaaaaattcctggtacaaggtcatactaagcattttagttccacctgccatattgctgttagagtataaaactaaggctgaaatgtcccatatcccacaatctcaagatgctcatcagatgacaatggatgacagcgaaaacaactttcagaacataacagaagagatccccatggaagtgtttaaagaagtacggattttggatagtaatgaaggaaagaatgagatggagatacaaatgaaatcaaaaaagcttccaattacgcgaaagttttatgccttttatcatgcaccaattgtaaaattctggtttaacacgttggcatatttaggatttctgatgctttatacatttgtggttcttgtacaaatggaacagttaccttcagttcaagaatggattgttattgcttatatttttacttatgccattgagaaagtccgtgagatctttatgtctgaagctgggaaagtaaaccagaagattaaagtatggtttagtgattacttcaacatcagtgatacaattgccataatttctttcttcattggatttggactaagatttggagcaaaatggaactttgcaaatgcatatgataatcatgttttgtggctggaagattaatttactgtcttaacataatattttggtatgtgcgtttgctagattttctagctgtaaatcaacaggcaggaccttatgtaatgatgattggaaaaatggtggccaatatgttctacattgtagtgattatggctcttgtattacttagttttggtgttcccagaaaggcaatactttatcctcatgaagcaccatcttggactcttgctaaagatatagtttttcacccatactggatgatttttggtgaagtttatgcatacgaaattgatgtgtgtgcaaatgattctgttatccctcaaatctgtggtcctgggacgtggttgactccatttcttcaagcagtctacctctttgtacagtatatcattatggttaatcttcttattgcatttttcaacaatgtgtatttacaagtgaaggcaatttccaatattgtatggaagtaccagcgttatcattttattatggcttatcatgagaaaccagttctgcctcctccacttatcattcttagccatatagtttctctgttttgctgcatatgtaagagaagaaagaaagataagacttccgatggaccaaaacttttcttaacagaagaagatcaaaagaaacttcatgattttgaagagcagtgtgttgaaatgtatttcaatgaaaaagatgacaaatttcattctgggagtgaagagagaattcgtgtcacttttgaaagagtggaacagatgtgcattcagattaaagaagttggagatcgtgtcaactacataaaaagatcattacaatcattagattctcaaattggccatttgcaagatctttcagccctgacggtagatacattaaaaacactcactgcccagaaagcgtcggaagctagcaaagttcataatgaaatcacacgagaactgagcatttccaaacacttggctcaaaaccttattgatgatggtcctgtaagaccttctgtatggaaaaagcatggtgttgtaaatacacttagctcctctcttcctcaaggtgatcttgaaagtaataatccttttcattgtaatattttaatgaaagatgacaaagatccccagtgtaatatatttggccaagacttacctgcagtaccccagagaaaagaatttaattttccagaggctggttcctcttctggtgccttattcccaagtgctgtttcccctccagaactgcgacagagactacatggggtagaactcttaaaaatatttaataaaaatcaaaaattaggcagttcatctactagcataccacatctgtcatccccaccaaccaaattttttgttagtacaccacctcagccaagttgcaaaagccacttggaaactggaaccaaagatcaagaaactgtttgctctaaagctacagaaggagataatacagaatttggagcatttgtaggacacagagatagcatggatttacagaggtttaaagaaacatcaaacaagataaaaatactatccaataacaatacttctgaaaacactttgaaacgagcgagttctcttgctggatttactgactgtcacagaacttccattcctgttcattcagaacaagaaaaaatcagtagaaggccatctaccgaagacactcatgaagtagattccaaagcagctttaataccggtttgtagatttcaactaaacagatatatattattaaatacattaaacttttttagataagatct

SEQ ID NO: 322238 - DNA, 3540 bp, Homo sapiens
  misc_feature (1)..(3): n is a, c, g, or t
  misc_feature (10)..(10): n is a, c, g, or t
nnnccgtccncagccccgtcgccggcggaggcgggcgcgggcgcgtccctgtggccagtcacccggaggagttggtcgcacaattatgaaagactcggcttctgctgctagcgccggagctgagttagttctgagaaggtttccctgggcgttccttgtccggcggcctctgctgccgcctccggagacgcttcccgatagatggctacaggccgcggaggaggaggaggtggagttgctgcccttccggagtccgccccgtgaggagaatgtcccagaaatcctggatagaaagcactttgaccaagagggaatgtgtatatattataccaagttccaaggaccctcacagatgccttccaggatgtcaaatttgtcagcaactcgtcaggtgtttttgtggtcgcttggtcaagcaacatgcttgttttactgcaagtcttgccatgaaatactcagatgtgaaattgggtgaccattttaatcaggcaatagaagaatggtctgtggaaaagcatacagaacagagcccaacggatgcttatggagtcataaattttcaagggggttctcattcctacagagctaagtatgtgaggctatcatatgacaccaaacctgaagtcattctgcaacttctgcttaaagaatggcaaatggagttacccaaacttgttatctctgtacatgggggcatgcagaaatttgagcttcacccacgaatcaagcagttgcttggaaaaggtcttattaaagctgcagttacaactggagcctggattttaactggaggagtaaacacaggtgtggcaaaacatgttggagatgccctcaaagaacatgcttccagatcatctcgaaagatttgcactatcggaatagctccatggggagtgattgaaaacagaaatgatcttgttgggagagatgtggttgctccttatcaaaccttattgaaccccctgagcaaattgaatgttttgaataatctgcattcccatttcatattggtggatgatggcactgttggaaagtatggggcggaagtcagactgagaagagaacttgaaaaaactattaatcagcaaagaattcatgctaggattggccagggtgtccctgtggtggcacttatatttgagggtgggccaaatgttatcctcacagttcttgaataccttcaggaaagcccccctgttccagtagttgtgtgtgaaggaacaggcagagctgcagatctgctagcgtatattcataaacaaacagaagaaggagggaatcttcctgatgcagcagagcccgatattatttccactatcaaaaaaacatttaactttggccagaatgaagcacttcatttatttcaaacactgatggagtgcatgaaaagaaaggagcttatcactgttttccatattgggtcagatgaacatcaagatatagatgtagcaatacttactgcactgctaaaaggtactaatgcatctgcatttgaccagcttatccttacattggcatgggatagagttgacattgccaaaaatcatgtatttgtttatggacagcagtggctggttggatccttggaacaagctatgcttgatgctcttgtaatggatagagttgcatttgtaaaacttcttattgaaaatggagtaagcatgcataaattccttaccattccgagactggaagaactttacaacactaaacaaggtccaactaatccaatgctgtttcatcttgttcgagacgtcaaacagggaaatcttcctccaggatataagatcactctgattgatataggacttgttattgaatatctcatgggaggaacctacagatgcacctatactaggaaacgttttcgattaatatataatagtcttggtggaaataatcggaggtctggccgaaatacctccagcagcactcctcagttgcgaaagagtcatgaatcttttggcaatagggcagataaaaaggaaaaaatgaggcataaccatttcattaagacagcacagccctaccgaccaaagattgatacagttatggaagaaggaaagaagaaaagaaccaaagatgaaattgtagacattgatgatccagaaaccaagcgctttccttatccacttaatgaacttttaatttgggcttgccttatgaagaggcaggtcatggcccgttttttatggcaacatggtgaagaatcaatggctaaagcattagttgcctgtaagatctatcgttcaatggcatatgaagcaaagcagagtgacctggtagatgatacttcagaagaactaaaacagtattccaatgattttggtcagttggccgttgaattattagaacagtccttcagacaagatgaaaccatggctatgaaattgctcacttatgaactgaagaactggagtaattcaacctgccttaagttagcagtttcttcaagacttagaccttttgtagctcacacctgtacacaaatgttgttatctgatatgtggatgggaaggctgaatatgaggaaaaattcctggtacaaggtcatactaagcattttagttccacctgccatattgctgttagagtataaaactaaggctgaaatgtcccatatcccacaatctcaagatgctcatcagatgacaatggatgacagcgaaaacaactttcagaacataacagaagagatccccatggaagtgtttaaagaagtacggattttggatagtaatgaaggaaagaatgagatggagatacaaatgaaatcaaaaaagcttccaattacgcgaaagttttatgccttttatcatgcaccaattgtaaaattctggtttaacacgttggcatatttaggatttctgatgctttatacatttgtggttcttgtacaaatggaacagttaccttcagttcaagaatggattgttattgcttatatttttacttatgccattgagaaagtccgtgagatctttatgtctgaagctgggaaagtaaaccagaagattaaagtatggtttagtgattacttcaacatcagtgatacaattgccataatttctttcttcattggatttggactaagatttggagcaaaatggaactttgcaaatgcatatgataatcatgttttgtggctggaagattaatttactgtcttaacataatattttggtatgtgcgtttgctagattttctagctgtaaatcaacaggcaggaccttatgtaatgatgattggaaaaatggtaagttgacagatgtttgataatactcgtgggtttattgattttttaaaaaatcacaaaaatgttattaacatagttttatttgagccagtgaatgtcttttattttgtgtttgtttgcctcatacttcacatctgccattccttaagagtttctcatgctcaatcccaatcccctatacccatttagtgctttgcaagataatgttagctataccatctatggtttatgtctgtaggtaactcctttttcctgtcttcactgatccaggctttttttttttt

SEQ ID NO: 322239 - DNA, 1080 bp, Homo sapiens
  misc_feature (1)..(3): n is a, c, g, or t
  misc_feature (10)..(10): n is a, c, g, or t
nnnccgtccncagccccgtcgccggcggaggcgggcgcgggcgcgtccctgtggccagtcacccggaggagttggtcgcacaattatgaaagactcggcttctgctgctagcgccggagctgagttagttctgagaaggtttccctgggcgttccttgtccggcggcctctgctgccgcctccggagacgcttcccgatagatggctacaggccgcggaggaggaggaggtggagttgctgcccttccggagtccgccccgtgaggagaatgtcccagaaatcctggatagaaagcactttgaccaagagggaatgtgtatatattataccaagttccaaggaccctcacagatgccttccaggatgtcaaatttgtcagcaactcgtcaggtgtttttgtggtcgcttggtcaagcaacatgcttgttttactgcaagtcttgccatgaaatactcagatgtgaaattgggtgaccattttaatcaggcaatagaagaatggtctgtggaaaagcatacagaacagagcccaacggatgcttatggagtcataaattttcaagggggttctcattcctacagagctaagtatgtgaggctatcatatgacaccaaacctgaagtcattctgcaacttctgcttaaagaatggcaaatggagttacccaaacttgttatctctgtacatgggggcatgcagaaatttgagcttcacccacgaatcaagcagttgcttggaaaaggtcttattaaagctgcagttacaactggagcctggattttaactggaggagtaaacacaggtgtggcaaaacatgttggagatgccctcaaagaacatgcttccagatcatctcgaaagatttgcactatcggaatagctccatggggagtgattgaaaacagaaatgatcttgttgggagagatgtggttgctccttatcaaaccttattgaaccccctgagcaaattgaatgttttgaataatctgcattcccatttcatattggtggatgatggcactgttggaaagtatggggcggaagtcagactgaggtggtgtggactcaggtggtgtg

SEQ ID NO: 322240 - DNA, 7244 bp, Homo sapiens
  misc_feature (1)..(3): n is a, c, g, or t
  misc_feature (10)..(10): n is a, c, g, or t
nnnccgtccncagccccgtcgccggcggaggcgggcgcgggcgcgtccctgtggccagtcacccggaggagttggtcgcacaattatgaaagactcggcttctgctgctagcgccggagctgagttagttctgagaaggtttccctgggcgttccttgtccggcggcctctgctgccgcctccggagacgcttcccgatagatggctacaggccgcggaggaggaggaggtggagttgctgcccttccggagtccgccccgtgaggagaatgtcccagaaatcctggatagaaagcactttgaccaagagggaatgtgtatatattataccaagttccaaggaccctcacagatgccttccaggatgtcaaatttgtcagcaactcgtcaggtgtttttgtggtcgcttggtcaagcaacatgcttgttttactgcaagtcttgccatgaaatactcagatgtgaaattgggtgaccattttaatcaggcaatagaagaatggtctgtggaaaagcatacagaacagagcccaacggatgcttatggagtcataaattttcaagggggttctcattcctacagagctaagtatgtgaggctatcatatgacaccaaacctgaagtcattctgcaacttctgcttaaagaatggcaaatggagttacccaaacttgttatctctgtacatgggggcatgcagaaatttgagcttcacccacgaatcaagcagttgcttggaaaaggtcttattaaagctgcagttacaactggagcctggattttaactggaggagtaaacacaggtgtggcaaaacatgttggagatgccctcaaagaacatgcttccagatcatctcgaaagatttgcactatcggaatagctccatggggagtgattgaaaacagaaatgatcttgttgggagagatgtggttgctccttatcaaaccttattgaaccccctgagcaaattgaatgttttgaataatctgcattcccatttcatattggtggatgatggcactgttggaaagtatggggcggaagtcagactgagaagagaacttgaaaaaactattaatcagcaaagaattcatgctaggattggccagggtgtccctgtggtggcacttatatttgagggtgggccaaatgttatcctcacagttcttgaataccttcaggaaagcccccctgttccagtagttgtgtgtgaaggaacaggcagagctgcagatctgctagcgtatattcataaacaaacagaagaaggagggaatcttcctgatgcagcagagcccgatattatttccactatcaaaaaaacatttaactttggccagaatgaagcacttcatttatttcaaacactgatggagtgcatgaaaagaaaggagcttatcactgttttccatattgggtcagatgaacatcaagatatagatgtagcaatacttactgcactgctaaaaggtactaatgcatctgcatttgaccagcttatccttacattggcatgggatagagttgacattgccaaaaatcatgtatttgtttatggacagcagtggctggttggatccttggaacaagctatgcttgatgctcttgtaatggatagagttgcatttgtaaaacttcttattgaaaatggagtaagcatgcataaattccttaccattccgagactggaagaactttacaacactaaacaaggtccaactaatccaatgctgtttcatcttgttcgagacgtcaaacagggaaatcttcctccaggatataagatcactctgattgatataggacttgttattgaatatctcatgggaggaacctacagatgcacctatactaggaaacgttttcgattaatatataatagtcttggtggaaataatcggaggtctggccgaaatacctccagcagcactcctcagttgcgaaagagtcatgaatcttttggcaatagggcagataaaaaggaaaaaatgaggcataaccatttcattaagacagcacagccctaccgaccaaagattgatacagttatggaagaaggaaagaagaaaagaaccaaagatgaaattgtagacattgatgatccagaaaccaagcgctttccttatccacttaatgaacttttaatttgggcttgccttatgaagaggcaggtcatggcccgttttttatggcaacatggtgaagaatcaatggctaaagcattagttgcctgtaagatctatcgttcaatggcatatgaagcaaagcagagtgacctggtagatgatacttcagaagaactaaaacagtattccaatgattttggtcagttggccgttgaattattagaacagtccttcagacaagatgaaaccatggctatgaaattgctcacttatgaactgaagaactggagtaattcaacctgccttaagttagcagtttcttcaagacttagaccttttgtagctcacacctgtacacaaatgttgttatctgatatgtggatgggaaggctgaatatgaggaaaaattcctggtacaaggtcatactaagcattttagttccacctgccatattgctgttagagtataaaactaaggctgaaatgtcccatatcccacaatctcaagatgctcatcagatgacaatggatgacagcgaaaacaactttcagaacataacagaagagatccccatggaagtgtttaaagaagtacggattttggatagtaatgaaggaaagaatgagatggagatacaaatgaaatcaaaaaagcttccaattacgcgaaagttttatgccttttatcatgcaccaattgtaaaattctggtttaacacgttggcatatttaggatttctgatgctttatacatttgtggttcttgtacaaatggaacagttaccttcagttcaagaatggattgttattgcttatatttttacttatgccattgagaaagtccgtgagatctttatgtctgaagctgggaaagtaaaccagaagattaaagtatggtttagtgattacttcaacatcagtgatacaattgccataatttctttcttcattggatttggactaagatttggagcaaaatggaactttgcaaatgcatatgataatcatgttttgtggctggaagattaatttactgtcttaacataatattttggtatgtgcgtttgctagattttctagctgtaaatcaacaggcaggaccttatgtaatgatgattggaaaaatggtggccaatatgttctacattgtagtgattatggctcttgtattacttagttttggtgttcccagaaaggcaatactttatcctcatgaagcaccatcttggactcttgctaaagatatagtttttcacccatactggatgatttttggtgaagtttatgcatacgaaattgatgtgtgtgcaaatgattctgttatccctcaaatctgtggtcctgggacgtggttgactccatttcttcaagcagtctacctctttgtacagtatatcattatggttaatcttcttattgcatttttcaacaatgtgtatttacaagtgaaggcaatttccaatattgtatggaagtaccagcgttatcattttattatggcttatcatgagaaaccagttctgcctcctccacttatcattcttagccatatagtttctctgttttgctgcatatgtaagagaagaaagaaagataagacttccgatggaccaaaacttttcttaacagaagaagatcaaaagaaacttcatgattttgaagagcagtgtgttgaaatgtatttcaatgaaaaagatgacaaatttcattctgggagtgaagagagaattcgtgtcacttttgaaagagtggaacagatgtgcattcagattaaagaagttggagatcgtgtcaactacataaaaagatcattacaatcattagattctcaaattggccatttgcaagatctttcagccctgacggtagatacattaaaaacactcactgcccagaaagcgtcggaagctagcaaagttcataatgaaatcacacgagaactgagcatttccaaacacttggctcaaaaccttattgatgatggtcctgtaagaccttctgtatggaaaaagcatggtgttgtaaatacacttagctcctctcttcctcaaggtgatcttgaaagtaataatccttttcattgtaatattttaatgaaagatgacaaagatccccagtgtaatatatttggccaagacttacctgcagtaccccagagaaaagaatttaattttccagaggctggttcctcttctggtgccttattcccaagtgctgtttcccctccagaactgcgacagagactacatggggtagaactcttaaaaatatttaataaaaatcaaaaattaggcagttcatctactagcataccacatctgtcatccccaccaaccaaattttttgttagtacaccacctcagccaagttgcaaaagccacttggaaactggaaccaaagatcaagaaactgtttgctctaaagctacagaaggagataatacagaatttggagcatttgtaggacacagagatagcatggatttacagaggtttaaagaaacatcaaacaagataaaaatactatccaataacaatacttctgaaaacactttgaaacgagcgagttctcttgctggatttactgactgtcacagaacttccattcctgttcattcagaacaagaaaaaatcagtagaaggccatctaccgaagacactcatgaagtagattccaaagcagctttaataccggattggttacaagatagaccatcaaacagagaaatgccatctgaagaaggaacattaaatggtctcacttctccatttaagccagctatggatacaaattactattattcagctgtggaaagaaataacttgatgaggttatcacagagcattccatttacacctgtgcctccaagaggggagcctgtcacagtgtatcgtttggaagagagttcacccaacatactaaataacagcatgtcttcttggtcacaactaggcctctgtgccaaaatagagtttttaagcaaagaggagatgggaggaggtttacgaagagctgtcaaagtacagtgtacctggtcagaacatgatatcctcaaatcagggcatctttatattatcaaatcttttcttccagaggtggttaatacatggtcaagtatttataaagaagatacagttctgcatctctgtctgagagaaattcaacaacagagagcagcacaaaagcttacgtttgcctttaatcaaatgaaacccaaatccataccatattctccaaggttccttgaagttttcctgctgtattgccattcagcaggacagtggtttgctgtggaagaatgtatgactggagaatttagaaaatacaacaataataatggagatgagattattccaactaatactctggaagagatcatgctagcctttagccactggacttacgaatatacaagaggggagttactggtacttgatttgcaaggtgttggtgaaaatttgactgacccatctgtgataaaagcagaagaaaagagatcctgtgatatggtttttggcccagcaaatctaggagaagatgcaattaaaaacttcagagcaaaacatcactgtaattcttgctgtagaaagcttaaacttccagatctgaagaggaatgattatacgcctgataaaattatatttcctcaggatgagccttcagatttgaatcttcagcctggaaattccaccaaagaatcagaatcaactaattctgttcgtctgatgttataatattaatattactgaatcattggttttgcctgcacctcacagaaatgttactgtgtcacttttccctcgggaggaaattgtttggtaatatagaaaggtgtatgcaagttgaatttgctgactccagcacagttaaaaggtcaatattcttttgacctgattaatcagtcagaaagtccctataggatagagctggcagctgagaaattttaaaggtaattgataattagtatttataactttttaaagggctctttgtatagcagaggatctcatttgactttgttttgatgagggtgatgccctctcttatgtggtacaataccattaaccaaaggtaggtgtccatgcagattttattggcagctgttttattgccattcaactagggaaatgaagaaatcacgcagccttttggttaaatggcagtcaaaattttcctcagtgtatttagtgtgttcagtgatgatatcactggttcccaactagatgcttgttggccacgggaagggaaatgacttgttctaattctaggttcacagaggtatgagaagcctgaactgaagaccattttcaagagggacggtatttatgaatcagggttaggctccatatttaaagatagagccagttttttttttaaatagaacccaaattgtgtaaaaatgttaattgggttttttaaacattgttttatcaagtcactgttaagtagaagaaagccatggtaaactgatacataacctaaattataaaagcagaaacctaactcactcgtcaagggaagttaccttttgaggaaagttaaagtacttttttccctatctgtatctatagcaacaacccagaacttacaaacttctccaaagattttattgattgttatatcaaatcagaatgtaaacatgaactcttgcatatatttaaaattgtgttggaacatttgaacatgaatgctgtttgtggtacttaagaaattaattcagttggattatcattatgtgatactggcagattgcagtgcaaccttatgccaataaaatgtaatttaacagccccagatattgttgaatattcaacaataacaagaaaagcttttcatctaagttttatgctttaattttttttctttttttttctttttcttttgtttccttggtactaattttaatttttatttggaagggagcagtataaagcttatttgtatttagtagtgtatctcatagatacagacaaggcaagagatgataagctgtttaaatagtgtttaatattgattgggggtggggagaaagaaaaagtgtattacttaaagatactatatacgttttgtatatcattaaatctttaaaagaaatgaaataaatttattgtttac

SEQ ID NO: 322241 - DNA, 7376 bp, Homo sapiens
  misc_feature (1)..(3): n is a, c, g, or t
  misc_feature (10)..(10): n is a, c, g, or t
nnnccgtccncagccccgtcgccggcggaggcgggcgcgggcgcgtccctgtggccagtcacccggaggagttggtcgcacaattatgaaagactcggcttctgctgctagcgccggagctgagttagttctgagaaggtttccctgggcgttccttgtccggcggcctctgctgccgcctccggagacgcttcccgatagatggctacaggccgcggaggaggaggaggtggagttgctgcccttccggagtccgccccgtgaggagaatgtcccagaaatcctggatagaaagcactttgaccaagagggaatgtgtatatattataccaagttccaaggaccctcacagatgccttccaggatgtcaaatttgtcagcaactcgtcaggtgtttttgtggtcgcttggtcaagcaacatgcttgttttactgcaagtcttgccatgaaatactcagatgtgaaattgggtgaccattttaatcaggcaatagaagaatggtctgtggaaaagcatacagaacagagcccaacggatgcttatggagtcataaattttcaagggggttctcattcctacagagctaagtatgtgaggctatcatatgacaccaaacctgaagtcattctgcaacttctgcttaaagaatggcaaatggagttacccaaacttgttatctctgtacatgggggcatgcagaaatttgagcttcacccacgaatcaagcagttgcttggaaaaggtcttattaaagctgcagttacaactggagcctggattttaactggaggagtaaacacaggtgtggcaaaacatgttggagatgccctcaaagaacatgcttccagatcatctcgaaagatttgcactatcggaatagctccatggggagtgattgaaaacagaaatgatcttgttgggagagatgtggttgctccttatcaaaccttattgaaccccctgagcaaattgaatgttttgaataatctgcattcccatttcatattggtggatgatggcactgttggaaagtatggggcggaagtcagactgagaagagaacttgaaaaaactattaatcagcaaagaattcatgctaggattggccagggtgtccctgtggtggcacttatatttgagggtgggccaaatgttatcctcacagttcttgaataccttcaggaaagcccccctgttccagtagttgtgtgtgaaggaacaggcagagctgcagatctgctagcgtatattcataaacaaacagaagaaggagggaatcttcctgatgcagcagagcccgatattatttccactatcaaaaaaacatttaactttggccagaatgaagcacttcatttatttcaaacactgatggagtgcatgaaaagaaaggagcttatcactgttttccatattgggtcagatgaacatcaagatatagatgtagcaatacttactgcactgctaaaaggtactaatgcatctgcatttgaccagcttatccttacattggcatgggatagagttgacattgccaaaaatcatgtatttgtttatggacagcagtggctggttggatccttggaacaagctatgcttgatgctcttgtaatggatagagttgcatttgtaaaacttcttattgaaaatggagtaagcatgcataaattccttaccattccgagactggaagaactttacaacactaaacaaggtccaactaatccaatgctgtttcatcttgttcgagacgtcaaacagggaaatcttcctccaggatataagatcactctgattgatataggacttgttattgaatatctcatgggaggaacctacagatgcacctatactaggaaacgttttcgattaatatataatagtcttggtggaaataatcggaggtctggccgaaatacctccagcagcactcctcagttgcgaaagagtcatgaatcttttggcaatagggcagataaaaaggaaaaaatgaggcataaccatttcattaagacagcacagccctaccgaccaaagattgatacagttatggaagaaggaaagaagaaaagaaccaaagatgaaattgtagacattgatgatccagaaaccaagcgctttccttatccacttaatgaacttttaatttgggcttgccttatgaagaggcaggtcatggcccgttttttatggcaacatggtgaagaatcaatggctaaagcattagttgcctgtaagatctatcgttcaatggcatatgaagcaaagcagagtgacctggtagatgatacttcagaagaactaaaacagtattccaatgattttggtcagttggccgttgaattattagaacagtccttcagacaagatgaaaccatggctatgaaattgctcacttatgaactgaagaactggagtaattcaacctgccttaagttagcagtttcttcaagacttagaccttttgtagctcacacctgtacacaaatgttgttatctgatatgtggatgggaaggctgaatatgaggaaaaattcctggtacaaggtcatactaagcattttagttccacctgccatattgctgttagagtataaaactaaggctgaaatgtcccatatcccacaatctcaagatgctcatcagatgacaatggatgacagcgaaaacaactttcagaacataacagaagagatccccatggaagtgtttaaagaagtacggattttggatagtaatgaaggaaagaatgagatggagatacaaatgaaatcaaaaaagcttccaattacgcgaaagttttatgccttttatcatgcaccaattgtaaaattctggtttaacacgttggcatatttaggatttctgatgctttatacatttgtggttcttgtacaaatggaacagttaccttcagttcaagaatggattgttattgcttatatttttacttatgccattgagaaagtccgtgagatctttatgtctgaagctgggaaagtaaaccagaagattaaagtatggtttagtgattacttcaacatcagtgatacaattgccataatttctttcttcattggatttggactaagatttggagcaaaatggaactttgcaaatgcatatgataatcatgttttgtggctggaagattaatttactgtcttaacataatattttggtatgtgcgtttgctagattttctagctgtaaatcaacaggcaggaccttatgtaatgatgattggaaaaatggtggccaatatgttctacattgtagtgattatggctcttgtattacttagttttggtgttcccagaaaggcaatactttatcctcatgaagcaccatcttggactcttgctaaagatatagtttttcacccatactggatgatttttggtgaagtttatgcatacgaaattgatgtgtgtgcaaatgattctgttatccctcaaatctgtggtcctgggacgtggttgactccatttcttcaagcagtctacctctttgtacagtatatcattatggttaatcttcttattgcatttttcaacaatgtgtatttacaagtgaaggcaatttccaatattgtatggaagtaccagcgttatcattttattatggcttatcatgagaaaccagttctgcctcctccacttatcattcttagccatatagtttctctgttttgctgcatatgtaagagaagaaagaaagataagacttccgatggaccaaaacttttcttaacagaagaagatcaaaagaaacttcatgattttgaagagcagtgtgttgaaatgtatttcaatgaaaaagatgacaaatttcattctgggagtgaagagagaattcgtgtcacttttgaaagagtggaacagatgtgcattcagattaaagaagttggagatcgtgtcaactacataaaaagatcattacaatcattagattctcaaattggccatttgcaagatctttcagccctgacggtagatacattaaaaacactcactgcccagaaagcgtcggaagctagcaaagttcataatgaaatcacacgagaactgagcatttccaaacacttggctcaaaaccttattgatgatggtcctgtaagaccttctgtatggaaaaagcatggtgttgtaaatacacttagctcctctcttcctcaaggtgatcttgaaagtaataatccttttcattgtaatattttaatgaaagatgacaaagatccccagtgtaatatatttggccaagacttacctgcagtaccccagagaaaagaatttaattttccagaggctggttcctcttctggtgccttattcccaagtgctgtttcccctccagaactgcgacagagactacatggggtagaactcttaaaaatatttaataaaaatcaaaaattaggcagttcatctactagcataccacatctgtcatccccaccaaccaaattttttgttagtacaccacctcagccaagttgcaaaagccacttggaaactggaaccaaagatcaagaaactgtttgctctaaagctacagaaggagataatacagaatttggagcatttgtaggacacagagatagcatggatttacagaggtttaaagaaacatcaaacaagataaaaatactatccaataacaatacttctgaaaacactttgaaacgagcgagttctcttgctggatttactgactgtcacagaacttccattcctgttcattcagaacaagaaaaaatcagtagaaggccatctaccgaagacactcatgaagtagattccaaagcagctttaataccggattggttacaagatagaccatcaaacagagaaatgccatctgaagaaggaacattaaatggtctcacttctccatttaagccagctatggatacaaattactattattcagctgtggaaagaaataacttgatgaggttatcacagagcattccatttacacctgtgcctccaagaggggagcctgtcacagtgtatcgtttggaagagagttcacccaacatactaaataacagcatgtcttcttggtcacaactaggcctctgtgccaaaatagagtttttaagcaaagaggagatgggaggaggtttacgaagagctgtcaaagtacagtgtacctggtcagaacatgatatcctcaaatcagggcatctttatattatcaaatcttttcttccagaggtggttaatacatggtcaagtatttataaagaagatacagttctgcatctctgtctgagagtaagtgtcagtgaatatttaatagtggaacataatttaagctttatattttaacttctgaaatatcaataagccaaatataatcttagtttaaatattaaacaagggttctccccaccctcccttttataggaaattcaacaacagagagcagcacaaaagcttacgtttgcctttaatcaaatgaaacccaaatccataccatattctccaaggttccttgaagttttcctgctgtattgccattcagcaggacagtggtttgctgtggaagaatgtatgactggagaatttagaaaatacaacaataataatggagatgagattattccaactaatactctggaagagatcatgctagcctttagccactggacttacgaatatacaagaggggagttactggtacttgatttgcaaggtgttggtgaaaatttgactgacccatctgtgataaaagcagaagaaaagagatcctgtgatatggtttttggcccagcaaatctaggagaagatgcaattaaaaacttcagagcaaaacatcactgtaattcttgctgtagaaagcttaaacttccagatctgaagaggaatgattatacgcctgataaaattatatttcctcaggatgagccttcagatttgaatcttcagcctggaaattccaccaaagaatcagaatcaactaattctgttcgtctgatgttataatattaatattactgaatcattggttttgcctgcacctcacagaaatgttactgtgtcacttttccctcgggaggaaattgtttggtaatatagaaaggtgtatgcaagttgaatttgctgactccagcacagttaaaaggtcaatattcttttgacctgattaatcagtcagaaagtccctataggatagagctggcagctgagaaattttaaaggtaattgataattagtatttataactttttaaagggctctttgtatagcagaggatctcatttgactttgttttgatgagggtgatgccctctcttatgtggtacaataccattaaccaaaggtaggtgtccatgcagattttattggcagctgttttattgccattcaactagggaaatgaagaaatcacgcagccttttggttaaatggcagtcaaaattttcctcagtgtatttagtgtgttcagtgatgatatcactggttcccaactagatgcttgttggccacgggaagggaaatgacttgttctaattctaggttcacagaggtatgagaagcctgaactgaagaccattttcaagagggacggtatttatgaatcagggttaggctccatatttaaagatagagccagttttttttttaaatagaacccaaattgtgtaaaaatgttaattgggttttttaaacattgttttatcaagtcactgttaagtagaagaaagccatggtaaactgatacataacctaaattataaaagcagaaacctaactcactcgtcaagggaagttaccttttgaggaaagttaaagtacttttttccctatctgtatctatagcaacaacccagaacttacaaacttctccaaagattttattgattgttatatcaaatcagaatgtaaacatgaactcttgcatatatttaaaattgtgttggaacatttgaacatgaatgctgtttgtggtacttaagaaattaattcagttggattatcattatgtgatactggcagattgcagtgcaaccttatgccaataaaatgtaatttaacagccccagatattgttgaatattcaacaataacaagaaaagcttttcatctaagttttatgctttaattttttttctttttttttctttttcttttgtttccttggtactaattttaatttttatttggaagggagcagtataaagcttatttgtatttagtagtgtatctcatagatacagacaaggcaagagatgataagctgtttaaatagtgtttaatattgattgggggtggggagaaagaaaaagtgtattacttaaagatactatatacgttttgtatatcattaaatctttaaaagaaatgaaataaatttattgtttac

SEQ ID NO: 322242 - DNA, 7190 bp, Homo sapiens
  misc_feature (1)..(3): n is a, c, g, or t
  misc_feature (10)..(10): n is a, c, g, or t
nnnccgtccncagccccgtcgccggcggaggcgggcgcgggcgcgtccctgtggccagtcacccggaggagttggtcgcacaattatgaaagactcggcttctgctgctagcgccggagctgagttagttctgagaaggtttccctgggcgttccttgtccggcggcctctgctgccgcctccggagacgcttcccgatagatggctacaggccgcggaggaggaggaggtggagttgctgcccttccggagtccgccccgtgaggagaatgtcccagaaatcctggatagaaagcactttgaccaagagggaatgtgtatatattataccaagttccaaggaccctcacagatgccttccaggatgtcaaatttgtcagcaactcgtcaggtgtttttgtggtcgcttggtcaagcaacatgcttgttttactgcaagtcttgccatgaaatactcagatgtgaaattgggtgaccattttaatcaggcaatagaagaatggtctgtggaaaagcatacagaacagagcccaacggatgcttatggagtcataaattttcaagggggttctcattcctacagagctaagtatgtgaggctatcatatgacaccaaacctgaagtcattctgcaacttctgcttaaagaatggcaaatggagttacccaaacttgttatctctgtacatgggggcatgcagaaatttgagcttcacccacgaatcaagcagttgcttggaaaaggtcttattaaagctgcagttacaactggagcctggattttaactggaggagtaaacacaggtgtggcaaaacatgttggagatgccctcaaagaacatgcttccagatcatctcgaaagatttgcactatcggaatagctccatggggagtgattgaaaacagaaatgatcttgttgggagagatgtggttgctccttatcaaaccttattgaaccccctgagcaaattgaatgttttgaataatctgcattcccatttcatattggtggatgatggcactgttggaaagtatggggcggaagtcagactgagaagagaacttgaaaaaactattaatcagcaaagaattcatgctaggattggccagggtgtccctgtggtggcacttatatttgagggtgggccaaatgttatcctcacagttcttgaataccttcaggaaagcccccctgttccagtagttgtgtgtgaaggaacaggcagagctgcagatctgctagcgtatattcataaacaaacagaagaaggagggaatcttcctgatgcagcagagcccgatattatttccactatcaaaaaaacatttaactttggccagaatgaagcacttcatttatttcaaacactgatggagtgcatgaaaagaaaggagcttatcactgttttccatattgggtcagatgaacatcaagatatagatgtagcaatacttactgcactgctaaaaggtactaatgcatctgcatttgaccagcttatccttacattggcatgggatagagttgacattgccaaaaatcatgtatttgtttatggacagcagtggctggttggatccttggaacaagctatgcttgatgctcttgtaatggatagagttgcatttgtaaaacttcttattgaaaatggagtaagcatgcataaattccttaccattccgagactggaagaactttacaacactaaacaaggtccaactaatccaatgctgtttcatcttgttcgagacgtcaaacagggaaatcttcctccaggatataagatcactctgattgatataggacttgttattgaatatctcatgggaggaacctacagatgcacctatactaggaaacgttttcgattaatatataatagtcttggtggaaataatcggaggtctggccgaaatacctccagcagcactcctcagttgcgaaagagtcatgaatcttttggcaatagggcagataaaaaggaaaaaatgaggcataaccatttcattaagacagcacagccctaccgaccaaagattgatacagttatggaagaaggaaagaagaaaagaaccaaagatgaaattgtagacattgatgatccagaaaccaagcgctttccttatccacttaatgaacttttaatttgggcttgccttatgaagaggcaggtcatggcccgttttttatggcaacatggtgaagaatcaatggctaaagcattagttgcctgtaagatctatcgttcaatggcatatgaagcaaagcagagtgacctggtagatgatacttcagaagaactaaaacagtattccaatgattttggtcagttggccgttgaattattagaacagtccttcagacaagatgaaaccatggctatgaaattgctcacttatgaactgaagaactggagtaattcaacctgccttaagttagcagtttcttcaagacttagaccttttgtagctcacacctgtacacaaatgttgttatctgatatgtggatgggaaggctgaatatgaggaaaaattcctggtacaaggtcatactaagcattttagttccacctgccatattgctgttagagtataaaactaaggctgaaatgtcccatatcccacaatctcaagatgctcatcagatgacaatggatgacagcgaaaacaactttcagaacataacagaagagatccccatggaagtgtttaaagaagtacggattttggatagtaatgaaggaaagaatgagatggagatacaaatgaaatcaaaaaagcttccaattacgcgaaagttttatgccttttatcatgcaccaattgtaaaattctggtttaacacgttggcatatttaggatttctgatgctttatacatttgtggttcttgtacaaatggaacagttaccttcagttcaagaatggattgttattgcttatatttttacttatgccattgagaaagtccgtgagatctttatgtctgaagctgggaaagtaaaccagaagattaaagtatggtttagtgattacttcaacatcagtgatacaattgccataatttctttcttcattggatttggactaagatttggagcaaaatggaactttgcaaatgcatatgataatcatgttttgtggctggaagattaatttactgtcttaacataatattttggtatgtgcgtttgctagattttctagctgtaaatcaacaggcaggaccttatgtaatgatgattggaaaaatggtggccaatatgttctacattgtagtgattatggctcttgtattacttagttttggtgttcccagaaaggcaatactttatcctcatgaagcaccatcttggactcttgctaaagatatagtttttcacccatactggatgatttttggtgaagtttatgcatacgaaattgatgtgtgtgcaaatgattctgttatccctcaaatctgtggtcctgggacgtggttgactccatttcttcaagcagtctacctctttgtacagtatatcattatggttaatcttcttattgcatttttcaacaatgtgtatttacaagtgaaggcaatttccaatattgtatggaagtaccagcgttatcattttattatggcttatcatgagaaaccagttctgcctcctccacttatcattcttagccatatagtttctctgttttgctgcatatgtaagagaagaaagaaagataagacttccgatggaccaaaacttttcttaacagaagaagatcaaaagaaacttcatgattttgaagagcagtgtgttgaaatgtatttcaatgaaaaagatgacaaatttcattctgggagtgaagagagaattcgtgtcacttttgaaagagtggaacagatgtgcattcagattaaagaagttggagatcgtgtcaactacataaaaagatcattacaatcattagattctcaaattggccatttgcaagatctttcagccctgacggtagatacattaaaaacactcactgcccagaaagcgtcggaagctagcaaagttcataatgaaatcacacgagaactgagcatttccaaacacttggctcaaaaccttattgatgatggtcctgtaagaccttctgtatggaaaaagcatggtgttgtaaatacacttagctcctctcttcctcaaggtgatcttgaaagtaataatccttttcattgtaatattttaatgaaagatgacaaagatccccagtgtaatatatttggccaagacttacctgcagtaccccagagaaaagaatttaattttccagaggctggttcctcttctggtgccttattcccaagtgctgtttcccctccagaactgcgacagagactacatggggtagaactcttaaaaatatttaataaaaatcaaaaattaggcagttcatctactagcataccacatctgtcatccccaccaaccaaattttttgttagtacaccacctcagccaagttgcaaaagccacttggaaactggaaccaaagatcaagaaactgtttgctctaaagctacagaaggagataatacagaatttggagcatttgtaggacacagagatagcatggatttacagaggtttaaagaaacatcaaacaagataaaaatactatccaataacaatacttctgaaaacactttgaaacgagcgagttctcttgctggatttactgactgtcacagaacttccattcctgttcattcagaacaagaaaaaatcagtagaaggccatctaccgaagacactcatgaagtagattccaaagcagctttaataccggattggttacaagatagaccatcaaacagagaaatgccatctgaagaaggaacattaaatggtctcacttctccatttaagccagctatggatacaaattactattattcagctgtggaaagaaataacttgatgaggttatcacagagcattccatttacacctgtgcctccaagaggggagcctgtcacagtgtatcgtttggaagagagttcacccaacatactaaataacagcatgtcttcttggtcacaactaggcctctgtgccaaaatagagtttttaagcaaagaggagatgggaggaggtttacgaagagctgtcaaagtacagtgtacctggtcagaacatgatatcctcaaatcagggcatctttatattatcaaatcttttcttccagaggtggttaatacatggtcaagtatttataaagaagatacagttctgcatctctgtctgagagaaattcaacaacagagagcagcacaaaagcttacgtttgcctttaatcaaatgaaacccaaatccataccatattctccaaggttccttgaagttttcctgctgtattgccattcagcaggacagtggtttgctgtggaagaatgtatgactggagaatttagaaaatacaacaataataatggagatgagattattccaactaatactctggaagagatcatgctagcctttagccactggacttacgaatatacaagaggggagttactggtacttgatttgcaaggtgttggtgaaaatttgactgacccatctgtgataaaagcagaagaaaagagatcctgtgatatggtttttggcccagcaaatctaggagaagatgcaattaaaaacttcagagcaaaacatcactgtaattcttgctgtagaaagcttaaacttccagatctgaagaggaatgattatacgcctgataaaattatatttcctcaggatgagccttcagatttgaatcttcagcctggaaattccaccaaagaatcagaatcaactaattctgttcgtctgatgttataatattaatattactgaatcattggttttgcctgcacctcacagaaatgttactgtgtcacttttccctcgggaggaaattgtttggtaatatagaaaggtgtatgcaagttgaatttgctgactccagcacagttaaaaggtcaatattcttttgacctgattaatcagtcagaaagtccctataggatagagctggcagctgagaaattttaaaggtaattgataattagtatttataactttttaaagggctctttgtatagcagaggatctcatttgactttgttttgatgagggtgatgccctctcttatgtggtacaataccattaaccaaaggtaggtgtccatgcagattttattggcagctgttttattgccattcaactagggaaatgaagaaatcacgcagccttttggttaaatggcagtcaaaattttcctcagtgtatttagtgtgttcagtgatgatatcactggttcccaactagatgcttgttggccacgggaagggaaatgacttgttctaattctaggttcacagaggtatgagaagcctgaactgaagaccattttcaagagggacggtatttatgaatcagggttaggctccatatttaaagatagagccagttttttttttaaatagaacccaaattgtgtaaaaatgttaattgggttttttaaacattgttttatcaagtcactgttaagtagaagaaagccatggtaaactgatacataacctaaattataaatacttttttccctatctgtatctatagcaacaacccagaacttacaaacttctccaaagattttattgattgttatatcaaatcagaatgtaaacatgaactcttgcatatatttaaaattgtgttggaacatttgaacatgaatgctgtttgtggtacttaagaaattaattcagttggattatcattatgtgatactggcagattgcagtgcaaccttatgccaataaaatgtaatttaacagccccagatattgttgaatattcaacaataacaagaaaagcttttcatctaagttttatgctttaattttttttctttttttttctttttcttttgtttccttggtactaattttaatttttatttggaagggagcagtataaagcttatttgtatttagtagtgtatctcatagatacagacaaggcaagagatgataagctgtttaaatagtgtttaatattgattgggggtggggagaaagaaaaagtgtattacttaaagatactatatacgttttgtatatcattaaatctttaaaagaaatgaaataaatttattgtttac

SEQ ID NO: 322243 - DNA, 5509 bp, Homo sapiens
  misc_feature (1)..(3): n is a, c, g, or t
  misc_feature (10)..(10): n is a, c, g, or t
nnnccgtccncagccccgtcgccggcggaggcgggcgcgggcgcgtccctgtggccagtcacccggaggagttggtcgcacaattatgaaagactcggcttctgctgctagcgccggagctgagttagttctgagaaggtttccctgggcgttccttgtccggcggcctctgctgccgcctccggagacgcttcccgatagatggctacaggccgcggaggaggaggaggtggagttgctgcccttccggagtccgccccgtgaggagaatgtcccagaaatcctggatagaaagcactttgaccaagagggaatgtgtatatattataccaagttccaaggaccctcacagatgccttccaggatgtcaaatttgtcagcaactcgtcaggtgtttttgtggtcgcttggtcaagcaacatgcttgttttactgcaagtcttgccatgaaatactcagatgtgaaattgggtgaccattttaatcaggcaatagaagaatggtctgtggaaaagcatacagaacagagcccaacggatgcttatggagtcataaattttcaagggggttctcattcctacagagctaagtatgtgaggctatcatatgacaccaaacctgaagtcattctgcaacttctgcttaaagaatggcaaatggagttacccaaacttgttatctctgtacatgggggcatgcagaaatttgagcttcacccacgaatcaagcagttgcttggaaaaggtcttattaaagctgcagttacaactggagcctggattttaactggaggagtaaacacaggtgtggcaaaacatgttggagatgccctcaaagaacatgcttccagatcatctcgaaagatttgcactatcggaatagctccatggggagtgattgaaaacagaaatgatcttgttgggagagatgtggttgctccttatcaaaccttattgaaccccctgagcaaattgaatgttttgaataatctgcattcccatttcatattggtggatgatggcactgttggaaagtatggggcggaagtcagactgagaagagaacttgaaaaaactattaatcagcaaagaattcatgctaggattggccagggtgtccctgtggtggcacttatatttgagggtgggccaaatgttatcctcacagttcttgaataccttcaggaaagcccccctgttccagtagttgtgtgtgaaggaacaggcagagctgcagatctgctagcgtatattcataaacaaacagaagaaggagggaatcttcctgatgcagcagagcccgatattatttccactatcaaaaaaacatttaactttggccagaatgaagcacttcatttatttcaaacactgatggagtgcatgaaaagaaaggagcttatcactgttttccatattgggtcagatgaacatcaagatatagatgtagcaatacttactgcactgctaaaaggtactaatgcatctgcatttgaccagcttatccttacattggcatgggatagagttgacattgccaaaaatcatgtatttgtttatggacagcagtggctggttggatccttggaacaagctatgcttgatgctcttgtaatggatagagttgcatttgtaaaacttcttattgaaaatggagtaagcatgcataaattccttaccattccgagactggaagaactttacaacactaaacaaggtccaactaatccaatgctgtttcatcttgttcgagacgtcaaacagggaaatcttcctccaggatataagatcactctgattgatataggacttgttattgaatatctcatgggaggaacctacagatgcacctatactaggaaacgttttcgattaatatataatagtcttggtggaaataatcggaggtctggccgaaatacctccagcagcactcctcagttgcgaaagagtcatgaatcttttggcaatagggcagataaaaaggaaaaaatgaggcataaccatttcattaagacagcacagccctaccgaccaaagattgatacagttatggaagaaggaaagaagaaaagaaccaaagatgaaattgtagacattgatgatccagaaaccaagcgctttccttatccacttaatgaacttttaatttgggcttgccttatgaagaggcaggtcatggcccgttttttatggcaacatggtgaagaatcaatggctaaagcattagttgcctgtaagatctatcgttcaatggcatatgaagcaaagcagagtgacctggtagatgatacttcagaagaactaaaacagtattccaatgattttggtcagttggccgttgaattattagaacagtccttcagacaagatgaaaccatggctatgaaattgctcacttatgaactgaagaactggagtaattcaacctgccttaagttagcagtttcttcaagacttagaccttttgtagctcacacctgtacacaaatgttgttatctgatatgtggatgggaaggctgaatatgaggaaaaattcctggtacaaggtcatactaagcattttagttccacctgccatattgctgttagagtataaaactaaggctgaaatgtcccatatcccacaatctcaagatgctcatcagatgacaatggatgacagcgaaaacaactttcagaacataacagaagagatccccatggaagtgtttaaagaagtacggattttggatagtaatgaaggaaagaatgagatggagatacaaatgaaatcaaaaaagcttccaattacgcgaaagttttatgccttttatcatgcaccaattgtaaaattctggtttaacacgttggcatatttaggatttctgatgctttatacatttgtggttcttgtacaaatggaacagttaccttcagttcaagaatggattgttattgcttatatttttacttatgccattgagaaagtccgtgagatctttatgtctgaagctgggaaagtaaaccagaagattaaagtatggtttagtgattacttcaacatcagtgatacaattgccataatttctttcttcattggatttggactaagatttggagcaaaatggaactttgcaaatgcatatgataatcatgttttgtggctggaagattaatttactgtcttaacataatattttggtatgtgcgtttgctagattttctagctgtaaatcaacaggcaggaccttatgtaatgatgattggaaaaatggtggccaatatgttctacattgtagtgattatggctcttgtattacttagttttggtgttcccagaaaggcaatactttatcctcatgaagcaccatcttggactcttgctaaagatatagtttttcacccatactggatgatttttggtgaagtttatgcatacgaaattgatgtgtgtgcaaatgattctgttatccctcaaatctgtggtcctgggacgtggttgactccatttcttcaagcagtctacctctttgtacagtatatcattatggttaatcttcttattgcatttttcaacaatgtgtatttacaagtgaaggcaatttccaatattgtatggaagtaccagcgttatcattttattatggcttatcatgagaaaccagttctgcctcctccacttatcattcttagccatatagtttctctgttttgctgcatatgtaagagaagaaagaaagataagacttccgatggaccaaaacttttcttaacagaagaagatcaaaagaaacttcatgattttgaagagcagtgtgttgaaatgtatttcaatgaaaaagatgacaaatttcattctgggagtgaagagagaattcgtgtcacttttgaaagagtggaacagatgtgcattcagattaaagaagttggagatcgtgtcaactacataaaaagatcattacaatcattagattctcaaattggccatttgcaagatctttcagccctgacggtagatacattaaaaacactcactgcccagaaagcgtcggaagctagcaaagttcataatgaaatcacacgagaactgagcatttccaaacacttggctcaaaaccttattgatgatggtcctgtaagaccttctgtatggaaaaagcatggtgttgtaaatacacttagctcctctcttcctcaaggtgatcttgaaagtaataatccttttcattgtaatattttaatgaaagatgacaaagatccccagtgtaatatatttggccaagacttacctgcagtaccccagagaaaagaatttaattttccagaggctggttcctcttctggtgccttattcccaagtgctgtttcccctccagaactgcgacagagactacatggggtagaactcttaaaaatatttaataaaaatcaaaaattaggcagttcatctactagcataccacatctgtcatccccaccaaccaaattttttgttagtacaccacctcagccaagttgcaaaagccacttggaaactggaaccaaagatcaagaaactgtttgctctaaagctacagaaggagataatacagaatttggagcatttgtaggacacagagatagcatggatttacagaggtttaaagaaacatcaaacaagataaaaatactatccaataacaatacttctgaaaacactttgaaacgagcgagttctcttgctggatttactgactgtcacagaacttccattcctgttcattcagaacaagaaaaaatcagtagaaggccatctaccgaagacactcatgaagtagattccaaagcagctttaataccggattggttacaagatagaccatcaaacagagaaatgtaagtaagctttttcttaccattagcttgcgaagtatcatagttattgaatgttgtcttttttcctgctctttacatcatctctttaacatttctttatgagtgatgattatttattctagcatctcctctcttcacatagatgagattaggggaacaagtttattatgaattaatataaaagttaaaatttattattttcatatagttgtaccataattacaactctactaaggtcttcctaatagtgatacaattctgattttattatttagtcctgtttctaacttattcctgaataaatttgttgagagacctagtttgagactttagttttgtacttgcttgatttctctatccatcattctagtcaaaaccttgcatctgcttttggtaagcactttgatgattagagcagtaatacacagtatgcattagaaagcctgcatacaggaagatccactagaaagctgatgtggtaatccaaaaccaaaagtggaaactataggcaatctgacaggttattgtccccagaaagtaaaactttttagtacatattagacataagggtaaagacaaatctaagataatctctgtgtttccatcctaggaattagtattgtagaattccaaaggatatgcaaaaaaaaaa

SEQ ID NO: 322244 - DNA, 2761 bp, Homo sapiens
gctaaatagatcaagggactctaatactacttagagtaatgggttgaaatttagttcaattattttcaaattatatgtctgcacaatatttgcagaataacaatacttctgaaaacactttgaaacgagcgagttctcttgctggatttactgactgtcacagaacttccattcctgttcattcagaacaagaaaaaatcagtagaaggccatctaccgaagacactcatgaagtagattccaaagcagctttaataccggattggttacaagatagaccatcaaacagagaaatgccatctgaagaaggaacattaaatggtctcacttctccatttaagccagctatggatacaaattactattattcaggtcagtaatattaaaaacaaaatttaatagcattttggacctttacagatttaattatttctctctcatttttatgcagctgtggaaagaaataacttgatgaggttatcacagagcattccatttacacctgtgcctccaagaggggagcctgtcacagtgtatcgtttggaagagagttcacccaacatactaaataacagcatgtcttcttggtcacaactaggcctctgtgccaaaatagagtttttaagcaaagaggagatgggaggaggtttacgaagagctgtcaaagtacagtgtacctggtcagaacatgatatcctcaaatcagggcatctttatattatcaaatcttttcttccagaggtggttaatacatggtcaagtatttataaagaagatacagttctgcatctctgtctgagagaaattcaacaacagagagcagcacaaaagcttacgtttgcctttaatcaaatgaaacccaaatccataccatattctccaaggttccttgaagttttcctgctgtattgccattcagcaggacagtggtttgctgtggaagaatgtatgactggagaatttagaaaatacaacaataataatggagatgagattattccaactaatactctggaagagatcatgctagcctttagccactggacttacgaatatacaagaggggagttactggtacttgatttgcaaggtgttggtgaaaatttgactgacccatctgtgataaaagcagaagaaaagagatcctgtgatatggtttttggcccagcaaatctaggagaagatgcaattaaaaacttcagagcaaaacatcactgtaattcttgctgtagaaagcttaaacttccagatctgaagaggaatgattatacgcctgataaaattatatttcctcaggatgagccttcagatttgaatcttcagcctggaaattccaccaaagaatcagaatcaactaattctgttcgtctgatgttataatattaatattactgaatcattggttttgcctgcacctcacagaaatgttactgtgtcacttttccctcgggaggaaattgtttggtaatatagaaaggtgtatgcaagttgaatttgctgactccagcacagttaaaaggtcaatattcttttgacctgattaatcagtcagaaagtccctataggatagagctggcagctgagaaattttaaaggtaattgataattagtatttataactttttaaagggctctttgtatagcagaggatctcatttgactttgttttgatgagggtgatgccctctcttatgtggtacaataccattaaccaaaggtaggtgtccatgcagattttattggcagctgttttattgccattcaactagggaaatgaagaaatcacgcagccttttggttaaatggcagtcaaaattttcctcagtgtatttagtgtgttcagtgatgatatcactggttcccaactagatgcttgttggccacgggaagggaaatgacttgttctaattctaggttcacagaggtatgagaagcctgaactgaagaccattttcaagagggacggtatttatgaatcagggttaggctccatatttaaagatagagccagttttttttttaaatagaacccaaattgtgtaaaaatgttaattgggttttttaaacattgttttatcaagtcactgttaagtagaagaaagccatggtaaactgatacataacctaaattataaaagcagaaacctaactcactcgtcaagggaagttaccttttgaggaaagttaaagtacttttttccctatctgtatctatagcaacaacccagaacttacaaacttctccaaagattttattgattgttatatcaaatcagaatgtaaacatgaactcttgcatatatttaaaattgtgttggaacatttgaacatgaatgctgtttgtggtacttaagaaattaattcagttggattatcattatgtgatactggcagattgcagtgcaaccttatgccaataaaatgtaatttaacagccccagatattgttgaatattcaacaataacaagaaaagcttttcatctaagttttatgctttaattttttttctttttttttctttttcttttgtttccttggtactaattttaatttttatttggaagggagcagtataaagcttatttgtatttagtagtgtatctcatagatacagacaaggcaagagatgataagctgtttaaatagtgtttaatattgattgggggtggggagaaagaaaaagtgtattacttaaagatactatatacgttttgtatatcattaaatctttaaaagaaatgaaataaatttattgtttac

SEQ ID NO: 322245 - DNA, 1220 bp, Homo sapiens
agagatcatgtgaccagaaaatggaggcgaatctgtatttccagttaactgctcagaagagagatgctgaagagctgtagtcgtgcatccttctcaccctccgttagaaagcctcctctcatcctcagaagactactgtcagaggatgtaggaatggacatcccctttgaagagggcgtgctgagtcccagtgctgcagacatgaggcctgaacctcctaattctctggatcttaatgacactcatcctcggagaatcaagctcacagccccaaatatcaatctttctctggaccaaagtgaaggatctattctctctgatgataacttggacagtccagatgaaattgacatcaatgtggatgaacttgatacccccgatgaagcagattcttttgagtacactggccatgaagatcccacagccaacaaagattctggccaagagtcagagtctattccagaatatacggccgaagaggaacgggaggacaaccggctttggaggacagtggtcattggagaacaagagcagcgcattgacatgaaggtcatcgagccctacaggagagtcatttctcacggaggagattcaggatactatggggacggtctaaatgccatcattgtgtttgccgcctgttttctgccagacagcagtcgggcggattaccactatgtcatggaaaatcttttcctatatgtaataagtactttagagttgatggtagctgaagactatatgattgtgtacttgaatggtgcaaccccaagaaggaggatgccagggctaggctggatgaagaaatgctaccagatgattgacagacggttgaggaagaatttgaaatcattcatcattgttcatccatcttggttcatcagaacaatccttgctgtgacacgaccttttataaggtacagttaatgttgtcataaaataaaagtactactagtagttttaaaaaatatgtactcattgtcctaaaaacaagaattcataaactaagagtacccagggaaatatatttgtctctgtctttcctagaaaggtgctttggactattcatcaagaatcccgaattaagagagaaaatgctgtcatgatgaatatttcccccagatcattataaaacaggacctctaaattgcttgctataaacacggaagatgaagtggtgggattttcatgccacattagaaaggagaatagataataca

SEQ ID NO: 322246 - DNA, 424 bp, Homo sapiens
gatgaagagagatcttataagagaagtgtgagactggatgaagaactgagggaagcatcagaggcagctaaaactagctgcctttacaatgatccagaaatgtcttctatggagaaggatattgacttgaagctgaaagaaaagccttagttggcctctctgtccaccttccagcaaatgtggattagcaagcaagagtacgatgaggcaggcccatccattgtccaccgcaaatgcttgtaagatgccttctctctccatctaccttccagtcaggatgacggcattatgcttattggagtcttccaaaccaccttccctgatctttcatcaatcattgtacagattgtttacacacgtgcaatttgcttgtgcttctaatatttattgctttataaataaaccagaccaggacttgcaacct

SEQ ID NO: 322247 - DNA, 4328 bp, Homo sapiens
agagatcatgtgaccagaaaatggaggcgaatctgtatttccagttaactgctcagaagagagatgctgaagagctgtagtcgtgcatccttctcaccctccgttagaaagcctcctctcatcctcagaagactactgtcagaggatgtaggaatggacatcccctttgaagagggcgtgctgagtcccagtgctgcagacatgaggcctgaacctcctaattctctggatcttaatgacactcatcctcggagaatcaagctcacagccccaaatatcaatctttctctggaccaaagtgaaggatctattctctctgatgataacttggacagtccagatgaaattgacatcaatgtggatgaacttgatacccccgatgaagcagattcttttgagtacactggccatgaagatcccacagccaacaaagattctggccaagagtcagagtctattccagaatatacggccgaagaggaacgggaggacaaccggctttggaggacagtggtcattggagaacaagagcagcgcattgacatgaaggtcatcgagccctacaggagagtcatttctcacggaggagattcaggatactatggggacggtctaaatgccatcattgtgtttgccgcctgttttctgccagacagcagtcgggcggattaccactatgtcatggaaaatcttttcctatatgtaataagtactttagagttgatggtagctgaagactatatgattgtgtacttgaatggtgcaaccccaagaaggaggatgccagggctaggctggatgaagaaatgctaccagatgattgacagacggttgaggaagaatttgaaatcattcatcattgttcatccatcttggttcatcagaacaatccttgctgtgacacgaccttttataagttcaaaattcagcagtaaaattaaatatgtcaatagcttatcagaactcagtgggctgatcccaatggattgcatccacattccagagagcatcatcaaactggatgaagaactgagggaagcatcagaggcagctaaaactagctgcctttacaatgatccagaaatgtcttctatggagaaggatattgacttgaagctgaaagaaaagccttagttggccatgctggaagaagaggatgcttttctggttcatggttctgttgaaacatatctacctgaaagagacagggctgatgttacctttttccactttgcactacctggtgccattctaaatttctaaggggaaaaatagaaagtttgtttactcttaagatattttatgaaattgtgtgtactttcctattttgccaattatgtgcctcaaagattttagttgagccttagcaagaaagtaggaccttccatttcaatacttcattaacacggtgtagtgatactttgtcccttagactggtgtttaccagtaagatacctttaatccactgttaagtatgagtggatttgtttccatagattagctggatttccttttggtgattgcattaggtttaaagtacacaggtctcaactctccccaggaaagtttcccctgtttgactccacctttaaaatcctaagcctgactaggacagccacaaaccacacaaggtgtaaaaccatcatcagctaagtgcccgttttgttcttgtttaccagaatctcctttaacttctcaaagggaagccgggctttctaatccacgtcaactttattttagttgtcaaattgggcattatattttatgtaaattggtcttttaacatcattttcctgatgaatgttggtgaccaccacattgtgaaatttaagaatccgtgttgcatgtttggtagctctctgagtttcaggccataaactcagctccagaggttaccttttaagtgccaagaactcaagtgcaaggtggcctactcaaaaatcatttggtagcattcagttattcatgaattcctctctcgcatgcattataaaaagtgatctgctttaaaacaccgtaatctgatcataggcttaaaattaaatatgagtattactttcatgtacaaaatatttcctttatagtcttcatatgccctttaaaatgccaacaagatttcaagtctgtaggcctctagtgaggtggggtggcaaaccacagctaagtctcgctcaccactgcaagctaagaatggtttttacattttgggttggaaaaattttttttgaatatttcatgacacatgaaaattattcaaatgttagtgccgataaataaagtggtactgaaacacagccacacaaacttgtttttgtactgtctacagctactttcacactacagccgcagagctgagcagttcagcagaccgtatgtcccacaatgcctaaaacattgactatgtttacagaaaaagtttgctgacccctgctctagcaaacgcatcctttcctactccaccccaatttgtatttagatagtttctctaacagaacggacaaatgaggctgcaaactaatttatttttgtcaaaaatcaatgttttgacatccacagacagtgaaataaaagaaatggcttgctgaaaaacatgaggagtcctagccacaaaatcactgcttaggttgcaattgccaaaatgaagccttcttagaagcacttctttagtatatacaggtgttggctgaagtccgtgcctcactctgggaaccattcttagtctccagtgtctcctattacaaagaagctggcagaaataaaaatgaaggggtgagagcggttccaccctagtctcatggtggaaaattcattggggagagctgtccaggatatttggagtcctgggtagaaggagcttgtaactactttaaagtcgacatctttgcacaggtgattgagtttctctgacctcattgcttcacctctgtctcctcccgtccttccgcacgtgcccacacacacgcagttcagccctctttcctccataagcctccatcgttttctcttttctcctcttgatcctttcaagcgagtatcttgttgaattgtatgttctgttggatctcctccttcataacatctggcttgttggacagaaaaaccctacagcccaccccctcccacagcccacctccacttttgaaagcccaaattacacctctcccagaacacagtgttgacgtaaatacagttacccaatattcctgtttgttcacctatttgctactttcactcagtagcatcccattttgtaaaatgaattccatggtcaccctgtcacaggaagtaatgaaaaatccagtgttcagtgtagtggtgcaaacctgagggcatagagctgttcatagagggctcttgttatagccaaacagacacagcaacaatctcaccatttatatatatatttttaacttgtccagctcatctatggaaaactactcaggtggtatgctgtttgaagcctcatcttcctacatgaaaattatgggcatttgtcccaatgattttgtttcagctgttctgtaggctgcataaccactctgatatttaggtatctgctattttattatcttaaaagacaaattaatttaattgcatgtgctagggaaaagctaccatgtacattcaccccaagtaaatagaatcctagatgaatcctagaaaaataatccctaagcagataggtagacagaggtaaacattcacatgatttagctctctagctcttgcactctgaacattcttgctttggttctgacttctgggaactgctttgcatttctcctatagatctgtagttaagggaaccaaggggtcattggggcaaaagcattgtttctcaaagctccttgattaagagaaagaacagaaatttgcacagaagatagtgtcaaggagtgagaaagtttgtttgagggcagtagctcagtgtggaagaaaatcctgaagtttctgttgaagccatacaatgttctatggggttactctctaagacattctctgaggtgtgtgaggaagtcactactcctagcctttgttaagatgtaattttaaatattcagttatggtactatgtttgcaactctcgtcttatcacaatgcctcagtagtttgttcccttagaaacatttagatgtgcacaaattaatcttttatatatctaaaggtttttctatcatgcattggattgctcagaataaagtgtctgttagacttcgttttggtaaataaattctccataatgtagattaataatataaaagtctttaatgacacaatatatctatatagcctcactgtataattcagaaataaaaattgattctgca

SEQ ID NO: 322248 - DNA, 3694 bp, Homo sapiens
gttgaggtcaacctaatttgcaactgaaacctactaaaccagatacatccctgacttggcccaggctgcaagctaacttgaactgtacccaccagactgacgtggatgttttcagctttattcagccagcatgtttctgatccctttgcaacttatgtctacattttatgaaggaatttgcaaagtaaatgtacataaacactgaatgggaggcaatgacaacatatttaatggaaggagtacgtctcagggctccagaagacagtttcgaaaagcacatatgcaccactttcatttggccctgctttgctgagtgactgtctcatgctgtgcttgcttctcttttgtttcttttccacaccaataatttttgctcctgcagactggatgaagaactgagggaagcatcagaggcagctaaaactagctgcctttacaatgatccagaaatgtcttctatggagaaggatattgacttgaagctgaaagaaaagccttagttggccatgctggaagaagaggatgcttttctggttcatggttctgttgaaacatatctacctgaaagagacagggctgatgttacctttttccactttgcactacctggtgccattctaaatttctaaggggaaaaatagaaagtttgtttactcttaagatattttatgaaattgtgtgtactttcctattttgccaattatgtgcctcaaagattttagttgagccttagcaagaaagtaggaccttccatttcaatacttcattaacacggtgtagtgatactttgtcccttagactggtgtttaccagtaagatacctttaatccactgttaagtatgagtggatttgtttccatagattagctggatttccttttggtgattgcattaggtttaaagtacacaggtctcaactctccccaggaaagtttcccctgtttgactccacctttaaaatcctaagcctgactaggacagccacaaaccacacaaggtgtaaaaccatcatcagctaagtgcccgttttgttcttgtttaccagaatctcctttaacttctcaaagggaagccgggctttctaatccacgtcaactttattttagttgtcaaattgggcattatattttatgtaaattggtcttttaacatcattttcctgatgaatgttggtgaccaccacattgtgaaatttaagaatccgtgttgcatgtttggtagctctctgagtttcaggccataaactcagctccagaggttaccttttaagtgccaagaactcaagtgcaaggtggcctactcaaaaatcatttggtagcattcagttattcatgaattcctctctcgcatgcattataaaaagtgatctgctttaaaacaccgtaatctgatcataggcttaaaattaaatatgagtattactttcatgtacaaaatatttcctttatagtcttcatatgccctttaaaatgccaacaagatttcaagtctgtaggcctctagtgaggtggggtggcaaaccacagctaagtctcgctcaccactgcaagctaagaatggtttttacattttgggttggaaaaattttttttgaatatttcatgacacatgaaaattattcaaatgttagtgccgataaataaagtggtactgaaacacagccacacaaacttgtttttgtactgtctacagctactttcacactacagccgcagagctgagcagttcagcagaccgtatgtcccacaatgcctaaaacattgactatgtttacagaaaaagtttgctgacccctgctctagcaaacgcatcctttcctactccaccccaatttgtatttagatagtttctctaacagaacggacaaatgaggctgcaaactaatttatttttgtcaaaaatcaatgttttgacatccacagacagtgaaataaaagaaatggcttgctgaaaaacatgaggagtcctagccacaaaatcactgcttaggttgcaattgccaaaatgaagccttcttagaagcacttctttagtatatacaggtgttggctgaagtccgtgcctcactctgggaaccattcttagtctccagtgtctcctattacaaagaagctggcagaaataaaaatgaaggggtgagagcggttccaccctagtctcatggtggaaaattcattggggagagctgtccaggatatttggagtcctgggtagaaggagcttgtaactactttaaagtcgacatctttgcacaggtgattgagtttctctgacctcattgcttcacctctgtctcctcccgtccttccgcacgtgcccacacacacgcagttcagccctctttcctccataagcctccatcgttttctcttttctcctcttgatcctttcaagcgagtatcttgttgaattgtatgttctgttggatctcctccttcataacatctggcttgttggacagaaaaaccctacagcccaccccctcccacagcccacctccacttttgaaagcccaaattacacctctcccagaacacagtgttgacgtaaatacagttacccaatattcctgtttgttcacctatttgctactttcactcagtagcatcccattttgtaaaatgaattccatggtcaccctgtcacaggaagtaatgaaaaatccagtgttcagtgtagtggtgcaaacctgagggcatagagctgttcatagagggctcttgttatagccaaacagacacagcaacaatctcaccatttatatatatatttttaacttgtccagctcatctatggaaaactactcaggtggtatgctgtttgaagcctcatcttcctacatgaaaattatgggcatttgtcccaatgattttgtttcagctgttctgtaggctgcataaccactctgatatttaggtatctgctattttattatcttaaaagacaaattaatttaattgcatgtgctagggaaaagctaccatgtacattcaccccaagtaaatagaatcctagatgaatcctagaaaaataatccctaagcagataggtagacagaggtaaacattcacatgatttagctctctagctcttgcactctgaacattcttgctttggttctgacttctgggaactgctttgcatttctcctatagatctgtagttaagggaaccaaggggtcattggggcaaaagcattgtttctcaaagctccttgattaagagaaagaacagaaatttgcacagaagatagtgtcaaggagtgagaaagtttgtttgagggcagtagctcagtgtggaagaaaatcctgaagtttctgttgaagccatacaatgttctatggggttactctctaagacattctctgaggtgtgtgaggaagtcactactcctagcctttgttaagatgtaattttaaatattcagttatggtactatgtttgcaactctcgtcttatcacaatgcctcagtagtttgttcccttagaaacatttagatgtgcacaaattaatcttttatatatctaaaggtttttctatcatgcattggattgctcagaataaagtgtctgttagacttcgttttggtaaataaattctccataatgtagattaataatataaaagtctttaatgacacaatatatctatatagcctcactgtataattcagaaataaaaattgattctgca

SEQ ID NO: 322249 - DNA, 3372 bp, Homo sapiens
gatttttctattataagaaacttgcatgatttaaatattttcagtatgtcctttgaggaaaaaagcaaacacagtgctacccaaatcattactaaatgtctctcatttggtttctcatgtttctctctctttttcttttctttgcagtattgacttgaagctgaaagaaaagccttagttggccatgctggaagaagaggatgcttttctggttcatggttctgttgaaacatatctacctgaaagagacagggctgatgttacctttttccactttgcactacctggtgccattctaaatttctaaggggaaaaatagaaagtttgtttactcttaagatattttatgaaattgtgtgtactttcctattttgccaattatgtgcctcaaagattttagttgagccttagcaagaaagtaggaccttccatttcaatacttcattaacacggtgtagtgatactttgtcccttagactggtgtttaccagtaagatacctttaatccactgttaagtatgagtggatttgtttccatagattagctggatttccttttggtgattgcattaggtttaaagtacacaggtctcaactctccccaggaaagtttcccctgtttgactccacctttaaaatcctaagcctgactaggacagccacaaaccacacaaggtgtaaaaccatcatcagctaagtgcccgttttgttcttgtttaccagaatctcctttaacttctcaaagggaagccgggctttctaatccacgtcaactttattttagttgtcaaattgggcattatattttatgtaaattggtcttttaacatcattttcctgatgaatgttggtgaccaccacattgtgaaatttaagaatccgtgttgcatgtttggtagctctctgagtttcaggccataaactcagctccagaggttaccttttaagtgccaagaactcaagtgcaaggtggcctactcaaaaatcatttggtagcattcagttattcatgaattcctctctcgcatgcattataaaaagtgatctgctttaaaacaccgtaatctgatcataggcttaaaattaaatatgagtattactttcatgtacaaaatatttcctttatagtcttcatatgccctttaaaatgccaacaagatttcaagtctgtaggcctctagtgaggtggggtggcaaaccacagctaagtctcgctcaccactgcaagctaagaatggtttttacattttgggttggaaaaattttttttgaatatttcatgacacatgaaaattattcaaatgttagtgccgataaataaagtggtactgaaacacagccacacaaacttgtttttgtactgtctacagctactttcacactacagccgcagagctgagcagttcagcagaccgtatgtcccacaatgcctaaaacattgactatgtttacagaaaaagtttgctgacccctgctctagcaaacgcatcctttcctactccaccccaatttgtatttagatagtttctctaacagaacggacaaatgaggctgcaaactaatttatttttgtcaaaaatcaatgttttgacatccacagacagtgaaataaaagaaatggcttgctgaaaaacatgaggagtcctagccacaaaatcactgcttaggttgcaattgccaaaatgaagccttcttagaagcacttctttagtatatacaggtgttggctgaagtccgtgcctcactctgggaaccattcttagtctccagtgtctcctattacaaagaagctggcagaaataaaaatgaaggggtgagagcggttccaccctagtctcatggtggaaaattcattggggagagctgtccaggatatttggagtcctgggtagaaggagcttgtaactactttaaagtcgacatctttgcacaggtgattgagtttctctgacctcattgcttcacctctgtctcctcccgtccttccgcacgtgcccacacacacgcagttcagccctctttcctccataagcctccatcgttttctcttttctcctcttgatcctttcaagcgagtatcttgttgaattgtatgttctgttggatctcctccttcataacatctggcttgttggacagaaaaaccctacagcccaccccctcccacagcccacctccacttttgaaagcccaaattacacctctcccagaacacagtgttgacgtaaatacagttacccaatattcctgtttgttcacctatttgctactttcactcagtagcatcccattttgtaaaatgaattccatggtcaccctgtcacaggaagtaatgaaaaatccagtgttcagtgtagtggtgcaaacctgagggcatagagctgttcatagagggctcttgttatagccaaacagacacagcaacaatctcaccatttatatatatatttttaacttgtccagctcatctatggaaaactactcaggtggtatgctgtttgaagcctcatcttcctacatgaaaattatgggcatttgtcccaatgattttgtttcagctgttctgtaggctgcataaccactctgatatttaggtatctgctattttattatcttaaaagacaaattaatttaattgcatgtgctagggaaaagctaccatgtacattcaccccaagtaaatagaatcctagatgaatcctagaaaaataatccctaagcagataggtagacagaggtaaacattcacatgatttagctctctagctcttgcactctgaacattcttgctttggttctgacttctgggaactgctttgcatttctcctatagatctgtagttaagggaaccaaggggtcattggggcaaaagcattgtttctcaaagctccttgattaagagaaagaacagaaatttgcacagaagatagtgtcaaggagtgagaaagtttgtttgagggcagtagctcagtgtggaagaaaatcctgaagtttctgttgaagccatacaatgttctatggggttactctctaagacattctctgaggtgtgtgaggaagtcactactcctagcctttgttaagatgtaattttaaatattcagttatggtactatgtttgcaactctcgtcttatcacaatgcctcagtagtttgttcccttagaaacatttagatgtgcacaaattaatcttttatatatctaaaggtttttctatcatgcattggattgctcagaataaagtgtctgttagacttcgttttggtaaataaattctccataatgtagattaataatataaaagtctttaatgacacaatatatctatatagcctcactgtataattcagaaataaaaattgattctgca

SEQ ID NO: 322250 - DNA, 5599 bp, Homo sapiens
gctttgtttgatggtgatccacatttatccacagagaatcctgccttggttcctgatgctttgctagcctcagacacttgtctggatataagcgaagctgcctttgaccacagtttcagcgatgcctcaggtctcaacacatccacgggaacaatagatgacatgagtaaactgacattatccgaaggccatccggaaacgccagttgatggggacctagggaagcaagatatctgctcatctgaagcctcgtggggtgattttgaatatgatgtaatgggccagaatatcgatgaagatttactgagagagcctgaacacttcctgtatggtggtgaccctcctttggaggaagattctctgaagcagtcgctggcaccgtacacacctccctttgatttgtcttatctcacagaacctgcccagagtgctgaaacaatagaggaagctgggtctccagaggatgaatctctgggatgcagagcagcagagatagtgctttctgcacttcctgatcgaagaagtgagggaaaccaggctgagaccaaaaacagactgcctggatcccagctggctgtgctgcatattcgtgaagaccctgagtccgtttatttgccggtaggagcaggctccaacattttgtctccatcaaacgttgactgggaagtagaaacagataattctgatttaccagcaggtggagacataggaccaccaaatggtgccagcaaggaaataccagaattggaagaagaaaaaacaattcctaccaaagagcctgagcagataaaatcagaatacaaggaagaaagatgtacagagaagaatgaagatcgtcatgcactacacatggattacatacttgtaaaccgtgaagaaaattcacactcaaagccagagacctgtgaagaaagagaaagcatagctgaattagaattgtatgtaggttccaaagaaacagggctgcagggaactcagttagcaagcttcccagacacatgtcagccagcctccttaaatgaaagaaaaggtctctctgcagagaaaatgtcttctaaaggcgatacgagatcatcttttgaaagccctgcacaagaccagagttggatgttcttgggccatagtgaggttggtgatccatcactggatgccagggactcagggcctgggtggtctggcaagactgtggagccgttctctgaactcggcttgggtgagggtccccagctgcagattctggaagaaatgaagcctctagaatctttagcactagaggaagcctctggtccagtcagccaatcacagaagagtaagagccgaggcagggctggcccggatgcagttacccatgacaatgaatgggaaatgctttcaccacagcctgttcagaaaaacatgatccctgacacggaaatggaggaggagacagagttccttgagctcggaaccaggatatcaagaccaaatggactactgtcagaggatgtaggaatggacatcccctttgaagagggcgtgctgagtcccagtgctgcagacatgaggcctgaacctcctaattctctggatcttaatgacactcatcctcggagaatcaagctcacagccccaaatatcaatctttctctggaccaaagtgaaggatctattctctctgatgataacttggacagtccagatgaaattgacatcaatgtggatgaacttgatacccccgatgaagcagattcttttgagtacactggccatgaagatcccacagccaacaaagattctggccaagagtcagagtctattccagaatatacggccgaagaggaacgggaggacaaccggctttggaggacagtggtcattggagaacaagagcagcgcattgacatgaaggtcatcgagccctacaggagagtcatttctcacggaggagattcaggatactatggggacggtctaaatgccatcattgtgtttgccgcctgttttctgccagacagcagtcgggcggattaccactatgtcatggaaaatcttttcctatatgtaataagtactttagagttgatggtagctgaagactatatgattgtgtacttgaatggtgcaaccccaagaaggaggatgccagggctaggctggatgaagaaatgctaccagatgattgacagacggttgaggaagaatttgaaatcattcatcattgttcatccatcttggttcatcagaacaatccttgctgtgacacgaccttttataagttcaaaattcagcagtaaaattaaatatgtcaatagcttatcagaactcagtgggctgatcccaatggattgcatccacattccagagagcatcatcaaactggatgaagaactgagggaagcatcagaggcagctaaaactagctgcctttacaatgatccagaaatgtcttctatggagaaggatattgacttgaagctgaaagaaaagccttagttggccatgctggaagaagaggatgcttttctggttcatggttctgttgaaacatatctacctgaaagagacagggctgatgttacctttttccactttgcactacctggtgccattctaaatttctaaggggaaaaatagaaagtttgtttactcttaagatattttatgaaattgtgtgtactttcctattttgccaattatgtgcctcaaagattttagttgagccttagcaagaaagtaggaccttccatttcaatacttcattaacacggtgtagtgatactttgtcccttagactggtgtttaccagtaagatacctttaatccactgttaagtatgagtggatttgtttccatagattagctggatttccttttggtgattgcattaggtttaaagtacacaggtctcaactctccccaggaaagtttcccctgtttgactccacctttaaaatcctaagcctgactaggacagccacaaaccacacaaggtgtaaaaccatcatcagctaagtgcccgttttgttcttgtttaccagaatctcctttaacttctcaaagggaagccgggctttctaatccacgtcaactttattttagttgtcaaattgggcattatattttatgtaaattggtcttttaacatcattttcctgatgaatgttggtgaccaccacattgtgaaatttaagaatccgtgttgcatgtttggtagctctctgagtttcaggccataaactcagctccagaggttaccttttaagtgccaagaactcaagtgcaaggtggcctactcaaaaatcatttggtagcattcagttattcatgaattcctctctcgcatgcattataaaaagtgatctgctttaaaacaccgtaatctgatcataggcttaaaattaaatatgagtattactttcatgtacaaaatatttcctttatagtcttcatatgccctttaaaatgccaacaagatttcaagtctgtaggcctctagtgaggtggggtggcaaaccacagctaagtctcgctcaccactgcaagctaagaatggtttttacattttgggttggaaaaattttttttgaatatttcatgacacatgaaaattattcaaatgttagtgccgataaataaagtggtactgaaacacagccacacaaacttgtttttgtactgtctacagctactttcacactacagccgcagagctgagcagttcagcagaccgtatgtcccacaatgcctaaaacattgactatgtttacagaaaaagtttgctgacccctgctctagcaaacgcatcctttcctactccaccccaatttgtatttagatagtttctctaacagaacggacaaatgaggctgcaaactaatttatttttgtcaaaaatcaatgttttgacatccacagacagtgaaataaaagaaatggcttgctgaaaaacatgaggagtcctagccacaaaatcactgcttaggttgcaattgccaaaatgaagccttcttagaagcacttctttagtatatacaggtgttggctgaagtccgtgcctcactctgggaaccattcttagtctccagtgtctcctattacaaagaagctggcagaaataaaaatgaaggggtgagagcggttccaccctagtctcatggtggaaaattcattggggagagctgtccaggatatttggagtcctgggtagaaggagcttgtaactactttaaagtcgacatctttgcacaggtgattgagtttctctgacctcattgcttcacctctgtctcctcccgtccttccgcacgtgcccacacacacgcagttcagccctctttcctccataagcctccatcgttttctcttttctcctcttgatcctttcaagcgagtatcttgttgaattgtatgttctgttggatctcctccttcataacatctggcttgttggacagaaaaaccctacagcccaccccctcccacagcccacctccacttttgaaagcccaaattacacctctcccagaacacagtgttgacgtaaatacagttacccaatattcctgtttgttcacctatttgctactttcactcagtagcatcccattttgtaaaatgaattccatggtcaccctgtcacaggaagtaatgaaaaatccagtgttcagtgtagtggtgcaaacctgagggcatagagctgttcatagagggctcttgttatagccaaacagacacagcaacaatctcaccatttatatatatatttttaacttgtccagctcatctatggaaaactactcaggtggtatgctgtttgaagcctcatcttcctacatgaaaattatgggcatttgtcccaatgattttgtttcagctgttctgtaggctgcataaccactctgatatttaggtatctgctattttattatcttaaaagacaaattaatttaattgcatgtgctagggaaaagctaccatgtacattcaccccaagtaaatagaatcctagatgaatcctagaaaaataatccctaagcagataggtagacagaggtaaacattcacatgatttagctctctagctcttgcactctgaacattcttgctttggttctgacttctgggaactgctttgcatttctcctatagatctgtagttaagggaaccaaggggtcattggggcaaaagcattgtttctcaaagctccttgattaagagaaagaacagaaatttgcacagaagatagtgtcaaggagtgagaaagtttgtttgagggcagtagctcagtgtggaagaaaatcctgaagtttctgttgaagccatacaatgttctatggggttactctctaagacattctctgaggtgtgtgaggaagtcactactcctagcctttgttaagatgtaattttaaatattcagttatggtactatgtttgcaactctcgtcttatctacaggcccagagatgggccccttaaacttttatatggccacttaccttataaccagagggaccacacggatgtcccaaaaagggctgaccctggagaaacccacccagagcaaaacaacccacgcaccaatacccgcacagaccgctccacaggggcgccctctcc

SEQ ID NO: 322251 - DNA, 2404 bp, Homo sapiens
gctttgtttgatggtgatccacatttatccacagagaatcctgccttggttcctgatgctttgctagcctcagacacttgtctggatataagcgaagctgcctttgaccacagtttcagcgatgcctcaggtctcaacacatccacgggaacaatagatgacatgagtaaactgacattatccgaaggccatccggaaacgccagttgatggggacctagggaagcaagatatctgctcatctgaagcctcgtggggtgattttgaatatgatgtaatgggccagaatatcgatgaagatttactgagagagcctgaacacttcctgtatggtggtgaccctcctttggaggaagattctctgaagcagtcgctggcaccgtacacacctccctttgatttgtcttatctcacagaacctgcccagagtgctgaaacaatagaggaagctgggtctccagaggatgaatctctgggatgcagagcagcagagatagtgctttctgcacttcctgatcgaagaagtgagggaaaccaggctgagaccaaaaacagactgcctggatcccagctggctgtgctgcatattcgtgaagaccctgagtccgtttatttgccggtaggagcaggctccaacattttgtctccatcaaacgttgactgggaagtagaaacagataattctgatttaccagcaggtggagacataggaccaccaaatggtgccagcaaggaaataccagaattggaagaagaaaaaacaattcctaccaaagagcctgagcagataaaatcagaatacaaggaagaaagatgtacagagaagaatgaagatcgtcatgcactacacatggattacatacttgtaaaccgtgaagaaaattcacactcaaagccagagacctgtgaagaaagagaaagcatagctgaattagaattgtatgtaggttccaaagaaacagggctgcagggaactcagttagcaagcttcccagacacatgtcagccagcctccttaaatgaaagaaaaggtctctctgcagagaaaatgtcttctaaaggcgatacgagatcatcttttgaaagccctgcacaagaccagagttggatgttcttgggccatagtgaggttggtgatccatcactggatgccagggactcagggcctgggtggtctggcaagactgtggagccgttctctgaactcggcttgggtgagggtccccagctgcagattctggaagaaatgaagcctctagaatctttagcactagaggaagcctctggtccagtcagccaatcacagaagagtaagagccgaggcagggctggcccggatgcagttacccatgacaatgaatgggaaatgctttcaccacagcctgttcagaaaaacatgatccctgacacggaaatggaggaggagacagagttccttgagctcggaaccaggatatcaagaccaaatggactactgtcagaggatgtaggaatggacatcccctttgaagagggcgtgctgagtcccagtgctgcagacatgaggcctgaacctcctaattctctggatcttaatgacactcatcctcggagaatcaagctcacagccccaaatatcaatctttctctggaccaaagtgaaggatctattctctctgatgataacttggacagtccagatgaaattgacatcaatgtggatgaacttgatacccccgatgaagcagattcttttgagtacactggccatggtaagtcactaagttggcaaggccaaagttaaatgctaaataagtaaaagattttctaacagacctctcatttttgtgccagtggatcctttttgtgatttctagaagcttctgtttttatttcaggttataggtggccatgattgacagtttggagcctgacagagaaagtatgggtcacagaggccatacataaccattgctctttattaacccccactctgtgctagcatttatgctaggcactggggctgagggaagactgttacatgctgtgttacaagaaacctggggctgggtttgcaggggaagagaatttaatcaggatgataaaatttgaagaagagaaatcagagcttgccaatttcttgtataagttcccactatctgcaatgttcttttccccagatccttacgtgactgactccttctctttattcagatgttaatcagatgtcacctcctcagagaagtcttccttgacctctgtaatcaaagatgcttcccacttcccgactcccaccacctagtcactctctgtcccagtgttcattttattttccacgtatcactaattcaaattgtattatttaactatttgtttgcatctttattgtctttctcttaccactcgaatgtatgctccacaggagc

SEQ ID NO: 322252 - DNA, 2085 bp, Homo sapiens
gctttgtttgatggtgatccacatttatccacagagaatcctgccttggttcctgatgctttgctagcctcagacacttgtctggatataagcgaagctgcctttgaccacagtttcagcgatgcctcaggtctcaacacatccacgggaacaatagatgacatgagtaaactgacattatccgaaggccatccggaaacgccagttgatggggacctagggaagcaagatatctgctcatctgaagcctcgtggggtgattttgaatatgatgtaatgggccagaatatcgatgaagatttactgagagagcctgaacacttcctgtatggtggtgaccctcctttggaggaagattctctgaagcagtcgctggcaccgtacacacctccctttgatttgtcttatctcacagaacctgcccagagtgctgaaacaatagaggaagctgggtctccagaggatgaatctctgggatgcagagcagcagagatagtgctttctgcacttcctgatcgaagaagtgagggaaaccaggctgagaccaaaaacagactgcctggatcccagctggctgtgctgcatattcgtgaagaccctgagtccgtttatttgccggtaggagcaggctccaacattttgtctccatcaaacgttgactgggaagtagaaacagataattctgatttaccagcaggtggagacataggaccaccaaatggtgccagcaaggaaataccagaattggaagaagaaaaaacaattcctaccaaagagcctgagcagataaaatcagaatacaaggaagaaagatgtacagagaagaatgaagatcgtcatgcactacacatggattacatacttgtaaaccgtgaagaaaattcacactcaaagccagagacctgtgaagaaagagaaagcatagctgaattagaattgtatgtaggttccaaagaaacagggctgcagggaactcagttagcaagcttcccagacacatgtcagccagcctccttaaatgaaagaaaaggtctctctgcagagaaaatgtcttctaaaggcgatacgagatcatcttttgaaagccctgcacaagaccagagttggatgttcttgggccatagtgaggttggtgatccatcactggatgccagggactcagggcctgggtggtctggcaagactgtggagccgttctctgaactcggcttgggtgagggtccccagctgcagattctggaagaaatgaagcctctagaatctttagcactagaggaagcctctggtccagtcagccaatcacagaagagtaagagccgaggcagggctggcccggatgcagttacccatgacaatgaatgggaaatgctttcaccacagcctgttcagaaaaacatgatccctgacacggaaatggaggaggagacagagttccttgagctcggaaccaggatatcaagaccaaatggactactgtcagaggatgtaggaatggacatcccctttgaagagggcgtgctgagtcccagtgctgcagacatgaggcctgaacctcctaattctctggatcttaatgacactcatcctcggagaatcaagctcacagccccaaatatcaatctttctctggaccaaagtgaaggatctattctctctgatgataacttggacagtccagatgaaattgacatcaatgtggatgaacttgatacccccgatgaagcagattcttttgagtacactggccatgaagatcccacagccaacaaagattctggccaagagtcagagtctattccagaatatacggccgaagaggaacgggaggacaaccggctttggaggacagtggtcattggagaacaagagcagcgcattgacatgaaggtcatcgagccctacaggagagtcatttctcacggaggagattcaggatactatggggacggtctaaatgccatcattgtgtttgccgcctgttttctgccagacagcagtcgggcggattaccactatgtcatggaaaatcttttcctatactgtcataagtactttagagctgtgggtgcacagatcctctagagc

SEQ ID NO: 322253 - DNA, 5666 bp, Homo sapiens
gctttgtttgatggtgatccacatttatccacagagaatcctgccttggttcctgatgctttgctagcctcagacacttgtctggatataagcgaagctgcctttgaccacagtttcagcgatgcctcaggtctcaacacatccacgggaacaatagatgacatgagtaaactgacattatccgaaggccatccggaaacgccagttgatggggacctagggaagcaagatatctgctcatctgaagcctcgtggggtgattttgaatatgatgtaatgggccagaatatcgatgaagatttactgagagagcctgaacacttcctgtatggtggtgaccctcctttggaggaagattctctgaagcagtcgctggcaccgtacacacctccctttgatttgtcttatctcacagaacctgcccagagtgctgaaacaatagaggaagctgggtctccagaggatgaatctctgggatgcagagcagcagagatagtgctttctgcacttcctgatcgaagaagtgagggaaaccaggctgagaccaaaaacagactgcctggatcccagctggctgtgctgcatattcgtgaagaccctgagtccgtttatttgccggtaggagcaggctccaacattttgtctccatcaaacgttgactgggaagtagaaacagataattctgatttaccagcaggtggagacataggaccaccaaatggtgccagcaaggaaataccagaattggaagaagaaaaaacaattcctaccaaagagcctgagcagataaaatcagaatacaaggaagaaagatgtacagagaagaatgaagatcgtcatgcactacacatggattacatacttgtaaaccgtgaagaaaattcacactcaaagccagagacctgtgaagaaagagaaagcatagctgaattagaattgtatgtaggttccaaagaaacagggctgcagggaactcagttagcaagcttcccagacacatgtcagccagcctccttaaatgaaagaaaaggtctctctgcagagaaaatgtcttctaaaggcgatacgagatcatcttttgaaagccctgcacaagaccagagttggatgttcttgggccatagtgaggttggtgatccatcactggatgccagggactcagggcctgggtggtctggcaagactgtggagccgttctctgaactcggcttgggtgagggtccccagctgcagattctggaagaaatgaagcctctagaatctttagcactagaggaagcctctggtccagtcagccaatcacagaagagtaagagccgaggcagggctggcccggatgcagttacccatgacaatgaatgggaaatgctttcaccacagcctgttcagaaaaacatgatccctgacacggaaatggaggaggagacagagttccttgagctcggaaccaggatatcaagaccaaatggactactgtcagaggatgtaggaatggacatcccctttgaagagggcgtgctgagtcccagtgctgcagacatgaggcctgaacctcctaattctctggatcttaatgacactcatcctcggagaatcaagctcacagccccaaatatcaatctttctctggaccaaagtgaaggatctattctctctgatgataacttggacagtccagatgaaattgacatcaatgtggatgaacttgatacccccgatgaagcagattcttttgagtacactggccatgaagatcccacagccaacaaagattctggccaagagtcagagtctattccagaatatacggccgaagaggaacgggaggacaaccggctttggaggacagtggtcattggagaacaagagcagcgcattgacatgaaggtcatcgagccctacaggagagtcatttctcacggaggagattcaggatactatggggacggtctaaatgccatcattgtgtttgccgcctgttttctgccagacagcagtcgggcggattaccactatgtcatggaaaatcttttcctatatgtaataagtactttagagttgatggtagctgaagactatatgattgtgtacttgaatggtgcaaccccaagaaggaggatgccagggctaggctggatgaagaaatgctaccagatgattgacagacggttgaggaagaatttgaaatcattcatcattgttcatccatcttggttcatcagaacaatccttgctgtgacacgaccttttataagttcaaaattcagcagtaaaattaaatatgtcaatagcttatcagaactcagtgggctgatcccaatggattgcatccacattccagagagcatcatcaaactggatgaagaactgagggaagcatcagaggcagctaaaactagctgcctttacaatgatccagaaatgtcttctatggagaaggatattgacttgaagctgaaagaaaagccttagttggccatgctggaagaagaggatgcttttctggttcatggttctgttgaaacatatctacctgaaagagacagggctgatgttacctttttccactttgcactacctggtgccattctaaatttctaaggggaaaaatagaaagtttgtttactcttaagatattttatgaaattgtgtgtactttcctattttgccaattatgtgcctcaaagattttagttgagccttagcaagaaagtaggaccttccatttcaatacttcattaacacggtgtagtgatactttgtcccttagactggtgtttaccagtaagatacctttaatccactgttaagtatgagtggatttgtttccatagattagctggatttccttttggtgattgcattaggtttaaagtacacaggtctcaactctccccaggaaagtttcccctgtttgactccacctttaaaatcctaagcctgactaggacagccacaaaccacacaaggtgtaaaaccatcatcagctaagtgcccgttttgttcttgtttaccagaatctcctttaacttctcaaagggaagccgggctttctaatccacgtcaactttattttagttgtcaaattgggcattatattttatgtaaattggtcttttaacatcattttcctgatgaatgttggtgaccaccacattgtgaaatttaagaatccgtgttgcatgtttggtagctctctgagtttcaggccataaactcagctccagaggttaccttttaagtgccaagaactcaagtgcaaggtggcctactcaaaaatcatttggtagcattcagttattcatgaattcctctctcgcatgcattataaaaagtgatctgctttaaaacaccgtaatctgatcataggcttaaaattaaatatgagtattactttcatgtacaaaatatttcctttatagtcttcatatgccctttaaaatgccaacaagatttcaagtctgtaggcctctagtgaggtggggtggcaaaccacagctaagtctcgctcaccactgcaagctaagaatggtttttacattttgggttggaaaaattttttttgaatatttcatgacacatgaaaattattcaaatgttagtgccgataaataaagtggtactgaaacacagccacacaaacttgtttttgtactgtctacagctactttcacactacagccgcagagctgagcagttcagcagaccgtatgtcccacaatgcctaaaacattgactatgtttacagaaaaagtttgctgacccctgctctagcaaacgcatcctttcctactccaccccaatttgtatttagatagtttctctaacagaacggacaaatgaggctgcaaactaatttatttttgtcaaaaatcaatgttttgacatccacagacagtgaaataaaagaaatggcttgctgaaaaacatgaggagtcctagccacaaaatcactgcttaggttgcaattgccaaaatgaagccttcttagaagcacttctttagtatatacaggtgttggctgaagtccgtgcctcactctgggaaccattcttagtctccagtgtctcctattacaaagaagctggcagaaataaaaatgaaggggtgagagcggttccaccctagtctcatggtggaaaattcattggggagagctgtccaggatatttggagtcctgggtagaaggagcttgtaactactttaaagtcgacatctttgcacaggtgattgagtttctctgacctcattgcttcacctctgtctcctcccgtccttccgcacgtgcccacacacacgcagttcagccctctttcctccataagcctccatcgttttctcttttctcctcttgatcctttcaagcgagtatcttgttgaattgtatgttctgttggatctcctccttcataacatctggcttgttggacagaaaaaccctacagcccaccccctcccacagcccacctccacttttgaaagcccaaattacacctctcccagaacacagtgttgacgtaaatacagttacccaatattcctgtttgttcacctatttgctactttcactcagtagcatcccattttgtaaaatgaattccatggtcaccctgtcacaggaagtaatgaaaaatccagtgttcagtgtagtggtgcaaacctgagggcatagagctgttcatagagggctcttgttatagccaaacagacacagcaacaatctcaccatttatatatatatttttaacttgtccagctcatctatggaaaactactcaggtggtatgctgtttgaagcctcatcttcctacatgaaaattatgggcatttgtcccaatgattttgtttcagctgttctgtaggctgcataaccactctgatatttaggtatctgctattttattatcttaaaagacaaattaatttaattgcatgtgctagggaaaagctaccatgtacattcaccccaagtaaatagaatcctagatgaatcctagaaaaataatccctaagcagataggtagacagaggtaaacattcacatgatttagctctctagctcttgcactctgaacattcttgctttggttctgacttctgggaactgctttgcatttctcctatagatctgtagttaagggaaccaaggggtcattggggcaaaagcattgtttctcaaagctccttgattaagagaaagaacagaaatttgcacagaagatagtgtcaaggagtgagaaagtttgtttgagggcagtagctcagtgtggaagaaaatcctgaagtttctgttgaagccatacaatgttctatggggttactctctaagacattctctgaggtgtgtgaggaagtcactactcctagcctttgttaagatgtaattttaaatattcagttatggtactatgtttgcaactctcgtcttatcacaatgcctcagtagtttgttcccttagaaacatttagatgtgcacaaattaatcttttatatatctaaaggtttttctatcatgcattggattgctcagaataaagtgtctgttagacttcgttttggtaaataaattctccataatgtagattaataatataaaagtctttaatgacacaatatatctatatagcctcactgtataattcagaaataaaaattgattctgca

SEQ ID NO: 322254 - DNA, 453 bp, Homo sapiens
tcagttaataaaagaagacttcattgagtgtactttatatggtcaggatagtgctaagctctgtaaaggctgtacaaaacaaggactttgatcaggttgtttctgcaggatgaaacaaaacaaaggctgcccgtaggagtactgtattgtaaagcttaccatttggctgtttagctgcactgtggaggtcttgctccttcagccttgctctgtgctttgtttccagaagatcccacagccaacaaagattctggccaagagtcagagtctattccagaatatacggccgaagaggaacgggaggacaaccggctttggaggacagtggtcattggagaacaagagcagcgcattgacatgaaggtcatcgagccctacaggagagtcatttctcacggaggagattcaggagattcaggtaaccttctctgaagtcttgctggacaaatgacc

SEQ ID NO: 322255 - DNA, 2796 bp, Homo sapiens
gctttgtttgatggtgatccacatttatccacagagaatcctgccttggttcctgatgctttgctagcctcagacacttgtctggatataagcgaagctgcctttgaccacagtttcagcgatgcctcaggtctcaacacatccacgggaacaatagatgacatgagtaaactgacattatccgaaggccatccggaaacgccagttgatggggacctagggaagcaagatatctgctcatctgaagcctcgtggggtgattttgaatatgatgtaatgggccagaatatcgatgaagatttactgagagagcctgaacacttcctgtatggtggtgaccctcctttggaggaagattctctgaagcagtcgctggcaccgtacacacctccctttgatttgtcttatctcacagaacctgcccagagtgctgaaacaatagaggaagctgggtctccagaggatgaatctctgggatgcagagcagcagagatagtgctttctgcacttcctgatcgaagaagtgagggaaaccaggctgagaccaaaaacagactgcctggatcccagctggctgtgctgcatattcgtgaagaccctgagtccgtttatttgccggtaggagcaggctccaacattttgtctccatcaaacgttgactgggaagtagaaacagataattctgatttaccagcaggtggagacataggaccaccaaatggtgccagcaaggaaataccagaattggaagaagaaaaaacaattcctaccaaagagcctgagcagataaaatcagaatacaaggaagaaagatgtacagagaagaatgaagatcgtcatgcactacacatggattacatacttgtaaaccgtgaagaaaattcacactcaaagccagagacctgtgaagaaagagaaagcatagctgaattagaattgtatgtaggttccaaagaaacagggctgcagggaactcagttagcaagcttcccagacacatgtcagccagcctccttaaatgaaagaaaaggtctctctgcagagaaaatgtcttctaaaggcgatacgagatcatcttttgaaagccctgcacaagaccagagttggatgttcttgggccatagtgaggttggtgatccatcactggatgccagggactcagggcctgggtggtctggcaagactgtggagccgttctctgaactcggcttgggtgagggtccccagctgcagattctggaagaaatgaagcctctagaatctttagcactagaggaagcctctggtccagtcagccaatcacagaagagtaagagccgaggcagggctggcccggatgcagttacccatgacaatgaatgggaaatgctttcaccacagcctgttcagaaaaacatgatcccgtccttccgcacgtgcccacacacacgcagttcagccctctttcctccataagcctccatcgttttctcttttctcctcttgatcctttcaagcgagtatcttgttgaattgtatgttctgttggatctcctccttcataacatctggcttgttggacagaaaaaccctacagcccaccccctcccacagcccacctccacttttgaaagcccaaattacacctctcccagaacacagtgttgacgtaaatacagttacccaatattcctgtttgttcacctatttgctactttcactcagtagcatcccattttgtaaaatgaattccatggtcaccctgtcacaggaagtaatgaaaaatccagtgttcagtgtagtggtgcaaacctgagggcatagagctgttcatagagggctcttgttatagccaaacagacacagcaacaatctcaccatttatatatatatttttaacttgtccagctcatctatggaaaactactcaggtggtatgctgtttgaagcctcatcttcctacatgaaaattatgggcatttgtcccaatgattttgtttcagctgttctgtaggctgcataaccactctgatatttaggtatctgctattttattatcttaaaagacaaattaatttaattgcatgtgctagggaaaagctaccatgtacattcaccccaagtaaatagaatcctagatgaatcctagaaaaataatccctaagcagataggtagacagaggtaaacattcacatgatttagctctctagctcttgcactctgaacattcttgctttggttctgacttctgggaactgctttgcatttctcctatagatctgtagttaagggaaccaaggggtcattggggcaaaagcattgtttctcaaagctccttgattaagagaaagaacagaaatttgcacagaagatagtgtcaaggagtgagaaagtttgtttgagggcagtagctcagtgtggaagaaaatcctgaagtttctgttgaagccatacaatgttctatggggttactctctaagacattctctgaggtgtgtgaggaagtcactactcctagcctttgttaagatgtaattttaaatattcagttatggtactatgtttgcaactctcgtcttatcacaatgcctcagtagtttgttcccttagaaacatttagatgtgcacaaattaatcttttatatatctaaaggtttttctatcatgcattggattgctcagaataaagtgtctgttagacttcgttttggtaaataaattctccataatgtagattaataatataaaagtctttaatgacacaatatatctatatagcctcactgtataattcagaaataaaaattgattctgca

SEQ ID NO: 322256 - DNA, 2820 bp, Homo sapiens
gctttgtttgatggtgatccacatttatccacagagaatcctgccttggttcctgatgctttgctagcctcagacacttgtctggatataagcgaagctgcctttgaccacagtttcagcgatgcctcaggtctcaacacatccacgggaacaatagatgacatgagtaaactgacattatccgaaggccatccggaaacgccagttgatggggacctagggaagcaagatatctgctcatctgaagcctcgtggggtgattttgaatatgatgtaatgggccagaatatcgatgaagatttactgagagagcctgaacacttcctgtatggtggtgaccctcctttggaggaagattctctgaagcagtcgctggcaccgtacacacctccctttgatttgtcttatctcacagaacctgcccagagtgctgaaacaatagaggaagctgggtctccagaggatgaatctctgggatgcagagcagcagagatagtgctttctgcacttcctgatcgaagaagtgagggaaaccaggctgagaccaaaaacagactgcctggatcccagctggctgtgctgcatattcgtgaagaccctgagtccgtttatttgccggtaggagcaggctccaacattttgtctccatcaaacgttgactgggaagtagaaacagataattctgatttaccagcaggtggagacataggaccaccaaatggtgccagcaaggaaataccagaattggaagaagaaaaaacaattcctaccaaagagcctgagcagataaaatcagaatacaaggaagaaagatgtacagagaagaatgaagatcgtcatgcactacacatggattacatacttgtaaaccgtgaagaaaattcacactcaaagccagagacctgtgaagaaagagaaagcatagctgaattagaattgtatgtaggttccaaagaaacagggctgcagggaactcagttagcaagcttcccagacacatgtcagccagcctccttaaatgaaagaaaaggtctctctgcagagaaaatgtcttctaaaggcgatacgagatcatcttttgaaagccctgcacaagaccagagttggatgttcttgggccatagtgaggttggtgatccatcactggatgccagggactcagggcctgggtggtctggcaagactgtggagccgttctctgaactcggcttgggtgagggtccccagctgcagattctggaagaaatgaagcctctagaatctttagcactagaggaagcctctggtccagtcagccaatcacagaagagtaagagccgaggcagggctggcccggatgcagttacccatgacaatgaatgggaaatgctttcaccacagcctgttcagaaaaacatgatccctgacacggaaatggaggaggagacagagttccttgagctcggaaccaggatatcaagaccaaatggactactgtcagaggatgtaggaatggacatcccctttgaagagggcgtgctgagtcccagtgctgcagacatgaggcctgaacctcctaattctctggatcttaatgacactcatcctcggagaatcaagctcacagccccaaatatcaatctttctctggaccaaagtgaaggatctattctctctgatgataacttggacagtccagatgaaattgacatcaatgtggatgaacttgatacccccgatgaagcagattcttttgagtacactggccatgaagatcccacagccaacaaagattctggccaagagtcagagtctattccagaatatacggccgaagaggaacgggaggacaaccggctttggaggacagtggtcattggagaacaagagcagcgcattgacatgaaggtcatcgagccctacaggagagtcatttctcacggaggagattcaggatactatggggacggtctaaatgccatcattgtgtttgccgcctgttttctgccagacagcagtcgggcggattaccactatgtcatggaaaatcttttcctatatgtaataagtactttagagttgatggtagctgaagactatatgattgtgtacttgaatggtgcaaccccaagaaggaggatgccagggctaggctggatgaagaaatgctaccagatgattgacagacggttgaggaagaatttgaaatcattcatcattgttcatccatcttggttcatcagaacaatccttgctgtgacacgaccttttataagttcaaaattcagcagtaaaattaaatatgtcaatagcttatcagaactcagtgggctgatcccaatggattgcatccacattccagagagcatcatcaaactggatgaagaactgagggaagcatcagaggcagctaaaactagctgcctttacaatgatccagaaatgtcttctatggagaaggagtaagaattcaccatcaataacagctatgtggttacttgtagtgttgtatggctgggctctgaaagaaaacacactgaggactgggtaaaccctgtttagatgttcagctttcctgtgctccattcctgaaattagaaacctgaagctatatttgccagcttcacaccatttcattcacgatcaccccttaaatttctaaaggacaacctgtggacatggcattctatttttccaatccaaaaatgggaagaaaatgaatattaggaccagatgtaagaacatttgggcaagaggaatgcaattctgctttctgaatgacatcatctctattttaattagtggaagttgggaacttccatttaatactttggtggatgg

SEQ ID NO: 322257 - DNA, 2558 bp, Homo sapiens
gctttgtttgatggtgatccacatttatccacagagaatcctgccttggttcctgatgctttgctagcctcagacacttgtctggatataagcgaagctgcctttgaccacagtttcagcgatgcctcaggtctcaacacatccacgggaacaatagatgacatgagtaaactgacattatccgaaggccatccggaaacgccagttgatggggacctagggaagcaagatatctgctcatctgaagcctcgtggggtgattttgaatatgatgtaatgggccagaatatcgatgaagatttactgagagagcctgaacacttcctgtatggtggtgaccctcctttggaggaagattctctgaagcagtcgctggcaccgtacacacctccctttgatttgtcttatctcacagaacctgcccagagtgctgaaacaatagaggaagctgggtctccagaggatgaatctctgggatgcagagcagcagagatagtgctttctgcacttcctgatcgaagaagtgagggaaaccaggctgagaccaaaaacagactgcctggatcccagctggctgtgctgcatattcgtgaagaccctgagtccgtttatttgccggtaggagcaggctccaacattttgtctccatcaaacgttgactgggaagtagaaacagataattctgatttaccagcaggtggagacataggaccaccaaatggtgccagcaaggaaataccagaattggaagaagaaaaaacaattcctaccaaagagcctgagcagataaaatcagaatacaaggaagaaagatgtacagagaagaatgaagatcgtcatgcactacacatggattacatacttgtaaaccgtgaagaaaattcacactcaaagccagagacctgtgaagaaagagaaagcatagctgaattagaattgtatgtaggttccaaagaaacagggctgcagggaactcagttagcaagcttcccagacacatgtcagccagcctccttaaatgaaagaaaaggtctctctgcagagaaaatgtcttctaaaggcgatacgagatcatcttttgaaagccctgcacaagaccagagttggatgttcttgggccatagtgaggttggtgatccatcactggatgccagggactcagggcctgggtggtctggcaagactgtggagccgttctctgaactcggcttgggtgagggtccccagctgcagattctggaagaaatgaagcctctagaatctttagcactagaggaagcctctggtccagtcagccaatcacagaagagtaagagccgaggcagggctggcccggatgcagttacccatgacaatgaatgggaaatgctttcaccacagcctgttcagaaaaacatgatccctgacacggaaatggaggaggagacagagttccttgagctcggaaccaggatatcaagaccaaatggactactgtcagaggatgtaggaatggacatcccctttgaagagggcgtgctgagtcccagtgctgcagacatgaggcctgaacctcctaattctctggatcttaatgacactcatcctcggagaatcaagctcacagccccaaatatcaatctttctctggaccaaagtgaaggatctattctctctgatgataacttggacagtccagatgaaattgacatcaatgtggatgaacttgatacccccgatgaagcagattcttttgagtacactggccatgaagatcccacagccaacaaagattctggccaagagtcagagtctattccagaatatacggccgaagaggaacgggaggacaaccggctttggaggacagtggtcattggagaacaagagcagcgcattgacatgaaggtcatcgagccctacaggagagtcatttctcacggaggagattcaggatactatggggacggtctaaatgccatcattgtgtttgccgcctgttttctgccagacagcagtcgggcggattaccactatgtcatggaaaatcttttcctatatgtaataagtactttagagttgatggtagctgaagactatatgattgtgtacttgaatggtgcaaccccaagaaggaggatgccagggctaggctggatgaagaaatgctaccagatgattgacagacggttgaggaagaatttgaaatcattcatcattgttcatccatcttggttcatcagaacaatccttgctgtgacacgaccttttataaggtacagttaatgttgtcataaaataaaagtactactagtagttttaaaaaatatgtactcattgtcctaaaaacaagaattcataaactaagagtacccagggaaatatatttgtctctgtctttcctagaaaggtgctttggactattcatcaagaatcccgaattaagagagaaaatgctgtcatgatgaatatttcccccagatcattataaaacaggacctctaaattgcttgctataaacacggaagatgaagtggtgggattttcatgccacattagaaaggagaatagataataca

SEQ ID NO: 322258 - DNA, 1807 bp, Homo sapiens
  misc_feature (120)..(120): n is a, c, g, or t
ggcttagggtcaggggtctgcccggtgcttcttgtacgttggctccagatggggtaaacagctggtggtgtccccccaccaccaccaggtgcctcaaccaccacgacgacgacgacgtcntcgtcgtcgtggttccaactcggtttggaaacgcagatggcgcggcctgccacttccccttcatcttcgagggccgctcctactctgcctgcaccaccgacggtcgctccgacggcttgccctggtgcagtaccacggccaactacgacaccgacgaccggtttggcttctgccccagcgagagactctacacccgggacggcaatgctgatgggaaaccctgccagtttccattcatcttccaaggccaatcctactccgcctgcaccacggacggtcgctccgacggctaccgctggtgcgccaccaccgccaactacgaccgggacaagctcttcggcttctgcccgacccgagctgactcgacggtgatggggggcaactcggcgggggagctgtgcgtcttccccttcactttcctgggtaaggagtactcgacctgtaccagcgagggccgcggagatgggcgcctctggtgcgctaccacctcgaactttgacagcgacaagaagtggggcttctgcccggaccaaggatacagtttgttcctcgtggcggcgcatgagttcggccacgcgctgggcttagatcattcctcagtgccggaggcgctcatgtaccctatgtaccgcttcactgaggggccccccttgcataaggacgacgtgaatggcatccggcacctctatggtcctcgccctgaacctgagccacggcctccaaccaccaccacaccgcagcccacggctcccccgacggtctgccccaccggaccccccactgtccacccctcagagcgccccacagctggccccacaggtcccccctcagctggccccacaggtccccccactgctggcccttctacggccactactgtgcctttgagtccggtggacgatgcctgcaacgtgaacatcttcgacgccatcgcggagattgggaaccagctgtatttgttcaaggatgggaagtactggcgattctctgagggcagggggagccggccgcagggccccttccttatcgccgacaagtggcccgcgctgccccgcaagctggactcggtctttgaggagccgctctccaagaagcttttcttcttctctgggcgccaggtgtgggtgtacacaggcgcgtcggtgctgggcccgaggcgtctggacaagctgggcctgggagccgacgtggcccaggtgaccggggccctccggagtggcagggggaagatgctgctgttcagcgggcggcgcctctggaggttcgacgtgaaggcgcagatggtggatccccggagcgccagcgaggtggaccggatgttccccggggtgcctttggacacgcacgacgtcttccagtaccgagagaaagcctatttctgccaggaccgcttctactggcgcgtgagttcccggagtgagttgaaccaggtggaccaagtgggctacgtgacctatgacatcctgcagtgccctgaggactagggctcccgtcctgctttggcagtgccatgtaaatccccactgggaccaaccctggggaaggagccagtttgccggatacaaactggtattctgttctggaggaaagggaggagtggaggtgggctgggccctctcttctcacctttgttttttgttggagtgtttctaataaacttggattctctaacctttagaagcagact

SEQ ID NO: 322259 - DNA, 745 bp, Homo sapiens
gtcctttcccatgctgtcttcatgatgggaagtactggcgattctctgagggcagggggagccggccgcagggccccttccttatcgccgacaagtggcccgcgctgccccgcaagctggactcggtctttgaggagccgctctccaagaagcttttcttcttctctgggcgccaggtgtgggtgtacacaggcgcgtcggtgctgggcccgaggcgtctggacaagctgggcctgggagccgacgtggcccaggtgaccggggccctccggagtggcagggggaagatgctgctgttcagcgggcggcgcctctggaggttcgacgtgaaggcgcagatggtggatccccggagcgccagcgaggtggaccggatgttccccggggtgcctttggacacgcacgacgtcttccagtaccgagagaaagcctatttctgccaggaccgcttctactggcgcgtgagttcccggagtgagttgaaccaggtggaccaagtgggctacgtgacctatgacatcctgcagtgccctgaggactagggctcccgtcctgctttggcagtgccatgtaaatccccactgggaccaaccctggggaaggagccagtttgccggatacaaactggtattctgttctggaggaaagggaggagtggaggtgggctgggccctctcttctcacctttgttttttgttggagtgtttctaataaacttggattctctaacctttagaagcagact

SEQ ID NO: 322260 - DNA, 1779 bp, Homo sapiens
agacacctctgccctcaccatgagcctctggcagcccctggtcctggtgctcctggtgctgggctgctgctttgctgcccccagacagcgccagtccacccttgtgctcttccctggagacctgagaaccaatctcaccgacaggcagctggcagaggaatacctgtaccgctatggttacactcgggtggcagagatgcgtggagagtcgaaatctctggggcctgcgctgctgcttctccagaagcaactgtccctgcccgagaccggtgagctggatagcgccacgctgaaggccatgcgaaccccacggtgcggggtcccagacctgggcagattccaaacctttgagggcgacctcaagtggcaccaccacaacatcacctattggatccaaaactactcggaagacttgccgcgggcggtgattgacgacgcctttgcccgcgccttcgcactgtggagcgcggtgacgccgctcaccttcactcgcgtgtacagccgggacgcagacatcgtcatccagtttggtgtcgcggagcacggagacgggtatcccttcgacgggaaggacgggctcctggcacacgcctttcctcctggccccggcattcagggagacgcccatttcgacgatgacgagttgtggtccctgggcaagggcgtcgtggttccaactcggtttggaaacgcagatggcgcggcctgccacttccccttcatcttcgagggccgctcctactctgcctgcaccaccgacggtcgctccgacggcttgccctggtgcagtaccacggccaactacgacaccgacgaccggtttggcttctgccccagcgagagactctacacccgggacggcaatgctgatgggaaaccctgccagtttccattcatcttccaaggccaatcctactccgcctgcaccacggacggtcgctccgacggctaccgctggtgcgccaccaccgccaactacgaccgggacaagctcttcggcttctgcccgacccgagctgactcgacggtgatggggggcaactcggcgggggagctgtgcgtcttccccttcactttcctgggtaaggagtactcgacctgtaccagcgagggccgcggagatgggcgcctctggtgcgctaccacctcgaactttgacagcgacaagaagtggggcttctgcccggaccaaggatacagtttgttcctcgtggcggcgcatgagttcggccacgcgctgggcttagatcattcctcagtgccggaggcgctcatgtaccctatgtaccgcttcactgaggggccccccttgcataaggacgacgtgaatggcatccggcacctctatggtcctcgccctgaacctgagccacggcctccaaccaccaccacaccgcagcccacggctatgttccccggggtgcctttggacacgcacgacgtcttccagtaccgagagaaagcctatttctgccaggaccgcttctactggcgcgtgagttcccggagtgagttgaaccaggtggaccaagtgggctacgtgacctatgacatcctgcagtgccctgaggactagggctcccgtcctgctttggcagtgccatgtaaatccccactgggaccaaccctggggaaggagccagtttgccggatacaaactggtattctgttctggaggaaagggaggagtggaggtgggctgggccctctcttctcacctttgttttttgttggagtgtttctaataaacttggattctctaacctttagaagcagact

SEQ ID NO: 322261 - DNA, 1537 bp, Homo sapiens
  misc_feature (1427)..(1427): n is a, c, g, or t
  misc_feature (1436)..(1437): n is a, c, g, or t
agacacctctgccctcaccatgagcctctggcagcccctggtcctggtgctcctggtgctgggctgctgctttgctgcccccagacagcgccagtccacccttgtgctcttccctggagacctgagaaccaatctcaccgacaggcagctggcagaggaatacctgtaccgctatggttacactcgggtggcagagatgcgtggagagtcgaaatctctggggcctgcgctgctgcttctccagaagcaactgtccctgcccgagaccggtgagctggatagcgccacgctgaaggccatgcgaaccccacggtgcggggtcccagacctgggcagattccaaacctttgagggcgacctcaagtggcaccaccacaacatcacctattggatccaaaactactcggaagacttgccgcgggcggtgattgacgacgcctttgcccgcgccttcgcactgtggagcgcggtgacgccgctcaccttcactcgcgtgtacagccgggacgcagacatcgtcatccagtttggtgtcgcggagcacggagacgggtatcccttcgacgggaaggacgggctcctggcacacgcctttcctcctggccccggcattcagggagacgcccatttcgacgatgacgagttgtggtccctgggcaagggcgtcgtggttccaactcggtttggaaacgcagatggcgcggcctgccacttccccttcatcttcgagggccgctcctactctgcctgcaccaccgacggtcgctccgacggcttgccctggtgcagtaccacggccaactacgacaccgacgaccggtttggcttctgccccagcgagagactctacacccgggacggcaatgctgatgggaaaccctgccagtttccattcatcttccaaggccaatcctactccgcctgcaccacggacggtcgctccgacggctaccgctggtgcgccaccaccgccaactacgaccgggacaagctcttcggcttctgcccgacccgagctgactcgacggtgatggggggcaactcggcgggggagctgtgcgtcttccccttcactttcctgggtaaggagtactcgacctgtaccagcgagggccgcggagatgggcgcctctggtgcgctaccacctcgaactttgacagcgacaagaagtggggcttctgcccggaccaaggatacagtttgttcctcgtggcggcgcatgagttcggccacgcgctgggcttagatcattcctcagtgccggaggcgctcatgtaccctatgtaccgcttcactgaggggccccccttgcataaggacgacgtgaatggcatccggcacctctatggtcctcgccctgaacctgagccacggcctccaaccaccaccacaccgcagcccacggctctgccctcaaaccgtgtancccacggtnnccaaatgttaacccctgatacgcctcacatttggccccaactgttcccttattagttgcttccgggaaccatcattgctggacttttaaggtccctttga

SEQ ID NO: 322262 - DNA, 944 bp, Homo sapiens
agacacctctgccctcaccatgagcctctggcagcccctggtcctggtgctcctggtgctgggctgctgctttgctgcccccagacagcgccagtccacccttgtgctcttccctggagacctgagaaccaatctcaccgacaggcagctggcagaggaatacctgtaccgctatggttacactcgggtggcagagatgcgtggagagtcgaaatctctggggcctgcgctgctgcttctccagaagcaactgtccctgcccgagaccggtgagctggatagcgccacgctgaaggccatgcgaaccccacggtgcggggtcccagacctgggcagattccaaacctttgagggcgacctcaagtggcaccaccacaacatcacctattggatccaaaactactcggaagacttgccgcgggcggtgattgacgacgcctttgcccgcgccttcgcactgtggagcgcggtgacgccgctcaccttcactcgcgtgtacagccgggacgcagacatcgtcatccagtttggtgtcgcggagcacggagacgggtatcccttcgacgggaaggacgggctcctggcacacgcctttcctcctggccccggcattcagggagacgcccatttcgacgatgacgagttgtggtccctgggcaagggcgtcgtggttccaactcggtttggaaacgcagatggcgcggcctgccacttccccttcatcttcgagggccgctcctactctgcctgcaccaccgacggtcgctccgacggcttgccctggtgcagtaccacggccaactacgacaccgacgaccggtttggcttctgccccagcgagagactctacacccaggaggaaaggcgtgtgccaggagcccgtccttcccgtcgaagggatacccgtctccgtgctccgcgacaccaaactggatgacgatgtc

SEQ ID NO: 322263 - DNA, 494 bp, Homo sapiens
atcccccgcgcggccccctcagctgaagcagccggggaagtccatctccaactgggaggtgatggagaggctgaagggcatggtgcagaaccaccagttctccacgctgcgtatttccaagagcaccatggacttcatccgcttcgagggggaggtggagaacaagagcctgagaaagcctatttctgccaggaccgcttctactggcgcgtgagttcccggagtgagttgaaccaggtggaccaagtgggctacgtgacctatgacatcctgcagtgccctgaggactagggctcccgtcctgctttggcagtgccatgtaaatccccactgggaccaaccctggggaaggagccagtttgccggatacaaactggtattctgttctggaggaaagggaggagtggaggtgggctgggccctctcttctcacctttgttttttgttggagtgtttctaataaacttggattctctaacctttagaagcagact

SEQ ID NO: 322264 - DNA, 498 bp, Homo sapiens
ggcagggggagcccgggcgccgtcggtccgtccgctagccggctcagcacctgtctcctccgcgcctgcccgcaggttcgacgtgaaggcgcagatggtggatccccggagcgccagcgaggtggaccggatgttccccggggtgcctttggacacgcacgacgtcttccagtaccgaggtgagggctgaggaggatcccttcgtgagacaccacactaagctcctcttagtgagtggtcaaattctgagcgaggaagaaaaagcccttggaaatggaaacaaatgccccagcacagacaagatcccagcagaggcagaggccttctccaggtcatttaggaagtcagggatgcaaccaagaccaggacccagatttcctgcctccccggctggaagctctttctccttcagtacaggacggcaggtggtttgtatggaagctcagttattagacaacagtcatcaagtgccgataatgtgccaggcactgtgctaca

SEQ ID NO: 322265 - DNA, 2346 bp, Homo sapiens
agacacctctgccctcaccatgagcctctggcagcccctggtcctggtgctcctggtgctgggctgctgctttgctgcccccagacagcgccagtccacccttgtgctcttccctggagacctgagaaccaatctcaccgacaggcagctggcagaggaatacctgtaccgctatggttacactcgggtggcagagatgcgtggagagtcgaaatctctggggcctgcgctgctgcttctccagaagcaactgtccctgcccgagaccggtgagctggatagcgccacgctgaaggccatgcgaaccccacggtgcggggtcccagacctgggcagattccaaacctttgagggcgacctcaagtggcaccaccacaacatcacctattggatccaaaactactcggaagacttgccgcgggcggtgattgacgacgcctttgcccgcgccttcgcactgtggagcgcggtgacgccgctcaccttcactcgcgtgtacagccgggacgcagacatcgtcatccagtttggtgtcgcggagcacggagacgggtatcccttcgacgggaaggacgggctcctggcacacgcctttcctcctggccccggcattcagggagacgcccatttcgacgatgacgagttgtggtccctgggcaagggcgtcgtggttccaactcggtttggaaacgcagatggcgcggcctgccacttccccttcatcttcgagggccgctcctactctgcctgcaccaccgacggtcgctccgacggcttgccctggtgcagtaccacggccaactacgacaccgacgaccggtttggcttctgccccagcgagagactctacacccgggacggcaatgctgatgggaaaccctgccagtttccattcatcttccaaggccaatcctactccgcctgcaccacggacggtcgctccgacggctaccgctggtgcgccaccaccgccaactacgaccgggacaagctcttcggcttctgcccgacccgagctgactcgacggtgatggggggcaactcggcgggggagctgtgcgtcttccccttcactttcctgggtaaggagtactcgacctgtaccagcgagggccgcggagatgggcgcctctggtgcgctaccacctcgaactttgacagcgacaagaagtggggcttctgcccggaccaaggatacagtttgttcctcgtggcggcgcatgagttcggccacgcgctgggcttagatcattcctcagtgccggaggcgctcatgtaccctatgtaccgcttcactgaggggccccccttgcataaggacgacgtgaatggcatccggcacctctatggtcctcgccctgaacctgagccacggcctccaaccaccaccacaccgcagcccacggctcccccgacggtctgccccaccggaccccccactgtccacccctcagagcgccccacagctggccccacaggtcccccctcagctggccccacaggtccccccactgctggcccttctacggccactactgtgcctttgagtccggtggacgatgcctgcaacgtgaacatcttcgacgccatcgcggagattgggaaccagctgtatttgttcaaggatgggaagtactggcgattctctgagggcagggggagccggccgcagggccccttccttatcgccgacaagtggcccgcgctgccccgcaagctggactcggtctttgaggagccgctctccaagaagcttttcttcttctctgggcgccaggtgtgggtgtacacaggcgcgtcggtgctgggcccgaggcgtctggacaagctgggcctgggagccgacgtggcccaggtgaccggggccctccggagtggcagggggaagatgctgctgttcagcgggcggcgcctctggaggttcgacgtgaaggcgcagatggtggatccccggagcgccagcgaggtggaccggatgttccccggggtgcctttggacacgcacgacgtcttccagtaccgagagaaagcctatttctgccaggaccgcttctactggcgcgtgagttcccggagtgagttgaaccaggtggaccaagtgggctacgtgacctatgacatcctgcagtgccctgaggactagggctcccgtcctgctttggcagtgccatgtaaatccccactgggaccaaccctggggaaggagccagtttgccggatacaaactggtattctgttctggaggaaagggaggagtggaggtgggctgggccctctcttctcacctttgttttttgttggagtgtttctaataaacttggattctctaacctttagaagcagact

SEQ ID NO: 322266 - DNA, 2173 bp, Homo sapiens
agacacctctgccctcaccatgagcctctggcagcccctggtcctggtgctcctggtgctgggctgctgctttgctgcccccagacagcgccagtccacccttgtgctcttccctggagacctgagaaccaatctcaccgacaggcagctggcagaggaatacctgtaccgctatggttacactcgggtggcagagatgcgtggagagtcgaaatctctggggcctgcgctgctgcttctccagaagcaactgtccctgcccgagaccggtgagctggatagcgccacgctgaaggccatgcgaaccccacggtgcggggtcccagacctgggcagattccaaacctttgagggcgacctcaagtggcaccaccacaacatcacctattggatccaaaactactcggaagacttgccgcgggcggtgattgacgacgcctttgcccgcgccttcgcactgtggagcgcggtgacgccgctcaccttcactcgcgtgtacagccgggacgcagacatcgtcatccagtttggtgtcgcggagcacggagacgggtatcccttcgacgggaaggacgggctcctggcacacgcctttcctcctggccccggcattcagggagacgcccatttcgacgatgacgagttgtggtccctgggcaagggcgtcgtggttccaactcggtttggaaacgcagatggcgcggccctgccagtttccattcatcttccaaggccaatcctactccgcctgcaccacggacggtcgctccgacggctaccgctggtgcgccaccaccgccaactacgaccgggacaagctcttcggcttctgcccgacccgagctgactcgacggtgatggggggcaactcggcgggggagctgtgcgtcttccccttcactttcctgggtaaggagtactcgacctgtaccagcgagggccgcggagatgggcgcctctggtgcgctaccacctcgaactttgacagcgacaagaagtggggcttctgcccggaccaaggatacagtttgttcctcgtggcggcgcatgagttcggccacgcgctgggcttagatcattcctcagtgccggaggcgctcatgtaccctatgtaccgcttcactgaggggccccccttgcataaggacgacgtgaatggcatccggcacctctatggtcctcgccctgaacctgagccacggcctccaaccaccaccacaccgcagcccacggctcccccgacggtctgccccaccggaccccccactgtccacccctcagagcgccccacagctggccccacaggtcccccctcagctggccccacaggtccccccactgctggcccttctacggccactactgtgcctttgagtccggtggacgatgcctgcaacgtgaacatcttcgacgccatcgcggagattgggaaccagctgtatttgttcaaggatgggaagtactggcgattctctgagggcagggggagccggccgcagggccccttccttatcgccgacaagtggcccgcgctgccccgcaagctggactcggtctttgaggagccgctctccaagaagcttttcttcttctctgggcgccaggtgtgggtgtacacaggcgcgtcggtgctgggcccgaggcgtctggacaagctgggcctgggagccgacgtggcccaggtgaccggggccctccggagtggcagggggaagatgctgctgttcagcgggcggcgcctctggaggttcgacgtgaaggcgcagatggtggatccccggagcgccagcgaggtggaccggatgttccccggggtgcctttggacacgcacgacgtcttccagtaccgagagaaagcctatttctgccaggaccgcttctactggcgcgtgagttcccggagtgagttgaaccaggtggaccaagtgggctacgtgacctatgacatcctgcagtgccctgaggactagggctcccgtcctgctttggcagtgccatgtaaatccccactgggaccaaccctggggaaggagccagtttgccggatacaaactggtattctgttctggaggaaagggaggagtggaggtgggctgggccctctcttctcacctttgttttttgttggagtgtttctaataaacttggattctctaacctttagaagcagact

SEQ ID NO: 322267 - DNA, 2000 bp, Homo sapiens
agacacctctgccctcaccatgagcctctggcagcccctggtcctggtgctcctggtgctgggctgctgctttgctgcccccagacagcgccagtccacccttgtgctcttccctggagacctgagaaccaatctcaccgacaggcagctggcagaggaatacctgtaccgctatggttacactcgggtggcagagatgcgtggagagtcgaaatctctggggcctgcgctgctgcttctccagaagcaactgtccctgcccgagaccggtgagctggatagcgccacgctgaaggccatgcgaaccccacggtgcggggtcccagacctgggcagattccaaacctttgagggcgacctcaagtggcaccaccacaacatcacctattggatccaaaactactcggaagacttgccgcgggcggtgattgacgacgcctttgcccgcgccttcgcactgtggagcgcggtgacgccgctcaccttcactcgcgtgtacagccgggacgcagacatcgtcatccagtttggtgtcgcggagcacggagacgggtatcccttcgacgggaaggacgggctcctggcacacgcctttcctcctggccccggcattcagggagacgcccatttcgacgatgacgagttgtggtccctgggcaagggcgtcgtggttccaactcggtttggaaacgcagatggcgcggcctgccacttccccttcatcttcgagggccgctcctactctgcctgcaccaccgacggtcgctccgacggcttgccctggtgcagtaccacggccaactacgacaccgacgaccggtttggcttctgccccagcgagagactctacacccgggacggcaatgctgatgggaaaccctgccagtttccattcatcttccaaggccaatcctactccgcctgcaccacggacggtcgctccgacggctaccgctggtgcgccaccaccgccaactacgaccgggacaagctcttcggcttctgcccgacccgagctgactcgacggtgatggggggcaactcggcgggggagctgtgcgtcttccccttcactttcctgggtaaggagtactcgacctgtaccagcgagggccgcggagatgggcgcctctggtgcgctaccacctcgaactttgacagcgacaagaagtggggcttctgcccggaccaaggatacagtttgttcctcgtggcggcgcatgagttcggccacgcgctgggcttagatcattcctcagtgccggaggcgctcatgtaccctatgtaccgcttcactgaggggccccccttgcataaggacgacgtgaatggcatccggcacctctatggtcctcgccctgaacctgagccacggcctccaaccaccaccacaccgcagcccacggctcccccgacggtctgccccaccggaccccccactgtccacccctcagagcgccccacagctggccccacaggtcccccctcagctggccccacaggtccccccactgctggcccttctacggccactactgtgcctttgagtccggtggacgatgcctgcaacgtgaacatcttcgacgccatcgcggagattgggaaccagctgtatttgttcaaggatggatgttccccggggtgcctttggacacgcacgacgtcttccagtaccgagagaaagcctatttctgccaggaccgcttctactggcgcgtgagttcccggagtgagttgaaccaggtggaccaagtgggctacgtgacctatgacatcctgcagtgccctgaggactagggctcccgtcctgctttggcagtgccatgtaaatccccactgggaccaaccctggggaaggagccagtttgccggatacaaactggtattctgttctggaggaaagggaggagtggaggtgggctgggccctctcttctcacctttgttttttgttggagtgtttctaataaacttggattctctaacctttagaagcagact

SEQ ID NO: 322268 - DNA, 1420 bp, Homo sapiens
agacacctctgccctcaccatgagcctctggcagcccctggtcctggtgctcctggtgctgggctgctgctttgctgcccccagacagcgccagtccacccttgtgctcttccctggagacctgagaaccaatctcaccgacaggcagctggcagaggaatacctgtaccgctatggttacactcgggtggcagagatgcgtggagagtcgaaatctctggggcctgcgctgctgcttctccagaagcaactgtccctgcccgagaccggtgagctggatagcgccacgctgaaggccatgcgaaccccacggtgcggggtcccagacctgggcagattccaaacctttgagggcgacctcaagtggcaccaccacaacatcacctattggatccaaaactactcggaagacttgccgcgggcggtgattgacgacgcctttgcccgcgccttcgcactgtggagcgcggtgacgccgctcaccttcactcgcgtgtacagccgggacgcagacatcgtcatccagtttggtgtcgcggagcacggagacgggtatcccttcgacgggaaggacgggctcctggcacacgcctttcctcctggccccggcattcagggagacgcccatttcgacgatgacgagttgtggtccctgggcaagggcgtcgtggttccaactcggtttggaaacgcagatggcgcggcctgccacttccccttcatcttcgagggccgctcctactctgcctgcaccaccgacggtcgctccgacggcttgccctggtgcagtaccacggccaactacgacaccgacgaccggtttggcttctgccccagcgagagactctacacccgggacggcaatgctgatgggaaaccctgccagtttccattcatcttccaaggccaatcctactccgcctgcaccacggacggtcgctccgacggctaccgctggtgcgccaccaccgccaactacgaccgggacaagctcttcggcttctgcccgacccgagctgactcgacggtgatggggggcaactcggcgggggagctgtgcgtcttccccttcactttcctgggtaaggagtactcgacctgtaccagcgagggccgcggagatgggcgcctctggtgcgctaccacctcgaactttgacagcgacaagaagtggggcttctgcccggaccaaggatacagtttgttcctcgtggcggcgcatgagttcggccacgcgctgggcttagatcattcctcagtgccggaggcgctcatgtaccctatgtaccgcttcactgaggggccccccttgcataaggacgacgtgaatggcatccggcacctctatggtcctcgtcctgaacctgagccacggcctccaaccaccacgacgacgacgggatcctctagaacacctcac

SEQ ID NO: 322269 - DNA, 492 bp, Homo sapiens
agcccgggcgccgtcggtccgtccgctagccggctcagcacctgtctcctccgcgcctgcccgcaggttcgacgtgaaggcgcagatggtggatccccggagcgccagcgaggtggaccggatgttccccggggtgcctttggacacgcacgacgtcttccagtaccgagagaaagcctatttctgccaggaccgcttctactggcgcgtgagttcccggagtgagttgaaccaggtggaccaagtgggctacgtgacctatgacatcctgcagtgccctgaggactagggctcccgtcctgctttggcagtgccatgtaaatccccactgggaccaaccctggggaaggagccagtttgccggatacaaactggtattctgttctggaggaaagggaggagtggaggtgggctgggccctctcttctcacctttgttttttgttggagtgtttctaataaacttggattctctaacctttagaagcagact

SEQ ID NO: 322270 - DNA, 392 bp, Homo sapiens
  misc_feature (15)..(16): n is a, c, g, or t
aattcggcacgaggnntggctgaggagccaatggagcacggatctcacggaggtcatggagcagattcacagcacgtttccatcttgctgcccaaatgttcccagcaggccacaggcaatgtgaagtattcatccggccaaccaatgtttcctgacgtacagtgttgcccttttcagcaaatgccaattccaagttccattaaatcagaagctccatggctccttggcccacgatgttgagtgctgactgtgtgttctactgaaagagtaaaacactgactatccaaagagaaatggatattttgtttttataataaccatatattattgttttcttcttccctttctatgcaagtgtaaattaatgaacagagaggtatttggaaatggta

SEQ ID NO: 322271 - DNA, 668 bp, Homo sapiens
tccttttctttaaggatttaactatcaacttgataaataacttataggtgatagtgataattcctgatttcaagaagcaggaactggccagttcctgcttcttgaaagaaaaactggcaggtttaaaccaacgctgggatgcaattgttgcagaagtgaaggataggcagccaaggctaaaaggagaaagtaagcaggtgatgaagtacaggcatcagctagatgagattatctgttggttaacaaaggctgagcatgctatgcaaaagagatcaaccaccgaattgggagaaaacctgcaagaattaagagacttaactcaagaaatggaagtacatgctgaaaaactcaaatggctgaatagaactgaattggagatgctttcagataaaagtctgagtttacctgaaagggataaaatttcaagaagcaggaactggccagttcctgcttcttgaaattctataaagcggaactgaaaatgttgctagaggatgggtgtgtgggagtggaggaaggcagctgacatatggaaatggggaaaataccatcagaaccctaggaaacatcagccaagggcaacgcctcgaacccctttgaaaccctcccggattcactggtctccatttagcctttgtgtttcagaagcgaaaatggggtgcgcgctc

SEQ ID NO: 322272 - DNA, 363 bp, Homo sapiens
aatggcttggttggctctatgttactgatcccaacctagagtaagcagattatccacgactgattttattcctactttattctccatgtaaataagtaaacttacttgacatttaaatgttagttgattctgtacaacagtttgtcagtctgggagtggggggtggctcccaagccacagataccaaaaataccatgtgtttgatcctttgtgttctaacagctttttaatggcatcttatgtgctacataaagtcactctagatagatttgaccaccactgctctctcaaatgtctacttaaggtggctatcacagaacattgacctaaaaaaaaaatgactggtaccacagaggtggtttt

SEQ ID NO: 322273 - DNA, 12590 bp, Homo sapiens
aaatacatcgcaccaccaaactaacactcgcacacacccccgcggttactccgtgtcaaactcctagaggagcccttggccagctcggggtgcggcggtggcgaccggcaggcgaggaggcccgcgggcagcaggtattgatgtcaagctgaaccatcgtaggaagttgaaagccttagaaagaggacttggtaaagtttttggattatcttgaaactcttgcatatggcatggccaagtatggagaacatgaagccagtcctgacaatgggcagaacgaattcagtgatatcattaagtccagatctgatgaacacaatgacgtacagaagaaaacctttaccaaatggataaatgctcgattttcaaagagtgggaaaccacccatcaatgatatgttcacagacctcaaagatggaaggaagctattggatcttctagaaggcctcacaggaacatcactgccaaaggaacgtggttccacaagggtacatgccttaaataacgtcaacagagtgctgcaggttttacatcagaacaatgtggaattagtgaatatagggggaactgacattgtggatggaaatcacaaactgactttggggttactttggagcatcattttgcactggcaggtgaaagatgtcatgaaggatgtcatgtcggacctgcagcagacgaacagtgagaagatcctgctcagctgggtgcgtcagaccaccaggccctacagccaagtcaacgtcctcaacttcaccaccagctggacagatggactcgcctttaatgctgtcctccaccgacataaacctgatctcttcagctgggataaagttgtcaaaatgtcaccaattgagagacttgaacatgccttcagcaaggctcaaacttatttgggaattgaaaagctgttagatcctgaagatgttgccgttcagcttcctgacaagaaatccataattatgtatttaacatctttgtttgaggtgctacctcagcaagtcaccatagacgccatccgtgaggtagagacactcccaaggaaatataaaaaagaatgtgaagaagaggcaattaatatacagagtacagcgcctgaggaggagcatgagagtccccgagctgaaactcccagcactgtcactgaggtcgacatggatctggacagctatcagattgcgttggaggaagtgctgacctggttgctttctgctgaggacactttccaggagcaggatgatatttctgatgatgttgaagaagtcaaagaccagtttgcaacccatgaagcttttatgatggaactgactgcacaccagagcagtgtgggcagcgtcctgcaggcaggcaaccaactgataacacaaggaactctgtcagacgaagaagaatttgagattcaggaacagatgaccctgctgaatgctagatgggaggctcttagggtggagagtatggacagacagtcccggctgcacgatgtgctgatggaactgcagaagaagcaactgcagcagctctccgcctggttaacactcacagaggagcgcattcagaagatggaaacttgccccctggatgatgatgtaaaatctctacaaaagctgctagaagaacataaaagtttgcaaagtgatcttgaggctgaacaggtgaaagtaaattcactaactcacatggtggtcattgttgatgaaaacagtggtgagagtgctacagctatcctagaagaccagttacagaaacttggtgagcgctggacagcagtatgccgttggactgaagaacgctggaataggttacaagaaatcaatatattgtggcaggaattattggaagaacagtgcttgttgaaagcttggttaaccgaaaaagaagaggctttaaataaagtccagacaagcaacttcaaagaccaaaaggaactaagtgtcagtgttcgacgtctggctattttgaaggaagacatggaaatgaagcgtcaaacattggatcagctgagtgagattggccaggatgtgggacaattacttgataattccaaggcatctaagaagatcaacagtgactcagaggaactgactcaaagatgggattctttggttcagagactagaagattcctccaaccaggtgactcaggctgtagcaaagctggggatgtctcagattcctcagaaggaccttttggagactgttcgtgtaagagaacaagcaattacaaaaaaatctaagcaggaactgcctcctcctcctcccccaaagaagagacagatccatgtggatattgaagctaagaaaaagtttgatgctataagtgcagagctgttgaactggattttgaaatggaaaactgccattcagaccacagagataaaagagtatatgaagatgcaagacacttccgaaatgaaaaagaagttgaaggcattagaaaaagaacagagagaaagaatccccagagcagatgaattaaaccaaactggacaaatccttgtggagcaaatgggaaaagaaggccttcctactgaagaaataaaaaatgttctggagaaggtttcatcagaatggaagaatgtatctcaacatttggaagatctagaaagaaagattcagctacaggaagatataaatgcttatttcaagcagcttgatgagcttgaaaaggtcatcaagacaaaggaggagtgggtaaaacacacttccatttctgaatcttcccggcagtccttgccaagcttgaaggattcctgtcagcgggaattgacaaatcttcttggccttcaccccaaaattgaaatggctcgtgcaagctgctcggccctgatgtctcagccttctgccccagattttgtccagcggggcttcgatagctttctgggccgctaccaagctgtacaagaggctgtagaggatcgtcaacaacatctagagaatgaactgaagggccaacctggacatgcatatctggaaacattgaaaacactgaaagatgtgctaaatgattcagaaaataaggcccaggtgtctctgaatgtccttaatgatcttgccaaggtggagaaggccctgcaagaaaaaaagacccttgatgaaatccttgagaatcagaaacctgcattacataaacttgcagaagaaacaaaggctctggagaaaaatgttcatcctgatgtagaaaaattatataagcaagaatttgatgatgtgcaaggaaagtggaacaagctaaaggtcttggtttccaaagatctacatttgcttgaggaaattgctctcacactcagagcttttgaggccgattcaacagtcattgagaagtggatggatggcgtgaaagacttcttaatgaaacagcaggctgcccaaggagacgacgcaggtctacagaggcagttagaccagtgctctgcatttgttaatgaaatagaaacaattgaatcatctctgaaaaacatgaaggaaatagagactaatcttcgaagtggtccagttgctggaataaaaacttgggtgcagacaagactaggtgactaccaaactcaactggagaaacttagcaaggagatcgctactcaaaaaagtaggttgtctgaaagtcaagaaaaagctgcgaacctgaagaaagacttggcagagatgcaggaatggatgacccaggccgaggaagaatatttggagcgggattttgagtacaagtcaccagaagagcttgagagtgctgtggaagagatgaagagggcaaaagaggatgtgttgcagaaggaggtgagagtgaagattctcaaggacaacatcaagttattagctgccaaggtgccctctggtggccaggagttgacgtctgagctgaatgttgtgctggagaattaccaacttctttgtaatagaattcgaggaaagtgccacacgctagaggaggtctggtcttgttggattgaactgcttcactatttggatcttgaaactacctggttaaacactttggaagagcggatgaagagcacagaggtcctgcctgagaagacggatgctgtcaacgaagccctggagtctctggaatctgttctgcgccacccggcagataatcgcacccagattcgagagcttggccagactctgattgatggggggatcctggatgatataatcagtgagaaactggaggctttcaacagccgatatgaagatctaagtcacctggcagagagcaagcagatttctttggaaaagcaactccaggtgctgcgggaaactgaccagatgcttcaagtcttgcaagagagcttgggggagctggacaaacagctcaccacatacctgactgacaggatagatgctttccaagttccacaggaagctcagaaaatccaagcagagatctcagcccatgagctaaccctagaggagttgagaagaaatatgcgttctcagcccctgacctccccagagagtaggactgccagaggaggaagtcagatggatgtgctacagaggaaactccgagaggtgtccacaaagttccagcttttccagaagccagctaacttcgagcagcgcatgctggactgcaagcgtgtgctggatggcgtgaaagcagaacttcacgttctggatgtgaaggacgtagaccctgacgtcatacagacgcacctggacaagtgtatgaaactgtataaaactttgagtgaagtcaaacttgaagtggaaactgtgattaaaacaggaagacatattgtccagaaacagcaaacggacaacccaaaagggatggatgagcagctgacttccctgaaggttctttacaatgacctgggcgcacaggtgacagaaggaaaacaggatctggaaagagcatcacagttggcccggaaaatgaagaaagaggctgcttctctctctgaatggctttctgctactgaaactgaattggtacagaagtccacttcagaaggtctgcttggtgacttggatacagaaatttcctgggctaaaaatgttctgaaggatctggaaaagagaaaagctgatttaaataccatcacagagagtagtgctgccctgcaaaacttgattgagggcagtgagcctattttagaagagaggctctgcgtccttaacgctgggtggagccgagttcgtacctggactgaagattggtgcaataccttgatgaaccatcagaaccagctagaaatatttgatgggaacgtggctcacataagtacctggctttatcaagctgaagctctattggatgaaattgaaaagaaaccaacaagtaaacaggaagaaattgtgaagcgtttagtatctgagctggatgatgccaacctccaggttgaaaatgtccgcgatcaagcccttattttgatgaatgcccgtggaagctcaagcagggagcttgtagaaccaaagttagctgagctgaataggaactttgaaaaggtgtctcaacatatcaaaagtgccaaattgctaattgctcaggaaccattataccaatgtttggtcaccactgaaacatttgaaactggtgtgcctttctctgacttggaaaaattagaaaatgacatagaaaatatgttaaaatttgtggaaaaacacttggaatccagtgatgaagatgaaaagatggatgaggagagtgcccagattgaggaagttctacaaagaggagaagaaatgttacatcaacctatggaagataataaaaaagaaaagatccgtttgcaattattacttttgcatactagatacaacaaaattaaggcaatccctattcaacagaggaaaatgggtcaacttgcttctggaattagatcatcacttcttcctacagattatctggttgaaattaacaaaattttactttgcatggatgatgttgaattatcgcttaatgttccagagctcaacactgctatttacgaagacttctcttttcaggaagactctctgaagaatatcaaagaccaactggacaaacttggagagcagattgcagtcattcatgaaaaacagccagatgtcatccttgaagcctctggacctgaagccattcagatcagagatacacttactcagctgaatgcaaaatgggacagaattaatagaatgtacagtgatcggaaaggttgttttgacagggcaatggaagaatggagacagttccattgtgaccttaatgacctcacacagtggataacagaggctgaagaattactggttgatacctgtgctccaggtggcagcctggacttagagaaagccaggatacatcagcaggaacttgaggtgggcatcagcagccaccagcccagttttgcagcactaaaccgaactggggatgggattgtgcagaaactctcccaggcagatggaagcttcttgaaagaaaaactggcaggtttaaaccaacgctgggatgcaattgttgcagaagtgaaggataggcagccaaggctaaaaggagaaagtaagcaggtgatgaagtacaggcatcagctagatgagattatctgttggttaacaaaggctgagcatgctatgcaaaagagatcaaccaccgaattgggagaaaacctgcaagaattaagagacttaactcaagaaatggaagtacatgctgaaaaactcaaatggctgaatagaactgaattggagatgctttcagataaaagtctgagtttacctgaaagggataaaatttcagaaagcttaaggactgtaaatatgacatggaataagatttgcagagaggtgcctaccaccctgaaggaatgcatccaggagcccagttctgtttcacagacaaggattgctgctcatcctaatgtccaaaaggtggtgctagtatcatctgcgtcagatattcctgttcagtctcatcgtacttcggaaatttcaattcctgctgatcttgataaaactataacagaactagccgactggctggtattaatcgaccagatgctgaagtccaacattgtcactgttggggatgtagaagagatcaataagaccgtttcccgaatgaaaattacaaaggctgacttagaacagcgccatcctcagctggattatgtttttacatgggcacagaaattgaaaaataaagcttccagttcagatatgagaacagcaattacagaaaaattggaaagggtcaagaaccagtgggatggcacccagcatggcgttgagctaagacagcagcagcttgaggacatgattattgacagtcttcagtgggatgaccatagggaggagactgaagaactgatgagaaaatatgaggctcgactctatattcttcagcaagcccgacgggatccactcaccaaacaaatttctgtgcccaatactgcttcaagaactgggtcctggagatggtatcgtcatggcgttcgataacgtcctgcagaaactcctggaggaatatgggagtgatgacacaaggaatgtgaaagaaaccacagagtacttaaaaacatcatggatcaatctcaaacaaagtattgctgacagacagaacgccttggaggctgagtggaggacggtgcaggcctctcgcagagatctggaaaacttcctgaagtggatccaagaagcagagaccacagtgaatgtgcttgtggatgcctctcatcgggagaatgctcttcaggatagtatcttggccagggaactcaaacagcagatgcaggacatccaggcagaaattgatgcccacaatgacatatttaaaagcattgacggaaacaggcagaagatggtaaaagctttgggaaattctgaagaggctactatgcttcaacatcgactggatgatatgaaccaaagatggaatgacttaaaagcaaaatctgctagcatcagggcccatttggaggccagcgctgagaagtggaacaggttgctgatgtccttagaagaactgatcaaatggctgaatatgaaagatgaagagcttaagaaacaaatgcctattggaggagatgttccagccttacagctccagtatgaccattgtaaggccctgagacgggagttaaaggagaaagaatattctgtcctgaatgctgtcgaccaggcccgagttttcttggctgatcagccaattgaggcccctgaagagccaagaagaaacctacaatcaaaaacagaattaactcctgaggagagagcccaaaagattgccaaagccatgcgcaaacagtcttctgaagtcaaagaaaaatgggaaagtctaaatgctgtaactagcaattggcaaaagcaagtggacaaggcattggagaaactcagagacctgcagggagctatggatgacctggacgctgacatgaaggaggcagagtccgtgcggaatggctggaagcccgtgggagacttactcattgactcgctgcaggatcacattgaaaaaatcatggcatttagagaagaaattgcaccaatcaactttaaagttaaaacggtgaatgatttatccagtcagctgtctccacttgacctgcatccctctctaaagatgtctcgccagctagatgaccttaatatgcgatggaaacttttacaggtttctgtggatgatcgccttaaacagcttcaggaagcccacagagattttggaccatcctctcagcattttctctctacgtcagtccagctgccgtggcaaagatccatttcacataataaagtgccctattacatcaaccatcaaacacagaccacctgttgggaccatcctaaaatgaccgaactctttcaatcccttgctgacctgaataatgtacgtttttctgcctaccgtacagcaatcaaaatccgaagactacaaaaagcactatgtttggatctcttagagttgagtacaacaaatgaaattttcaaacagcacaagttgaaccaaaatgaccagctcctcagtgttccagatgtcatcaactgtctgacaacaacttatgatggacttgagcaaatgcataaggacctggtcaacgttccactctgtgttgatatgtgtctcaattggttgctcaatgtctatgacacgggtcgaactggaaaaattagagtgcagagtctgaagattggattaatgtctctctccaaaggtctcttggaagaaaaatacagatatctctttaaggaagttgcagggccaacagaaatgtgtgaccagaggcagctgggcctgttacttcatgatgccatccagatcccccggcagctaggtgaagtagcagcttttggaggcagtaatattgagcctagtgttcgcagctgcttccaacagaataacaataaaccagaaataagtgtgaaagagtttatagattggatgcatttggaaccacagtccatggtttggctcccagttttacatcgagtggcagcagcggagactgcaaaacatcaggccaaatgcaacatctgtaaagaatgtccaattgtcgggttcaggtatagaagccttaagcattttaactatgatgtctgccagagttgtttcttttcgggtcgaacagcaaaaggtcacaaattacattacccaatggtggaatattgtatacctacaacatctggggaagatgtacgagacttcacaaaggtacttaagaacaagttcaggtcgaagaagtactttgccaaacaccctcgacttggttacctgcctgtccagacagttcttgaaggtgacaacttagagactcctatcacactcatcagtatgtggccagagcactatgacccctcacaatctcctcaactgtttcatgatgacacccattcaagaatagaacaatatgccacacgactggcccagatggaaaggactaatgggtcttttctcactgatagcagctccaccacaggaagtgtggaagacgagcacgccctcatccagcagtattgccaaacactcggaggagagtccccagtgagccagccgcagagcccagctcagatcctgaagtcagtagagagggaagaacgtggagaactggagaggatcattgctgacctggaggaagaacaaagaaatctacaggtggagtatgagcagctgaaggaccagcacctccgaagggggctccctgtcggttcaccgccagagtcgattatatctccccatcacacgtctgaggattcagaacttatagcagaagcaaaactcctcaggcagcacaaaggtcggctggaggctaggatgcagattttagaagatcacaataaacagctggagtctcagctccaccgcctccgacagctgctggagcagcctgaatctgattcccgaatcaatggtgtttccccatgggcttctcctcagcattctgcactgagctactcgcttgatccagatgcctccggcccacagttccaccaggcagcgggagaggacctgctggccccaccgcacgacaccagcacggatctcacggaggtcatggagcagattcacagcacgtttccatcttgctgcccaaatgttcccagcaggccacaggcaatgtgaagtattcatccggccaaccaatgtttcctgacgtacagtgttgcccttttcagcaaatgccaattccaagttccattaaatcagaagctccatggctccttggcccacgatgttgagtgctgactgtgtgttctactgaaagagtaaaacactgactatccaaagagaaatggatattttgtttttataataaccatatattattgttttcttcttccctttctatgcaagtgtaaattaatgaacagagaggtatttggaaatggtaatacatttgtcacggatttgtataatgtatacagcattgggaaagtgggtgggggctttctaatatgataccgtctttttaataactatgacaaagcttacataagaattagaagaccactttacatttttacattccttctgctgttcatattaaccttgcacaattacttcattttttctttgactcttttaccacaatgttttggttatttataatttatcagccatatgtttatcagccatataaccaactagatcccaaatagatccatgtatttgtttccgtgatttggccacattaataaattcataaatttcaatcaaatatcttatatatacacacatatggtttaagctacagccctgtgtatgccgtttaactttatttgacgttgcccacttacttctttgctgaccacttggataaccgtaataaaaatcctataagcctaaatggcatttcttttgggatatttttcctgcattttattccctttttatataagtaggaattaattatttattttatgtcttaatctatttgataaagaagactacattataataatctcaaagatcatattaccaaaggttgcccacttgagcatattttcattttgacacagaaacaaaatttagtacaacctttcctagttcccatgtcttgattttcatcattacatgcacagcagacctttacctattgtgataccagaacacatcattgtctttggttcccttcaaagagaattttattgttgttttgtattttcaagtccttaatagttcttgaaactcctagttgttttcttgttgaaagcagacacacatttagtgcacggcttattttacctttcgggtgaaagatcagatgtttttatacccttcacttgatcaatatatttggaaagaatgtttatcaaaagtctatgtcactgcttctacagaagaatgaaattaatgcttaggtgatggtacctccacctacatctttttgagtgcattcaattatgtattttggtttagcttctgatttaacatttaattgattcagtttaaacatgttacttaattagcaaatgtagaggaaccaaaaaaaggtgaaaataatatgttttgattcaaacctaaagacataaaaacataaagacattttaactttgggttctctttagctgggatctggccagaaggaggcttaaagttagaaattgctattattttagaataggttgggtgggttggggggcaagggtgtctatttgcagcagagatattttgaaaagaagaaaattgttttatataaaaaggaaagccatgaccacctttctacctcagatccatcttcatccattgcattggaaactgctttatgctgctgcagtctgcaaagtctagagcttttatcaggccatgtcatacccaagaaagcacctatttaaagaaaaaacaattccctgagctctcaactccaagttgtagatttggtgtcttccttgttcttactttaaaaagtcatgtgttaattttttttctgcctgtatttgtatgcaaaatgtcctctatctgctattaaagaaaagctacgtaaaacactacattgtaaccttctaagtaataataaataaaaagaaatatattgcagtaacaatgggaagtaagtatgtagttcttttgaaatatgtggtaaagaactaatcacagactatcatctaatctggttacatattgtatttttcatcctgaataaaagtaattttaacacaaaaaaactataaaacttcagctgg

SEQ ID NO: 322274 - DNA, 12428 bp, Homo sapiens
  misc_feature (12410)..(12410): n is a, c, g, or t
aaatacatcgcaccaccaaactaacactcgcacacacccccgcggttactccgtgtcaaactcctagaggagcccttggccagctcggggtgcggcggtggcgaccggcaggcgaggaggcccgcgggcagcaggtattgatgtcaagctgaaccatcgtaggaagttgaaagccttagaaagaggacttggtaaagtttttggattatcttgaaactcttgcatatggcatggccaagtatggagaacatgaagccagtcctgacaatgggcagaacgaattcagtgatatcattaagtccagatctgatgaacacaatgacgtacagaagaaaacctttaccaaatggataaatgctcgattttcaaagagtgggaaaccacccatcaatgatatgttcacagacctcaaagatggaaggaagctattggatcttctagaaggcctcacaggaacatcactgccaaaggaacgtggttccacaagggtacatgccttaaataacgtcaacagagtgctgcaggttttacatcagaacaatgtggaattagtgaatatagggggaactgacattgtggatggaaatcacaaactgactttggggttactttggagcatcattttgcactggcaggtgaaagatgtcatgaaggatgtcatgtcggacctgcagcagacgaacagtgagaagatcctgctcagctgggtgcgtcagaccaccaggccctacagccaagtcaacgtcctcaacttcaccaccagctggacagatggactcgcctttaatgctgtcctccaccgacataaacctgatctcttcagctgggataaagttgtcaaaatgtcaccaattgagagacttgaacatgccttcagcaaggctcaaacttatttgggaattgaaaagctgttagatcctgaagatgttgccgttcagcttcctgacaagaaatccataattatgtatttaacatctttgtttgaggtgctacctcagcaagtcaccatagacgccatccgtgaggtagagacactcccaaggaaatataaaaaagaatgtgaagaagaggcaattaatatacagagtacagcgcctgaggaggagcatgagagtccccgagctgaaactcccagcactgtcactgaggtcgacatggatctggacagctatcagattgcgttggaggaagtgctgacctggttgctttctgctgaggacactttccaggagcaggatgatatttctgatgatgttgaagaagtcaaagaccagtttgcaacccatgaagcttttatgatggaactgactgcacaccagagcagtgtgggcagcgtcctgcaggcaggcaaccaactgataacacaaggaactctgtcagacgaagaagaatttgagattcaggaacagatgaccctgctgaatgctagatgggaggctcttagggtggagagtatggacagacagtcccggctgcacgatgtgctgatggaactgcagaagaagcaactgcagcagctctccgcctggttaacactcacagaggagcgcattcagaagatggaaacttgccccctggatgatgatgtaaaatctctacaaaagctgctagaagaacataaaagtttgcaaagtgatcttgaggctgaacaggtgaaagtaaattcactaactcacatggtggtcattgttgatgaaaacagtggtgagagtgctacagctatcctagaagaccagttacagaaacttggtgagcgctggacagcagtatgccgttggactgaagaacgctggaataggttacaagaaatcaatatattgtggcaggaattattggaagaacagtgcttgttgaaagcttggttaaccgaaaaagaagaggctttaaataaagtccagacaagcaacttcaaagaccaaaaggaactaagtgtcagtgttcgacgtctggctattttgaaggaagacatggaaatgaagcgtcaaacattggatcagctgagtgagattggccaggatgtgggacaattacttgataattccaaggcatctaagaagatcaacagtgactcagaggaactgactcaaagatgggattctttggttcagagactagaagattcctccaaccaggtgactcaggctgtagcaaagctggggatgtctcagattcctcagaaggaccttttggagactgttcgtgtaagagaacaagcaattacaaaaaaatctaagcaggaactgcctcctcctcctcccccaaagaagagacagatccatgtggatattgaagctaagaaaaagtttgatgctataagtgcagagctgttgaactggattttgaaatggaaaactgccattcagaccacagagataaaagagtatatgaagatgcaagacacttccgaaatgaaaaagaagttgaaggcattagaaaaagaacagagagaaagaatccccagagcagatgaattaaaccaaactggacaaatccttgtggagcaaatgggaaaagaaggccttcctactgaagaaataaaaaatgttctggagaaggtttcatcagaatggaagaatgtatctcaacatttggaagatctagaaagaaagattcagctacaggaagatataaatgcttatttcaagcagcttgatgagcttgaaaaggtcatcaagacaaaggaggagtgggtaaaacacacttccatttctgaatcttcccggcagtccttgccaagcttgaaggattcctgtcagcgggaattgacaaatcttcttggccttcaccccaaaattgaaatggctcgtgcaagctgctcggccctgatgtctcagccttctgccccagattttgtccagcggggcttcgatagctttctgggccgctaccaagctgtacaagaggctgtagaggatcgtcaacaacatctagagaatgaactgaagggccaacctggacatgcatatctggaaacattgaaaacactgaaagatgtgctaaatgattcagaaaataaggcccaggtgtctctgaatgtccttaatgatcttgccaaggtggagaaggccctgcaagaaaaaaagacccttgatgaaatccttgagaatcagaaacctgcattacataaacttgcagaagaaacaaaggctctggagaaaaatgttcatcctgatgtagaaaaattatataagcaagaatttgatgatgtgcaaggaaagtggaacaagctaaaggtcttggtttccaaagatctacatttgcttgaggaaattgctctcacactcagagcttttgaggccgattcaacagtcattgagaagtggatggatggcgtgaaagacttcttaatgaaacagcaggctgcccaaggagacgacgcaggtctacagaggcagttagaccagtgctctgcatttgttaatgaaatagaaacaattgaatcatctctgaaaaacatgaaggaaatagagactaatcttcgaagtggtccagttgctggaataaaaacttgggtgcagacaagactaggtgactaccaaactcaactggagaaacttagcaaggagatcgctactcaaaaaagtaggttgtctgaaagtcaagaaaaagctgcgaacctgaagaaagacttggcagagatgcaggaatggatgacccaggccgaggaagaatatttggagcgggattttgagtacaagtcaccagaagagcttgagagtgctgtggaagagatgaagagggcaaaagaggatgtgttgcagaaggaggtgagagtgaagattctcaaggacaacatcaagttattagctgccaaggtgccctctggtggccaggagttgacgtctgagctgaatgttgtgctggagaattaccaacttctttgtaatagaattcgaggaaagtgccacacgctagaggaggtctggtcttgttggattgaactgcttcactatttggatcttgaaactacctggttaaacactttggaagagcggatgaagagcacagaggtcctgcctgagaagacggatgctgtcaacgaagccctggagtctctggaatctgttctgcgccacccggcagataatcgcacccagattcgagagcttggccagactctgattgatggggggatcctggatgatataatcagtgagaaactggaggctttcaacagccgatatgaagatctaagtcacctggcagagagcaagcagatttctttggaaaagcaactccaggtgctgcgggaaactgaccagatgcttcaagtcttgcaagagagcttgggggagctggacaaacagctcaccacatacctgactgacaggatagatgctttccaagttccacaggaagctcagaaaatccaagcagagatctcagcccatgagctaaccctagaggagttgagaagaaatatgcgttctcagcccctgacctccccagagagtaggactgccagaggaggaagtcagatggatgtgctacagaggaaactccgagaggtgtccacaaagttccagcttttccagaagccagctaacttcgagcagcgcatgctggactgcaagcgtgtgctggatggcgtgaaagcagaacttcacgttctggatgtgaaggacgtagaccctgacgtcatacagacgcacctggacaagtgtatgaaactgtataaaactttgagtgaagtcaaacttgaagtggaaactgtgattaaaacaggaagacatattgtccagaaacagcaaacggacaacccaaaagggatggatgagcagctgacttccctgaaggttctttacaatgacctgggcgcacaggtgacagaaggaaaacaggatctggaaagagcatcacagttggcccggaaaatgaagaaagaggctgcttctctctctgaatggctttctgctactgaaactgaattggtacagaagtccacttcagaaggtctgcttggtgacttggatacagaaatttcctgggctaaaaatgttctgaaggatctggaaaagagaaaagctgatttaaataccatcacagagagtagtgctgccctgcaaaacttgattgagggcagtgagcctattttagaagagaggctctgcgtccttaacgctgggtggagccgagttcgtacctggactgaagattggtgcaataccttgatgaaccatcagaaccagctagaaatatttgatgggaacgtggctcacataagtacctggctttatcaagctgaagctctattggatgaaattgaaaagaaaccaacaagtaaacaggaagaaattgtgaagcgtttagtatctgagctggatgatgccaacctccaggttgaaaatgtccgcgatcaagcccttattttgatgaatgcccgtggaagctcaagcagggagcttgtagaaccaaagttagctgagctgaataggaactttgaaaaggtgtctcaacatatcaaaagtgccaaattgctaattgctcaggaaccattataccaatgtttggtcaccactgaaacatttgaaactggtgtgcctttctctgacttggaaaaattagaaaatgacatagaaaatatgttaaaatttgtggaaaaacacttggaatccagtgatgaagatgaaaagatggatgaggagagtgcccagattgaggaagttctacaaagaggagaagaaatgttacatcaacctatggaagataataaaaaagaaaagatccgtttgcaattattacttttgcatactagatacaacaaaattaaggcaatccctattcaacagaggaaaatgggtcaacttgcttctggaattagatcatcacttcttcctacagattatctggttgaaattaacaaaattttactttgcatggatgatgttgaattatcgcttaatgttccagagctcaacactgctatttacgaagacttctcttttcaggaagactctctgaagaatatcaaagaccaactggacaaacttggagagcagattgcagtcattcatgaaaaacagccagatgtcatccttgaagcctctggacctgaagccattcagatcagagatacacttactcagctgaatgcaaaatgggacagaattaatagaatgtacagtgatcggaaaggttgttttgacagggcaatggaagaatggagacagttccattgtgaccttaatgacctcacacagtggataacagaggctgaagaattactggttgatacctgtgctccaggtggcagcctggacttagagaaagccaggatacatcagcaggaacttgaggtgggcatcagcagccaccagcccagttttgcagcactaaaccgaactggggatgggattgtgcagaaactctcccaggcagatggaagcttcttgaaagaaaaactggcaggtttaaaccaacgctgggatgcaattgttgcagaagtgaaggataggcagccaaggctaaaaggagaaagtaagcaggtgatgaagtacaggcatcagctagatgagattatctgttggttaacaaaggctgagcatgctatgcaaaagagatcaaccaccgaattgggagaaaacctgcaagaattaagagacttaactcaagaaatggaagtacatgctgaaaaactcaaatggctgaatagaactgaattggagatgctttcagataaaagtctgagtttacctgaaagggataaaatttcagaaagcttaaggactgtaaatatgacatggaataagatttgcagagaggtgcctaccaccctgaaggaatgcatccaggagcccagttctgtttcacagacaaggattgctgctcatcctaatgtccaaaaggtggtgctagtatcatctgcgtcagatattcctgttcagtctcatcgtacttcggaaatttcaattcctgctgatcttgataaaactataacagaactagccgactggctggtattaatcgaccagatgctgaagtccaacattgtcactgttggggatgtagaagagatcaataagaccgtttcccgaatgaaaattacaaaggctgacttagaacagcgccatcctcagctggattatgtttttacatgggcacagaaattgaaaaataaagcttccagttcagatatgagaacagcaattacagaaaaattggaaagggtcaagaaccagtgggatggcacccagcatggcgttgagctaagacagcagcagcttgaggacatgattattgacagtcttcagtgggatgaccatagggaggagactgaagaactgatgagaaaatatgaggctcgactctatattcttcagcaagcccgacgggatccactcaccaaacaaatttctgtgcccaatactgcttcaagaactgggtcctggagatggtatcgtcatggcgttcgataacgtcctgcagaaactcctggaggaatatgggagtgatgacacaaggaatgtgaaagaaaccacagagtacttaaaaacatcatggatcaatctcaaacaaagtattgctgacagacagaacgccttggaggctgagtggaggacggtgcaggcctctcgcagagatctggaaaacttcctgaagtggatccaagaagcagagaccacagtgaatgtgcttgtggatgcctctcatcgggagaatgctcttcaggatagtatcttggccagggaactcaaacagcagatgcaggacatccaggcagaaattgatgcccacaatgacatatttaaaagcattgacggaaacaggcagaagatggtaaaagctttgggaaattctgaagaggctactatgcttcaacatcgactggatgatatgaaccaaagatggaatgacttaaaagcaaaatctgctagcatcagggcccatttggaggccagcgctgagaagtggaacaggttgctgatgtccttagaagaactgatcaaatggctgaatatgaaagatgaagagcttaagaaacaaatgcctattggaggagatgttccagccttacagctccagtatgaccattgtaaggccctgagacgggagttaaaggagaaagaatattctgtcctgaatgctgtcgaccaggcccgagttttcttggctgatcagccaattgaggcccctgaagagccaagaagaaacctacaatcaaaaacagaattaactcctgaggagagagcccaaaagattgccaaagccatgcgcaaacagtcttctgaagtcaaagaaaaatgggaaagtctaaatgctgtaactagcaattggcaaaagcaagtggacaaggcattggagaaactcagagacctgcagggagctatggatgacctggacgctgacatgaaggaggcagagtccgtgcggaatggctggaagcccgtgggagacttactcattgactcgctgcaggatcacattgaaaaaatcatggcatttagagaagaaattgcaccaatcaactttaaagttaaaacggtgaatgatttatccagtcagctgtctccacttgacctgcatccctctctaaagatgtctcgccagctagatgaccttaatatgcgatggaaacttttacaggtttctgtggatgatcgccttaaacagcttcaggaagcccacagagattttggaccatcctctcagcattttctctctacgtcagtccagctgccgtggcaaagatccatttcacataataaagtgccctattacatcaaccatcaaacacagaccacctgttgggaccatcctaaaatgaccgaactctttcaatcccttgctgacctgaataatgtacgtttttctgcctaccgtacagcaatcaaaatccgaagactacaaaaagcactatgtttggatctcttagagttgagtacaacaaatgaaattttcaaacagcacaagttgaaccaaaatgaccagctcctcagtgttccagatgtcatcaactgtctgacaacaacttatgatggacttgagcaaatgcataaggacctggtcaacgttccactctgtgttgatatgtgtctcaattggttgctcaatgtctatgacacgggtcgaactggaaaaattagagtgcagagtctgaagattggattaatgtctctctccaaaggtctcttggaagaaaaatacagatatctctttaaggaagttgcagggccaacagaaatgtgtgaccagaggcagctgggcctgttacttcatgatgccatccagatcccccggcagctaggtgaagtagcagcttttggaggcagtaatattgagcctagtgttcgcagctgcttccaacagaataacaataaaccagaaataagtgtgaaagagtttatagattggatgcatttggaaccacagtccatggtttggctcccagttttacatcgagtggcagcagcggagactgcaaaacatcaggccaaatgcaacatctgtaaagaatgtccaattgtcgggttcaggtatagaagccttaagcattttaactatgatgtctgccagagttgtttcttttcgggtcgaacagcaaaaggtcacaaattacattacccaatggtggaatattgtatacctacaacatctggggaagatgtacgagacttcacaaaggtacttaagaacaagttcaggtcgaagaagtactttgccaaacaccctcgacttggttacctgcctgtccagacagttcttgaaggtgacaacttagagactcctatcacactcatcagtatgtggccagagcactatgacccctcacaatctcctcaactgtttcatgatgacacccattcaagaatagaacaatatgccacacgactggcccagatggaaaggactaatgggtcttttctcactgatagcagctccaccacaggaagtgtggaagacgagcacgccctcatccagcagtattgccaaacactcggaggagagtccccagtgagccagccgcagagcccagctcagatcctgaagtcagtagagagggaagaacgtggagaactggagaggatcattgctgacctggaggaagaacaaagaaatctacaggtggagtatgagcagctgaaggaccagcacctccgaagggggctccctgtcggttcaccgccagagtcgattatatctccccatcacacgtctgaggattcagaacttatagcagaagcaaaactcctcaggcagcacaaaggtcggctggaggctaggatgcagattttagaagatcacaataaacagctggagtctcagctccaccgcctccgacagctgctggagcagcctgaatctgattcccgaatcaatggtgtttccccatgggcttctcctcagcattctgcactgagctactcgcttgatccagatgcctccggcccacagttccaccaggcagcgggagaggacctgctggccccaccgcacgacaccagcacggatctcacggaggtcatggagcagattcacagcacgtttccatcttgctgcccaaatgttcccagcaggccacaggcaatgtgaagtattcatccggccaaccaatgtttcctgacgtacagtgttgcccttttcagcaaatgccaattccaagttccattaaatcagaagctccatggctccttggcccacgatgttgagtgctgactgtgtgttctactgaaagagtaaaacactgactatccaaagagaaatggatattttgtttttataataaccatatattattgttttcttcttccctttctatgcaagtgtaaattaatgaacagagaggtatttggaaatggtaatacatttgtcacggatttgtataatgtatacagcattgggaaagtgggtgggggctttctaatatgataccgtctttttaataactatgacaaagcttacataagaattagaagaccactttacatttttacattccttctgctgttcatattaaccttgcacaattacttcattttttctttgactcttttaccacaatgttttggttatttataatttatcagccatatgtttatcagccatataaccaactagatcccaaatagatccatgtatttgtttccgtgatttggccacattaataaattcataaatttcaatcaaatatcttatatatacacacatatggtttaagctacagccctgtgtatgccgtttaactttatttgacgttgcccacttacttctttgctgaccacttggataaccgtaataaaaatcctataagcctaaatggcatttcttttgggatatttttcctgcattttattccctttttatataagtaggaattaattatttattttatgtcttaatctatttgataaagaagactacattataataatctcaaagatcatattaccaaaggttgcccacttgagcatattttcattttgacacagaaacaaaatttagtacaacctttcctagttcccatgtcttgattttcatcattacatgcacagcagacctttacctattgtgataccagaacacatcattgtctttggttcccttcaaagagaattttattgttgttttgtattttcaagtccttaatagttcttgaaactcctagttgttttcttgttgaaagcagacacacatttagtgcacggcttattttacctttcgggtgaaagatcagatgtttttatacccttcacttgatcaatatatttggaaagaatgtttatcaaaagtctatgtcactgcttctacagaagaatgaaattaatgcttaggtgatggtacctccacctacatctttttgagtgcattcaattatgtattttggtttagcttctgatttaacatttaattgattcagtttaaacatgttacttaattagcaaatgtagaggaaccaaaaaaaggtgaaaataatatgttttgattcaaacctaaagacataaaaacataaagacattttaactttgggttctctttagctgggatctggccagaaggaggcttaaagttagaaattgctattattttagaataggttgggtgggttggggggcaagggtgtctatttgcagcagagatattttgaaaagaagaaaattgttttatataaaaaggaaagccatgaccacctttctacctcagatccatcttcatccattgcattggaaactgctttatgctgctgcagtctgcaaagtctagagcttttatcaggccatgtcatacccaagaaagcacctatttaaagaaaaaacaattccctgagctctcaactccaagttgtagatttggtgtcttccttgttcttactttaaaaatatctctgctgcaaatagacacccttgccccccaacccacccaacctattctaaaataatagcaatttctaactttaagcctccttctggccagancccagctaaagagaccca

SEQ ID NO: 322275 - DNA, 10798 bp, Homo sapiens
aaatacatcgcaccaccaaactaacactcgcacacacccccgcggttactccgtgtcaaactcctagaggagcccttggccagctcggggtgcggcggtggcgaccggcaggcgaggaggcccgcgggcagcaggtattgatgtcaagctgaaccatcgtaggaagttgaaagccttagaaagaggacttggtaaagtttttggattatcttgaaactcttgcatatggcatggccaagtatggagaacatgaagccagtcctgacaatgggcagaacgaattcagtgatatcattaagtccagatctgatgaacacaatgacgtacagaagaaaacctttaccaaatggataaatgctcgattttcaaagagtgggaaaccacccatcaatgatatgttcacagacctcaaagatggaaggaagctattggatcttctagaaggcctcacaggaacatcactgccaaaggaacgtggttccacaagggtacatgccttaaataacgtcaacagagtgctgcaggttttacatcagaacaatgtggaattagtgaatatagggggaactgacattgtggatggaaatcacaaactgactttggggttactttggagcatcattttgcactggcaggtgaaagatgtcatgaaggatgtcatgtcggacctgcagcagacgaacagtgagaagatcctgctcagctgggtgcgtcagaccaccaggccctacagccaagtcaacgtcctcaacttcaccaccagctggacagatggactcgcctttaatgctgtcctccaccgacataaacctgatctcttcagctgggataaagttgtcaaaatgtcaccaattgagagacttgaacatgccttcagcaaggctcaaacttatttgggaattgaaaagctgttagatcctgaagatgttgccgttcagcttcctgacaagaaatccataattatgtatttaacatctttgtttgaggtgctacctcagcaagtcaccatagacgccatccgtgaggtagagacactcccaaggaaatataaaaaagaatgtgaagaagaggcaattaatatacagagtacagcgcctgaggaggagcatgagagtccccgagctgaaactcccagcactgtcactgaggtcgacatggatctggacagctatcagattgcgttggaggaagtgctgacctggttgctttctgctgaggacactttccaggagcaggatgatatttctgatgatgttgaagaagtcaaagaccagtttgcaacccatgaagcttttatgatggaactgactgcacaccagagcagtgtgggcagcgtcctgcaggcaggcaaccaactgataacacaaggaactctgtcagacgaagaagaatttgagattcaggaacagatgaccctgctgaatgctagatgggaggctcttagggtggagagtatggacagacagtcccggctgcacgatgtgctgatggaactgcagaagaagcaactgcagcagctctccgcctggttaacactcacagaggagcgcattcagaagatggaaacttgccccctggatgatgatgtaaaatctctacaaaagctgctagaagaacataaaagtttgcaaagtgatcttgaggctgaacaggtgaaagtaaattcactaactcacatggtggtcattgttgatgaaaacagtggtgagagtgctacagctatcctagaagaccagttacagaaacttggtgagcgctggacagcagtatgccgttggactgaagaacgctggaataggttacaagaaatcaatatattgtggcaggaattattggaagaacagtgcttgttgaaagcttggttaaccgaaaaagaagaggctttaaataaagtccagacaagcaacttcaaagaccaaaaggaactaagtgtcagtgttcgacgtctggctattttgaaggaagacatggaaatgaagcgtcaaacattggatcagctgagtgagattggccaggatgtgggacaattacttgataattccaaggcatctaagaagatcaacagtgactcagaggaactgactcaaagatgggattctttggttcagagactagaagattcctccaaccaggtgactcaggctgtagcaaagctggggatgtctcagattcctcagaaggaccttttggagactgttcgtgtaagagaacaagcaattacaaaaaaatctaagcaggaactgcctcctcctcctcccccaaagaagagacagatccatgtggatattgaagctaagaaaaagtttgatgctataagtgcagagctgttgaactggattttgaaatggaaaactgccattcagaccacagagataaaagagtatatgaagatgcaagacacttccgaaatgaaaaagaagttgaaggcattagaaaaagaacagagagaaagaatccccagagcagatgaattaaaccaaactggacaaatccttgtggagcaaatgggaaaagaaggccttcctactgaagaaataaaaaatgttctggagaaggtttcatcagaatggaagaatgtatctcaacatttggaagatctagaaagaaagattcagctacaggaagatataaatgcttatttcaagcagcttgatgagcttgaaaaggtcatcaagacaaaggaggagtgggtaaaacacacttccatttctgaatcttcccggcagtccttgccaagcttgaaggattcctgtcagcgggaattgacaaatcttcttggccttcaccccaaaattgaaatggctcgtgcaagctgctcggccctgatgtctcagccttctgccccagattttgtccagcggggcttcgatagctttctgggccgctaccaagctgtacaagaggctgtagaggatcgtcaacaacatctagagaatgaactgaagggccaacctggacatgcatatctggaaacattgaaaacactgaaagatgtgctaaatgattcagaaaataaggcccaggtgtctctgaatgtccttaatgatcttgccaaggtggagaaggccctgcaagaaaaaaagacccttgatgaaatccttgagaatcagaaacctgcattacataaacttgcagaagaaacaaaggctctggagaaaaatgttcatcctgatgtagaaaaattatataagcaagaatttgatgatgtgcaaggaaagtggaacaagctaaaggtcttggtttccaaagatctacatttgcttgaggaaattgctctcacactcagagcttttgaggccgattcaacagtcattgagaagtggatggatggcgtgaaagacttcttaatgaaacagcaggctgcccaaggagacgacgcaggtctacagaggcagttagaccagtgctctgcatttgttaatgaaatagaaacaattgaatcatctctgaaaaacatgaaggaaatagagactaatcttcgaagtggtccagttgctggaataaaaacttgggtgcagacaagactaggtgactaccaaactcaactggagaaacttagcaaggagatcgctactcaaaaaagtaggttgtctgaaagtcaagaaaaagctgcgaacctgaagaaagacttggcagagatgcaggaatggatgacccaggccgaggaagaatatttggagcgggattttgagtacaagtcaccagaagagcttgagagtgctgtggaagagatgaagagggcaaaagaggatgtgttgcagaaggaggtgagagtgaagattctcaaggacaacatcaagttattagctgccaaggtgccctctggtggccaggagttgacgtctgagctgaatgttgtgctggagaattaccaacttctttgtaatagaattcgaggaaagtgccacacgctagaggaggtctggtcttgttggattgaactgcttcactatttggatcttgaaactacctggttaaacactttggaagagcggatgaagagcacagaggtcctgcctgagaagacggatgctgtcaacgaagccctggagtctctggaatctgttctgcgccacccggcagataatcgcacccagattcgagagcttggccagactctgattgatggggggatcctggatgatataatcagtgagaaactggaggctttcaacagccgatatgaagatctaagtcacctggcagagagcaagcagatttctttggaaaagcaactccaggtgctgcgggaaactgaccagatgcttcaagtcttgcaagagagcttgggggagctggacaaacagctcaccacatacctgactgacaggatagatgctttccaagttccacaggaagctcagaaaatccaagcagagatctcagcccatgagctaaccctagaggagttgagaagaaatatgcgttctcagcccctgacctccccagagagtaggactgccagaggaggaagtcagatggatgtgctacagaggaaactccgagaggtgtccacaaagttccagcttttccagaagccagctaacttcgagcagcgcatgctggactgcaagcgtgtgctggatggcgtgaaagcagaacttcacgttctggatgtgaaggacgtagaccctgacgtcatacagacgcacctggacaagtgtatgaaactgtataaaactttgagtgaagtcaaacttgaagtggaaactgtgattaaaacaggaagacatattgtccagaaacagcaaacggacaacccaaaagggatggatgagcagctgacttccctgaaggttctttacaatgacctgggcgcacaggtgacagaaggaaaacaggatctggaaagagcatcacagttggcccggaaaatgaagaaagaggctgcttctctctctgaatggctttctgctactgaaactgaattggtacagaagtccacttcagaaggtctgcttggtgacttggatacagaaatttcctgggctaaaaatgttctgaaggatctggaaaagagaaaagctgatttaaataccatcacagagagtagtgctgccctgcaaaacttgattgagggcagtgagcctattttagaagagaggctctgcgtccttaacgctgggtggagccgagttcgtacctggactgaagattggtgcaataccttgatgaaccatcagaaccagctagaaatatttgatgggaacgtggctcacataagtacctggctttatcaagctgaagctctattggatgaaattgaaaagaaaccaacaagtaaacaggaagaaattgtgaagcgtttagtatctgagctggatgatgccaacctccaggttgaaaatgtccgcgatcaagcccttattttgatgaatgcccgtggaagctcaagcagggagcttgtagaaccaaagttagctgagctgaataggaactttgaaaaggtgtctcaacatatcaaaagtgccaaattgctaattgctcaggaaccattataccaatgtttggtcaccactgaaacatttgaaactggtgtgcctttctctgacttggaaaaattagaaaatgacatagaaaatatgttaaaatttgtggaaaaacacttggaatccagtgatgaagatgaaaagatggatgaggagagtgcccagattgaggaagttctacaaagaggagaagaaatgttacatcaacctatggaagataataaaaaagaaaagatccgtttgcaattattacttttgcatactagatacaacaaaattaaggcaatccctattcaacagaggaaaatgggtcaacttgcttctggaattagatcatcacttcttcctacagattatctggttgaaattaacaaaattttactttgcatggatgatgttgaattatcgcttaatgttccagagctcaacactgctatttacgaagacttctcttttcaggaagactctctgaagaatatcaaagaccaactggacaaacttggagagcagattgcagtcattcatgaaaaacagccagatgtcatccttgaagcctctggacctgaagccattcagatcagagatacacttactcagctgaatgcaaaatgggacagaattaatagaatgtacagtgatcggaaaggttgttttgacagggcaatggaagaatggagacagttccattgtgaccttaatgacctcacacagtggataacagaggctgaagaattactggttgatacctgtgctccaggtggcagcctggacttagagaaagccaggatacatcagcaggaacttgaggtgggcatcagcagccaccagcccagttttgcagcactaaaccgaactggggatgggattgtgcagaaactctcccaggcagatggaagcttcttgaaagaaaaactggcaggtttaaaccaacgctgggatgcaattgttgcagaagtgaaggataggcagccaaggctaaaaggagaaagtaagcaggtgatgaagtacaggcatcagctagatgagattatctgttggttaacaaaggctgagcatgctatgcaaaagagatcaaccaccgaattgggagaaaacctgcaagaattaagagacttaactcaagaaatggaagtacatgctgaaaaactcaaatggctgaatagaactgaattggagatgctttcagataaaagtctgagtttacctgaaagggataaaatttcagaaagcttaaggactgtaaatatgacatggaataagatttgcagagaggtgcctaccaccctgaaggaatgcatccaggagcccagttctgtttcacagacaaggattgctgctcatcctaatgtccaaaaggtggtgctagtatcatctgcgtcagatattcctgttcagtctcatcgtacttcggaaatttcaattcctgctgatcttgataaaactataacagaactagccgactggctggtattaatcgaccagatgctgaagtccaacattgtcactgttggggatgtagaagagatcaataagaccgtttcccgaatgaaaattacaaaggctgacttagaacagcgccatcctcagctggattatgtttttacatgggcacagaaattgaaaaataaagcttccagttcagatatgagaacagcaattacagaaaaattggaaagggtcaagaaccagtgggatggcacccagcatggcgttgagctaagacagcagcagcttgaggacatgattattgacagtcttcagtgggatgaccatagggaggagactgaagaactgatgagaaaatatgaggctcgactctatattcttcagcaagcccgacgggatccactcaccaaacaaatttctgtgcccaatactgcttcaagaactgggtcctggagatggtatcgtcatggcgttcgataacgtcctgcagaaactcctggaggaatatgggagtgatgacacaaggaatgtgaaagaaaccacagagtacttaaaaacatcatggatcaatctcaaacaaagtattgctgacagacagaacgccttggaggctgagtggaggacggtgcaggcctctcgcagagatctggaaaacttcctgaagtggatccaagaagcagagaccacagtgaatgtgcttgtggatgcctctcatcgggagaatgctcttcaggatagtatcttggccagggaactcaaacagcagatgcaggacatccaggcagaaattgatgcccacaatgacatatttaaaagcattgacggaaacaggcagaagatggtaaaagctttgggaaattctgaagaggctactatgcttcaacatcgactggatgatatgaaccaaagatggaatgacttaaaagcaaaatctgctagcatcagggcccatttggaggccagcgctgagaagtggaacaggttgctgatgtccttagaagaactgatcaaatggctgaatatgaaagatgaagagcttaagaaacaaatgcctattggaggagatgttccagccttacagctccagtatgaccattgtaaggccctgagacgggagttaaaggagaaagaatattctgtcctgaatgctgtcgaccaggcccgagttttcttggctgatcagccaattgaggcccctgaagagccaagaagaaacctacaatcaaaaacagaattaactcctgaggagagagcccaaaagattgccaaagccatgcgcaaacagtcttctgaagtcaaagaaaaatgggaaagtctaaatgctgtaactagcaattggcaaaagcaagtggacaaggcattggagaaactcagagacctgcagggagctatggatgacctggacgctgacatgaaggaggcagagtccgtgcggaatggctggaagcccgtgggagacttactcattgactcgctgcaggatcacattgaaaaaatcatggcatttagagaagaaattgcaccaatcaactttaaagttaaaacggtgaatgatttatccagtcagctgtctccacttgacctgcatccctctctaaagatgtctcgccagctagatgaccttaatatgcgatggaaacttttacaggtttctgtggatgatcgccttaaacagcttcaggaagcccacagagattttggaccatcctctcagcattttctctctacgtcagtccagctgccgtggcaaagatccatttcacataataaagtgccctattacatcaaccatcaaacacagaccacctgttgggaccatcctaaaatgaccgaactctttcaatcccttgctgacctgaataatgtacgtttttctgcctaccgtacagcaatcaaaatccgaagactacaaaaagcactatgtttggatctcttagagttgagtacaacaaatgaaattttcaaacagcacaagttgaaccaaaatgaccagctcctcagtgttccagatgtcatcaactgtctgacaacaacttatgatggacttgagcaaatgcataaggacctggtcaacgttccactctgtgttgatatgtgtctcaattggttgctcaatgtctatgacacgggtcgaactggaaaaattagagtgcagagtctgaagattggattaatgtctctctccaaaggtctcttggaagaaaaatacagatatctctttaaggaagttgcagggccaacagaaatgtgtgaccagaggcagctgggcctgttacttcatgatgccatccagatcccccggcagctaggtgaagtagcagcttttggaggcagtaatattgagcctagtgttcgcagctgcttccaacagaataacaataaaccagaaataagtgtgaaagagtttatagattggatgcatttggaaccacagtccatggtttggctcccagttttacatcgagtggcagcagcggagactgcaaaacatcaggccaaatgcaacatctgtaaagaatgtccaattgtcgggttcaggtatagaagccttaagcattttaactatgatgtctgccagagttgtttcttttcgggtcgaacagcaaaaggtcacaaattacattacccaatggtggaatattgtatacctacaacatctggggaagatgtacgagacttcacaaaggtacttaagaacaagttcaggtcgaagaagtactttgccaaacaccctcgacttggttacctgcctgtccagacagttcttgaaggtgacaacttagagactcctatcacactcatcagtatgtggccagagcactatgacccctcacaatctcctcaactgtttcatgatgacacccattcaagaatagaacaatatgccacacgactggcccagatggaaaggactaatgggtcttttctcactgatagcagctccaccacaggaagtgtggaagacgagcacgccctcatccagcagtattgccaaacactcggaggagagtccccagtgagccagccgcagagcccagctcagatcctgaagtcagtagagagggaagaacgtggagaactggagaggatcattgctgacctggaggaagaacaaagaaatctacaggtggagtatgagcagctgaaggaccagcacctccgaagggggctccctgtcggttcaccgccagagtcgattatatctccccatcacacgtctgaggattcagaacttatagcagaagcaaaactcctcaggcagcacaaaggtcggctggaggctaggatgcagattttagaagatcacaataaacagctggagtctcagctccaccgcctccgacagctgctggagcagcctgaatctgattcccgaatcaatggtgtttccccatgggcttctcctcagcattctgcactgagctactcgcttgatccagatgcctccggcccacagttccaccaggcagcgggagaggacctgctggccccaccgcacgacaccagcacggatctcacggaggtcatggagcagattcacagcacgtttccatcttgctgcccaaatgttcccagcaggccacaggcaatgtgaagtattcatccggccaaccaatgtttcctgacgtacagtgttgcccttttcagcaaatgccaattccaagttccattaaatcagaagctccatggctccttggcccacgatgttgagtgctgactgtgtgttctactgaaagagtaaaacactgactatccaaagagaaatggatattttgtttttataataaccatatattattgttttcttcttccctttctatgcaagtgtaaattaatgaacagagaggtatttggaaatggta

SEQ ID NO: 322276 - DNA, 12549 bp, Homo sapiens
cagatgtaggtgatgagcggcctggcagccaccacgtttcattggaaaaagtgcagattggatttgccagggcatgtagctctccaggcttgcaagcgattaccagatgaacacaatgacgtacagaagaaaacctttaccaaatggataaatgctcgattttcaaagagtgggaaaccacccatcaatgatatgttcacagacctcaaagatggaaggaagctattggatcttctagaaggcctcacaggaacatcactgccaaaggaacgtggttccacaagggtacatgccttaaataacgtcaacagagtgctgcaggttttacatcagaacaatgtggaattagtgaatatagggggaactgacattgtggatggaaatcacaaactgactttggggttactttggagcatcattttgcactggcaggtgaaagatgtcatgaaggatgtcatgtcggacctgcagcagacgaacagtgagaagatcctgctcagctgggtgcgtcagaccaccaggccctacagccaagtcaacgtcctcaacttcaccaccagctggacagatggactcgcctttaatgctgtcctccaccgacataaacctgatctcttcagctgggataaagttgtcaaaatgtcaccaattgagagacttgaacatgccttcagcaaggctcaaacttatttgggaattgaaaagctgttagatcctgaagatgttgccgttcagcttcctgacaagaaatccataattatgtatttaacatctttgtttgaggtgctacctcagcaagtcaccatagacgccatccgtgaggtagagacactcccaaggaaatataaaaaagaatgtgaagaagaggcaattaatatacagagtacagcgcctgaggaggagcatgagagtccccgagctgaaactcccagcactgtcactgaggtcgacatggatctggacagctatcagattgcgttggaggaagtgctgacctggttgctttctgctgaggacactttccaggagcaggatgatatttctgatgatgttgaagaagtcaaagaccagtttgcaacccatgaagcttttatgatggaactgactgcacaccagagcagtgtgggcagcgtcctgcaggcaggcaaccaactgataacacaaggaactctgtcagacgaagaagaatttgagattcaggaacagatgaccctgctgaatgctagatgggaggctcttagggtggagagtatggacagacagtcccggctgcacgatgtgctgatggaactgcagaagaagcaactgcagcagctctccgcctggttaacactcacagaggagcgcattcagaagatggaaacttgccccctggatgatgatgtaaaatctctacaaaagctgctagaagaacataaaagtttgcaaagtgatcttgaggctgaacaggtgaaagtaaattcactaactcacatggtggtcattgttgatgaaaacagtggtgagagtgctacagctatcctagaagaccagttacagaaacttggtgagcgctggacagcagtatgccgttggactgaagaacgctggaataggttacaagaaatcaatatattgtggcaggaattattggaagaacagtgcttgttgaaagcttggttaaccgaaaaagaagaggctttaaataaagtccagacaagcaacttcaaagaccaaaaggaactaagtgtcagtgttcgacgtctggctattttgaaggaagacatggaaatgaagcgtcaaacattggatcagctgagtgagattggccaggatgtgggacaattacttgataattccaaggcatctaagaagatcaacagtgactcagaggaactgactcaaagatgggattctttggttcagagactagaagattcctccaaccaggtgactcaggctgtagcaaagctggggatgtctcagattcctcagaaggaccttttggagactgttcgtgtaagagaacaagcaattacaaaaaaatctaagcaggaactgcctcctcctcctcccccaaagaagagacagatccatgtggatattgaagctaagaaaaagtttgatgctataagtgcagagctgttgaactggattttgaaatggaaaactgccattcagaccacagagataaaagagtatatgaagatgcaagacacttccgaaatgaaaaagaagttgaaggcattagaaaaagaacagagagaaagaatccccagagcagatgaattaaaccaaactggacaaatccttgtggagcaaatgggaaaagaaggccttcctactgaagaaataaaaaatgttctggagaaggtttcatcagaatggaagaatgtatctcaacatttggaagatctagaaagaaagattcagctacaggaagatataaatgcttatttcaagcagcttgatgagcttgaaaaggtcatcaagacaaaggaggagtgggtaaaacacacttccatttctgaatcttcccggcagtccttgccaagcttgaaggattcctgtcaggtaaggagccaacggtctggaaagtggaggaattctatgtgcagttccagagttaaggagggcttctcgtatcatgaactttaagttaatgctgccctgattaacttcctgtgaggatgttcatcttcagtgagttgtgtgaccgtattttctcttccttagcgggaattgacaaatcttcttggccttcaccccaaaattgaaatggctcgtgcaagctgctcggccctgatgtctcagccttctgccccagattttgtccagcggggcttcgatagctttctgggccgctaccaagctgtacaagaggctgtagaggatcgtcaacaacatctagagaatgaactgaagggccaacctggacatgcatatctggaaacattgaaaacactgaaagatgtgctaaatgattcagaaaataaggcccaggtgtctctgaatgtccttaatgatcttgccaaggtggagaaggccctgcaagaaaaaaagacccttgatgaaatccttgagaatcagaaacctgcattacataaacttgcagaagaaacaaaggctctggagaaaaatgttcatcctgatgtagaaaaattatataagcaagaatttgatgatgtgcaaggaaagtggaacaagctaaaggtcttggtttccaaagatctacatttgcttgaggaaattgctctcacactcagagcttttgaggccgattcaacagtcattgagaagtggatggatggcgtgaaagacttcttaatgaaacagcaggctgcccaaggagacgacgcaggtctacagaggcagttagaccagtgctctgcatttgttaatgaaatagaaacaattgaatcatctctgaaaaacatgaaggaaatagagactaatcttcgaagtggtccagttgctggaataaaaacttgggtgcagacaagactaggtgactaccaaactcaactggagaaacttagcaaggagatcgctactcaaaaaagtaggttgtctgaaagtcaagaaaaagctgcgaacctgaagaaagacttggcagagatgcaggaatggatgacccaggccgaggaagaatatttggagcgggattttgagtacaagtcaccagaagagcttgagagtgctgtggaagagatgaagagggcaaaagaggatgtgttgcagaaggaggtgagagtgaagattctcaaggacaacatcaagttattagctgccaaggtgccctctggtggccaggagttgacgtctgagctgaatgttgtgctggagaattaccaacttctttgtaatagaattcgaggaaagtgccacacgctagaggaggtctggtcttgttggattgaactgcttcactatttggatcttgaaactacctggttaaacactttggaagagcggatgaagagcacagaggtcctgcctgagaagacggatgctgtcaacgaagccctggagtctctggaatctgttctgcgccacccggcagataatcgcacccagattcgagagcttggccagactctgattgatggggggatcctggatgatataatcagtgagaaactggaggctttcaacagccgatatgaagatctaagtcacctggcagagagcaagcagatttctttggaaaagcaactccaggtgctgcgggaaactgaccagatgcttcaagtcttgcaagagagcttgggggagctggacaaacagctcaccacatacctgactgacaggatagatgctttccaagttccacaggaagctcagaaaatccaagcagagatctcagcccatgagctaaccctagaggagttgagaagaaatatgcgttctcagcccctgacctccccagagagtaggactgccagaggaggaagtcagatggatgtgctacagaggaaactccgagaggtgtccacaaagttccagcttttccagaagccagctaacttcgagcagcgcatgctggactgcaagcgtgtgctggatggcgtgaaagcagaacttcacgttctggatgtgaaggacgtagaccctgacgtcatacagacgcacctggacaagtgtatgaaactgtataaaactttgagtgaagtcaaacttgaagtggaaactgtgattaaaacaggaagacatattgtccagaaacagcaaacggacaacccaaaagggatggatgagcagctgacttccctgaaggttctttacaatgacctgggcgcacaggtgacagaaggaaaacaggatctggaaagagcatcacagttggcccggaaaatgaagaaagaggctgcttctctctctgaatggctttctgctactgaaactgaattggtacagaagtccacttcagaaggtctgcttggtgacttggatacagaaatttcctgggctaaaaatgttctgaaggatctggaaaagagaaaagctgatttaaataccatcacagagagtagtgctgccctgcaaaacttgattgagggcagtgagcctattttagaagagaggctctgcgtccttaacgctgggtggagccgagttcgtacctggactgaagattggtgcaataccttgatgaaccatcagaaccagctagaaatatttgatgggaacgtggctcacataagtacctggctttatcaagctgaagctctattggatgaaattgaaaagaaaccaacaagtaaacaggaagaaattgtgaagcgtttagtatctgagctggatgatgccaacctccaggttgaaaatgtccgcgatcaagcccttattttgatgaatgcccgtggaagctcaagcagggagcttgtagaaccaaagttagctgagctgaataggaactttgaaaaggtgtctcaacatatcaaaagtgccaaattgctaattgctcaggaaccattataccaatgtttggtcaccactgaaacatttgaaactggtgtgcctttctctgacttggaaaaattagaaaatgacatagaaaatatgttaaaatttgtggaaaaacacttggaatccagtgatgaagatgaaaagatggatgaggagagtgcccagattgaggaagttctacaaagaggagaagaaatgttacatcaacctatggaagataataaaaaagaaaagatccgtttgcaattattacttttgcatactagatacaacaaaattaaggcaatccctattcaacagaggaaaatgggtcaacttgcttctggaattagatcatcacttcttcctacagattatctggttgaaattaacaaaattttactttgcatggatgatgttgaattatcgcttaatgttccagagctcaacactgctatttacgaagacttctcttttcaggaagactctctgaagaatatcaaagaccaactggacaaacttggagagcagattgcagtcattcatgaaaaacagccagatgtcatccttgaagcctctggacctgaagccattcagatcagagatacacttactcagctgaatgcaaaatgggacagaattaatagaatgtacagtgatcggaaaggttgttttgacagggcaatggaagaatggagacagttccattgtgaccttaatgacctcacacagtggataacagaggctgaagaattactggttgatacctgtgctccaggtggcagcctggacttagagaaagccaggatacatcagcaggaacttgaggtgggcatcagcagccaccagcccagttttgcagcactaaaccgaactggggatgggattgtgcagaaactctcccaggcagatggaagcttcttgaaagaaaaactggcaggtttaaaccaacgctgggatgcaattgttgcagaagtgaaggataggcagccaaggctaaaaggagaaagtaagcaggtgatgaagtacaggcatcagctagatgagattatctgttggttaacaaaggctgagcatgctatgcaaaagagatcaaccaccgaattgggagaaaacctgcaagaattaagagacttaactcaagaaatggaagtacatgctgaaaaactcaaatggctgaatagaactgaattggagatgctttcagataaaagtctgagtttacctgaaagggataaaatttcagaaagcttaaggactgtaaatatgacatggaataagatttgcagagaggtgcctaccaccctgaaggaatgcatccaggagcccagttctgtttcacagacaaggattgctgctcatcctaatgtccaaaaggtggtgctagtatcatctgcgtcagatattcctgttcagtctcatcgtacttcggaaatttcaattcctgctgatcttgataaaactataacagaactagccgactggctggtattaatcgaccagatgctgaagtccaacattgtcactgttggggatgtagaagagatcaataagaccgtttcccgaatgaaaattacaaaggctgacttagaacagcgccatcctcagctggattatgtttttacatgggcacagaaattgaaaaataaagcttccagttcagatatgagaacagcaattacagaaaaattggaaagggtcaagaaccagtgggatggcacccagcatggcgttgagctaagacagcagcagcttgaggacatgattattgacagtcttcagtgggatgaccatagggaggagactgaagaactgatgagaaaatatgaggctcgactctatattcttcagcaagcccgacgggatccactcaccaaacaaatttctgtgcccaatactgcttcaagaactgggtcctggagatggtatcgtcatggcgttcgataacgtcctgcagaaactcctggaggaatatgggagtgatgacacaaggaatgtgaaagaaaccacagagtacttaaaaacatcatggatcaatctcaaacaaagtattgctgacagacagaacgccttggaggctgagtggaggacggtgcaggcctctcgcagagatctggaaaacttcctgaagtggatccaagaagcagagaccacagtgaatgtgcttgtggatgcctctcatcgggagaatgctcttcaggatagtatcttggccagggaactcaaacagcagatgcaggacatccaggcagaaattgatgcccacaatgacatatttaaaagcattgacggaaacaggcagaagatggtaaaagctttgggaaattctgaagaggctactatgcttcaacatcgactggatgatatgaaccaaagatggaatgacttaaaagcaaaatctgctagcatcagggcccatttggaggccagcgctgagaagtggaacaggttgctgatgtccttagaagaactgatcaaatggctgaatatgaaagatgaagagcttaagaaacaaatgcctattggaggagatgttccagccttacagctccagtatgaccattgtaaggccctgagacgggagttaaaggagaaagaatattctgtcctgaatgctgtcgaccaggcccgagttttcttggctgatcagccaattgaggcccctgaagagccaagaagaaacctacaatcaaaaacagaattaactcctgaggagagagcccaaaagattgccaaagccatgcgcaaacagtcttctgaagtcaaagaaaaatgggaaagtctaaatgctgtaactagcaattggcaaaagcaagtggacaaggcattggagaaactcagagacctgcagggagctatggatgacctggacgctgacatgaaggaggcagagtccgtgcggaatggctggaagcccgtgggagacttactcattgactcgctgcaggatcacattgaaaaaatcatggcatttagagaagaaattgcaccaatcaactttaaagttaaaacggtgaatgatttatccagtcagctgtctccacttgacctgcatccctctctaaagatgtctcgccagctagatgaccttaatatgcgatggaaacttttacaggtttctgtggatgatcgccttaaacagcttcaggaagcccacagagattttggaccatcctctcagcattttctctctacgtcagtccagctgccgtggcaaagatccatttcacataataaagtgccctattacatcaaccatcaaacacagaccacctgttgggaccatcctaaaatgaccgaactctttcaatcccttgctgacctgaataatgtacgtttttctgcctaccgtacagcaatcaaaatccgaagactacaaaaagcactatgtttggatctcttagagttgagtacaacaaatgaaattttcaaacagcacaagttgaaccaaaatgaccagctcctcagtgttccagatgtcatcaactgtctgacaacaacttatgatggacttgagcaaatgcataaggacctggtcaacgttccactctgtgttgatatgtgtctcaattggttgctcaatgtctatgacacgggtcgaactggaaaaattagagtgcagagtctgaagattggattaatgtctctctccaaaggtctcttggaagaaaaatacagatatctctttaaggaagttgcagggccaacagaaatgtgtgaccagaggcagctgggcctgttacttcatgatgccatccagatcccccggcagctaggtgaagtagcagcttttggaggcagtaatattgagcctagtgttcgcagctgcttccaacagaataacaataaaccagaaataagtgtgaaagagtttatagattggatgcatttggaaccacagtccatggtttggctcccagttttacatcgagtggcagcagcggagactgcaaaacatcaggccaaatgcaacatctgtaaagaatgtccaattgtcgggttcaggtatagaagccttaagcattttaactatgatgtctgccagagttgtttcttttcgggtcgaacagcaaaaggtcacaaattacattacccaatggtggaatattgtatacctacaacatctggggaagatgtacgagacttcacaaaggtacttaagaacaagttcaggtcgaagaagtactttgccaaacaccctcgacttggttacctgcctgtccagacagttcttgaaggtgacaacttagagactcctatcacactcatcagtatgtggccagagcactatgacccctcacaatctcctcaactgtttcatgatgacacccattcaagaatagaacaatatgccacacgactggcccagatggaaaggactaatgggtcttttctcactgatagcagctccaccacaggaagtgtggaagacgagcacgccctcatccagcagtattgccaaacactcggaggagagtccccagtgagccagccgcagagcccagctcagatcctgaagtcagtagagagggaagaacgtggagaactggagaggatcattgctgacctggaggaagaacaaagaaatctacaggtggagtatgagcagctgaaggaccagcacctccgaagggggctccctgtcggttcaccgccagagtcgattatatctccccatcacacgtctgaggattcagaacttatagcagaagcaaaactcctcaggcagcacaaaggtcggctggaggctaggatgcagattttagaagatcacaataaacagctggagtctcagctccaccgcctccgacagctgctggagcagcctgaatctgattcccgaatcaatggtgtttccccatgggcttctcctcagcattctgcactgagctactcgcttgatccagatgcctccggcccacagttccaccaggcagcgggagaggacctgctggccccaccgcacgacaccagcacggatctcacggaggtcatggagcagattcacagcacgtttccatcttgctgcccaaatgttcccagcaggccacaggcaatgtgaagtattcatccggccaaccaatgtttcctgacgtacagtgttgcccttttcagcaaatgccaattccaagttccattaaatcagaagctccatggctccttggcccacgatgttgagtgctgactgtgtgttctactgaaagagtaaaacactgactatccaaagagaaatggatattttgtttttataataaccatatattattgttttcttcttccctttctatgcaagtgtaaattaatgaacagagaggtatttggaaatggtaatacatttgtcacggatttgtataatgtatacagcattgggaaagtgggtgggggctttctaatatgataccgtctttttaataactatgacaaagcttacataagaattagaagaccactttacatttttacattccttctgctgttcatattaaccttgcacaattacttcattttttctttgactcttttaccacaatgttttggttatttataatttatcagccatatgtttatcagccatataaccaactagatcccaaatagatccatgtatttgtttccgtgatttggccacattaataaattcataaatttcaatcaaatatcttatatatacacacatatggtttaagctacagccctgtgtatgccgtttaactttatttgacgttgcccacttacttctttgctgaccacttggataaccgtaataaaaatcctataagcctaaatggcatttcttttgggatatttttcctgcattttattccctttttatataagtaggaattaattatttattttatgtcttaatctatttgataaagaagactacattataataatctcaaagatcatattaccaaaggttgcccacttgagcatattttcattttgacacagaaacaaaatttagtacaacctttcctagttcccatgtcttgattttcatcattacatgcacagcagacctttacctattgtgataccagaacacatcattgtctttggttcccttcaaagagaattttattgttgttttgtattttcaagtccttaatagttcttgaaactcctagttgttttcttgttgaaagcagacacacatttagtgcacggcttattttacctttcgggtgaaagatcagatgtttttatacccttcacttgatcaatatatttggaaagaatgtttatcaaaagtctatgtcactgcttctacagaagaatgaaattaatgcttaggtgatggtacctccacctacatctttttgagtgcattcaattatgtattttggtttagcttctgatttaacatttaattgattcagtttaaacatgttacttaattagcaaatgtagaggaaccaaaaaaaggtgaaaataatatgttttgattcaaacctaaagacataaaaacataaagacattttaactttgggttctctttagctgggatctggccagaaggaggcttaaagttagaaattgctattattttagaataggttgggtgggttggggggcaagggtgtctatttgcagcagagatattttgaaaagaagaaaattgttttatataaaaaggaaagccatgaccacctttctacctcagatccatcttcatccattgcattggaaactgctttatgctgctgcagtctgcaaagtctagagcttttatcaggccatgtcatacccaagaaagcacctatttaaagaaaaaacaattccctgagctctcaactccaagttgtagatttggtgtcttccttgttcttactttaaaaagtcatgtgttaattttttttctgcctgtatttgtatgcaaaatgtcctctatctgctattaaagaaaagctacgtaaaacactacattgtaaccttctaagtaataataaataaaaagaaatatattgcagtaacaatgggaagtaagtatgtagttcttttgaaatatgtggtaaagaactaatcacagactatcatctaatctggttacatattgtatttttcatcctgaataaaagtaattttaacacaaaaaaactataaaacttcagctgg

SEQ ID NO: 322277 - DNA, 10960 bp, Homo sapiens
tgagacagatagaatcgagctggtaccgggcattatagtcgatattctgcactgtaagagcgtcccatcgtagctattcagaagggtcatctggttcgcgtgaatctcaaattcctcttcgtctgacagagttcctctgtgtcatcagttggttgcctgcccgcaggacgctgcccacactgctccggtgtgcacgctcacgctcccaccatacaacgctccatgggtcgcaaactggtctttgacttcttcaacatcatccgaaatatcatcctgctcctggaaagtgtcctcagcagaaagcaaccaggtcagcacttcctccaacgcaatctgatagctgtccagatccatgtcaacctcagtgacagtgctgggagtttcagatgtgggacaattacttgataattccaaggcatctaagaagatcaacagtgactcagaggaactgactcaaagatgggattctttggttcagagactagaagattcctccaaccaggtgactcaggctgtagcaaagctggggatgtctcagattcctcagaaggaccttttggagactgttcgtgtaagagaacaagcaattacaaaaaaatctaagcaggaactgcctcctcctcctcccccaaagaagagacagatccatgtggatattgaagctaagaaaaagtttgatgctataagtgcagagctgttgaactggattttgaaatggaaaactgccattcagaccacagagataaaagagtatatgaagatgcaagacacttccgaaatgaaaaagaagttgaaggcattagaaaaagaacagagagaaagaatccccagagcagatgaattaaaccaaactggacaaatccttgtggagcaaatgggaaaagaaggccttcctactgaagaaataaaaaatgttctggagaaggtttcatcagaatggaagaatgtatctcaacatttggaagatctagaaagaaagattcagctacaggaagatataaatgcttatttcaagcagcttgatgagcttgaaaaggtcatcaagacaaaggaggagtgggtaaaacacacttccatttctgaatcttcccggcagtccttgccaagcttgaaggattcctgtcagcgggaattgacaaatcttcttggccttcaccccaaaattgaaatggctcgtgcaagctgctcggccctgatgtctcagccttctgccccagattttgtccagcggggcttcgatagctttctgggccgctaccaagctgtacaagaggctgtagaggatcgtcaacaacatctagagaatgaactgaagggccaacctggacatgcatatctggaaacattgaaaacactgaaagatgtgctaaatgattcagaaaataaggcccaggtgtctctgaatgtccttaatgatcttgccaaggtggagaaggccctgcaagaaaaaaagacccttgatgaaatccttgagaatcagaaacctgcattacataaacttgcagaagaaacaaaggctctggagaaaaatgttcatcctgatgtagaaaaattatataagcaagaatttgatgatgtgcaaggaaagtggaacaagctaaaggtcttggtttccaaagatctacatttgcttgaggaaattgctctcacactcagagcttttgaggccgattcaacagtcattgagaagtggatggatggcgtgaaagacttcttaatgaaacagcaggctgcccaaggagacgacgcaggtctacagaggcagttagaccagtgctctgcatttgttaatgaaatagaaacaattgaatcatctctgaaaaacatgaaggaaatagagactaatcttcgaagtggtccagttgctggaataaaaacttgggtgcagacaagactaggtgactaccaaactcaactggagaaacttagcaaggagatcgctactcaaaaaagtaggttgtctgaaagtcaagaaaaagctgcgaacctgaagaaagacttggcagagatgcaggaatggatgacccaggccgaggaagaatatttggagcgggattttgagtacaagtcaccagaagagcttgagagtgctgtggaagagatgaagagggcaaaagaggatgtgttgcagaaggaggtgagagtgaagattctcaaggacaacatcaagttattagctgccaaggtgccctctggtggccaggagttgacgtctgagctgaatgttgtgctggagaattaccaacttctttgtaatagaattcgaggaaagtgccacacgctagaggaggtctggtcttgttggattgaactgcttcactatttggatcttgaaactacctggttaaacactttggaagagcggatgaagagcacagaggtcctgcctgagaagacggatgctgtcaacgaagccctggagtctctggaatctgttctgcgccacccggcagataatcgcacccagattcgagagcttggccagactctgattgatggggggatcctggatgatataatcagtgagaaactggaggctttcaacagccgatatgaagatctaagtcacctggcagagagcaagcagatttctttggaaaagcaactccaggtgctgcgggaaactgaccagatgcttcaagtcttgcaagagagcttgggggagctggacaaacagctcaccacatacctgactgacaggatagatgctttccaagttccacaggaagctcagaaaatccaagcagagatctcagcccatgagctaaccctagaggagttgagaagaaatatgcgttctcagcccctgacctccccagagagtaggactgccagaggaggaagtcagatggatgtgctacagaggaaactccgagaggtgtccacaaagttccagcttttccagaagccagctaacttcgagcagcgcatgctggactgcaagcgtgtgctggatggcgtgaaagcagaacttcacgttctggatgtgaaggacgtagaccctgacgtcatacagacgcacctggacaagtgtatgaaactgtataaaactttgagtgaagtcaaacttgaagtggaaactgtgattaaaacaggaagacatattgtccagaaacagcaaacggacaacccaaaagggatggatgagcagctgacttccctgaaggttctttacaatgacctgggcgcacaggtgacagaaggaaaacaggatctggaaagagcatcacagttggcccggaaaatgaagaaagaggctgcttctctctctgaatggctttctgctactgaaactgaattggtacagaagtccacttcagaaggtctgcttggtgacttggatacagaaatttcctgggctaaaaatgttctgaaggatctggaaaagagaaaagctgatttaaataccatcacagagagtagtgctgccctgcaaaacttgattgagggcagtgagcctattttagaagagaggctctgcgtccttaacgctgggtggagccgagttcgtacctggactgaagattggtgcaataccttgatgaaccatcagaaccagctagaaatatttgatgggaacgtggctcacataagtacctggctttatcaagctgaagctctattggatgaaattgaaaagaaaccaacaagtaaacaggaagaaattgtgaagcgtttagtatctgagctggatgatgccaacctccaggttgaaaatgtccgcgatcaagcccttattttgatgaatgcccgtggaagctcaagcagggagcttgtagaaccaaagttagctgagctgaataggaactttgaaaaggtgtctcaacatatcaaaagtgccaaattgctaattgctcaggaaccattataccaatgtttggtcaccactgaaacatttgaaactggtgtgcctttctctgacttggaaaaattagaaaatgacatagaaaatatgttaaaatttgtggaaaaacacttggaatccagtgatgaagatgaaaagatggatgaggagagtgcccagattgaggaagttctacaaagaggagaagaaatgttacatcaacctatggaagataataaaaaagaaaagatccgtttgcaattattacttttgcatactagatacaacaaaattaaggcaatccctattcaacagaggaaaatgggtcaacttgcttctggaattagatcatcacttcttcctacagattatctggttgaaattaacaaaattttactttgcatggatgatgttgaattatcgcttaatgttccagagctcaacactgctatttacgaagacttctcttttcaggaagactctctgaagaatatcaaagaccaactggacaaacttggagagcagattgcagtcattcatgaaaaacagccagatgtcatccttgaagcctctggacctgaagccattcagatcagagatacacttactcagctgaatgcaaaatgggacagaattaatagaatgtacagtgatcggaaaggttgttttgacagggcaatggaagaatggagacagttccattgtgaccttaatgacctcacacagtggataacagaggctgaagaattactggttgatacctgtgctccaggtggcagcctggacttagagaaagccaggatacatcagcaggaacttgaggtgggcatcagcagccaccagcccagttttgcagcactaaaccgaactggggatgggattgtgcagaaactctcccaggcagatggaagcttcttgaaagaaaaactggcaggtttaaaccaacgctgggatgcaattgttgcagaagtgaaggataggcagccaaggctaaaaggagaaagtaagcaggtgatgaagtacaggcatcagctagatgagattatctgttggttaacaaaggctgagcatgctatgcaaaagagatcaaccaccgaattgggagaaaacctgcaagaattaagagacttaactcaagaaatggaagtacatgctgaaaaactcaaatggctgaatagaactgaattggagatgctttcagataaaagtctgagtttacctgaaagggataaaatttcagaaagcttaaggactgtaaatatgacatggaataagatttgcagagaggtgcctaccaccctgaaggaatgcatccaggagcccagttctgtttcacagacaaggattgctgctcatcctaatgtccaaaaggtggtgctagtatcatctgcgtcagatattcctgttcagtctcatcgtacttcggaaatttcaattcctgctgatcttgataaaactataacagaactagccgactggctggtattaatcgaccagatgctgaagtccaacattgtcactgttggggatgtagaagagatcaataagaccgtttcccgaatgaaaattacaaaggctgacttagaacagcgccatcctcagctggattatgtttttacatgggcacagaaattgaaaaataaagcttccagttcagatatgagaacagcaattacagaaaaattggaaagggtcaagaaccagtgggatggcacccagcatggcgttgagctaagacagcagcagcttgaggacatgattattgacagtcttcagtgggatgaccatagggaggagactgaagaactgatgagaaaatatgaggctcgactctatattcttcagcaagcccgacgggatccactcaccaaacaaatttctgtgcccaatactgcttcaagaactgggtcctggagatggtatcgtcatggcgttcgataacgtcctgcagaaactcctggaggaatatgggagtgatgacacaaggaatgtgaaagaaaccacagagtacttaaaaacatcatggatcaatctcaaacaaagtattgctgacagacagaacgccttggaggctgagtggaggacggtgcaggcctctcgcagagatctggaaaacttcctgaagtggatccaagaagcagagaccacagtgaatgtgcttgtggatgcctctcatcgggagaatgctcttcaggatagtatcttggccagggaactcaaacagcagatgcaggacatccaggcagaaattgatgcccacaatgacatatttaaaagcattgacggaaacaggcagaagatggtaaaagctttgggaaattctgaagaggctactatgcttcaacatcgactggatgatatgaaccaaagatggaatgacttaaaagcaaaatctgctagcatcagggcccatttggaggccagcgctgagaagtggaacaggttgctgatgtccttagaagaactgatcaaatggctgaatatgaaagatgaagagcttaagaaacaaatgcctattggaggagatgttccagccttacagctccagtatgaccattgtaaggccctgagacgggagttaaaggagaaagaatattctgtcctgaatgctgtcgaccaggcccgagttttcttggctgatcagccaattgaggcccctgaagagccaagaagaaacctacaatcaaaaacagaattaactcctgaggagagagcccaaaagattgccaaagccatgcgcaaacagtcttctgaagtcaaagaaaaatgggaaagtctaaatgctgtaactagcaattggcaaaagcaagtggacaaggcattggagaaactcagagacctgcagggagctatggatgacctggacgctgacatgaaggaggcagagtccgtgcggaatggctggaagcccgtgggagacttactcattgactcgctgcaggatcacattgaaaaaatcatggcatttagagaagaaattgcaccaatcaactttaaagttaaaacggtgaatgatttatccagtcagctgtctccacttgacctgcatccctctctaaagatgtctcgccagctagatgaccttaatatgcgatggaaacttttacaggtttctgtggatgatcgccttaaacagcttcaggaagcccacagagattttggaccatcctctcagcattttctctctacgtcagtccagctgccgtggcaaagatccatttcacataataaagtgccctattacatcaaccatcaaacacagaccacctgttgggaccatcctaaaatgaccgaactctttcaatcccttgctgacctgaataatgtacgtttttctgcctaccgtacagcaatcaaaatccgaagactacaaaaagcactatgtttggatctcttagagttgagtacaacaaatgaaattttcaaacagcacaagttgaaccaaaatgaccagctcctcagtgttccagatgtcatcaactgtctgacaacaacttatgatggacttgagcaaatgcataaggacctggtcaacgttccactctgtgttgatatgtgtctcaattggttgctcaatgtctatgacacgggtcgaactggaaaaattagagtgcagagtctgaagattggattaatgtctctctccaaaggtctcttggaagaaaaatacagatatctctttaaggaagttgcagggccaacagaaatgtgtgaccagaggcagctgggcctgttacttcatgatgccatccagatcccccggcagctaggtgaagtagcagcttttggaggcagtaatattgagcctagtgttcgcagctgcttccaacagaataacaataaaccagaaataagtgtgaaagagtttatagattggatgcatttggaaccacagtccatggtttggctcccagttttacatcgagtggcagcagcggagactgcaaaacatcaggccaaatgcaacatctgtaaagaatgtccaattgtcgggttcaggtatagaagccttaagcattttaactatgatgtctgccagagttgtttcttttcgggtcgaacagcaaaaggtcacaaattacattacccaatggtggaatattgtatacctacaacatctggggaagatgtacgagacttcacaaaggtacttaagaacaagttcaggtcgaagaagtactttgccaaacaccctcgacttggttacctgcctgtccagacagttcttgaaggtgacaacttagagactcctatcacactcatcagtatgtggccagagcactatgacccctcacaatctcctcaactgtttcatgatgacacccattcaagaatagaacaatatgccacacgactggcccagatggaaaggactaatgggtcttttctcactgatagcagctccaccacaggaagtgtggaagacgagcacgccctcatccagcagtattgccaaacactcggaggagagtccccagtgagccagccgcagagcccagctcagatcctgaagtcagtagagagggaagaacgtggagaactggagaggatcattgctgacctggaggaagaacaaagaaatctacaggtggagtatgagcagctgaaggaccagcacctccgaagggggctccctgtcggttcaccgccagagtcgattatatctccccatcacacgtctgaggattcagaacttatagcagaagcaaaactcctcaggcagcacaaaggtcggctggaggctaggatgcagattttagaagatcacaataaacagctggagtctcagctccaccgcctccgacagctgctggagcagcctgaatctgattcccgaatcaatggtgtttccccatgggcttctcctcagcattctgcactgagctactcgcttgatccagatgcctccggcccacagttccaccaggcagcgggagaggacctgctggccccaccgcacgacaccagcacggatctcacggaggtcatggagcagattcacagcacgtttccatcttgctgcccaaatgttcccagcaggccacaggcaatgtgaagtattcatccggccaaccaatgtttcctgacgtacagtgttgcccttttcagcaaatgccaattccaagttccattaaatcagaagctccatggctccttggcccacgatgttgagtgctgactgtgtgttctactgaaagagtaaaacactgactatccaaagagaaatggatattttgtttttataataaccatatattattgttttcttcttccctttctatgcaagtgtaaattaatgaacagagaggtatttggaaatggtaatacatttgtcacggatttgtataatgtatacagcattgggaaagtgggtgggggctttctaatatgataccgtctttttaataactatgacaaagcttacataagaattagaagaccactttacatttttacattccttctgctgttcatattaaccttgcacaattacttcattttttctttgactcttttaccacaatgttttggttatttataatttatcagccatatgtttatcagccatataaccaactagatcccaaatagatccatgtatttgtttccgtgatttggccacattaataaattcataaatttcaatcaaatatcttatatatacacacatatggtttaagctacagccctgtgtatgccgtttaactttatttgacgttgcccacttacttctttgctgaccacttggataaccgtaataaaaatcctataagcctaaatggcatttcttttgggatatttttcctgcattttattccctttttatataagtaggaattaattatttattttatgtcttaatctatttgataaagaagactacattataataatctcaaagatcatattaccaaaggttgcccacttgagcatattttcattttgacacagaaacaaaatttagtacaacctttcctagttcccatgtcttgattttcatcattacatgcacagcagacctttacctattgtgataccagaacacatcattgtctttggttcccttcaaagagaattttattgttgttttgtattttcaagtccttaatagttcttgaaactcctagttgttttcttgttgaaagcagacacacatttagtgcacggcttattttacctttcgggtgaaagatcagatgtttttatacccttcacttgatcaatatatttggaaagaatgtttatcaaaagtctatgtcactgcttctacagaagaatgaaattaatgcttaggtgatggtacctccacctacatctttttgagtgcattcaattatgtattttggtttagcttctgatttaacatttaattgattcagtttaaacatgttacttaattagcaaatgtagaggaaccaaaaaaaggtgaaaataatatgttttgattcaaacctaaagacataaaaacataaagacattttaactttgggttctctttagctgggatctggccagaaggaggcttaaagttagaaattgctattattttagaataggttgggtgggttggggggcaagggtgtctatttgcagcagagatattttgaaaagaagaaaattgttttatataaaaaggaaagccatgaccacctttctacctcagatccatcttcatccattgcattggaaactgctttatgctgctgcagtctgcaaagtctagagcttttatcaggccatgtcatacccaagaaagcacctatttaaagaaaaaacaattccctgagctctcaactccaagttgtagatttggtgtcttccttgttcttactttaaaaagtcatgtgttaattttttttctgcctgtatttgtatgcaaaatgtcctctatctgctattaaagaaaagctacgtaaaacactacattgtaaccttctaagtaataataaataaaaagaaatatattgcagtaacaatgggaagtaagtatgtagttcttttgaaatatgtggtaaagaactaatcacagactatcatctaatctggttacatattgtatttttcatcctgaataaaagtaattttaacacaaaaaaactataaaacttcagctgg

SEQ ID NO: 322278 - DNA, 10830 bp, Homo sapiens
ccacactctgggatataaacccgcccatctgtgaagctgattgcagtttgctgtgaaccttgctacttgtacttggttgaagttctaggtacctttagtcaagggatggaaaaataaagccatacgcagttttgttacctcagttaccccaaaaataggaaaagcagcaagcacagtattttaaagatcataattcctataaaaggactgtgcaccaagtgtttagactccattttcattaggcaggttgactaaaaatgattgcagtaacaggtttatataaaatagagcaacctttcatgctgtgacacaaatcaaaaggttgataactttgtaattttactctggagattctaaccgaagttggtgtaagttttcaagagttactaaaatcaagttggaaatgatttacgtacacttccctgagcctggactaaagcctcatgcctgtaccccaagtaggtgatggtacttttctatacaaaaaggatttcctggcaggcaggtatttacaaagtttgttcctgtaccagtcccataatgacaactctaaatccagctgcaccaatcttagtggagcaaatgggaaaagaaggccttcctactgaagaaataaaaaatgttctggagaaggtttcatcagaatggaagaatgtatctcaacatttggaagatctagaaagaaagattcagctacaggaagatataaatgcttatttcaagcagcttgatgagcttgaaaaggtcatcaagacaaaggaggagtgggtaaaacacacttccatttctgaatcttcccggcagtccttgccaagcttgaaggattcctgtcaggtaaggagccaacggtctggaaagtggaggaattctatgtgcagttccagagttaaggagggcttctcgtatcatgaactttaagttaatgctgccctgattaacttcctgtgaggatgttcatcttcagtgagttgtgtgaccgtattttctcttccttagcgggaattgacaaatcttcttggccttcaccccaaaattgaaatggctcgtgcaagctgctcggccctgatgtctcagccttctgccccagattttgtccagcggggcttcgatagctttctgggccgctaccaagctgtacaagaggctgtagaggatcgtcaacaacatctagagaatgaactgaagggccaacctggacatgcatatctggaaacattgaaaacactgaaagatgtgctaaatgattcagaaaataaggcccaggtgtctctgaatgtccttaatgatcttgccaaggtggagaaggccctgcaagaaaaaaagacccttgatgaaatccttgagaatcagaaacctgcattacataaacttgcagaagaaacaaaggctctggagaaaaatgttcatcctgatgtagaaaaattatataagcaagaatttgatgatgtgcaaggaaagtggaacaagctaaaggtcttggtttccaaagatctacatttgcttgaggaaattgctctcacactcagagcttttgaggccgattcaacagtcattgagaagtggatggatggcgtgaaagacttcttaatgaaacagcaggctgcccaaggagacgacgcaggtctacagaggcagttagaccagtgctctgcatttgttaatgaaatagaaacaattgaatcatctctgaaaaacatgaaggaaatagagactaatcttcgaagtggtccagttgctggaataaaaacttgggtgcagacaagactaggtgactaccaaactcaactggagaaacttagcaaggagatcgctactcaaaaaagtaggttgtctgaaagtcaagaaaaagctgcgaacctgaagaaagacttggcagagatgcaggaatggatgacccaggccgaggaagaatatttggagcgggattttgagtacaagtcaccagaagagcttgagagtgctgtggaagagatgaagagggcaaaagaggatgtgttgcagaaggaggtgagagtgaagattctcaaggacaacatcaagttattagctgccaaggtgccctctggtggccaggagttgacgtctgagctgaatgttgtgctggagaattaccaacttctttgtaatagaattcgaggaaagtgccacacgctagaggaggtctggtcttgttggattgaactgcttcactatttggatcttgaaactacctggttaaacactttggaagagcggatgaagagcacagaggtcctgcctgagaagacggatgctgtcaacgaagccctggagtctctggaatctgttctgcgccacccggcagataatcgcacccagattcgagagcttggccagactctgattgatggggggatcctggatgatataatcagtgagaaactggaggctttcaacagccgatatgaagatctaagtcacctggcagagagcaagcagatttctttggaaaagcaactccaggtgctgcgggaaactgaccagatgcttcaagtcttgcaagagagcttgggggagctggacaaacagctcaccacatacctgactgacaggatagatgctttccaagttccacaggaagctcagaaaatccaagcagagatctcagcccatgagctaaccctagaggagttgagaagaaatatgcgttctcagcccctgacctccccagagagtaggactgccagaggaggaagtcagatggatgtgctacagaggaaactccgagaggtgtccacaaagttccagcttttccagaagccagctaacttcgagcagcgcatgctggactgcaagcgtgtgctggatggcgtgaaagcagaacttcacgttctggatgtgaaggacgtagaccctgacgtcatacagacgcacctggacaagtgtatgaaactgtataaaactttgagtgaagtcaaacttgaagtggaaactgtgattaaaacaggaagacatattgtccagaaacagcaaacggacaacccaaaagggatggatgagcagctgacttccctgaaggttctttacaatgacctgggcgcacaggtgacagaaggaaaacaggatctggaaagagcatcacagttggcccggaaaatgaagaaagaggctgcttctctctctgaatggctttctgctactgaaactgaattggtacagaagtccacttcagaaggtctgcttggtgacttggatacagaaatttcctgggctaaaaatgttctgaaggatctggaaaagagaaaagctgatttaaataccatcacagagagtagtgctgccctgcaaaacttgattgagggcagtgagcctattttagaagagaggctctgcgtccttaacgctgggtggagccgagttcgtacctggactgaagattggtgcaataccttgatgaaccatcagaaccagctagaaatatttgatgggaacgtggctcacataagtacctggctttatcaagctgaagctctattggatgaaattgaaaagaaaccaacaagtaaacaggaagaaattgtgaagcgtttagtatctgagctggatgatgccaacctccaggttgaaaatgtccgcgatcaagcccttattttgatgaatgcccgtggaagctcaagcagggagcttgtagaaccaaagttagctgagctgaataggaactttgaaaaggtgtctcaacatatcaaaagtgccaaattgctaattgctcaggaaccattataccaatgtttggtcaccactgaaacatttgaaactggtgtgcctttctctgacttggaaaaattagaaaatgacatagaaaatatgttaaaatttgtggaaaaacacttggaatccagtgatgaagatgaaaagatggatgaggagagtgcccagattgaggaagttctacaaagaggagaagaaatgttacatcaacctatggaagataataaaaaagaaaagatccgtttgcaattattacttttgcatactagatacaacaaaattaaggcaatccctattcaacagaggaaaatgggtcaacttgcttctggaattagatcatcacttcttcctacagattatctggttgaaattaacaaaattttactttgcatggatgatgttgaattatcgcttaatgttccagagctcaacactgctatttacgaagacttctcttttcaggaagactctctgaagaatatcaaagaccaactggacaaacttggagagcagattgcagtcattcatgaaaaacagccagatgtcatccttgaagcctctggacctgaagccattcagatcagagatacacttactcagctgaatgcaaaatgggacagaattaatagaatgtacagtgatcggaaaggttgttttgacagggcaatggaagaatggagacagttccattgtgaccttaatgacctcacacagtggataacagaggctgaagaattactggttgatacctgtgctccaggtggcagcctggacttagagaaagccaggatacatcagcaggaacttgaggtgggcatcagcagccaccagcccagttttgcagcactaaaccgaactggggatgggattgtgcagaaactctcccaggcagatggaagcttcttgaaagaaaaactggcaggtttaaaccaacgctgggatgcaattgttgcagaagtgaaggataggcagccaaggctaaaaggagaaagtaagcaggtgatgaagtacaggcatcagctagatgagattatctgttggttaacaaaggctgagcatgctatgcaaaagagatcaaccaccgaattgggagaaaacctgcaagaattaagagacttaactcaagaaatggaagtacatgctgaaaaactcaaatggctgaatagaactgaattggagatgctttcagataaaagtctgagtttacctgaaagggataaaatttcagaaagcttaaggactgtaaatatgacatggaataagatttgcagagaggtgcctaccaccctgaaggaatgcatccaggagcccagttctgtttcacagacaaggattgctgctcatcctaatgtccaaaaggtggtgctagtatcatctgcgtcagatattcctgttcagtctcatcgtacttcggaaatttcaattcctgctgatcttgataaaactataacagaactagccgactggctggtattaatcgaccagatgctgaagtccaacattgtcactgttggggatgtagaagagatcaataagaccgtttcccgaatgaaaattacaaaggctgacttagaacagcgccatcctcagctggattatgtttttacatgggcacagaaattgaaaaataaagcttccagttcagatatgagaacagcaattacagaaaaattggaaagggtcaagaaccagtgggatggcacccagcatggcgttgagctaagacagcagcagcttgaggacatgattattgacagtcttcagtgggatgaccatagggaggagactgaagaactgatgagaaaatatgaggctcgactctatattcttcagcaagcccgacgggatccactcaccaaacaaatttctgtgcccaatactgcttcaagaactgggtcctggagatggtatcgtcatggcgttcgataacgtcctgcagaaactcctggaggaatatgggagtgatgacacaaggaatgtgaaagaaaccacagagtacttaaaaacatcatggatcaatctcaaacaaagtattgctgacagacagaacgccttggaggctgagtggaggacggtgcaggcctctcgcagagatctggaaaacttcctgaagtggatccaagaagcagagaccacagtgaatgtgcttgtggatgcctctcatcgggagaatgctcttcaggatagtatcttggccagggaactcaaacagcagatgcaggacatccaggcagaaattgatgcccacaatgacatatttaaaagcattgacggaaacaggcagaagatggtaaaagctttgggaaattctgaagaggctactatgcttcaacatcgactggatgatatgaaccaaagatggaatgacttaaaagcaaaatctgctagcatcagggcccatttggaggccagcgctgagaagtggaacaggttgctgatgtccttagaagaactgatcaaatggctgaatatgaaagatgaagagcttaagaaacaaatgcctattggaggagatgttccagccttacagctccagtatgaccattgtaaggccctgagacgggagttaaaggagaaagaatattctgtcctgaatgctgtcgaccaggcccgagttttcttggctgatcagccaattgaggcccctgaagagccaagaagaaacctacaatcaaaaacagaattaactcctgaggagagagcccaaaagattgccaaagccatgcgcaaacagtcttctgaagtcaaagaaaaatgggaaagtctaaatgctgtaactagcaattggcaaaagcaagtggacaaggcattggagaaactcagagacctgcagggagctatggatgacctggacgctgacatgaaggaggcagagtccgtgcggaatggctggaagcccgtgggagacttactcattgactcgctgcaggatcacattgaaaaaatcatggcatttagagaagaaattgcaccaatcaactttaaagttaaaacggtgaatgatttatccagtcagctgtctccacttgacctgcatccctctctaaagatgtctcgccagctagatgaccttaatatgcgatggaaacttttacaggtttctgtggatgatcgccttaaacagcttcaggaagcccacagagattttggaccatcctctcagcattttctctctacgtcagtccagctgccgtggcaaagatccatttcacataataaagtgccctattacatcaaccatcaaacacagaccacctgttgggaccatcctaaaatgaccgaactctttcaatcccttgctgacctgaataatgtacgtttttctgcctaccgtacagcaatcaaaatccgaagactacaaaaagcactatgtttggatctcttagagttgagtacaacaaatgaaattttcaaacagcacaagttgaaccaaaatgaccagctcctcagtgttccagatgtcatcaactgtctgacaacaacttatgatggacttgagcaaatgcataaggacctggtcaacgttccactctgtgttgatatgtgtctcaattggttgctcaatgtctatgacacgggtcgaactggaaaaattagagtgcagagtctgaagattggattaatgtctctctccaaaggtctcttggaagaaaaatacagatatctctttaaggaagttgcagggccaacagaaatgtgtgaccagaggcagctgggcctgttacttcatgatgccatccagatcccccggcagctaggtgaagtagcagcttttggaggcagtaatattgagcctagtgttcgcagctgcttccaacagaataacaataaaccagaaataagtgtgaaagagtttatagattggatgcatttggaaccacagtccatggtttggctcccagttttacatcgagtggcagcagcggagactgcaaaacatcaggccaaatgcaacatctgtaaagaatgtccaattgtcgggttcaggtatagaagccttaagcattttaactatgatgtctgccagagttgtttcttttcgggtcgaacagcaaaaggtcacaaattacattacccaatggtggaatattgtatacctacaacatctggggaagatgtacgagacttcacaaaggtacttaagaacaagttcaggtcgaagaagtactttgccaaacaccctcgacttggttacctgcctgtccagacagttcttgaaggtgacaacttagagactcctatcacactcatcagtatgtggccagagcactatgacccctcacaatctcctcaactgtttcatgatgacacccattcaagaatagaacaatatgccacacgactggcccagatggaaaggactaatgggtcttttctcactgatagcagctccaccacaggaagtgtggaagacgagcacgccctcatccagcagtattgccaaacactcggaggagagtccccagtgagccagccgcagagcccagctcagatcctgaagtcagtagagagggaagaacgtggagaactggagaggatcattgctgacctggaggaagaacaaagaaatctacaggtggagtatgagcagctgaaggaccagcacctccgaagggggctccctgtcggttcaccgccagagtcgattatatctccccatcacacgtctgaggattcagaacttatagcagaagcaaaactcctcaggcagcacaaaggtcggctggaggctaggatgcagattttagaagatcacaataaacagctggagtctcagctccaccgcctccgacagctgctggagcagcctgaatctgattcccgaatcaatggtgtttccccatgggcttctcctcagcattctgcactgagctactcgcttgatccagatgcctccggcccacagttccaccaggcagcgggagaggacctgctggccccaccgcacgacaccagcacggatctcacggaggtcatggagcagattcacagcacgtttccatcttgctgcccaaatgttcccagcaggccacaggcaatgtgaagtattcatccggccaaccaatgtttcctgacgtacagtgttgcccttttcagcaaatgccaattccaagttccattaaatcagaagctccatggctccttggcccacgatgttgagtgctgactgtgtgttctactgaaagagtaaaacactgactatccaaagagaaatggatattttgtttttataataaccatatattattgttttcttcttccctttctatgcaagtgtaaattaatgaacagagaggtatttggaaatggtaatacatttgtcacggatttgtataatgtatacagcattgggaaagtgggtgggggctttctaatatgataccgtctttttaataactatgacaaagcttacataagaattagaagaccactttacatttttacattccttctgctgttcatattaaccttgcacaattacttcattttttctttgactcttttaccacaatgttttggttatttataatttatcagccatatgtttatcagccatataaccaactagatcccaaatagatccatgtatttgtttccgtgatttggccacattaataaattcataaatttcaatcaaatatcttatatatacacacatatggtttaagctacagccctgtgtatgccgtttaactttatttgacgttgcccacttacttctttgctgaccacttggataaccgtaataaaaatcctataagcctaaatggcatttcttttgggatatttttcctgcattttattccctttttatataagtaggaattaattatttattttatgtcttaatctatttgataaagaagactacattataataatctcaaagatcatattaccaaaggttgcccacttgagcatattttcattttgacacagaaacaaaatttagtacaacctttcctagttcccatgtcttgattttcatcattacatgcacagcagacctttacctattgtgataccagaacacatcattgtctttggttcccttcaaagagaattttattgttgttttgtattttcaagtccttaatagttcttgaaactcctagttgttttcttgttgaaagcagacacacatttagtgcacggcttattttacctttcgggtgaaagatcagatgtttttatacccttcacttgatcaatatatttggaaagaatgtttatcaaaagtctatgtcactgcttctacagaagaatgaaattaatgcttaggtgatggtacctccacctacatctttttgagtgcattcaattatgtattttggtttagcttctgatttaacatttaattgattcagtttaaacatgttacttaattagcaaatgtagaggaaccaaaaaaaggtgaaaataatatgttttgattcaaacctaaagacataaaaacataaagacattttaactttgggttctctttagctgggatctggccagaaggaggcttaaagttagaaattgctattattttagaataggttgggtgggttggggggcaagggtgtctatttgcagcagagatattttgaaaagaagaaaattgttttatataaaaaggaaagccatgaccacctttctacctcagatccatcttcatccattgcattggaaactgctttatgctgctgcagtctgcaaagtctagagcttttatcaggccatgtcatacccaagaaagcacctatttaaagaaaaaacaattccctgagctctcaactccaagttgtagatttggtgtcttccttgttcttactttaaaaagtcatgtgttaattttttttctgcctgtatttgtatgcaaaatgtcctctatctgctattaaagaaaagctacgtaaaacactacattgtaaccttctaagtaataataaataaaaagaaatatattgcagtaacaatgggaagtaagtatgtagttcttttgaaatatgtggtaaagaactaatcacagactatcatctaatctggttacatattgtatttttcatcctgaataaaagtaattttaacacaaaaaaactataaaacttcagctgg

SEQ ID NO: 322279 - DNA, 6669 bp, Homo sapiens
cggcccaaaaggccagtcttagtcctatcaggaaccccttccgccacccccacacccccactggcccaacagcattgggtttatttccaggcagctggtgagcagggttgagaacttgccccaggtgacaagtctcccagctgagaacgcaagctgatctccagttcctcggctctcccatgcagcatgcagcagcattccacctccttcaaaggttgttttgacagggcaatggaagaatggagacagttccattgtgaccttaatgacctcacacagtggataacagaggctgaagaattactggttgatacctgtgctccaggtggcagcctggacttagagaaagccaggatacatcagcaggaacttgaggtgggcatcagcagccaccagcccagttttgcagcactaaaccgaactggggatgggattgtgcagaaactctcccaggcagatggaagcttcttgaaagaaaaactggcaggtttaaaccaacgctgggatgcaattgttgcagaagtgaaggataggcagccaaggctaaaaggagaaagtaagcaggtgatgaagtacaggcatcagctagatgagattatctgttggttaacaaaggctgagcatgctatgcaaaagagatcaaccaccgaattgggagaaaacctgcaagaattaagagacttaactcaagaaatggaagtacatgctgaaaaactcaaatggctgaatagaactgaattggagatgctttcagataaaagtctgagtttacctgaaagggataaaatttcagaaagcttaaggactgtaaatatgacatggaataagatttgcagagaggtgcctaccaccctgaaggaatgcatccaggagcccagttctgtttcacagacaaggattgctgctcatcctaatgtccaaaaggtggtgctagtatcatctgcgtcagatattcctgttcagtctcatcgtacttcggaaatttcaattcctgctgatcttgataaaactataacagaactagccgactggctggtattaatcgaccagatgctgaagtccaacattgtcactgttggggatgtagaagagatcaataagaccgtttcccgaatgaaaattacaaaggctgacttagaacagcgccatcctcagctggattatgtttttacatgggcacagaaattgaaaaataaagcttccagttcagatatgagaacagcaattacagaaaaattggaaagggtcaagaaccagtgggatggcacccagcatggcgttgagctaagacagcagcagcttgaggacatgattattgacagtcttcagtgggatgaccatagggaggagactgaagaactgatgagaaaatatgaggctcgactctatattcttcagcaagcccgacgggatccactcaccaaacaaatttctgtgcccaatactgcttcaagaactgggtcctggagatggtatcgtcatggcgttcgataacgtcctgcagaaactcctggaggaatatgggagtgatgacacaaggaatgtgaaagaaaccacagagtacttaaaaacatcatggatcaatctcaaacaaagtattgctgacagacagaacgccttggaggctgagtggaggacggtgcaggcctctcgcagagatctggaaaacttcctgaagtggatccaagaagcagagaccacagtgaatgtgcttgtggatgcctctcatcgggagaatgctcttcaggatagtatcttggccagggaactcaaacagcagatgcaggacatccaggcagaaattgatgcccacaatgacatatttaaaagcattgacggaaacaggcagaagatggtaaaagctttgggaaattctgaagaggctactatgcttcaacatcgactggatgatatgaaccaaagatggaatgacttaaaagcaaaatctgctagcatcagggcccatttggaggccagcgctgagaagtggaacaggttgctgatgtccttagaagaactgatcaaatggctgaatatgaaagatgaagagcttaagaaacaaatgcctattggaggagatgttccagccttacagctccagtatgaccattgtaaggccctgagacgggagttaaaggagaaagaatattctgtcctgaatgctgtcgaccaggcccgagttttcttggctgatcagccaattgaggcccctgaagagccaagaagaaacctacaatcaaaaacagaattaactcctgaggagagagcccaaaagattgccaaagccatgcgcaaacagtcttctgaagtcaaagaaaaatgggaaagtctaaatgctgtaactagcaattggcaaaagcaagtggacaaggcattggagaaactcagagacctgcagggagctatggatgacctggacgctgacatgaaggaggcagagtccgtgcggaatggctggaagcccgtgggagacttactcattgactcgctgcaggatcacattgaaaaaatcatggcatttagagaagaaattgcaccaatcaactttaaagttaaaacggtgaatgatttatccagtcagctgtctccacttgacctgcatccctctctaaagatgtctcgccagctagatgaccttaatatgcgatggaaacttttacaggtttctgtggatgatcgccttaaacagcttcaggaagcccacagagattttggaccatcctctcagcattttctctctacgtcagtccagctgccgtggcaaagatccatttcacataataaagtgccctattacatcaaccatcaaacacagaccacctgttgggaccatcctaaaatgaccgaactctttcaatcccttgctgacctgaataatgtacgtttttctgcctaccgtacagcaatcaaaatccgaagactacaaaaagcactatgtttggatctcttagagttgagtacaacaaatgaaattttcaaacagcacaagttgaaccaaaatgaccagctcctcagtgttccagatgtcatcaactgtctgacaacaacttatgatggacttgagcaaatgcataaggacctggtcaacgttccactctgtgttgatatgtgtctcaattggttgctcaatgtctatgacacgggtcgaactggaaaaattagagtgcagagtctgaagattggattaatgtctctctccaaaggtctcttggaagaaaaatacagatatctctttaaggaagttgcagggccaacagaaatgtgtgaccagaggcagctgggcctgttacttcatgatgccatccagatcccccggcagctaggtgaagtagcagcttttggaggcagtaatattgagcctagtgttcgcagctgcttccaacagaataacaataaaccagaaataagtgtgaaagagtttatagattggatgcatttggaaccacagtccatggtttggctcccagttttacatcgagtggcagcagcggagactgcaaaacatcaggccaaatgcaacatctgtaaagaatgtccaattgtcgggttcaggtatagaagccttaagcattttaactatgatgtctgccagagttgtttcttttcgggtcgaacagcaaaaggtcacaaattacattacccaatggtggaatattgtatacctacaacatctggggaagatgtacgagacttcacaaaggtacttaagaacaagttcaggtcgaagaagtactttgccaaacaccctcgacttggttacctgcctgtccagacagttcttgaaggtgacaacttagagactcctatcacactcatcagtatgtggccagagcactatgacccctcacaatctcctcaactgtttcatgatgacacccattcaagaatagaacaatatgccacacgactggcccagatggaaaggactaatgggtcttttctcactgatagcagctccaccacaggaagtgtggaagacgagcacgccctcatccagcagtattgccaaacactcggaggagagtccccagtgagccagccgcagagcccagctcagatcctgaagtcagtagagagggaagaacgtggagaactggagaggatcattgctgacctggaggaagaacaaagaaatctacaggtggagtatgagcagctgaaggaccagcacctccgaagggggctccctgtcggttcaccgccagagtcgattatatctccccatcacacgtctgaggattcagaacttatagcagaagcaaaactcctcaggcagcacaaaggtcggctggaggctaggatgcagattttagaagatcacaataaacagctggagtctcagctccaccgcctccgacagctgctggagcagcctgaatctgattcccgaatcaatggtgtttccccatgggcttctcctcagcattctgcactgagctactcgcttgatccagatgcctccggcccacagttccaccaggcagcgggagaggacctgctggccccaccgcacgacaccagcacggatctcacggaggtcatggagcagattcacagcacgtttccatcttgctgcccaaatgttcccagcaggccacaggcaatgtgaagtattcatccggccaaccaatgtttcctgacgtacagtgttgcccttttcagcaaatgccaattccaagttccattaaatcagaagctccatggctccttggcccacgatgttgagtgctgactgtgtgttctactgaaagagtaaaacactgactatccaaagagaaatggatattttgtttttataataaccatatattattgttttcttcttccctttctatgcaagtgtaaattaatgaacagagaggtatttggaaatggtaatacatttgtcacggatttgtataatgtatacagcattgggaaagtgggtgggggctttctaatatgataccgtctttttaataactatgacaaagcttacataagaattagaagaccactttacatttttacattccttctgctgttcatattaaccttgcacaattacttcattttttctttgactcttttaccacaatgttttggttatttataatttatcagccatatgtttatcagccatataaccaactagatcccaaatagatccatgtatttgtttccgtgatttggccacattaataaattcataaatttcaatcaaatatcttatatatacacacatatggtttaagctacagccctgtgtatgccgtttaactttatttgacgttgcccacttacttctttgctgaccacttggataaccgtaataaaaatcctataagcctaaatggcatttcttttgggatatttttcctgcattttattccctttttatataagtaggaattaattatttattttatgtcttaatctatttgataaagaagactacattataataatctcaaagatcatattaccaaaggttgcccacttgagcatattttcattttgacacagaaacaaaatttagtacaacctttcctagttcccatgtcttgattttcatcattacatgcacagcagacctttacctattgtgataccagaacacatcattgtctttggttcccttcaaagagaattttattgttgttttgtattttcaagtccttaatagttcttgaaactcctagttgttttcttgttgaaagcagacacacatttagtgcacggcttattttacctttcgggtgaaagatcagatgtttttatacccttcacttgatcaatatatttggaaagaatgtttatcaaaagtctatgtcactgcttctacagaagaatgaaattaatgcttaggtgatggtacctccacctacatctttttgagtgcattcaattatgtattttggtttagcttctgatttaacatttaattgattcagtttaaacatgttacttaattagcaaatgtagaggaaccaaaaaaaggtgaaaataatatgttttgattcaaacctaaagacataaaaacataaagacattttaactttgggttctctttagctgggatctggccagaaggaggcttaaagttagaaattgctattattttagaataggttgggtgggttggggggcaagggtgtctatttgcagcagagatattttgaaaagaagaaaattgttttatataaaaaggaaagccatgaccacctttctacctcagatccatcttcatccattgcattggaaactgctttatgctgctgcagtctgcaaagtctagagcttttatcaggccatgtcatacccaagaaagcacctatttaaagaaaaaacaattccctgagctctcaactccaagttgtagatttggtgtcttccttgttcttactttaaaaagtcatgtgttaattttttttctgcctgtatttgtatgcaaaatgtcctctatctgctattaaagaaaagctacgtaaaacactacattgtaaccttctaagtaataataaataaaaagaaatatattgcagtaacaatgggaagtaagtatgtagttcttttgaaatatgtggtaaagaactaatcacagactatcatctaatctggttacatattgtatttttcatcctgaataaaagtaattttaacacaaaaaaactataaaacttcagctgg

SEQ ID NO: 322280 - DNA, 12348 bp, Homo sapiens
cagatgtaggtgatgagcggcctggcagccaccacgtttcattggaaaaagtgcagattggatttgccagggcatgtagctctccaggcttgcaagcgattaccagatgaacacaatgacgtacagaagaaaacctttaccaaatggataaatgctcgattttcaaagagtgggaaaccacccatcaatgatatgttcacagacctcaaagatggaaggaagctattggatcttctagaaggcctcacaggaacatcactgccaaaggaacgtggttccacaagggtacatgccttaaataacgtcaacagagtgctgcaggttttacatcagaacaatgtggaattagtgaatatagggggaactgacattgtggatggaaatcacaaactgactttggggttactttggagcatcattttgcactggcaggtgaaagatgtcatgaaggatgtcatgtcggacctgcagcagacgaacagtgagaagatcctgctcagctgggtgcgtcagaccaccaggccctacagccaagtcaacgtcctcaacttcaccaccagctggacagatggactcgcctttaatgctgtcctccaccgacataaacctgatctcttcagctgggataaagttgtcaaaatgtcaccaattgagagacttgaacatgccttcagcaaggctcaaacttatttgggaattgaaaagctgttagatcctgaagatgttgccgttcagcttcctgacaagaaatccataattatgtatttaacatctttgtttgaggtgctacctcagcaagtcaccatagacgccatccgtgaggtagagacactcccaaggaaatataaaaaagaatgtgaagaagaggcaattaatatacagagtacagcgcctgaggaggagcatgagagtccccgagctgaaactcccagcactgtcactgaggtcgacatggatctggacagctatcagattgcgttggaggaagtgctgacctggttgctttctgctgaggacactttccaggagcaggatgatatttctgatgatgttgaagaagtcaaagaccagtttgcaacccatgaagcttttatgatggaactgactgcacaccagagcagtgtgggcagcgtcctgcaggcaggcaaccaactgataacacaaggaactctgtcagacgaagaagaatttgagattcaggaacagatgaccctgctgaatgctagatgggaggctcttagggtggagagtatggacagacagtcccggctgcacgatgtgctgatggaactgcagaagaagcaactgcagcagctctccgcctggttaacactcacagaggagcgcattcagaagatggaaacttgccccctggatgatgatgtaaaatctctacaaaagctgctagaagaacataaaagtttgcaaagtgatcttgaggctgaacaggtgaaagtaaattcactaactcacatggtggtcattgttgatgaaaacagtggtgagagtgctacagctatcctagaagaccagttacagaaacttggtgagcgctggacagcagtatgccgttggactgaagaacgctggaataggttacaagaaatcaatatattgtggcaggaattattggaagaacagtgcttgttgaaagcttggttaaccgaaaaagaagaggctttaaataaagtccagacaagcaacttcaaagaccaaaaggaactaagtgtcagtgttcgacgtctggctattttgaaggaagacatggaaatgaagcgtcaaacattggatcagctgagtgagattggccaggatgtgggacaattacttgataattccaaggcatctaagaagatcaacagtgactcagaggaactgactcaaagatgggattctttggttcagagactagaagattcctccaaccaggtgactcaggctgtagcaaagctggggatgtctcagattcctcagaaggaccttttggagactgttcgtgtaagagaacaagcaattacaaaaaaatctaagcaggaactgcctcctcctcctcccccaaagaagagacagatccatgtggatattgaagctaagaaaaagtttgatgctataagtgcagagctgttgaactggattttgaaatggaaaactgccattcagaccacagagataaaagagtatatgaagatgcaagacacttccgaaatgaaaaagaagttgaaggcattagaaaaagaacagagagaaagaatccccagagcagatgaattaaaccaaactggacaaatccttgtggagcaaatgggaaaagaaggccttcctactgaagaaataaaaaatgttctggagaaggtttcatcagaatggaagaatgtatctcaacatttggaagatctagaaagaaagattcagctacaggaagatataaatgcttatttcaagcagcttgatgagcttgaaaaggtcatcaagacaaaggaggagtgggtaaaacacacttccatttctgaatcttcccggcagtccttgccaagcttgaaggattcctgtcagcgggaattgacaaatcttcttggccttcaccccaaaattgaaatggctcgtgcaagctgctcggccctgatgtctcagccttctgccccagattttgtccagcggggcttcgatagctttctgggccgctaccaagctgtacaagaggctgtagaggatcgtcaacaacatctagagaatgaactgaagggccaacctggacatgcatatctggaaacattgaaaacactgaaagatgtgctaaatgattcagaaaataaggcccaggtgtctctgaatgtccttaatgatcttgccaaggtggagaaggccctgcaagaaaaaaagacccttgatgaaatccttgagaatcagaaacctgcattacataaacttgcagaagaaacaaaggctctggagaaaaatgttcatcctgatgtagaaaaattatataagcaagaatttgatgatgtgcaaggaaagtggaacaagctaaaggtcttggtttccaaagatctacatttgcttgaggaaattgctctcacactcagagcttttgaggccgattcaacagtcattgagaagtggatggatggcgtgaaagacttcttaatgaaacagcaggctgcccaaggagacgacgcaggtctacagaggcagttagaccagtgctctgcatttgttaatgaaatagaaacaattgaatcatctctgaaaaacatgaaggaaatagagactaatcttcgaagtggtccagttgctggaataaaaacttgggtgcagacaagactaggtgactaccaaactcaactggagaaacttagcaaggagatcgctactcaaaaaagtaggttgtctgaaagtcaagaaaaagctgcgaacctgaagaaagacttggcagagatgcaggaatggatgacccaggccgaggaagaatatttggagcgggattttgagtacaagtcaccagaagagcttgagagtgctgtggaagagatgaagagggcaaaagaggatgtgttgcagaaggaggtgagagtgaagattctcaaggacaacatcaagttattagctgccaaggtgccctctggtggccaggagttgacgtctgagctgaatgttgtgctggagaattaccaacttctttgtaatagaattcgaggaaagtgccacacgctagaggaggtctggtcttgttggattgaactgcttcactatttggatcttgaaactacctggttaaacactttggaagagcggatgaagagcacagaggtcctgcctgagaagacggatgctgtcaacgaagccctggagtctctggaatctgttctgcgccacccggcagataatcgcacccagattcgagagcttggccagactctgattgatggggggatcctggatgatataatcagtgagaaactggaggctttcaacagccgatatgaagatctaagtcacctggcagagagcaagcagatttctttggaaaagcaactccaggtgctgcgggaaactgaccagatgcttcaagtcttgcaagagagcttgggggagctggacaaacagctcaccacatacctgactgacaggatagatgctttccaagttccacaggaagctcagaaaatccaagcagagatctcagcccatgagctaaccctagaggagttgagaagaaatatgcgttctcagcccctgacctccccagagagtaggactgccagaggaggaagtcagatggatgtgctacagaggaaactccgagaggtgtccacaaagttccagcttttccagaagccagctaacttcgagcagcgcatgctggactgcaagcgtgtgctggatggcgtgaaagcagaacttcacgttctggatgtgaaggacgtagaccctgacgtcatacagacgcacctggacaagtgtatgaaactgtataaaactttgagtgaagtcaaacttgaagtggaaactgtgattaaaacaggaagacatattgtccagaaacagcaaacggacaacccaaaagggatggatgagcagctgacttccctgaaggttctttacaatgacctgggcgcacaggtgacagaaggaaaacaggatctggaaagagcatcacagttggcccggaaaatgaagaaagaggctgcttctctctctgaatggctttctgctactgaaactgaattggtacagaagtccacttcagaaggtctgcttggtgacttggatacagaaatttcctgggctaaaaatgttctgaaggatctggaaaagagaaaagctgatttaaataccatcacagagagtagtgctgccctgcaaaacttgattgagggcagtgagcctattttagaagagaggctctgcgtccttaacgctgggtggagccgagttcgtacctggactgaagattggtgcaataccttgatgaaccatcagaaccagctagaaatatttgatgggaacgtggctcacataagtacctggctttatcaagctgaagctctattggatgaaattgaaaagaaaccaacaagtaaacaggaagaaattgtgaagcgtttagtatctgagctggatgatgccaacctccaggttgaaaatgtccgcgatcaagcccttattttgatgaatgcccgtggaagctcaagcagggagcttgtagaaccaaagttagctgagctgaataggaactttgaaaaggtgtctcaacatatcaaaagtgccaaattgctaattgctcaggaaccattataccaatgtttggtcaccactgaaacatttgaaactggtgtgcctttctctgacttggaaaaattagaaaatgacatagaaaatatgttaaaatttgtggaaaaacacttggaatccagtgatgaagatgaaaagatggatgaggagagtgcccagattgaggaagttctacaaagaggagaagaaatgttacatcaacctatggaagataataaaaaagaaaagatccgtttgcaattattacttttgcatactagatacaacaaaattaaggcaatccctattcaacagaggaaaatgggtcaacttgcttctggaattagatcatcacttcttcctacagattatctggttgaaattaacaaaattttactttgcatggatgatgttgaattatcgcttaatgttccagagctcaacactgctatttacgaagacttctcttttcaggaagactctctgaagaatatcaaagaccaactggacaaacttggagagcagattgcagtcattcatgaaaaacagccagatgtcatccttgaagcctctggacctgaagccattcagatcagagatacacttactcagctgaatgcaaaatgggacagaattaatagaatgtacagtgatcggaaaggttgttttgacagggcaatggaagaatggagacagttccattgtgaccttaatgacctcacacagtggataacagaggctgaagaattactggttgatacctgtgctccaggtggcagcctggacttagagaaagccaggatacatcagcaggaacttgaggtgggcatcagcagccaccagcccagttttgcagcactaaaccgaactggggatgggattgtgcagaaactctcccaggcagatggaagcttcttgaaagaaaaactggcaggtttaaaccaacgctgggatgcaattgttgcagaagtgaaggataggcagccaaggctaaaaggagaaagtaagcaggtgatgaagtacaggcatcagctagatgagattatctgttggttaacaaaggctgagcatgctatgcaaaagagatcaaccaccgaattgggagaaaacctgcaagaattaagagacttaactcaagaaatggaagtacatgctgaaaaactcaaatggctgaatagaactgaattggagatgctttcagataaaagtctgagtttacctgaaagggataaaatttcagaaagcttaaggactgtaaatatgacatggaataagatttgcagagaggtgcctaccaccctgaaggaatgcatccaggagcccagttctgtttcacagacaaggattgctgctcatcctaatgtccaaaaggtggtgctagtatcatctgcgtcagatattcctgttcagtctcatcgtacttcggaaatttcaattcctgctgatcttgataaaactataacagaactagccgactggctggtattaatcgaccagatgctgaagtccaacattgtcactgttggggatgtagaagagatcaataagaccgtttcccgaatgaaaattacaaaggctgacttagaacagcgccatcctcagctggattatgtttttacatgggcacagaaattgaaaaataaagcttccagttcagatatgagaacagcaattacagaaaaattggaaagggtcaagaaccagtgggatggcacccagcatggcgttgagctaagacagcagcagcttgaggacatgattattgacagtcttcagtgggatgaccatagggaggagactgaagaactgatgagaaaatatgaggctcgactctatattcttcagcaagcccgacgggatccactcaccaaacaaatttctgtgcccaatactgcttcaagaactgggtcctggagatggtatcgtcatggcgttcgataacgtcctgcagaaactcctggaggaatatgggagtgatgacacaaggaatgtgaaagaaaccacagagtacttaaaaacatcatggatcaatctcaaacaaagtattgctgacagacagaacgccttggaggctgagtggaggacggtgcaggcctctcgcagagatctggaaaacttcctgaagtggatccaagaagcagagaccacagtgaatgtgcttgtggatgcctctcatcgggagaatgctcttcaggatagtatcttggccagggaactcaaacagcagatgcaggacatccaggcagaaattgatgcccacaatgacatatttaaaagcattgacggaaacaggcagaagatggtaaaagctttgggaaattctgaagaggctactatgcttcaacatcgactggatgatatgaaccaaagatggaatgacttaaaagcaaaatctgctagcatcagggcccatttggaggccagcgctgagaagtggaacaggttgctgatgtccttagaagaactgatcaaatggctgaatatgaaagatgaagagcttaagaaacaaatgcctattggaggagatgttccagccttacagctccagtatgaccattgtaaggccctgagacgggagttaaaggagaaagaatattctgtcctgaatgctgtcgaccaggcccgagttttcttggctgatcagccaattgaggcccctgaagagccaagaagaaacctacaatcaaaaacagaattaactcctgaggagagagcccaaaagattgccaaagccatgcgcaaacagtcttctgaagtcaaagaaaaatgggaaagtctaaatgctgtaactagcaattggcaaaagcaagtggacaaggcattggagaaactcagagacctgcagggagctatggatgacctggacgctgacatgaaggaggcagagtccgtgcggaatggctggaagcccgtgggagacttactcattgactcgctgcaggatcacattgaaaaaatcatggcatttagagaagaaattgcaccaatcaactttaaagttaaaacggtgaatgatttatccagtcagctgtctccacttgacctgcatccctctctaaagatgtctcgccagctagatgaccttaatatgcgatggaaacttttacaggtttctgtggatgatcgccttaaacagcttcaggaagcccacagagattttggaccatcctctcagcattttctctctacgtcagtccagctgccgtggcaaagatccatttcacataataaagtgccctattacatcaaccatcaaacacagaccacctgttgggaccatcctaaaatgaccgaactctttcaatcccttgctgacctgaataatgtacgtttttctgcctaccgtacagcaatcaaaatccgaagactacaaaaagcactatgtttggatctcttagagttgagtacaacaaatgaaattttcaaacagcacaagttgaaccaaaatgaccagctcctcagtgttccagatgtcatcaactgtctgacaacaacttatgatggacttgagcaaatgcataaggacctggtcaacgttccactctgtgttgatatgtgtctcaattggttgctcaatgtctatgacacgggtcgaactggaaaaattagagtgcagagtctgaagattggattaatgtctctctccaaaggtctcttggaagaaaaatacagatatctctttaaggaagttgcagggccaacagaaatgtgtgaccagaggcagctgggcctgttacttcatgatgccatccagatcccccggcagctaggtgaagtagcagcttttggaggcagtaatattgagcctagtgttcgcagctgcttccaacagaataacaataaaccagaaataagtgtgaaagagtttatagattggatgcatttggaaccacagtccatggtttggctcccagttttacatcgagtggcagcagcggagactgcaaaacatcaggccaaatgcaacatctgtaaagaatgtccaattgtcgggttcaggtatagaagccttaagcattttaactatgatgtctgccagagttgtttcttttcgggtcgaacagcaaaaggtcacaaattacattacccaatggtggaatattgtatacctacaacatctggggaagatgtacgagacttcacaaaggtacttaagaacaagttcaggtcgaagaagtactttgccaaacaccctcgacttggttacctgcctgtccagacagttcttgaaggtgacaacttagagaccccctcacaatctcctcaactgtttcatgatgacacccattcaagaatagaacaatatgccacacgactggcccagatggaaaggactaatgggtcttttctcactgatagcagctccaccacaggaagtgtggaagacgagcacgccctcatccagcagtattgccaaacactcggaggagagtccccagtgagccagccgcagagcccagctcagatcctgaagtcagtagagagggaagaacgtggagaactggagaggatcattgctgacctggaggaagaacaaagaaatctacaggtggagtatgagcagctgaaggaccagcacctccgaagggggctccctgtcggttcaccgccagagtcgattatatctccccatcacacgtctgaggattcagaacttatagcagaagcaaaactcctcaggcagcacaaaggtcggctggaggctaggatgcagattttagaagatcacaataaacagctggagtctcagctccaccgcctccgacagctgctggagcagcctgaatctgattcccgaatcaatggtgtttccccatgggcttctcctcagcattctgcactgagctactcgcttgatccagatgcctccggcccacagttccaccaggcagcgggagaggacctgctggccccaccgcacgacaccagcacggatctcacggaggtcatggagcagattcacagcacgtttccatcttgctgcccaaatgttcccagcaggccacaggcaatgtgaagtattcatccggccaaccaatgtttcctgacgtacagtgttgcccttttcagcaaatgccaattccaagttccattaaatcagaagctccatggctccttggcccacgatgttgagtgctgactgtgtgttctactgaaagagtaaaacactgactatccaaagagaaatggatattttgtttttataataaccatatattattgttttcttcttccctttctatgcaagtgtaaattaatgaacagagaggtatttggaaatggtaatacatttgtcacggatttgtataatgtatacagcattgggaaagtgggtgggggctttctaatatgataccgtctttttaataactatgacaaagcttacataagaattagaagaccactttacatttttacattccttctgctgttcatattaaccttgcacaattacttcattttttctttgactcttttaccacaatgttttggttatttataatttatcagccatatgtttatcagccatataaccaactagatcccaaatagatccatgtatttgtttccgtgatttggccacattaataaattcataaatttcaatcaaatatcttatatatacacacatatggtttaagctacagccctgtgtatgccgtttaactttatttgacgttgcccacttacttctttgctgaccacttggataaccgtaataaaaatcctataagcctaaatggcatttcttttgggatatttttcctgcattttattccctttttatataagtaggaattaattatttattttatgtcttaatctatttgataaagaagactacattataataatctcaaagatcatattaccaaaggttgcccacttgagcatattttcattttgacacagaaacaaaatttagtacaacctttcctagttcccatgtcttgattttcatcattacatgcacagcagacctttacctattgtgataccagaacacatcattgtctttggttcccttcaaagagaattttattgttgttttgtattttcaagtccttaatagttcttgaaactcctagttgttttcttgttgaaagcagacacacatttagtgcacggcttattttacctttcgggtgaaagatcagatgtttttatacccttcacttgatcaatatatttggaaagaatgtttatcaaaagtctatgtcactgcttctacagaagaatgaaattaatgcttaggtgatggtacctccacctacatctttttgagtgcattcaattatgtattttggtttagcttctgatttaacatttaattgattcagtttaaacatgttacttaattagcaaatgtagaggaaccaaaaaaaggtgaaaataatatgttttgattcaaacctaaagacataaaaacataaagacattttaactttgggttctctttagctgggatctggccagaaggaggcttaaagttagaaattgctattattttagaataggttgggtgggttggggggcaagggtgtctatttgcagcagagatattttgaaaagaagaaaattgttttatataaaaaggaaagccatgaccacctttctacctcagatccatcttcatccattgcattggaaactgctttatgctgctgcagtctgcaaagtctagagcttttatcaggccatgtcatacccaagaaagcacctatttaaagaaaaaacaattccctgagctctcaactccaagttgtagatttggtgtcttccttgttcttactttaaaaagtcatgtgttaattttttttctgcctgtatttgtatgcaaaatgtcctctatctgctattaaagaaaagctacgtaaaacactacattgtaaccttctaagtaataataaataaaaagaaatatattgcagtaacaatgggaagtaagtatgtagttcttttgaaatatgtggtaaagaactaatcacagactatcatctaatctggttacatattgtatttttcatcctgaataaaagtaattttaacacaaaaaaactataaaacttcagctgg

SEQ ID NO: 322281 - DNA, 12293 bp, Homo sapiens
cagatgtaggtgatgagcggcctggcagccaccacgtttcattggaaaaagtgcagattggatttgccagggcatgtagctctccaggcttgcaagcgattaccagatgaacacaatgacgtacagaagaaaacctttaccaaatggataaatgctcgattttcaaagagtgggaaaccacccatcaatgatatgttcacagacctcaaagatggaaggaagctattggatcttctagaaggcctcacaggaacatcactgccaaaggaacgtggttccacaagggtacatgccttaaataacgtcaacagagtgctgcaggttttacatcagaacaatgtggaattagtgaatatagggggaactgacattgtggatggaaatcacaaactgactttggggttactttggagcatcattttgcactggcaggtgaaagatgtcatgaaggatgtcatgtcggacctgcagcagacgaacagtgagaagatcctgctcagctgggtgcgtcagaccaccaggccctacagccaagtcaacgtcctcaacttcaccaccagctggacagatggactcgcctttaatgctgtcctccaccgacataaacctgatctcttcagctgggataaagttgtcaaaatgtcaccaattgagagacttgaacatgccttcagcaaggctcaaacttatttgggaattgaaaagctgttagatcctgaagatgttgccgttcagcttcctgacaagaaatccataattatgtatttaacatctttgtttgaggtgctacctcagcaagtcaccatagacgccatccgtgaggtagagacactcccaaggaaatataaaaaagaatgtgaagaagaggcaattaatatacagagtacagcgcctgaggaggagcatgagagtccccgagctgaaactcccagcactgtcactgaggtcgacatggatctggacagctatcagattgcgttggaggaagtgctgacctggttgctttctgctgaggacactttccaggagcaggatgatatttctgatgatgttgaagaagtcaaagaccagtttgcaacccatgaagcttttatgatggaactgactgcacaccagagcagtgtgggcagcgtcctgcaggcaggcaaccaactgataacacaaggaactctgtcagacgaagaagaatttgagattcaggaacagatgaccctgctgaatgctagatgggaggctcttagggtggagagtatggacagacagtcccggctgcacgatgtgctgatggaactgcagaagaagcaactgcagcagctctccgcctggttaacactcacagaggagcgcattcagaagatggaaacttgccccctggatgatgatgtaaaatctctacaaaagctgctagaagaacataaaagtttgcaaagtgatcttgaggctgaacaggtgaaagtaaattcactaactcacatggtggtcattgttgatgaaaacagtggtgagagtgctacagctatcctagaagaccagttacagaaacttggtgagcgctggacagcagtatgccgttggactgaagaacgctggaataggttacaagaaatcaatatattgtggcaggaattattggaagaacagtgcttgttgaaagcttggttaaccgaaaaagaagaggctttaaataaagtccagacaagcaacttcaaagaccaaaaggaactaagtgtcagtgttcgacgtctggctattttgaaggaagacatggaaatgaagcgtcaaacattggatcagctgagtgagattggccaggatgtgggacaattacttgataattccaaggcatctaagaagatcaacagtgactcagaggaactgactcaaagatgggattctttggttcagagactagaagattcctccaaccaggtgactcaggctgtagcaaagctggggatgtctcagattcctcagaaggaccttttggagactgttcgtgtaagagaacaagcaattacaaaaaaatctaagcaggaactgcctcctcctcctcccccaaagaagagacagatccatgtggatattgaagctaagaaaaagtttgatgctataagtgcagagctgttgaactggattttgaaatggaaaactgccattcagaccacagagataaaagagtatatgaagatgcaagacacttccgaaatgaaaaagaagttgaaggcattagaaaaagaacagagagaaagaatccccagagcagatgaattaaaccaaactggacaaatccttgtggagcaaatgggaaaagaaggccttcctactgaagaaataaaaaatgttctggagaaggtttcatcagaatggaagaatgtatctcaacatttggaagatctagaaagaaagattcagctacaggaagatataaatgcttatttcaagcagcttgatgagcttgaaaaggtcatcaagacaaaggaggagtgggtaaaacacacttccatttctgaatcttcccggcagtccttgccaagcttgaaggattcctgtcagcgggaattgacaaatcttcttggccttcaccccaaaattgaaatggctcgtgcaagctgctcggccctgatgtctcagccttctgccccagattttgtccagcggggcttcgatagctttctgggccgctaccaagctgtacaagaggctgtagaggatcgtcaacaacatctagagaatgaactgaagggccaacctggacatgcatatctggaaacattgaaaacactgaaagatgtgctaaatgattcagaaaataaggcccaggtgtctctgaatgtccttaatgatcttgccaaggtggagaaggccctgcaagaaaaaaagacccttgatgaaatccttgagaatcagaaacctgcattacataaacttgcagaagaaacaaaggctctggagaaaaatgttcatcctgatgtagaaaaattatataagcaagaatttgatgatgtgcaaggaaagtggaacaagctaaaggtcttggtttccaaagatctacatttgcttgaggaaattgctctcacactcagagcttttgaggccgattcaacagtcattgagaagtggatggatggcgtgaaagacttcttaatgaaacagcaggctgcccaaggagacgacgcaggtctacagaggcagttagaccagtgctctgcatttgttaatgaaatagaaacaattgaatcatctctgaaaaacatgaaggaaatagagactaatcttcgaagtggtccagttgctggaataaaaacttgggtgcagacaagactaggtgactaccaaactcaactggagaaacttagcaaggagatcgctactcaaaaaagtaggttgtctgaaagtcaagaaaaagctgcgaacctgaagaaagacttggcagagatgcaggaatggatgacccaggccgaggaagaatatttggagcgggattttgagtacaagtcaccagaagagcttgagagtgctgtggaagagatgaagagggcaaaagaggatgtgttgcagaaggaggtgagagtgaagattctcaaggacaacatcaagttattagctgccaaggtgccctctggtggccaggagttgacgtctgagctgaatgttgtgctggagaattaccaacttctttgtaatagaattcgaggaaagtgccacacgctagaggaggtctggtcttgttggattgaactgcttcactatttggatcttgaaactacctggttaaacactttggaagagcggatgaagagcacagaggtcctgcctgagaagacggatgctgtcaacgaagccctggagtctctggaatctgttctgcgccacccggcagataatcgcacccagattcgagagcttggccagactctgattgatggggggatcctggatgatataatcagtgagaaactggaggctttcaacagccgatatgaagatctaagtcacctggcagagagcaagcagatttctttggaaaagcaactccaggtgctgcgggaaactgaccagatgcttcaagtcttgcaagagagcttgggggagctggacaaacagctcaccacatacctgactgacaggatagatgctttccaagttccacaggaagctcagaaaatccaagcagagatctcagcccatgagctaaccctagaggagttgagaagaaatatgcgttctcagcccctgacctccccagagagtaggactgccagaggaggaagtcagatggatgtgctacagaggaaactccgagaggtgtccacaaagttccagcttttccagaagccagctaacttcgagcagcgcatgctggactgcaagcgtgtgctggatggcgtgaaagcagaacttcacgttctggatgtgaaggacgtagaccctgacgtcatacagacgcacctggacaagtgtatgaaactgtataaaactttgagtgaagtcaaacttgaagtggaaactgtgattaaaacaggaagacatattgtccagaaacagcaaacggacaacccaaaagggatggatgagcagctgacttccctgaaggttctttacaatgacctgggcgcacaggtgacagaaggaaaacaggatctggaaagagcatcacagttggcccggaaaatgaagaaagaggctgcttctctctctgaatggctttctgctactgaaactgaattggtacagaagtccacttcagaaggtctgcttggtgacttggatacagaaatttcctgggctaaaaatgttctgaaggatctggaaaagagaaaagctgatttaaataccatcacagagagtagtgctgccctgcaaaacttgattgagggcagtgagcctattttagaagagaggctctgcgtccttaacgctgggtggagccgagttcgtacctggactgaagattggtgcaataccttgatgaaccatcagaaccagctagaaatatttgatgggaacgtggctcacataagtacctggctttatcaagctgaagctctattggatgaaattgaaaagaaaccaacaagtaaacaggaagaaattgtgaagcgtttagtatctgagctggatgatgccaacctccaggttgaaaatgtccgcgatcaagcccttattttgatgaatgcccgtggaagctcaagcagggagcttgtagaaccaaagttagctgagctgaataggaactttgaaaaggtgtctcaacatatcaaaagtgccaaattgctaattgctcaggaaccattataccaatgtttggtcaccactgaaacatttgaaactggtgtgcctttctctgacttggaaaaattagaaaatgacatagaaaatatgttaaaatttgtggaaaaacacttggaatccagtgatgaagatgaaaagatggatgaggagagtgcccagattgaggaagttctacaaagaggagaagaaatgttacatcaacctatggaagataataaaaaagaaaagatccgtttgcaattattacttttgcatactagatacaacaaaattaaggcaatccctattcaacagaggaaaatgggtcaacttgcttctggaattagatcatcacttcttcctacagattatctggttgaaattaacaaaattttactttgcatggatgatgttgaattatcgcttaatgttccagagctcaacactgctatttacgaagacttctcttttcaggaagactctctgaagaatatcaaagaccaactggacaaacttggagagcagattgcagtcattcatgaaaaacagccagatgtcatccttgaagcctctggacctgaagccattcagatcagagatacacttactcagctgaatgcaaaatgggacagaattaatagaatgtacagtgatcggaaaggttgttttgacagggcaatggaagaatggagacagttccattgtgaccttaatgacctcacacagtggataacagaggctgaagaattactggttgatacctgtgctccaggtggcagcctggacttagagaaagccaggatacatcagcaggaacttgaggtgggcatcagcagccaccagcccagttttgcagcactaaaccgaactggggatgggattgtgcagaaactctcccaggcagatggaagcttcttgaaagaaaaactggcaggtttaaaccaacgctgggatgcaattgttgcagaagtgaaggataggcagccaaggctaaaaggagaaagtaagcaggtgatgaagtacaggcatcagctagatgagattatctgttggttaacaaaggctgagcatgctatgcaaaagagatcaaccaccgaattgggagaaaacctgcaagaattaagagacttaactcaagaaatggaagtacatgctgaaaaactcaaatggctgaatagaactgaattggagatgctttcagataaaagtctgagtttacctgaaagggataaaatttcagaaagcttaaggactgtaaatatgacatggaataagatttgcagagaggtgcctaccaccctgaaggaatgcatccaggagcccagttctgtttcacagacaaggattgctgctcatcctaatgtccaaaaggtggtgctagtatcatctgcgtcagatattcctgttcagtctcatcgtacttcggaaatttcaattcctgctgatcttgataaaactataacagaactagccgactggctggtattaatcgaccagatgctgaagtccaacattgtcactgttggggatgtagaagagatcaataagaccgtttcccgaatgaaaattacaaaggctgacttagaacagcgccatcctcagctggattatgtttttacatgggcacagaaattgaaaaataaagcttccagttcagatatgagaacagcaattacagaaaaattggaaagggtcaagaaccagtgggatggcacccagcatggcgttgagctaagacagcagcagcttgaggacatgattattgacagtcttcagtgggatgaccatagggaggagactgaagaactgatgagaaaatatgaggctcgactctatattcttcagcaagcccgacgggatccactcaccaaacaaatttctgtgcccaatactgcttcaagaactgggtcctggagatggtatcgtcatggcgttcgataacgtcctgcagaaactcctggaggaatatgggagtgatgacacaaggaatgtgaaagaaaccacagagtacttaaaaacatcatggatcaatctcaaacaaagtattgctgacagacagaacgccttggaggctgagtggaggacggtgcaggcctctcgcagagatctggaaaacttcctgaagtggatccaagaagcagagaccacagtgaatgtgcttgtggatgcctctcatcgggagaatgctcttcaggatagtatcttggccagggaactcaaacagcagatgcaggacatccaggcagaaattgatgcccacaatgacatatttaaaagcattgacggaaacaggcagaagatggtaaaagctttgggaaattctgaagaggctactatgcttcaacatcgactggatgatatgaaccaaagatggaatgacttaaaagcaaaatctgctagcatcagggcccatttggaggccagcgctgagaagtggaacaggttgctgatgtccttagaagaactgatcaaatggctgaatatgaaagatgaagagcttaagaaacaaatgcctattggaggagatgttccagccttacagctccagtatgaccattgtaaggccctgagacgggagttaaaggagaaagaatattctgtcctgaatgctgtcgaccaggcccgagttttcttggctgatcagccaattgaggcccctgaagagccaagaagaaacctacaatcaaaaacagaattaactcctgaggagagagcccaaaagattgccaaagccatgcgcaaacagtcttctgaagtcaaagaaaaatgggaaagtctaaatgctgtaactagcaattggcaaaagcaagtggacaaggcattggagaaactcagagacctgcagggagctatggatgacctggacgctgacatgaaggaggcagagtccgtgcggaatggctggaagcccgtgggagacttactcattgactcgctgcaggatcacattgaaaaaatcatggcatttagagaagaaattgcaccaatcaactttaaagttaaaacggtgaatgatttatccagtcagctgtctccacttgacctgcatccctctctaaagatgtctcgccagctagatgaccttaatatgcgatggaaacttttacaggtttctgtggatgatcgccttaaacagcttcaggaagcccacagagattttggaccatcctctcagcattttctctctacgtcagtccagctgccgtggcaaagatccatttcacataataaagtgccctattacatcaaccatcaaacacagaccacctgttgggaccatcctaaaatgaccgaactctttcaatcccttgctgacctgaataatgtacgtttttctgcctaccgtacagcaatcaaaatccgaagactacaaaaagcactatgtttggatctcttagagttgagtacaacaaatgaaattttcaaacagcacaagttgaaccaaaatgaccagctcctcagtgttccagatgtcatcaactgtctgacaacaacttatgatggacttgagcaaatgcataaggacctggtcaacgttccactctgtgttgatatgtgtctcaattggttgctcaatgtctatgacacgggtcgaactggaaaaattagagtgcagagtctgaagattggattaatgtctctctccaaaggtctcttggaagaaaaatacagatatctctttaaggaagttgcagggccaacagaaatgtgtgaccagaggcagctgggcctgttacttcatgatgccatccagatcccccggcagctaggtgaagtagcagcttttggaggcagtaatattgagcctagtgttcgcagctgcttccaacagaataacaataaaccagaaataagtgtgaaagagtttatagattggatgcatttggaaccacagtccatggtttggctcccagttttacatcgagtggcagcagcggagactgcaaaacatcaggccaaatgcaacatctgtaaagaatgtccaattgtcgggttcaggtatagaagccttaagcattttaactatgatgtctgccagagttgtttcttttcgggtcgaacagcaaaaggtcacaaattacattacccaatggtggaatattgtatacctacaacatctggggaagatgtacgagacttcacaaaggtacttaagaacaagttcaggtcgaagaagtactttgccaaacaccctcgacttggttacctgcctgtccagacagttcttgaaggtgacaacttagagactcctatcacactcatcagtatgtggccagagcactatgacccctcacaatctcctcaactgtttcatgatgacacccattcaagaatagaacaatatgccacacgactggcccagatggaaaggactaatgggtcttttctcactgatagcagctccaccacaggaagtgtggaagacgagcacgccctcatccagcagtattgccaaacactcggaggagagtccccagtgagccagccgcagagcccagctcagatcctgaagtcagtagagagggaagaacgtggagaactggagaggatcattgctgacctggaggaagaacaaagaaatctacaggtggagtatgagcagctgaaggaccagcacctccgaagggggctccctgtcggctggaggctaggatgcagattttagaagatcacaataaacagctggagtctcagctccaccgcctccgacagctgctggagcagcctgaatctgattcccgaatcaatggtgtttccccatgggcttctcctcagcattctgcactgagctactcgcttgatccagatgcctccggcccacagttccaccaggcagcgggagaggacctgctggccccaccgcacgacaccagcacggatctcacggaggtcatggagcagattcacagcacgtttccatcttgctgcccaaatgttcccagcaggccacaggcaatgtgaagtattcatccggccaaccaatgtttcctgacgtacagtgttgcccttttcagcaaatgccaattccaagttccattaaatcagaagctccatggctccttggcccacgatgttgagtgctgactgtgtgttctactgaaagagtaaaacactgactatccaaagagaaatggatattttgtttttataataaccatatattattgttttcttcttccctttctatgcaagtgtaaattaatgaacagagaggtatttggaaatggtaatacatttgtcacggatttgtataatgtatacagcattgggaaagtgggtgggggctttctaatatgataccgtctttttaataactatgacaaagcttacataagaattagaagaccactttacatttttacattccttctgctgttcatattaaccttgcacaattacttcattttttctttgactcttttaccacaatgttttggttatttataatttatcagccatatgtttatcagccatataaccaactagatcccaaatagatccatgtatttgtttccgtgatttggccacattaataaattcataaatttcaatcaaatatcttatatatacacacatatggtttaagctacagccctgtgtatgccgtttaactttatttgacgttgcccacttacttctttgctgaccacttggataaccgtaataaaaatcctataagcctaaatggcatttcttttgggatatttttcctgcattttattccctttttatataagtaggaattaattatttattttatgtcttaatctatttgataaagaagactacattataataatctcaaagatcatattaccaaaggttgcccacttgagcatattttcattttgacacagaaacaaaatttagtacaacctttcctagttcccatgtcttgattttcatcattacatgcacagcagacctttacctattgtgataccagaacacatcattgtctttggttcccttcaaagagaattttattgttgttttgtattttcaagtccttaatagttcttgaaactcctagttgttttcttgttgaaagcagacacacatttagtgcacggcttattttacctttcgggtgaaagatcagatgtttttatacccttcacttgatcaatatatttggaaagaatgtttatcaaaagtctatgtcactgcttctacagaagaatgaaattaatgcttaggtgatggtacctccacctacatctttttgagtgcattcaattatgtattttggtttagcttctgatttaacatttaattgattcagtttaaacatgttacttaattagcaaatgtagaggaaccaaaaaaaggtgaaaataatatgttttgattcaaacctaaagacataaaaacataaagacattttaactttgggttctctttagctgggatctggccagaaggaggcttaaagttagaaattgctattattttagaataggttgggtgggttggggggcaagggtgtctatttgcagcagagatattttgaaaagaagaaaattgttttatataaaaaggaaagccatgaccacctttctacctcagatccatcttcatccattgcattggaaactgctttatgctgctgcagtctgcaaagtctagagcttttatcaggccatgtcatacccaagaaagcacctatttaaagaaaaaacaattccctgagctctcaactccaagttgtagatttggtgtcttccttgttcttactttaaaaagtcatgtgttaattttttttctgcctgtatttgtatgcaaaatgtcctctatctgctattaaagaaaagctacgtaaaacactacattgtaaccttctaagtaataataaataaaaagaaatatattgcagtaacaatgggaagtaagtatgtagttcttttgaaatatgtggtaaagaactaatcacagactatcatctaatctggttacatattgtatttttcatcctgaataaaagtaattttaacacaaaaaaactataaaacttcagctgg

SEQ ID NO: 322282 - DNA, 5713 bp, Homo sapiens
gatatgggccagaaatttgggtaccctcctctagaaagaaattccagtaatggatctgtttaagtgttaagggagcagaagagaagacggtgaatgtacttcaatattttgaacatttttagaaataggaattcttgagtctcttttctttcttcagtcttttccatttctttttcttttctttttcactgtaatttctgtgcccatttcattgaaatgggcacagaaattgaaaaataaagcttccagttcagatatgagaacagcaattacagaaaaattggaaagggtcaagaaccagtgggatggcacccagcatggcgttgagctaagacagcagcagcttgaggacatgattattgacagtcttcagtgggatgaccatagggaggagactgaagaactgatgagaaaatatgaggctcgactctatattcttcagcaagcccgacgggatccactcaccaaacaaatttctgtgcccaatactgcttcaagaactgggtcctggagatggtatcgtcatggcgttcgataacgtcctgcagaaactcctggaggaatatgggagtgatgacacaaggaatgtgaaagaaaccacagagtacttaaaaacatcatggatcaatctcaaacaaagtattgctgacagacagaacgccttggaggctgagtggaggacggtgcaggcctctcgcagagatctggaaaacttcctgaagtggatccaagaagcagagaccacagtgaatgtgcttgtggatgcctctcatcgggagaatgctcttcaggatagtatcttggccagggaactcaaacagcagatgcaggacatccaggcagaaattgatgcccacaatgacatatttaaaagcattgacggaaacaggcagaagatggtaaaagctttgggaaattctgaagaggctactatgcttcaacatcgactggatgatatgaaccaaagatggaatgacttaaaagcaaaatctgctagcatcagggcccatttggaggccagcgctgagaagtggaacaggttgctgatgtccttagaagaactgatcaaatggctgaatatgaaagatgaagagcttaagaaacaaatgcctattggaggagatgttccagccttacagctccagtatgaccattgtaaggccctgagacgggagttaaaggagaaagaatattctgtcctgaatgctgtcgaccaggcccgagttttcttggctgatcagccaattgaggcccctgaagagccaagaagaaacctacaatcaaaaacagaattaactcctgaggagagagcccaaaagattgccaaagccatgcgcaaacagtcttctgaagtcaaagaaaaatgggaaagtctaaatgctgtaactagcaattggcaaaagcaagtggacaaggcattggagaaactcagagacctgcagggagctatggatgacctggacgctgacatgaaggaggcagagtccgtgcggaatggctggaagcccgtgggagacttactcattgactcgctgcaggatcacattgaaaaaatcatggcatttagagaagaaattgcaccaatcaactttaaagttaaaacggtgaatgatttatccagtcagctgtctccacttgacctgcatccctctctaaagatgtctcgccagctagatgaccttaatatgcgatggaaacttttacaggtttctgtggatgatcgccttaaacagcttcaggaagcccacagagattttggaccatcctctcagcattttctctctacgtcagtccagctgccgtggcaaagatccatttcacataataaagtgccctattacatcaaccatcaaacacagaccacctgttgggaccatcctaaaatgaccgaactctttcaatcccttgctgacctgaataatgtacgtttttctgcctaccgtacagcaatcaaaatccgaagactacaaaaagcactatgtttggatctcttagagttgagtacaacaaatgaaattttcaaacagcacaagttgaaccaaaatgaccagctcctcagtgttccagatgtcatcaactgtctgacaacaacttatgatggacttgagcaaatgcataaggacctggtcaacgttccactctgtgttgatatgtgtctcaattggttgctcaatgtctatgacacgggtcgaactggaaaaattagagtgcagagtctgaagattggattaatgtctctctccaaaggtctcttggaagaaaaatacagatatctctttaaggaagttgcagggccaacagaaatgtgtgaccagaggcagctgggcctgttacttcatgatgccatccagatcccccggcagctaggtgaagtagcagcttttggaggcagtaatattgagcctagtgttcgcagctgcttccaacagaataacaataaaccagaaataagtgtgaaagagtttatagattggatgcatttggaaccacagtccatggtttggctcccagttttacatcgagtggcagcagcggagactgcaaaacatcaggccaaatgcaacatctgtaaagaatgtccaattgtcgggttcaggtatagaagccttaagcattttaactatgatgtctgccagagttgtttcttttcgggtcgaacagcaaaaggtcacaaattacattacccaatggtggaatattgtatacctacaacatctggggaagatgtacgagacttcacaaaggtacttaagaacaagttcaggtcgaagaagtactttgccaaacaccctcgacttggttacctgcctgtccagacagttcttgaaggtgacaacttagagactcctatcacactcatcagtatgtggccagagcactatgacccctcacaatctcctcaactgtttcatgatgacacccattcaagaatagaacaatatgccacacgactggcccagatggaaaggactaatgggtcttttctcactgatagcagctccaccacaggaagtgtggaagacgagcacgccctcatccagcagtattgccaaacactcggaggagagtccccagtgagccagccgcagagcccagctcagatcctgaagtcagtagagagggaagaacgtggagaactggagaggatcattgctgacctggaggaagaacaaagaaatctacaggtggagtatgagcagctgaaggaccagcacctccgaagggggctccctgtcggttcaccgccagagtcgattatatctccccatcacacgtctgaggattcagaacttatagcagaagcaaaactcctcaggcagcacaaaggtcggctggaggctaggatgcagattttagaagatcacaataaacagctggagtctcagctccaccgcctccgacagctgctggagcagcctgaatctgattcccgaatcaatggtgtttccccatgggcttctcctcagcattctgcactgagctactcgcttgatccagatgcctccggcccacagttccaccaggcagcgggagaggacctgctggccccaccgcacgacaccagcacggatctcacggaggtcatggagcagattcacagcacgtttccatcttgctgcccaaatgttcccagcaggccacaggcaatgtgaagtattcatccggccaaccaatgtttcctgacgtacagtgttgcccttttcagcaaatgccaattccaagttccattaaatcagaagctccatggctccttggcccacgatgttgagtgctgactgtgtgttctactgaaagagtaaaacactgactatccaaagagaaatggatattttgtttttataataaccatatattattgttttcttcttccctttctatgcaagtgtaaattaatgaacagagaggtatttggaaatggtaatacatttgtcacggatttgtataatgtatacagcattgggaaagtgggtgggggctttctaatatgataccgtctttttaataactatgacaaagcttacataagaattagaagaccactttacatttttacattccttctgctgttcatattaaccttgcacaattacttcattttttctttgactcttttaccacaatgttttggttatttataatttatcagccatatgtttatcagccatataaccaactagatcccaaatagatccatgtatttgtttccgtgatttggccacattaataaattcataaatttcaatcaaatatcttatatatacacacatatggtttaagctacagccctgtgtatgccgtttaactttatttgacgttgcccacttacttctttgctgaccacttggataaccgtaataaaaatcctataagcctaaatggcatttcttttgggatatttttcctgcattttattccctttttatataagtaggaattaattatttattttatgtcttaatctatttgataaagaagactacattataataatctcaaagatcatattaccaaaggttgcccacttgagcatattttcattttgacacagaaacaaaatttagtacaacctttcctagttcccatgtcttgattttcatcattacatgcacagcagacctttacctattgtgataccagaacacatcattgtctttggttcccttcaaagagaattttattgttgttttgtattttcaagtccttaatagttcttgaaactcctagttgttttcttgttgaaagcagacacacatttagtgcacggcttattttacctttcgggtgaaagatcagatgtttttatacccttcacttgatcaatatatttggaaagaatgtttatcaaaagtctatgtcactgcttctacagaagaatgaaattaatgcttaggtgatggtacctccacctacatctttttgagtgcattcaattatgtattttggtttagcttctgatttaacatttaattgattcagtttaaacatgttacttaattagcaaatgtagaggaaccaaaaaaaggtgaaaataatatgttttgattcaaacctaaagacataaaaacataaagacattttaactttgggttctctttagctgggatctggccagaaggaggcttaaagttagaaattgctattattttagaataggttgggtgggttggggggcaagggtgtctatttgcagcagagatattttgaaaagaagaaaattgttttatataaaaaggaaagccatgaccacctttctacctcagatccatcttcatccattgcattggaaactgctttatgctgctgcagtctgcaaagtctagagcttttatcaggccatgtcatacccaagaaagcacctatttaaagaaaaaacaattccctgagctctcaactccaagttgtagatttggtgtcttccttgttcttactttaaaaagtcatgtgttaattttttttctgcctgtatttgtatgcaaaatgtcctctatctgctattaaagaaaagctacgtaaaacactacattgtaaccttctaagtaataataaataaaaagaaatatattgcagtaacaatgggaagtaagtatgtagttcttttgaaatatgtggtaaagaactaatcacagactatcatctaatctggttacatattgtatttttcatcctgaataaaagtaattttaacacaaaaaaactataaaacttcagctgg

SEQ ID NO: 322283 - DNA, 3331 bp, Homo sapiens
agcggagaagattatgaagcaacaacactagctacagtttaaatgaaggcatttcttcacttttaatatatttcttttttcaccagaataacaataaaccagaaataagtgtgaaagagtttatagattggatgcatttggaaccacagtccatggtttggctcccagttttacatcgagtggcagcagcggagactgcaaaacatcaggccaaatgcaacatctgtaaagaatgtccaattgtcgggttcaggtatagaagccttaagcattttaactatgatgtctgccagagttgtttcttttcgggtcgaacagcaaaaggtcacaaattacattacccaatggtggaatattgtatacctacaacatctggggaagatgtacgagacttcacaaaggtacttaagaacaagttcaggtcgaagaagtactttgccaaacaccctcgacttggttacctgcctgtccagacagttcttgaaggtgacaacttagagaccccctcacaatctcctcaactgtttcatgatgacacccattcaagaatagaacaatatgccacacgactggcccagatggaaaggactaatgggtcttttctcactgatagcagctccaccacaggaagtgtggaagacgagcacgccctcatccagcagtattgccaaacactcggaggagagtccccagtgagccagccgcagagcccagctcagatcctgaagtcagtagagagggaagaacgtggagaactggagaggatcattgctgacctggaggaagaacaaagaaatctacaggtggagtatgagcagctgaaggaccagcacctccgaagggggctccctgtcggttcaccgccagagtcgattatatctccccatcacacgtctgaggattcagaacttatagcagaagcaaaactcctcaggcagcacaaaggtcggctggaggctaggatgcagattttagaagatcacaataaacagctggagtctcagctccaccgcctccgacagctgctggagcagcctgaatctgattcccgaatcaatggtgtttccccatgggcttctcctcagcattctgcactgagctactcgcttgatccagatgcctccggcccacagttccaccaggcagcgggagaggacctgctggccccaccgcacgacaccagcacggatctcacggaggtcatggagcagattcacagcacgtttccatcttgctgcccaaatgttcccagcaggccacaggcaatgtgaagtattcatccggccaaccaatgtttcctgacgtacagtgttgcccttttcagcaaatgccaattccaagttccattaaatcagaagctccatggctccttggcccacgatgttgagtgctgactgtgtgttctactgaaagagtaaaacactgactatccaaagagaaatggatattttgtttttataataaccatatattattgttttcttcttccctttctatgcaagtgtaaattaatgaacagagaggtatttggaaatggtaatacatttgtcacggatttgtataatgtatacagcattgggaaagtgggtgggggctttctaatatgataccgtctttttaataactatgacaaagcttacataagaattagaagaccactttacatttttacattccttctgctgttcatattaaccttgcacaattacttcattttttctttgactcttttaccacaatgttttggttatttataatttatcagccatatgtttatcagccatataaccaactagatcccaaatagatccatgtatttgtttccgtgatttggccacattaataaattcataaatttcaatcaaatatcttatatatacacacatatggtttaagctacagccctgtgtatgccgtttaactttatttgacgttgcccacttacttctttgctgaccacttggataaccgtaataaaaatcctataagcctaaatggcatttcttttgggatatttttcctgcattttattccctttttatataagtaggaattaattatttattttatgtcttaatctatttgataaagaagactacattataataatctcaaagatcatattaccaaaggttgcccacttgagcatattttcattttgacacagaaacaaaatttagtacaacctttcctagttcccatgtcttgattttcatcattacatgcacagcagacctttacctattgtgataccagaacacatcattgtctttggttcccttcaaagagaattttattgttgttttgtattttcaagtccttaatagttcttgaaactcctagttgttttcttgttgaaagcagacacacatttagtgcacggcttattttacctttcgggtgaaagatcagatgtttttatacccttcacttgatcaatatatttggaaagaatgtttatcaaaagtctatgtcactgcttctacagaagaatgaaattaatgcttaggtgatggtacctccacctacatctttttgagtgcattcaattatgtattttggtttagcttctgatttaacatttaattgattcagtttaaacatgttacttaattagcaaatgtagaggaaccaaaaaaaggtgaaaataatatgttttgattcaaacctaaagacataaaaacataaagacattttaactttgggttctctttagctgggatctggccagaaggaggcttaaagttagaaattgctattattttagaataggttgggtgggttggggggcaagggtgtctatttgcagcagagatattttgaaaagaagaaaattgttttatataaaaaggaaagccatgaccacctttctacctcagatccatcttcatccattgcattggaaactgctttatgctgctgcagtctgcaaagtctagagcttttatcaggccatgtcatacccaagaaagcacctatttaaagaaaaaacaattccctgagctctcaactccaagttgtagatttggtgtcttccttgttcttactttaaaaagtcatgtgttaattttttttctgcctgtatttgtatgcaaaatgtcctctatctgctattaaagaaaagctacgtaaaacactacattgtaaccttctaagtaataataaataaaaagaaatatattgcagtaacaatgggaagtaagtatgtagttcttttgaaatatgtggtaaagaactaatcacagactatcatctaatctggttacatattgtatttttcatcctgaataaaagtaattttaacacaaaaaaactataaaacttcagctgg

SEQ ID NO: 322284 - DNA, 3171 bp, Homo sapiens
gtgaagtagagtgagcattagcctggcagacagctagggtaatagatgacttccagtggaagtcaaagcacaaatgttggaagaagaagaatggtatagaagccttaagcattttaactatgatgtctgccagagttgtttcttttcgggtcgaacagcaaaaggtcacaaattacattacccaatggtggaatattgtatacctacaacatctggggaagatgtacgagacttcacaaaggtacttaagaacaagttcaggtcgaagaagtactttgccaaacaccctcgacttggttacctgcctgtccagacagttcttgaaggtgacaacttagagaccccctcacaatctcctcaactgtttcatgatgacacccattcaagaatagaacaatatgccacacgactggcccagatggaaaggactaatgggtcttttctcactgatagcagctccaccacaggaagtgtggaagacgagcacgccctcatccagcagtattgccaaacactcggaggagagtccccagtgagccagccgcagagcccagctcagatcctgaagtcagtagagagggaagaacgtggagaactggagaggatcattgctgacctggaggaagaacaaagaaatctacaggtggagtatgagcagctgaaggaccagcacctccgaagggggctccctgtcggttcaccgccagagtcgattatatctccccatcacacgtctgaggattcagaacttatagcagaagcaaaactcctcaggcagcacaaaggtcggctggaggctaggatgcagattttagaagatcacaataaacagctggagtctcagctccaccgcctccgacagctgctggagcagcctgaatctgattcccgaatcaatggtgtttccccatgggcttctcctcagcattctgcactgagctactcgcttgatccagatgcctccggcccacagttccaccaggcagcgggagaggacctgctggccccaccgcacgacaccagcacggatctcacggaggtcatggagcagattcacagcacgtttccatcttgctgcccaaatgttcccagcaggccacaggcaatgtgaagtattcatccggccaaccaatgtttcctgacgtacagtgttgcccttttcagcaaatgccaattccaagttccattaaatcagaagctccatggctccttggcccacgatgttgagtgctgactgtgtgttctactgaaagagtaaaacactgactatccaaagagaaatggatattttgtttttataataaccatatattattgttttcttcttccctttctatgcaagtgtaaattaatgaacagagaggtatttggaaatggtaatacatttgtcacggatttgtataatgtatacagcattgggaaagtgggtgggggctttctaatatgataccgtctttttaataactatgacaaagcttacataagaattagaagaccactttacatttttacattccttctgctgttcatattaaccttgcacaattacttcattttttctttgactcttttaccacaatgttttggttatttataatttatcagccatatgtttatcagccatataaccaactagatcccaaatagatccatgtatttgtttccgtgatttggccacattaataaattcataaatttcaatcaaatatcttatatatacacacatatggtttaagctacagccctgtgtatgccgtttaactttatttgacgttgcccacttacttctttgctgaccacttggataaccgtaataaaaatcctataagcctaaatggcatttcttttgggatatttttcctgcattttattccctttttatataagtaggaattaattatttattttatgtcttaatctatttgataaagaagactacattataataatctcaaagatcatattaccaaaggttgcccacttgagcatattttcattttgacacagaaacaaaatttagtacaacctttcctagttcccatgtcttgattttcatcattacatgcacagcagacctttacctattgtgataccagaacacatcattgtctttggttcccttcaaagagaattttattgttgttttgtattttcaagtccttaatagttcttgaaactcctagttgttttcttgttgaaagcagacacacatttagtgcacggcttattttacctttcgggtgaaagatcagatgtttttatacccttcacttgatcaatatatttggaaagaatgtttatcaaaagtctatgtcactgcttctacagaagaatgaaattaatgcttaggtgatggtacctccacctacatctttttgagtgcattcaattatgtattttggtttagcttctgatttaacatttaattgattcagtttaaacatgttacttaattagcaaatgtagaggaaccaaaaaaaggtgaaaataatatgttttgattcaaacctaaagacataaaaacataaagacattttaactttgggttctctttagctgggatctggccagaaggaggcttaaagttagaaattgctattattttagaataggttgggtgggttggggggcaagggtgtctatttgcagcagagatattttgaaaagaagaaaattgttttatataaaaaggaaagccatgaccacctttctacctcagatccatcttcatccattgcattggaaactgctttatgctgctgcagtctgcaaagtctagagcttttatcaggccatgtcatacccaagaaagcacctatttaaagaaaaaacaattccctgagctctcaactccaagttgtagatttggtgtcttccttgttcttactttaaaaagtcatgtgttaattttttttctgcctgtatttgtatgcaaaatgtcctctatctgctattaaagaaaagctacgtaaaacactacattgtaaccttctaagtaataataaataaaaagaaatatattgcagtaacaatgggaagtaagtatgtagttcttttgaaatatgtggtaaagaactaatcacagactatcatctaatctggttacatattgtatttttcatcctgaataaaagtaattttaacacaaaaaaactataaaacttcagctgg

SEQ ID NO: 322285 - DNA, 2583 bp, Homo sapiens
atgaattcacttaacattaaaacaacagaaaaattgagggataaaaatggtgttgataaatgagtctggcagcataaccaagtggattcttcaaggtgtccaagcggaaagagaaggaccaaagcccccaccaagctgatgctaaaatgtatggaaaacatctgaaggcaaagacttctatatgatttaattatccatggtgagggcggggaagttaaaaaggaaatgtttttccttatgattatttgaatcctttctctgctttaacctctgaatgtggttccagcctgaatctgattcccgaatcaatggtgtttccccatgggcttctcctcagcattctgcactgagctactcgcttgatccagatgcctccggcccacagttccaccaggcagcgggagaggacctgctggccccaccgcacgacaccagcacggatctcacggaggtcatggagcagattcacagcacgtttccatcttgctgcccaaatgttcccagcaggccacaggcaatgtgaagtattcatccggccaaccaatgtttcctgacgtacagtgttgcccttttcagcaaatgccaattccaagttccattaaatcagaagctccatggctccttggcccacgatgttgagtgctgactgtgtgttctactgaaagagtaaaacactgactatccaaagagaaatggatattttgtttttataataaccatatattattgttttcttcttccctttctatgcaagtgtaaattaatgaacagagaggtatttggaaatggtaatacatttgtcacggatttgtataatgtatacagcattgggaaagtgggtgggggctttctaatatgataccgtctttttaataactatgacaaagcttacataagaattagaagaccactttacatttttacattccttctgctgttcatattaaccttgcacaattacttcattttttctttgactcttttaccacaatgttttggttatttataatttatcagccatatgtttatcagccatataaccaactagatcccaaatagatccatgtatttgtttccgtgatttggccacattaataaattcataaatttcaatcaaatatcttatatatacacacatatggtttaagctacagccctgtgtatgccgtttaactttatttgacgttgcccacttacttctttgctgaccacttggataaccgtaataaaaatcctataagcctaaatggcatttcttttgggatatttttcctgcattttattccctttttatataagtaggaattaattatttattttatgtcttaatctatttgataaagaagactacattataataatctcaaagatcatattaccaaaggttgcccacttgagcatattttcattttgacacagaaacaaaatttagtacaacctttcctagttcccatgtcttgattttcatcattacatgcacagcagacctttacctattgtgataccagaacacatcattgtctttggttcccttcaaagagaattttattgttgttttgtattttcaagtccttaatagttcttgaaactcctagttgttttcttgttgaaagcagacacacatttagtgcacggcttattttacctttcgggtgaaagatcagatgtttttatacccttcacttgatcaatatatttggaaagaatgtttatcaaaagtctatgtcactgcttctacagaagaatgaaattaatgcttaggtgatggtacctccacctacatctttttgagtgcattcaattatgtattttggtttagcttctgatttaacatttaattgattcagtttaaacatgttacttaattagcaaatgtagaggaaccaaaaaaaggtgaaaataatatgttttgattcaaacctaaagacataaaaacataaagacattttaactttgggttctctttagctgggatctggccagaaggaggcttaaagttagaaattgctattattttagaataggttgggtgggttggggggcaagggtgtctatttgcagcagagatattttgaaaagaagaaaattgttttatataaaaaggaaagccatgaccacctttctacctcagatccatcttcatccattgcattggaaactgctttatgctgctgcagtctgcaaagtctagagcttttatcaggccatgtcatacccaagaaagcacctatttaaagaaaaaacaattccctgagctctcaactccaagttgtagatttggtgtcttccttgttcttactttaaaaagtcatgtgttaattttttttctgcctgtatttgtatgcaaaatgtcctctatctgctattaaagaaaagctacgtaaaacactacattgtaaccttctaagtaataataaataaaaagaaatatattgcagtaacaatgggaagtaagtatgtagttcttttgaaatatgtggtaaagaactaatcacagactatcatctaatctggttacatattgtatttttcatcctgaataaaagtaattttaacacaaaaaaactataaaacttcagctgg

SEQ ID NO: 322286 - DNA, 10541 bp, Homo sapiens
cagatgtaggtgatgagcggcctggcagccaccacgtttcattggaaaaagtgcagattggatttgccagggcatgtagctctccaggcttgcaagcgattaccagatgaacacaatgacgtacagaagaaaacctttaccaaatggataaatgctcgattttcaaagagtgggaaaccacccatcaatgatatgttcacagacctcaaagatggaaggaagctattggatcttctagaaggcctcacaggaacatcactgccaaaggaacgtggttccacaagggtacatgccttaaataacgtcaacagagtgctgcaggttttacatcagaacaatgtggaattagtgaatatagggggaactgacattgtggatggaaatcacaaactgactttggggttactttggagcatcattttgcactggcaggtgaaagatgtcatgaaggatgtcatgtcggacctgcagcagacgaacagtgagaagatcctgctcagctgggtgcgtcagaccaccaggccctacagccaagtcaacgtcctcaacttcaccaccagctggacagatggactcgcctttaatgctgtcctccaccgacataaacctgatctcttcagctgggataaagttgtcaaaatgtcaccaattgagagacttgaacatgccttcagcaaggctcaaacttatttgggaattgaaaagctgttagatcctgaagatgttgccgttcagcttcctgacaagaaatccataattatgtatttaacatctttgtttgaggtgctacctcagcaagtcaccatagacgccatccgtgaggtagagacactcccaaggaaatataaaaaagaatgtgaagaagaggcaattaatatacagagtacagcgcctgaggaggagcatgagagtccccgagctgaaactcccagcactgtcactgaggtcgacatggatctggacagctatcagattgcgttggaggaagtgctgacctggttgctttctgctgaggacactttccaggagcaggatgatatttctgatgatgttgaagaagtcaaagaccagtttgcaacccatgaagcttttatgatggaactgactgcacaccagagcagtgtgggcagcgtcctgcaggcaggcaaccaactgataacacaaggaactctgtcagacgaagaagaatttgagattcaggaacagatgaccctgctgaatgctagatgggaggctcttagggtggagagtatggacagacagtcccggctgcacgatgtgctgatggaactgcagaagaagcaactgcagcagctctccgcctggttaacactcacagaggagcgcattcagaagatggaaacttgccccctggatgatgatgtaaaatctctacaaaagctgctagaagaacataaaagtttgcaaagtgatcttgaggctgaacaggtgaaagtaaattcactaactcacatggtggtcattgttgatgaaaacagtggtgagagtgctacagctatcctagaagaccagttacagaaacttggtgagcgctggacagcagtatgccgttggactgaagaacgctggaataggttacaagaaatcaatatattgtggcaggaattattggaagaacagtgcttgttgaaagcttggttaaccgaaaaagaagaggctttaaataaagtccagacaagcaacttcaaagaccaaaaggaactaagtgtcagtgttcgacgtctggctattttgaaggaagacatggaaatgaagcgtcaaacattggatcagctgagtgagattggccaggatgtgggacaattacttgataattccaaggcatctaagaagatcaacagtgactcagaggaactgactcaaagatgggattctttggttcagagactagaagattcctccaaccaggtgactcaggctgtagcaaagctggggatgtctcagattcctcagaaggaccttttggagactgttcgtgtaagagaacaagcaattacaaaaaaatctaagcaggaactgcctcctcctcctcccccaaagaagagacagatccatgtggatattgaagctaagaaaaagtttgatgctataagtgcagagctgttgaactggattttgaaatggaaaactgccattcagaccacagagataaaagagtatatgaagatgcaagacacttccgaaatgaaaaagaagttgaaggcattagaaaaagaacagagagaaagaatccccagagcagatgaattaaaccaaactggacaaatccttgtggagcaaatgggaaaagaaggccttcctactgaagaaataaaaaatgttctggagaaggtttcatcagaatggaagaatgtatctcaacatttggaagatctagaaagaaagattcagctacaggaagatataaatgcttatttcaagcagcttgatgagcttgaaaaggtcatcaagacaaaggaggagtgggtaaaacacacttccatttctgaatcttcccggcagtccttgccaagcttgaaggattcctgtcagcgggaattgacaaatcttcttggccttcaccccaaaattgaaatggctcgtgcaagctgctcggccctgatgtctcagccttctgccccagattttgtccagcggggcttcgatagctttctgggccgctaccaagctgtacaagaggctgtagaggatcgtcaacaacatctagagaatgaactgaagggccaacctggacatgcatatctggaaacattgaaaacactgaaagatgtgctaaatgattcagaaaataaggcccaggtgtctctgaatgtccttaatgatcttgccaaggtggagaaggccctgcaagaaaaaaagacccttgatgaaatccttgagaatcagaaacctgcattacataaacttgcagaagaaacaaaggctctggagaaaaatgttcatcctgatgtagaaaaattatataagcaagaatttgatgatgtgcaaggaaagtggaacaagctaaaggtcttggtttccaaagatctacatttgcttgaggaaattgctctcacactcagagcttttgaggccgattcaacagtcattgagaagtggatggatggcgtgaaagacttcttaatgaaacagcaggctgcccaaggagacgacgcaggtctacagaggcagttagaccagtgctctgcatttgttaatgaaatagaaacaattgaatcatctctgaaaaacatgaaggaaatagagactaatcttcgaagtggtccagttgctggaataaaaacttgggtgcagacaagactaggtgactaccaaactcaactggagaaacttagcaaggagatcgctactcaaaaaagtaggttgtctgaaagtcaagaaaaagctgcgaacctgaagaaagacttggcagagatgcaggaatggatgacccaggccgaggaagaatatttggagcgggattttgagtacaagtcaccagaagagcttgagagtgctgtggaagagatgaagagggcaaaagaggatgtgttgcagaaggaggtgagagtgaagattctcaaggacaacatcaagttattagctgccaaggtgccctctggtggccaggagttgacgtctgagctgaatgttgtgctggagaattaccaacttctttgtaatagaattcgaggaaagtgccacacgctagaggaggtctggtcttgttggattgaactgcttcactatttggatcttgaaactacctggttaaacactttggaagagcggatgaagagcacagaggtcctgcctgagaagacggatgctgtcaacgaagccctggagtctctggaatctgttctgcgccacccggcagataatcgcacccagattcgagagcttggccagactctgattgatggggggatcctggatgatataatcagtgagaaactggaggctttcaacagccgatatgaagatctaagtcacctggcagagagcaagcagatttctttggaaaagcaactccaggtgctgcgggaaactgaccagatgcttcaagtcttgcaagagagcttgggggagctggacaaacagctcaccacatacctgactgacaggatagatgctttccaagttccacaggaagctcagaaaatccaagcagagatctcagcccatgagctaaccctagaggagttgagaagaaatatgcgttctcagcccctgacctccccagagagtaggactgccagaggaggaagtcagatggatgtgctacagaggaaactccgagaggtgtccacaaagttccagcttttccagaagccagctaacttcgagcagcgcatgctggactgcaagcgtgtgctggatggcgtgaaagcagaacttcacgttctggatgtgaaggacgtagaccctgacgtcatacagacgcacctggacaagtgtatgaaactgtataaaactttgagtgaagtcaaacttgaagtggaaactgtgattaaaacaggaagacatattgtccagaaacagcaaacggacaacccaaaagggatggatgagcagctgacttccctgaaggttctttacaatgacctgggcgcacaggtgacagaaggaaaacaggatctggaaagagcatcacagttggcccggaaaatgaagaaagaggctgcttctctctctgaatggctttctgctactgaaactgaattggtacagaagtccacttcagaaggtctgcttggtgacttggatacagaaatttcctgggctaaaaatgttctgaaggatctggaaaagagaaaagctgatttaaataccatcacagagagtagtgctgccctgcaaaacttgattgagggcagtgagcctattttagaagagaggctctgcgtccttaacgctgggtggagccgagttcgtacctggactgaagattggtgcaataccttgatgaaccatcagaaccagctagaaatatttgatgggaacgtggctcacataagtacctggctttatcaagctgaagctctattggatgaaattgaaaagaaaccaacaagtaaacaggaagaaattgtgaagcgtttagtatctgagctggatgatgccaacctccaggttgaaaatgtccgcgatcaagcccttattttgatgaatgcccgtggaagctcaagcagggagcttgtagaaccaaagttagctgagctgaataggaactttgaaaaggtgtctcaacatatcaaaagtgccaaattgctaattgctcaggaaccattataccaatgtttggtcaccactgaaacatttgaaactggtgtgcctttctctgacttggaaaaattagaaaatgacatagaaaatatgttaaaatttgtggaaaaacacttggaatccagtgatgaagatgaaaagatggatgaggagagtgcccagattgaggaagttctacaaagaggagaagaaatgttacatcaacctatggaagataataaaaaagaaaagatccgtttgcaattattacttttgcatactagatacaacaaaattaaggcaatccctattcaacagaggaaaatgggtcaacttgcttctggaattagatcatcacttcttcctacagattatctggttgaaattaacaaaattttactttgcatggatgatgttgaattatcgcttaatgttccagagctcaacactgctatttacgaagacttctcttttcaggaagactctctgaagaatatcaaagaccaactggacaaacttggagagcagattgcagtcattcatgaaaaacagccagatgtcatccttgaagcctctggacctgaagccattcagatcagagatacacttactcagctgaatgcaaaatgggacagaattaatagaatgtacagtgatcggaaaggttgttttgacagggcaatggaagaatggagacagttccattgtgaccttaatgacctcacacagtggataacagaggctgaagaattactggttgatacctgtgctccaggtggcagcctggacttagagaaagccaggatacatcagcaggaacttgaggtgggcatcagcagccaccagcccagttttgcagcactaaaccgaactggggatgggattgtgcagaaactctcccaggcagatggaagcttcttgaaagaaaaactggcaggtttaaaccaacgctgggatgcaattgttgcagaagtgaaggataggcagccaaggctaaaaggagaaagtaagcaggtgatgaagtacaggcatcagctagatgagattatctgttggttaacaaaggctgagcatgctatgcaaaagagatcaaccaccgaattgggagaaaacctgcaagaattaagagacttaactcaagaaatggaagtacatgctgaaaaactcaaatggctgaatagaactgaattggagatgctttcagataaaagtctgagtttacctgaaagggataaaatttcagaaagcttaaggactgtaaatatgacatggaataagatttgcagagaggtgcctaccaccctgaaggaatgcatccaggagcccagttctgtttcacagacaaggattgctgctcatcctaatgtccaaaaggtggtgctagtatcatctgcgtcagatattcctgttcagtctcatcgtacttcggaaatttcaattcctgctgatcttgataaaactataacagaactagccgactggctggtattaatcgaccagatgctgaagtccaacattgtcactgttggggatgtagaagagatcaataagaccgtttcccgaatgaaaattacaaaggctgacttagaacagcgccatcctcagctggattatgtttttacatgggcacagaaattgaaaaataaagcttccagttcagatatgagaacagcaattacagaaaaattggaaagggtcaagaaccagtgggatggcacccagcatggcgttgagctaagacagcagcagcttgaggacatgattattgacagtcttcagtgggatgaccatagggaggagactgaagaactgatgagaaaatatgaggctcgactctatattcttcagcaagcccgacgggatccactcaccaaacaaatttctgtgcccaatactgcttcaagaactgggtcctggagatggtatcgtcatggcgttcgataacgtcctgcagaaactcctggaggaatatgggagtgatgacacaaggaatgtgaaagaaaccacagagtacttaaaaacatcatggatcaatctcaaacaaagtattgctgacagacagaacgccttggaggctgagtggaggacggtgcaggcctctcgcagagatctggaaaacttcctgaagtggatccaagaagcagagaccacagtgaatgtgcttgtggatgcctctcatcgggagaatgctcttcaggatagtatcttggccagggaactcaaacagcagatgcaggacatccaggcagaaattgatgcccacaatgacatatttaaaagcattgacggaaacaggcagaagatggtaaaagctttgggaaattctgaagaggctactatgcttcaacatcgactggatgatatgaaccaaagatggaatgacttaaaagcaaaatctgctagcatcagggcccatttggaggccagcgctgagaagtggaacaggttgctgatgtccttagaagaactgatcaaatggctgaatatgaaagatgaagagcttaagaaacaaatgcctattggaggagatgttccagccttacagctccagtatgaccattgtaaggccctgagacgggagttaaaggagaaagaatattctgtcctgaatgctgtcgaccaggcccgagttttcttggctgatcagccaattgaggcccctgaagagccaagaagaaacctacaatcaaaaacagaattaactcctgaggagagagcccaaaagattgccaaagccatgcgcaaacagtcttctgaagtcaaagaaaaatgggaaagtctaaatgctgtaactagcaattggcaaaagcaagtggacaaggcattggagaaactcagagacctgcagggagctatggatgacctggacgctgacatgaaggaggcagagtccgtgcggaatggctggaagcccgtgggagacttactcattgactcgctgcaggatcacattgaaaaaatcatggcatttagagaagaaattgcaccaatcaactttaaagttaaaacggtgaatgatttatccagtcagctgtctccacttgacctgcatccctctctaaagatgtctcgccagctagatgaccttaatatgcgatggaaacttttacaggtttctgtggatgatcgccttaaacagcttcaggaagcccacagagattttggaccatcctctcagcattttctctctacgtcagtccagctgccgtggcaaagatccatttcacataataaagtgccctattacatcaaccatcaaacacagaccacctgttgggaccatcctaaaatgaccgaactctttcaatcccttgctgacctgaataatgtacgtttttctgcctaccgtacagcaatcaaaatccgaagactacaaaaagcactatgtttggatctcttagagttgagtacaacaaatgaaattttcaaacagcacaagttgaaccaaaatgaccagctcctcagtgttccagatgtcatcaactgtctgacaacaacttatgatggacttgagcaaatgcataaggacctggtcaacgttccactctgtgttgatatgtgtctcaattggttgctcaatgtctatgacacgggtcgaactggaaaaattagagtgcagagtctgaagattggattaatgtctctctccaaaggtctcttggaagaaaaatacagatatctctttaaggaagttgcagggccaacagaaatgtgtgaccagaggcagctgggcctgttacttcatgatgccatccagatcccccggcagctaggtgaagtagcagcttttggaggcagtaatattgagcctagtgttcgcagctgcttccaacagaataacaataaaccagaaataagtgtgaaagagtttatagattggatgcatttggaaccacagtccatggtttggctcccagttttacatcgagtggcagcagcggagactgcaaaacatcaggccaaatgcaacatctgtaaagaatgtccaattgtcgggttcaggtatagaagccttaagcattttaactatgatgtctgccagagttgtttcttttcgggtcgaacagcaaaaggtcacaaattacattacccaatggtggaatattgtatacctacaacatctggggaagatgtacgagacttcacaaaggtacttaagaacaagttcaggtcgaagaagtactttgccaaacaccctcgacttggttacctgcctgtccagacagttcttgaaggtgacaacttagagactcctatcacactcatcagtatgtggccagagcactatgacccctcacaatctcctcaactgtttcatgatgacacccattcaagaatagaacaatatgccacacgactggcccagatggaaaggactaatgggtcttttctcactgatagcagctccaccacaggaagtgtggaagacgagcacgccctcatccagcagtattgccaaacactcggaggagagtccccagtgagccagccgcagagcccagctcagatcctgaagtcagtagagagggaagaacgtggagaactggagaggatcattgctgacctggaggaagaacaaagaaatctacaggtggagtatgagcagctgaaggaccagcacctccgaagggggctccctgtcggttcaccgccagagtcgattatatctccccatcacacgtctgaggattcagaacttatagcagaagcaaaactcctcaggcagcacaaaggtcggctggaggctaggatgcagattttagaagatcacaataaacagctggagtctcagctccaccgcctccgacagctgctggagcagcctgaatctgattcccgaatcaatggtgtttccccatgggcttctcctcagcattctgcactgagctactcgcttgatccagatgcctccggcccacagttccaccaggcagcgggagaggacctgctggccccaccgcacgacaccagcacggatctcacggaggtcatggagcagattcacagcacgtttccatcttgctgccgtgagtatgaaagattgcagcaccacagctgcacgtgttccttccctttctctttttctgcatgcggcccttcgccttcttccttaagataacaaaaaccttattacaaacaggactgaatattatttgaaaataaggcaaacattatataagaaaatgagaaagggaaggcacacgcgcagctgtggtgctgcatctttcatactcacggcagcagatggaaacgtgctgtgaatctgctccatg

SEQ ID NO: 322287 - DNA, 7269 bp, Homo sapiens
cagatgtaggtgatgagcggcctggcagccaccacgtttcattggaaaaagtgcagattggatttgccagggcatgtagctctccaggcttgcaagcgattaccagatgaacacaatgacgtacagaagaaaacctttaccaaatggataaatgctcgattttcaaagagtgggaaaccacccatcaatgatatgttcacagacctcaaagatggaaggaagctattggatcttctagaaggcctcacaggaacatcactgccaaaggaacgtggttccacaagggtacatgccttaaataacgtcaacagagtgctgcaggttttacatcagaacaatgtggaattagtgaatatagggggaactgacattgtggatggaaatcacaaactgactttggggttactttggagcatcattttgcactggcaggtgaaagatgtcatgaaggatgtcatgtcggacctgcagcagacgaacagtgagaagatcctgctcagctgggtgcgtcagaccaccaggccctacagccaagtcaacgtcctcaacttcaccaccagctggacagatggactcgcctttaatgctgtcctccaccgacataaacctgatctcttcagctgggataaagttgtcaaaatgtcaccaattgagagacttgaacatgccttcagcaaggctcaaacttatttgggaattgaaaagctgttagatcctgaagatgttgccgttcagcttcctgacaagaaatccataattatgtatttaacatctttgtttgaggtgctacctcagcaagtcaccatagacgccatccgtgaggtagagacactcccaaggaaatataaaaaagaatgtgaagaagaggcaattaatatacagagtacagcgcctgaggaggagcatgagagtccccgagctgaaactcccagcactgtcactgaggtcgacatggatctggacagctatcagattgcgttggaggaagtgctgacctggttgctttctgctgaggacactttccaggagcaggatgatatttctgatgatgttgaagaagtcaaagaccagtttgcaacccatgaagcttttatgatggaactgactgcacaccagagcagtgtgggcagcgtcctgcaggcaggcaaccaactgataacacaaggaactctgtcagacgaagaagaatttgagattcaggaacagatgaccctgctgaatgctagatgggaggctcttagggtggagagtatggacagacagtcccggctgcacgatgtgctgatggaactgcagaagaagcaactgcagcagctctccgcctggttaacactcacagaggagcgcattcagaagatggaaacttgccccctggatgatgatgtaaaatctctacaaaagctgctagaagaacataaaagtttgcaaagtgatcttgaggctgaacaggtgaaagtaaattcactaactcacatggtggtcattgttgatgaaaacagtggtgagagtgctacagctatcctagaagaccagttacagaaacttggtgagcgctggacagcagtatgccgttggactgaagaacgctggaataggttacaagaaatcaatatattgtggcaggaattattggaagaacagtgcttgttgaaagcttggttaaccgaaaaagaagaggctttaaataaagtccagacaagcaacttcaaagaccaaaaggaactaagtgtcagtgttcgacgtctggctattttgaaggaagacatggaaatgaagcgtcaaacattggatcagctgagtgagattggccaggatgtgggacaattacttgataattccaaggcatctaagaagatcaacagtgactcagaggaactgactcaaagatgggattctttggttcagagactagaagattcctccaaccaggtgactcaggctgtagcaaagctggggatgtctcagattcctcagaaggaccttttggagactgttcgtgtaagagaacaagcaattacaaaaaaatctaagcaggaactgcctcctcctcctcccccaaagaagagacagatccatgtggatattgaagctaagaaaaagtttgatgctataagtgcagagctgttgaactggattttgaaatggaaaactgccattcagaccacagagataaaagagtatatgaagatgcaagacacttccgaaatgaaaaagaagttgaaggcattagaaaaagaacagagagaaagaatccccagagcagatgaattaaaccaaactggacaaatccttgtggagcaaatgggaaaagaaggccttcctactgaagaaataaaaaatgttctggagaaggtttcatcagaatggaagaatgtatctcaacatttggaagatctagaaagaaagattcagctacaggaagatataaatgcttatttcaagcagcttgatgagcttgaaaaggtcatcaagacaaaggaggagtgggtaaaacacacttccatttctgaatcttcccggcagtccttgccaagcttgaaggattcctgtcagcgggaattgacaaatcttcttggccttcaccccaaaattgaaatggctcgtgcaagctgctcggccctgatgtctcagccttctgccccagattttgtccagcggggcttcgatagctttctgggccgctaccaagctgtacaagaggctgtagaggatcgtcaacaacatctagagaatgaactgaagggccaacctggacatgcatatctggaaacattgaaaacactgaaagatgtgctaaatgattcagaaaataaggcccaggtgtctctgaatgtccttaatgatcttgccaaggtggagaaggccctgcaagaaaaaaagacccttgatgaaatccttgagaatcagaaacctgcattacataaacttgcagaagaaacaaaggctctggagaaaaatgttcatcctgatgtagaaaaattatataagcaagaatttgatgatgtgcaaggaaagtggaacaagctaaaggtcttggtttccaaagatctacatttgcttgaggaaattgctctcacactcagagcttttgaggccgattcaacagtcattgagaagtggatggatggcgtgaaagacttcttaatgaaacagcaggctgcccaaggagacgacgcaggtctacagaggcagttagaccagtgctctgcatttgttaatgaaatagaaacaattgaatcatctctgaaaaacatgaaggaaatagagactaatcttcgaagtggtccagttgctggaataaaaacttgggtgcagacaagactaggtgactaccaaactcaactggagaaacttagcaaggagatcgctactcaaaaaagtaggttgtctgaaagtcaagaaaaagctgcgaacctgaagaaagacttggcagagatgcaggaatggatgacccaggccgaggaagaatatttggagcgggattttgagtacaagtcaccagaagagcttgagagtgctgtggaagagatgaagagggcaaaagaggatgtgttgcagaaggaggtgagagtgaagattctcaaggacaacatcaagttattagctgccaaggtgccctctggtggccaggagttgacgtctgagctgaatgttgtgctggagaattaccaacttctttgtaatagaattcgaggaaagtgccacacgctagaggaggtctggtcttgttggattgaactgcttcactatttggatcttgaaactacctggttaaacactttggaagagcggatgaagagcacagaggtcctgcctgagaagacggatgctgtcaacgaagccctggagtctctggaatctgttctgcgccacccggcagataatcgcacccagattcgagagcttggccagactctgattgatggggggatcctggatgatataatcagtgagaaactggaggctttcaacagccgatatgaagatctaagtcacctggcagagagcaagcagatttctttggaaaagcaactccaggtgctgcgggaaactgaccagatgcttcaagtcttgcaagagagcttgggggagctggacaaacagctcaccacatacctgactgacaggatagatgctttccaagttccacaggaagctcagaaaatccaagcagagatctcagcccatgagctaaccctagaggagttgagaagaaatatgcgttctcagcccctgacctccccagagagtaggactgccagaggaggaagtcagatggatgtgctacagaggaaactccgagaggtgtccacaaagttccagcttttccagaagccagctaacttcgagcagcgcatgctggactgcaagcgtgtgctggatggcgtgaaagcagaacttcacgttctggatgtgaaggacgtagaccctgacgtcatacagacgcacctggacaagtgtatgaaactgtataaaactttgagtgaagtcaaacttgaagtggaaactgtgattaaaacaggaagacatattgtccagaaacagcaaacggacaacccaaaagggatggatgagcagctgacttccctgaaggttctttacaatgacctgggcgcacaggtgacagaaggaaaacaggatctggaaagagcatcacagttggcccggaaaatgaagaaagaggctgcttctctctctgaatggctttctgctactgaaactgaattggtacagaagtccacttcagaaggtctgcttggtgacttggatacagaaatttcctgggctaaaaatgttctgaaggatctggaaaagagaaaagctgatttaaataccatcacagagagtagtgctgccctgcaaaacttgattgagggcagtgagcctattttagaagagaggctctgcgtccttaacgctgggtggagccgagttcgtacctggactgaagattggtgcaataccttgatgaaccatcagaaccagctagaaatatttgatgggaacgtggctcacataagtacctggctttatcaagctgaagctctattggatgaaattgaaaagaaaccaacaagtaaacaggaagaaattgtgaagcgtttagtatctgagctggatgatgccaacctccaggttgaaaatgtccgcgatcaagcccttattttgatgaatgcccgtggaagctcaagcagggagcttgtagaaccaaagttagctgagctgaataggaactttgaaaaggtgtctcaacatatcaaaagtgccaaattgctaattgctcaggaaccattataccaatgtttggtcaccactgaaacatttgaaactggtgtgcctttctctgacttggaaaaattagaaaatgacatagaaaatatgttaaaatttgtggaaaaacacttggaatccagtgatgaagatgaaaagatggatgaggagagtgcccagattgaggaagttctacaaagaggagaagaaatgttacatcaacctatggaagataataaaaaagaaaagatccgtttgcaattattacttttgcatactagatacaacaaaattaaggcaatccctattcaacagaggaaaatgggtcaacttgcttctggaattagatcatcacttcttcctacagattatctggttgaaattaacaaaattttactttgcatggatgatgttgaattatcgcttaatgttccagagctcaacactgctatttacgaagacttctcttttcaggaagactctctgaagaatatcaaagaccaactggacaaacttggagagcagattgcagtcattcatgaaaaacagccagatgtcatccttgaagcctctggacctgaagccattcagatcagagatacacttactcagctgaatgcaaaatgggacagaattaatagaatgtacagtgatcggaaaggttgttttgacagggcaatggaagaatggagacagttccattgtgaccttaatgacctcacacagtggataacagaggctgaagaattactggttgatacctgtgctccaggtggcagcctggacttagagaaagccaggatacatcagcaggaacttgaggtgggcatcagcagccaccagcccagttttgcagcactaaaccgaactggggatgggattgtgcagaaactctcccaggcagatggaagcttcttgaaagaaaaactggcaggtttaaaccaacgctgggatgcaattgttgcagaagtgaaggataggcagccaaggctaaaaggagaaagtaagcaggtgatgaagtacaggcatcagctagatgagattatctgttggttaacaaaggctgagcatgctatgcaaaagagatcaaccaccgaattgggagaaaacctgcaagaattaagagacttaactcaagaaatggaagtacatgctgaaaaactcaaatggctgaatagaactgaattggagatgctttcagataaaagtctgagtttacctgaaagggataaaatttcagaaagcttaaggactgtaaatatgacatggaataagatttgcagagaggtgcctaccaccctgaaggaatgcatccaggagcccagttctgtttcacagacaaggattgctgctcatcctaatgtccaaaaggtggtgctagtatcatctgcgtcagatattcctgttcagtctcatcgtacttcggaaatttcaattcctgctgatcttgataaaactataacagaactagccgactggctggtattaatcgaccagatgctgaagtccaacattgtcactgttggggatgtagaagagatcaataagaccgtttcccgaatgaaaattacaaaggctgacttagaacagcgccatcctcagctggattatgtttttacatgggcacagaaattgaaaaataaagcttccagttcagatatgagaacagcaattacagaaaaattggaaagggtcaagaaccagtgggatggcacccagcatggcgttgagctaagacagcagcagcttgaggacatgattattgacagtcttcagtgggatgaccatagggaggagactgaagaactgatgagaaaatatgaggctcgactctatattcttcagcaagcccgacgggatccactcaccaaacaaatttctgtgcccatttcatttgaaatgggccccgattttataacaggcgagtaaagtatttcttcggaaaacatttcatcagaccatatgttaaaaagactttccttttgttcaactggatta

SEQ ID NO: 322288 - DNA, 7287 bp, Homo sapiens
cagatgtaggtgatgagcggcctggcagccaccacgtttcattggaaaaagtgcagattggatttgccagggcatgtagctctccaggcttgcaagcgattaccagatgaacacaatgacgtacagaagaaaacctttaccaaatggataaatgctcgattttcaaagagtgggaaaccacccatcaatgatatgttcacagacctcaaagatggaaggaagctattggatcttctagaaggcctcacaggaacatcactgccaaaggaacgtggttccacaagggtacatgccttaaataacgtcaacagagtgctgcaggttttacatcagaacaatgtggaattagtgaatatagggggaactgacattgtggatggaaatcacaaactgactttggggttactttggagcatcattttgcactggcaggtgaaagatgtcatgaaggatgtcatgtcggacctgcagcagacgaacagtgagaagatcctgctcagctgggtgcgtcagaccaccaggccctacagccaagtcaacgtcctcaacttcaccaccagctggacagatggactcgcctttaatgctgtcctccaccgacataaacctgatctcttcagctgggataaagttgtcaaaatgtcaccaattgagagacttgaacatgccttcagcaaggctcaaacttatttgggaattgaaaagctgttagatcctgaagatgttgccgttcagcttcctgacaagaaatccataattatgtatttaacatctttgtttgaggtgctacctcagcaagtcaccatagacgccatccgtgaggtagagacactcccaaggaaatataaaaaagaatgtgaagaagaggcaattaatatacagagtacagcgcctgaggaggagcatgagagtccccgagctgaaactcccagcactgtcactgaggtcgacatggatctggacagctatcagattgcgttggaggaagtgctgacctggttgctttctgctgaggacactttccaggagcaggatgatatttctgatgatgttgaagaagtcaaagaccagtttgcaacccatgaagcttttatgatggaactgactgcacaccagagcagtgtgggcagcgtcctgcaggcaggcaaccaactgataacacaaggaactctgtcagacgaagaagaatttgagattcaggaacagatgaccctgctgaatgctagatgggaggctcttagggtggagagtatggacagacagtcccggctgcacgatgtgctgatggaactgcagaagaagcaactgcagcagctctccgcctggttaacactcacagaggagcgcattcagaagatggaaacttgccccctggatgatgatgtaaaatctctacaaaagctgctagaagaacataaaagtttgcaaagtgatcttgaggctgaacaggtgaaagtaaattcactaactcacatggtggtcattgttgatgaaaacagtggtgagagtgctacagctatcctagaagaccagttacagaaacttggtgagcgctggacagcagtatgccgttggactgaagaacgctggaataggttacaagaaatcaatatattgtggcaggaattattggaagaacagtgcttgttgaaagcttggttaaccgaaaaagaagaggctttaaataaagtccagacaagcaacttcaaagaccaaaaggaactaagtgtcagtgttcgacgtctggctattttgaaggaagacatggaaatgaagcgtcaaacattggatcagctgagtgagattggccaggatgtgggacaattacttgataattccaaggcatctaagaagatcaacagtgactcagaggaactgactcaaagatgggattctttggttcagagactagaagattcctccaaccaggtgactcaggctgtagcaaagctggggatgtctcagattcctcagaaggaccttttggagactgttcgtgtaagagaacaagcaattacaaaaaaatctaagcaggaactgcctcctcctcctcccccaaagaagagacagatccatgtggatattgaagctaagaaaaagtttgatgctataagtgcagagctgttgaactggattttgaaatggaaaactgccattcagaccacagagataaaagagtatatgaagatgcaagacacttccgaaatgaaaaagaagttgaaggcattagaaaaagaacagagagaaagaatccccagagcagatgaattaaaccaaactggacaaatccttgtggagcaaatgggaaaagaaggccttcctactgaagaaataaaaaatgttctggagaaggtttcatcagaatggaagaatgtatctcaacatttggaagatctagaaagaaagattcagctacaggaagatataaatgcttatttcaagcagcttgatgagcttgaaaaggtcatcaagacaaaggaggagtgggtaaaacacacttccatttctgaatcttcccggcagtccttgccaagcttgaaggattcctgtcagcgggaattgacaaatcttcttggccttcaccccaaaattgaaatggctcgtgcaagctgctcggccctgatgtctcagccttctgccccagattttgtccagcggggcttcgatagctttctgggccgctaccaagctgtacaagaggctgtagaggatcgtcaacaacatctagagaatgaactgaagggccaacctggacatgcatatctggaaacattgaaaacactgaaagatgtgctaaatgattcagaaaataaggcccaggtgtctctgaatgtccttaatgatcttgccaaggtggagaaggccctgcaagaaaaaaagacccttgatgaaatccttgagaatcagaaacctgcattacataaacttgcagaagaaacaaaggctctggagaaaaatgttcatcctgatgtagaaaaattatataagcaagaatttgatgatgtgcaaggaaagtggaacaagctaaaggtcttggtttccaaagatctacatttgcttgaggaaattgctctcacactcagagcttttgaggccgattcaacagtcattgagaagtggatggatggcgtgaaagacttcttaatgaaacagcaggctgcccaaggagacgacgcaggtctacagaggcagttagaccagtgctctgcatttgttaatgaaatagaaacaattgaatcatctctgaaaaacatgaaggaaatagagactaatcttcgaagtggtccagttgctggaataaaaacttgggtgcagacaagactaggtgactaccaaactcaactggagaaacttagcaaggagatcgctactcaaaaaagtaggttgtctgaaagtcaagaaaaagctgcgaacctgaagaaagacttggcagagatgcaggaatggatgacccaggccgaggaagaatatttggagcgggattttgagtacaagtcaccagaagagcttgagagtgctgtggaagagatgaagagggcaaaagaggatgtgttgcagaaggaggtgagagtgaagattctcaaggacaacatcaagttattagctgccaaggtgccctctggtggccaggagttgacgtctgagctgaatgttgtgctggagaattaccaacttctttgtaatagaattcgaggaaagtgccacacgctagaggaggtctggtcttgttggattgaactgcttcactatttggatcttgaaactacctggttaaacactttggaagagcggatgaagagcacagaggtcctgcctgagaagacggatgctgtcaacgaagccctggagtctctggaatctgttctgcgccacccggcagataatcgcacccagattcgagagcttggccagactctgattgatggggggatcctggatgatataatcagtgagaaactggaggctttcaacagccgatatgaagatctaagtcacctggcagagagcaagcagatttctttggaaaagcaactccaggtgctgcgggaaactgaccagatgcttcaagtcttgcaagagagcttgggggagctggacaaacagctcaccacatacctgactgacaggatagatgctttccaagttccacaggaagctcagaaaatccaagcagagatctcagcccatgagctaaccctagaggagttgagaagaaatatgcgttctcagcccctgacctccccagagagtaggactgccagaggaggaagtcagatggatgtgctacagaggaaactccgagaggtgtccacaaagttccagcttttccagaagccagctaacttcgagcagcgcatgctggactgcaagcgtgtgctggatggcgtgaaagcagaacttcacgttctggatgtgaaggacgtagaccctgacgtcatacagacgcacctggacaagtgtatgaaactgtataaaactttgagtgaagtcaaacttgaagtggaaactgtgattaaaacaggaagacatattgtccagaaacagcaaacggacaacccaaaagggatggatgagcagctgacttccctgaaggttctttacaatgacctgggcgcacaggtgacagaaggaaaacaggatctggaaagagcatcacagttggcccggaaaatgaagaaagaggctgcttctctctctgaatggctttctgctactgaaactgaattggtacagaagtccacttcagaaggtctgcttggtgacttggatacagaaatttcctgggctaaaaatgttctgaaggatctggaaaagagaaaagctgatttaaataccatcacagagagtagtgctgccctgcaaaacttgattgagggcagtgagcctattttagaagagaggctctgcgtccttaacgctgggtggagccgagttcgtacctggactgaagattggtgcaataccttgatgaaccatcagaaccagctagaaatatttgatgggaacgtggctcacataagtacctggctttatcaagctgaagctctattggatgaaattgaaaagaaaccaacaagtaaacaggaagaaattgtgaagcgtttagtatctgagctggatgatgccaacctccaggttgaaaatgtccgcgatcaagcccttattttgatgaatgcccgtggaagctcaagcagggagcttgtagaaccaaagttagctgagctgaataggaactttgaaaaggtgtctcaacatatcaaaagtgccaaattgctaattgctcaggaaccattataccaatgtttggtcaccactgaaacatttgaaactggtgtgcctttctctgacttggaaaaattagaaaatgacatagaaaatatgttaaaatttgtggaaaaacacttggaatccagtgatgaagatgaaaagatggatgaggagagtgcccagattgaggaagttctacaaagaggagaagaaatgttacatcaacctatggaagataataaaaaagaaaagatccgtttgcaattattacttttgcatactagatacaacaaaattaaggcaatccctattcaacagaggaaaatgggtcaacttgcttctggaattagatcatcacttcttcctacagattatctggttgaaattaacaaaattttactttgcatggatgatgttgaattatcgcttaatgttccagagctcaacactgctatttacgaagacttctcttttcaggaagactctctgaagaatatcaaagaccaactggacaaacttggagagcagattgcagtcattcatgaaaaacagccagatgtcatccttgaagcctctggacctgaagccattcagatcagagatacacttactcagctgaatgcaaaatgggacagaattaatagaatgtacagtgatcggaaaggttgttttgacagggcaatggaagaatggagacagttccattgtgaccttaatgacctcacacagtggataacagaggctgaagaattactggttgatacctgtgctccaggtggcagcctggacttagagaaagccaggatacatcagcaggaacttgaggtgggcatcagcagccaccagcccagttttgcagcactaaaccgaactggggatgggattgtgcagaaactctcccaggcagatggaagcttcttgaaagaaaaactggcaggtttaaaccaacgctgggatgcaattgttgcagaagtgaaggataggcagccaaggctaaaaggagaaagtaagcaggtgatgaagtacaggcatcagctagatgagattatctgttggttaacaaaggctgagcatgctatgcaaaagagatcaaccaccgaattgggagaaaacctgcaagaattaagagacttaactcaagaaatggaagtacatgctgaaaaactcaaatggctgaatagaactgaattggagatgctttcagataaaagtctgagtttacctgaaagggataaaatttcagaaagcttaaggactgtaaatatgacatggaataagatttgcagagaggtgcctaccaccctgaaggaatgcatccaggagcccagttctgtttcacagacaaggattgctgctcatcctaatgtccaaaaggtggtgctagtatcatctgcgtcagatattcctgttcagtctcatcgtacttcggaaatttcaattcctgctgatcttgataaaactataacagaactagccgactggctggtattaatcgaccagatgctgaagtccaacattgtcactgttggggatgtagaagagatcaataagaccgtttcccgaatgaaaattacaaaggctgacttagaacagcgccatcctcagctggattatgtttttacatgggcacagaaattgaaaaataaagcttccagttcagatatgagaacagcaattacagaaaaattggaaagggtcaagaaccagtgggatggcacccagcatggcgttgagctaagacagcagcagcttgaggacatgattattgacagtcttcagtgggatgaccatagggaggagactgaagaactgatgagaaaatatgaggctcgactctatattcttcagcaagcccgacgggatccactcaccaaacaaatttctgtgcccatttcaatgaaatgggcacagaaattatttgggctatgtggagcaagctgtcttgcataaaaagctatattgggctctagagaaagtgagaatggaaagaatttgagagatacgtgagaccaaaaaaaa

SEQ ID NO: 322289 - DNA, 7277 bp, Homo sapiens
cagatgtaggtgatgagcggcctggcagccaccacgtttcattggaaaaagtgcagattggatttgccagggcatgtagctctccaggcttgcaagcgattaccagatgaacacaatgacgtacagaagaaaacctttaccaaatggataaatgctcgattttcaaagagtgggaaaccacccatcaatgatatgttcacagacctcaaagatggaaggaagctattggatcttctagaaggcctcacaggaacatcactgccaaaggaacgtggttccacaagggtacatgccttaaataacgtcaacagagtgctgcaggttttacatcagaacaatgtggaattagtgaatatagggggaactgacattgtggatggaaatcacaaactgactttggggttactttggagcatcattttgcactggcaggtgaaagatgtcatgaaggatgtcatgtcggacctgcagcagacgaacagtgagaagatcctgctcagctgggtgcgtcagaccaccaggccctacagccaagtcaacgtcctcaacttcaccaccagctggacagatggactcgcctttaatgctgtcctccaccgacataaacctgatctcttcagctgggataaagttgtcaaaatgtcaccaattgagagacttgaacatgccttcagcaaggctcaaacttatttgggaattgaaaagctgttagatcctgaagatgttgccgttcagcttcctgacaagaaatccataattatgtatttaacatctttgtttgaggtgctacctcagcaagtcaccatagacgccatccgtgaggtagagacactcccaaggaaatataaaaaagaatgtgaagaagaggcaattaatatacagagtacagcgcctgaggaggagcatgagagtccccgagctgaaactcccagcactgtcactgaggtcgacatggatctggacagctatcagattgcgttggaggaagtgctgacctggttgctttctgctgaggacactttccaggagcaggatgatatttctgatgatgttgaagaagtcaaagaccagtttgcaacccatgaagcttttatgatggaactgactgcacaccagagcagtgtgggcagcgtcctgcaggcaggcaaccaactgataacacaaggaactctgtcagacgaagaagaatttgagattcaggaacagatgaccctgctgaatgctagatgggaggctcttagggtggagagtatggacagacagtcccggctgcacgatgtgctgatggaactgcagaagaagcaactgcagcagctctccgcctggttaacactcacagaggagcgcattcagaagatggaaacttgccccctggatgatgatgtaaaatctctacaaaagctgctagaagaacataaaagtttgcaaagtgatcttgaggctgaacaggtgaaagtaaattcactaactcacatggtggtcattgttgatgaaaacagtggtgagagtgctacagctatcctagaagaccagttacagaaacttggtgagcgctggacagcagtatgccgttggactgaagaacgctggaataggttacaagaaatcaatatattgtggcaggaattattggaagaacagtgcttgttgaaagcttggttaaccgaaaaagaagaggctttaaataaagtccagacaagcaacttcaaagaccaaaaggaactaagtgtcagtgttcgacgtctggctattttgaaggaagacatggaaatgaagcgtcaaacattggatcagctgagtgagattggccaggatgtgggacaattacttgataattccaaggcatctaagaagatcaacagtgactcagaggaactgactcaaagatgggattctttggttcagagactagaagattcctccaaccaggtgactcaggctgtagcaaagctggggatgtctcagattcctcagaaggaccttttggagactgttcgtgtaagagaacaagcaattacaaaaaaatctaagcaggaactgcctcctcctcctcccccaaagaagagacagatccatgtggatattgaagctaagaaaaagtttgatgctataagtgcagagctgttgaactggattttgaaatggaaaactgccattcagaccacagagataaaagagtatatgaagatgcaagacacttccgaaatgaaaaagaagttgaaggcattagaaaaagaacagagagaaagaatccccagagcagatgaattaaaccaaactggacaaatccttgtggagcaaatgggaaaagaaggccttcctactgaagaaataaaaaatgttctggagaaggtttcatcagaatggaagaatgtatctcaacatttggaagatctagaaagaaagattcagctacaggaagatataaatgcttatttcaagcagcttgatgagcttgaaaaggtcatcaagacaaaggaggagtgggtaaaacacacttccatttctgaatcttcccggcagtccttgccaagcttgaaggattcctgtcagcgggaattgacaaatcttcttggccttcaccccaaaattgaaatggctcgtgcaagctgctcggccctgatgtctcagccttctgccccagattttgtccagcggggcttcgatagctttctgggccgctaccaagctgtacaagaggctgtagaggatcgtcaacaacatctagagaatgaactgaagggccaacctggacatgcatatctggaaacattgaaaacactgaaagatgtgctaaatgattcagaaaataaggcccaggtgtctctgaatgtccttaatgatcttgccaaggtggagaaggccctgcaagaaaaaaagacccttgatgaaatccttgagaatcagaaacctgcattacataaacttgcagaagaaacaaaggctctggagaaaaatgttcatcctgatgtagaaaaattatataagcaagaatttgatgatgtgcaaggaaagtggaacaagctaaaggtcttggtttccaaagatctacatttgcttgaggaaattgctctcacactcagagcttttgaggccgattcaacagtcattgagaagtggatggatggcgtgaaagacttcttaatgaaacagcaggctgcccaaggagacgacgcaggtctacagaggcagttagaccagtgctctgcatttgttaatgaaatagaaacaattgaatcatctctgaaaaacatgaaggaaatagagactaatcttcgaagtggtccagttgctggaataaaaacttgggtgcagacaagactaggtgactaccaaactcaactggagaaacttagcaaggagatcgctactcaaaaaagtaggttgtctgaaagtcaagaaaaagctgcgaacctgaagaaagacttggcagagatgcaggaatggatgacccaggccgaggaagaatatttggagcgggattttgagtacaagtcaccagaagagcttgagagtgctgtggaagagatgaagagggcaaaagaggatgtgttgcagaaggaggtgagagtgaagattctcaaggacaacatcaagttattagctgccaaggtgccctctggtggccaggagttgacgtctgagctgaatgttgtgctggagaattaccaacttctttgtaatagaattcgaggaaagtgccacacgctagaggaggtctggtcttgttggattgaactgcttcactatttggatcttgaaactacctggttaaacactttggaagagcggatgaagagcacagaggtcctgcctgagaagacggatgctgtcaacgaagccctggagtctctggaatctgttctgcgccacccggcagataatcgcacccagattcgagagcttggccagactctgattgatggggggatcctggatgatataatcagtgagaaactggaggctttcaacagccgatatgaagatctaagtcacctggcagagagcaagcagatttctttggaaaagcaactccaggtgctgcgggaaactgaccagatgcttcaagtcttgcaagagagcttgggggagctggacaaacagctcaccacatacctgactgacaggatagatgctttccaagttccacaggaagctcagaaaatccaagcagagatctcagcccatgagctaaccctagaggagttgagaagaaatatgcgttctcagcccctgacctccccagagagtaggactgccagaggaggaagtcagatggatgtgctacagaggaaactccgagaggtgtccacaaagttccagcttttccagaagccagctaacttcgagcagcgcatgctggactgcaagcgtgtgctggatggcgtgaaagcagaacttcacgttctggatgtgaaggacgtagaccctgacgtcatacagacgcacctggacaagtgtatgaaactgtataaaactttgagtgaagtcaaacttgaagtggaaactgtgattaaaacaggaagacatattgtccagaaacagcaaacggacaacccaaaagggatggatgagcagctgacttccctgaaggttctttacaatgacctgggcgcacaggtgacagaaggaaaacaggatctggaaagagcatcacagttggcccggaaaatgaagaaagaggctgcttctctctctgaatggctttctgctactgaaactgaattggtacagaagtccacttcagaaggtctgcttggtgacttggatacagaaatttcctgggctaaaaatgttctgaaggatctggaaaagagaaaagctgatttaaataccatcacagagagtagtgctgccctgcaaaacttgattgagggcagtgagcctattttagaagagaggctctgcgtccttaacgctgggtggagccgagttcgtacctggactgaagattggtgcaataccttgatgaaccatcagaaccagctagaaatatttgatgggaacgtggctcacataagtacctggctttatcaagctgaagctctattggatgaaattgaaaagaaaccaacaagtaaacaggaagaaattgtgaagcgtttagtatctgagctggatgatgccaacctccaggttgaaaatgtccgcgatcaagcccttattttgatgaatgcccgtggaagctcaagcagggagcttgtagaaccaaagttagctgagctgaataggaactttgaaaaggtgtctcaacatatcaaaagtgccaaattgctaattgctcaggaaccattataccaatgtttggtcaccactgaaacatttgaaactggtgtgcctttctctgacttggaaaaattagaaaatgacatagaaaatatgttaaaatttgtggaaaaacacttggaatccagtgatgaagatgaaaagatggatgaggagagtgcccagattgaggaagttctacaaagaggagaagaaatgttacatcaacctatggaagataataaaaaagaaaagatccgtttgcaattattacttttgcatactagatacaacaaaattaaggcaatccctattcaacagaggaaaatgggtcaacttgcttctggaattagatcatcacttcttcctacagattatctggttgaaattaacaaaattttactttgcatggatgatgttgaattatcgcttaatgttccagagctcaacactgctatttacgaagacttctcttttcaggaagactctctgaagaatatcaaagaccaactggacaaacttggagagcagattgcagtcattcatgaaaaacagccagatgtcatccttgaagcctctggacctgaagccattcagatcagagatacacttactcagctgaatgcaaaatgggacagaattaatagaatgtacagtgatcggaaaggttgttttgacagggcaatggaagaatggagacagttccattgtgaccttaatgacctcacacagtggataacagaggctgaagaattactggttgatacctgtgctccaggtggcagcctggacttagagaaagccaggatacatcagcaggaacttgaggtgggcatcagcagccaccagcccagttttgcagcactaaaccgaactggggatgggattgtgcagaaactctcccaggcagatggaagcttcttgaaagaaaaactggcaggtttaaaccaacgctgggatgcaattgttgcagaagtgaaggataggcagccaaggctaaaaggagaaagtaagcaggtgatgaagtacaggcatcagctagatgagattatctgttggttaacaaaggctgagcatgctatgcaaaagagatcaaccaccgaattgggagaaaacctgcaagaattaagagacttaactcaagaaatggaagtacatgctgaaaaactcaaatggctgaatagaactgaattggagatgctttcagataaaagtctgagtttacctgaaagggataaaatttcagaaagcttaaggactgtaaatatgacatggaataagatttgcagagaggtgcctaccaccctgaaggaatgcatccaggagcccagttctgtttcacagacaaggattgctgctcatcctaatgtccaaaaggtggtgctagtatcatctgcgtcagatattcctgttcagtctcatcgtacttcggaaatttcaattcctgctgatcttgataaaactataacagaactagccgactggctggtattaatcgaccagatgctgaagtccaacattgtcactgttggggatgtagaagagatcaataagaccgtttcccgaatgaaaattacaaaggctgacttagaacagcgccatcctcagctggattatgtttttacatgggcacagaaattgaaaaataaagcttccagttcagatatgagaacagcaattacagaaaaattggaaagggtcaagaaccagtgggatggcacccagcatggcgttgagctaagacagcagcagcttgaggacatgattattgacagtcttcagtgggatgaccatagggaggagactgaagaactgatgagaaaatatgaggctcgactctatattcttcagcaagcccgacgggatccactcaccaaacaaatttctgtgcccatttcaatgaaatgggcacagaaattcagtacctgcttagacagcatcggtttggctgagctgagggatcataggagtgctttttatggtgttgaatttctttgaaaatttctttagaa

SEQ ID NO: 322290 - DNA, 6753 bp, Homo sapiens
cagatgtaggtgatgagcggcctggcagccaccacgtttcattggaaaaagtgcagattggatttgccagggcatgtagctctccaggcttgcaagcgattaccagatgaacacaatgacgtacagaagaaaacctttaccaaatggataaatgctcgattttcaaagagtgggaaaccacccatcaatgatatgttcacagacctcaaagatggaaggaagctattggatcttctagaaggcctcacaggaacatcactgccaaaggaacgtggttccacaagggtacatgccttaaataacgtcaacagagtgctgcaggttttacatcagaacaatgtggaattagtgaatatagggggaactgacattgtggatggaaatcacaaactgactttggggttactttggagcatcattttgcactggcaggtgaaagatgtcatgaaggatgtcatgtcggacctgcagcagacgaacagtgagaagatcctgctcagctgggtgcgtcagaccaccaggccctacagccaagtcaacgtcctcaacttcaccaccagctggacagatggactcgcctttaatgctgtcctccaccgacataaacctgatctcttcagctgggataaagttgtcaaaatgtcaccaattgagagacttgaacatgccttcagcaaggctcaaacttatttgggaattgaaaagctgttagatcctgaagatgttgccgttcagcttcctgacaagaaatccataattatgtatttaacatctttgtttgaggtgctacctcagcaagtcaccatagacgccatccgtgaggtagagacactcccaaggaaatataaaaaagaatgtgaagaagaggcaattaatatacagagtacagcgcctgaggaggagcatgagagtccccgagctgaaactcccagcactgtcactgaggtcgacatggatctggacagctatcagattgcgttggaggaagtgctgacctggttgctttctgctgaggacactttccaggagcaggatgatatttctgatgatgttgaagaagtcaaagaccagtttgcaacccatgaagcttttatgatggaactgactgcacaccagagcagtgtgggcagcgtcctgcaggcaggcaaccaactgataacacaaggaactctgtcagacgaagaagaatttgagattcaggaacagatgaccctgctgaatgctagatgggaggctcttagggtggagagtatggacagacagtcccggctgcacgatgtgctgatggaactgcagaagaagcaactgcagcagctctccgcctggttaacactcacagaggagcgcattcagaagatggaaacttgccccctggatgatgatgtaaaatctctacaaaagctgctagaagaacataaaagtttgcaaagtgatcttgaggctgaacaggtgaaagtaaattcactaactcacatggtggtcattgttgatgaaaacagtggtgagagtgctacagctatcctagaagaccagttacagaaacttggtgagcgctggacagcagtatgccgttggactgaagaacgctggaataggttacaagaaatcaatatattgtggcaggaattattggaagaacagtgcttgttgaaagcttggttaaccgaaaaagaagaggctttaaataaagtccagacaagcaacttcaaagaccaaaaggaactaagtgtcagtgttcgacgtctggctattttgaaggaagacatggaaatgaagcgtcaaacattggatcagctgagtgagattggccaggatgtgggacaattacttgataattccaaggcatctaagaagatcaacagtgactcagaggaactgactcaaagatgggattctttggttcagagactagaagattcctccaaccaggtgactcaggctgtagcaaagctggggatgtctcagattcctcagaaggaccttttggagactgttcgtgtaagagaacaagcaattacaaaaaaatctaagcaggaactgcctcctcctcctcccccaaagaagagacagatccatgtggatattgaagctaagaaaaagtttgatgctataagtgcagagctgttgaactggattttgaaatggaaaactgccattcagaccacagagataaaagagtatatgaagatgcaagacacttccgaaatgaaaaagaagttgaaggcattagaaaaagaacagagagaaagaatccccagagcagatgaattaaaccaaactggacaaatccttgtggagcaaatgggaaaagaaggccttcctactgaagaaataaaaaatgttctggagaaggtttcatcagaatggaagaatgtatctcaacatttggaagatctagaaagaaagattcagctacaggaagatataaatgcttatttcaagcagcttgatgagcttgaaaaggtcatcaagacaaaggaggagtgggtaaaacacacttccatttctgaatcttcccggcagtccttgccaagcttgaaggattcctgtcagcgggaattgacaaatcttcttggccttcaccccaaaattgaaatggctcgtgcaagctgctcggccctgatgtctcagccttctgccccagattttgtccagcggggcttcgatagctttctgggccgctaccaagctgtacaagaggctgtagaggatcgtcaacaacatctagagaatgaactgaagggccaacctggacatgcatatctggaaacattgaaaacactgaaagatgtgctaaatgattcagaaaataaggcccaggtgtctctgaatgtccttaatgatcttgccaaggtggagaaggccctgcaagaaaaaaagacccttgatgaaatccttgagaatcagaaacctgcattacataaacttgcagaagaaacaaaggctctggagaaaaatgttcatcctgatgtagaaaaattatataagcaagaatttgatgatgtgcaaggaaagtggaacaagctaaaggtcttggtttccaaagatctacatttgcttgaggaaattgctctcacactcagagcttttgaggccgattcaacagtcattgagaagtggatggatggcgtgaaagacttcttaatgaaacagcaggctgcccaaggagacgacgcaggtctacagaggcagttagaccagtgctctgcatttgttaatgaaatagaaacaattgaatcatctctgaaaaacatgaaggaaatagagactaatcttcgaagtggtccagttgctggaataaaaacttgggtgcagacaagactaggtgactaccaaactcaactggagaaacttagcaaggagatcgctactcaaaaaagtaggttgtctgaaagtcaagaaaaagctgcgaacctgaagaaagacttggcagagatgcaggaatggatgacccaggccgaggaagaatatttggagcgggattttgagtacaagtcaccagaagagcttgagagtgctgtggaagagatgaagagggcaaaagaggatgtgttgcagaaggaggtgagagtgaagattctcaaggacaacatcaagttattagctgccaaggtgccctctggtggccaggagttgacgtctgagctgaatgttgtgctggagaattaccaacttctttgtaatagaattcgaggaaagtgccacacgctagaggaggtctggtcttgttggattgaactgcttcactatttggatcttgaaactacctggttaaacactttggaagagcggatgaagagcacagaggtcctgcctgagaagacggatgctgtcaacgaagccctggagtctctggaatctgttctgcgccacccggcagataatcgcacccagattcgagagcttggccagactctgattgatggggggatcctggatgatataatcagtgagaaactggaggctttcaacagccgatatgaagatctaagtcacctggcagagagcaagcagatttctttggaaaagcaactccaggtgctgcgggaaactgaccagatgcttcaagtcttgcaagagagcttgggggagctggacaaacagctcaccacatacctgactgacaggatagatgctttccaagttccacaggaagctcagaaaatccaagcagagatctcagcccatgagctaaccctagaggagttgagaagaaatatgcgttctcagcccctgacctccccagagagtaggactgccagaggaggaagtcagatggatgtgctacagaggaaactccgagaggtgtccacaaagttccagcttttccagaagccagctaacttcgagcagcgcatgctggactgcaagcgtgtgctggatggcgtgaaagcagaacttcacgttctggatgtgaaggacgtagaccctgacgtcatacagacgcacctggacaagtgtatgaaactgtataaaactttgagtgaagtcaaacttgaagtggaaactgtgattaaaacaggaagacatattgtccagaaacagcaaacggacaacccaaaagggatggatgagcagctgacttccctgaaggttctttacaatgacctgggcgcacaggtgacagaaggaaaacaggatctggaaagagcatcacagttggcccggaaaatgaagaaagaggctgcttctctctctgaatggctttctgctactgaaactgaattggtacagaagtccacttcagaaggtctgcttggtgacttggatacagaaatttcctgggctaaaaatgttctgaaggatctggaaaagagaaaagctgatttaaataccatcacagagagtagtgctgccctgcaaaacttgattgagggcagtgagcctattttagaagagaggctctgcgtccttaacgctgggtggagccgagttcgtacctggactgaagattggtgcaataccttgatgaaccatcagaaccagctagaaatatttgatgggaacgtggctcacataagtacctggctttatcaagctgaagctctattggatgaaattgaaaagaaaccaacaagtaaacaggaagaaattgtgaagcgtttagtatctgagctggatgatgccaacctccaggttgaaaatgtccgcgatcaagcccttattttgatgaatgcccgtggaagctcaagcagggagcttgtagaaccaaagttagctgagctgaataggaactttgaaaaggtgtctcaacatatcaaaagtgccaaattgctaattgctcaggaaccattataccaatgtttggtcaccactgaaacatttgaaactggtgtgcctttctctgacttggaaaaattagaaaatgacatagaaaatatgttaaaatttgtggaaaaacacttggaatccagtgatgaagatgaaaagatggatgaggagagtgcccagattgaggaagttctacaaagaggagaagaaatgttacatcaacctatggaagataataaaaaagaaaagatccgtttgcaattattacttttgcatactagatacaacaaaattaaggcaatccctattcaacagaggaaaatgggtcaacttgcttctggaattagatcatcacttcttcctacagattatctggttgaaattaacaaaattttactttgcatggatgatgttgaattatcgcttaatgttccagagctcaacactgctatttacgaagacttctcttttcaggaagactctctgaagaatatcaaagaccaactggacaaacttggagagcagattgcagtcattcatgaaaaacagccagatgtcatccttgaagcctctggacctgaagccattcagatcagagatacacttactcagctgaatgcaaaatgggacagaattaatagaatgtacagtgatcggaaaggttgttttgacagggcaatggaagaatggagacagttccattgtgaccttaatgacctcacacagtggataacagaggctgaagaattactggttgatacctgtgctccaggtggcagcctggacttagagaaagccaggatacatcagcaggaacttgaggtgggcatcagcagccaccagcccagttttgcagcactaaaccgaactggggatgggattgtgcagaaactctcccaggcagatggaagcttcttgaaagaaaaactggcaggtttaaaccaacgctgggatgcaattgttgcagaagtgaaggataggcagccaaggctaaaaggagaaagtaagcaggtgatgaagtacaggcatcagctagatgagattatctgttggttaacaaaggctgagcatgctatgcaaaagagatcaaccaccgaattgggagaaaacctgcaagaattaagagacttaactcaagaaatggaagtacatgctgaaaaactcaaatggctgaatagaactgaattggagatgctttcagataaaagtctgagtttacctgaaagggataaaatttcaagaagcaggaactggccagttcctgcttcttgaaattctataaagcggaactgaaaatgttgctagaggatgggtgtgtgggagtggaggaaggcagctgacatatggaaatggggaaaataccatcagaaccctaggaaacatcagccaagggcaacgcctcgaacccctttgaaaccctcccggattcactggtctccatttagcctttgtgtttcagaagcgaaaatggggtgcgcgctc

SEQ ID NO: 322291 - DNA, 613 bp, Homo sapiens
gatatgggccagaaatttgggtaccctcctctagaaagaaattccagtaatggatctgtttaagtgttaagggagcagaagagaagacggtgaatgtacttcaatattttgaacatttttagaaataggaattcttgagtctcttttctttcttcagtcttttccatttctttttcttttctttttcactgtaatttctgtgcccatttcattgaaatgggcacagaaattgaaaaataaagcttccagttcagatatgagaacagcaattacagaaaaattggaaagggtcaagaaccagtgggatggcacccagcatggcgttgagctaagacagcagcagcttgaggacatgattattgacagtcttcagtgggatgaccatagggaggagactgaagaactgatgagaaaatatgaggctcgactctatattcttcagcaagcccgacgggatccactcaccaaacaaatttctgtgcccatttcaatgaaatgggcacagaaattatttgggctatgtggagcaagctgtcttgcataaaaagctatattgggctctagagaaagtgagaatggaaagaatttgagagatacgtgagaccaaaaaaaa

SEQ ID NO: 322292 - DNA, 792 bp, Homo sapiens
tatcttaaataagatgcctttacttttgtggcaggataagctggcctaagctgaagtctccaaaaagaaaggaggacagaaaaagaaattggtgaaattttttttgtatgaaaacatacctgtggtgcaaaaataatagatttctcattcaaacactgaaataataagaccatattacttgtttttcagtctcatatttttcagtcccctggtgtgtggattctttctacacaaacaaacagctagtacgtgtcaattatgtaaaattatattaccaacactcaagcaaaaatgttttgggtatattcccctaaaattgtcctttgcaatgggaaatcttttcacattgatatttagaggctggttggagtatttcctcctgaatttgggttttagtggaaggctagacattaatttgagaagctttgttgttctctttatttgctgtcacagcgggagaggacctgctggccccaccgcacgacaccagcacggatctcacggaggtcatggagcagattcacagcacgtttccatcttgctgccgtgagtatgaaagattgcagcaccacagctgcacgtgttccttccctttctctttttctgcatgcggcccttcgccttcttccttaagataacaaaaaccttattacaaacaggactgaatattatttgaaaataaggcaaacattatataagaaaatgagaaagggaaggcacacgcgcagctgtggtgctgcatctttcatactcacggcagcagatggaaacgtgctgtgaatctgctccatg

SEQ ID NO: 322293 - DNA, 809 bp, Homo sapiens
  misc_feature (728)..(728): n is a, c, g, or t
  misc_feature (773)..(773): n is a, c, g, or t
  misc_feature (798)..(798): n is a, c, g, or t
cagatgtaggtgatgagcggcctggcagccaccacgtttcattggaaaaagtgcagattggatttgccagggcatgtagctctccaggcttgcaagcgattaccagatgaacacaatgacgtacagaagaaaacctttaccaaatggataaatgctcgattttcaaagagtgggaaaccacccatcaatgatatgttcacagacctcaaagatggaaggaagctattggatcttctagaaggcctcacaggaacatcactgccaaaggaacgtggttccacaagggtacatgccttaaataacgtcaacagagtgctgcaggttttacatcagaacaatgtggaattagtgaatatagggggaactgacattgtggatggaaatcacaaactgactttggggttactttggagcatcattttgcactggcaggtgaaagatgtcatgaaggatgtcatgtcggacctgcagcagacgaacagtgagaagatcctgctcagctgggtgcgtcagaccaccaggccctacagccaagtcaacgtcctcaacttcaccaccagctggacagatggactcgcctttaatgctgtcctccaccgacataaacctgatctcttcagctgggataaagttgtcaaaatgtcaccaattgagagacttgaacatgccttcagcaaggctcaaacttatttgggaattgaaaagctgttagatcctgacttggaaanatgtttgccggttcaaccttcccttgaacaaagaaaatcccattnaaatttattgttattttaaaccatncttttggtttt

SEQ ID NO: 322294 - DNA, 768 bp, Homo sapiens
aaatacatcgcaccaccaaactaacactcgcacacacccccgcggttactccgtgtcaaactcctagaggagcccttggccagctcggggtgcggcggtggcgaccggcaggcgaggaggcccgcgggcagcaggtattgatgtcaagctgaaccatcgtaggaagttgaaagccttagaaagaggacttggtaaagtttttggattatcttgaaactcttgcatatggcatggccaagtatggagaacatgaagccagtcctgacaatgggcagaacgaattcagtgatatcattaagtccagatctgccctctcctactacaggagagagagataatggccctttgctcctcattccgcattcagaccagattccccagctgcaatctcctgccatcggattgcatcaccaactcaacctaattggtgagatgtcactccctccctccaccgctcactctcatttctcagtgagtttagctctgtcactctctctaaaagttactcttgttttagtgatttgggtgtaaacattgatgatccttctaatactctgtcctcttaatttctctaagttctctttctagtgatcttgtctcccagtgtggtgggtatattctggctagaccaggtcattgtttatggtggcagcccctctgtcatctgaatttaagcgtcccattttttcggtactagcatggctcactgcaacctccgcctcctgggctccagcaatcctcccaccctcgggtagctggggctatagg

SEQ ID NO: 322295 - DNA, 210 bp, Homo sapiens
tgacatcaaaagaaatttctttgtcaaagtgtagacatgtttgttgtgactgccttttgtgtgggttcttttctcccagccctctcctactacaggagagagagataatggccctttgctcctcattccgcattcagaccagattccccagctgcaatctcctgccatcggattgcatcaccaactcaacctaattggtgagatgtcact

SEQ ID NO: 322296 - DNA, 477 bp, Homo sapiens
aaatttcggttcgtgtctgcttctccaagctttatttttttttttaaatacatcgcaccaccaaactaacactcgcacacacccccgcggttactccgtgtcaaactcctagaggagcccttggccagctcggggtgcggcggtggcgaccggcaggcgaggaggcccgcgggcagcaggtaagcccatgcattattgaagcctcgggctggtaatgtgactacagcccccgagggaatggggcgggggccgggaggaggatggctctttctgtggttcttccgcctgggatcggcgtcccgagctgcttcccaagtcccagagtcgaagatgggagtaacttttgcgtgccctttcctcggggcctcagtttagctccccgcggtgcgagagagaatgccggaggcgtggagagctcgggcgtggaggtccttgggatccgtactagttgtgaacgatccaaacttatctgaccag

SEQ ID NO: 322297 - DNA, 360 bp, Homo sapiens
agctaaaacttgacattgaacacattaacatttgtttatttgggggaatggcttttcctttgtagatcgctactcaaaaaagtaggttgtctgaaagtcaagaaaaagctgcgaacctgaagaaagacttggcagagatgcaggaatggatgacccaggccgaggaagaatatttggagcgggattttgagtacaagtcaccagaagagcttgagagtgctgtggaagagatgaaggtgaggcggggacgaccagtgccaacaggcttcatgcctccctcctccctttaaaaccagcacatcaatcatctgtctatctgtcaaacactatgtgcatgtagcatctttcacagtaggtttt

SEQ ID NO: 322298 - DNA, 412 bp, Homo sapiens
aaagtaacaggactgccattaagtgatttcttttgttttctctttcagcaaatgttcccagcaggccacaggtaagagttaatggcttggttggctctatgttactgatcccaacctagagtaagcagattatccacgactgattttattcctactttattctccatgtaaataagtaaacttacttgacatttaaatgttagttgattctgtacaacagtttgtcagtctgggagtggggggtggctcccaagccacagataccaaaaataccatgtgtttgatcctttgtgttctaacagctttttaatggcatcttatgtgctacataaagtcactctagatagatttgaccaccactgctctctcaaatgtctacttaaggtggctatcacagaacattgacctaaaa

SEQ ID NO: 322299 - DNA, 593 bp, Homo sapiens
gatatgggccagaaatttgggtaccctcctctagaaagaaattccagtaatggatctgtttaagtgttaagggagcagaagagaagacggtgaatgtacttcaatattttgaacatttttagaaataggaattcttgagtctcttttctttcttcagtcttttccatttctttttcttttctttttcactgtaatttctgtgcccatttcattgaaatgggcacagaaattgaaaaataaagcttccagttcagatatgagaacagcaattacagaaaaattggaaagggtcaagaaccagtgggatggcacccagcatggcgttgagctaagacagcagcagcttgaggacatgattattgacagtcttcagtgggatgaccatagggaggagactgaagaactgatgagaaaatatgaggctcgactctatattcttcagcaagcccgacgggatccactcaccaaacaaatttctgtgcccatttcaatgaaatgggcacagaaatttcccatgtatttcccccacacaggcacagcctccctcatcatcagcatcccccaccagagtggatgttgaacaggtgccggcc

SEQ ID NO: 322300 - DNA, 12536 bp, Homo sapiens
aaatacatcgcaccaccaaactaacactcgcacacacccccgcggttactccgtgtcaaactcctagaggagcccttggccagctcggggtgcggcggtggcgaccggcaggcgaggaggcccgcgggcagcaggtattgatgtcaagctgaaccatcgtaggaagttgaaagccttagaaagaggacttggtaaagtttttggattatcttgaaactcttgcatatggcatggccaagtatggagaacatgaagccagtcctgacaatgggcagaacgaattcagtgatatcattaagtccagatctgatgaacacaatgacgtacagaagaaaacctttaccaaatggataaatgctcgattttcaaagagtgggaaaccacccatcaatgatatgttcacagacctcaaagatggaaggaagctattggatcttctagaaggcctcacaggaacatcactgccaaaggaacgtggttccacaagggtacatgccttaaataacgtcaacagagtgctgcaggttttacatcagaacaatgtggaattagtgaatatagggggaactgacattgtggatggaaatcacaaactgactttggggttactttggagcatcattttgcactggcaggtgaaagatgtcatgaaggatgtcatgtcggacctgcagcagacgaacagtgagaagatcctgctcagctgggtgcgtcagaccaccaggccctacagccaagtcaacgtcctcaacttcaccaccagctggacagatggactcgcctttaatgctgtcctccaccgacataaacctgatctcttcagctgggataaagttgtcaaaatgtcaccaattgagagacttgaacatgccttcagcaaggctcaaacttatttgggaattgaaaagctgttagatcctgaagatgttgccgttcagcttcctgacaagaaatccataattatgtatttaacatctttgtttgaggtgctacctcagcaagtcaccatagacgccatccgtgaggtagagacactcccaaggaaatataaaaaagaatgtgaagaagaggcaattaatatacagagtacagcgcctgaggaggagcatgagagtccccgagctgaaactcccagcactgtcactgaggtcgacatggatctggacagctatcagattgcgttggaggaagtgctgacctggttgctttctgctgaggacactttccaggagcaggatgatatttctgatgatgttgaagaagtcaaagaccagtttgcaacccatgaagcttttatgatggaactgactgcacaccagagcagtgtgggcagcgtcctgcaggcaggcaaccaactgataacacaaggaactctgtcagacgaagaagaatttgagattcaggaacagatgaccctgctgaatgctagatgggaggctcttagggtggagagtatggacagacagtcccggctgcacgatgtgctgatggaactgcagaagaagcaactgcagcagctctccgcctggttaacactcacagaggagcgcattcagaagatggaaacttgccccctggatgatgatgtaaaatctctacaaaagctgctagaagaacataaaagtttgcaaagtgatcttgaggctgaacaggtgaaagtaaattcactaactcacatggtggtcattgttgatgaaaacagtggtgagagtgctacagctatcctagaagaccagttacagaaacttggtgagcgctggacagcagtatgccgttggactgaagaacgctggaataggttacaagaaatcaatatattgtggcaggaattattggaagaacagtgcttgttgaaagcttggttaaccgaaaaagaagaggctttaaataaagtccagacaagcaacttcaaagaccaaaaggaactaagtgtcagtgttcgacgtctggctattttgaaggaagacatggaaatgaagcgtcaaacattggatcagctgagtgagattggccaggatgtgggacaattacttgataattccaaggcatctaagaagatcaacagtgactcagaggaactgactcaaagatgggattctttggttcagagactagaagattcctccaaccaggtgactcaggctgtagcaaagctggggatgtctcagattcctcagaaggaccttttggagactgttcgtgtaagagaacaagcaattacaaaaaaatctaagcaggaactgcctcctcctcctcccccaaagaagagacagatccatgtggatattgaagctaagaaaaagtttgatgctataagtgcagagctgttgaactggattttgaaatggaaaactgccattcagaccacagagataaaagagtatatgaagatgcaagacacttccgaaatgaaaaagaagttgaaggcattagaaaaagaacagagagaaagaatccccagagcagatgaattaaaccaaactggacaaatccttgtggagcaaatgggaaaagaaggccttcctactgaagaaataaaaaatgttctggagaaggtttcatcagaatggaagaatgtatctcaacatttggaagatctagaaagaaagattcagctacaggaagatataaatgcttatttcaagcagcttgatgagcttgaaaaggtcatcaagacaaaggaggagtgggtaaaacacacttccatttctgaatcttcccggcagtccttgccaagcttgaaggattcctgtcagcgggaattgacaaatcttcttggccttcaccccaaaattgaaatggctcgtgcaagctgctcggccctgatgtctcagccttctgccccagattttgtccagcggggcttcgatagctttctgggccgctaccaagctgtacaagaggctgtagaggatcgtcaacaacatctagagaatgaactgaagggccaacctggacatgcatatctggaaacattgaaaacactgaaagatgtgctaaatgattcagaaaataaggcccaggtgtctctgaatgtccttaatgatcttgccaaggtggagaaggccctgcaagaaaaaaagacccttgatgaaatccttgagaatcagaaacctgcattacataaacttgcagaagaaacaaaggctctggagaaaaatgttcatcctgatgtagaaaaattatataagcaagaatttgatgatgtgcaaggaaagtggaacaagctaaaggtcttggtttccaaagatctacatttgcttgaggaaattgctctcacactcagagcttttgaggccgattcaacagtcattgagaagtggatggatggcgtgaaagacttcttaatgaaacagcaggctgcccaaggagacgacgcaggtctacagaggcagttagaccagtgctctgcatttgttaatgaaatagaaacaattgaatcatctctgaaaaacatgaaggaaatagagactaatcttcgaagtggtccagttgctggaataaaaacttgggtgcagacaagactaggtgactaccaaactcaactggagaaacttagcaaggagatcgctactcaaaaaagtaggttgtctgaaagtcaagaaaaagctgcgaacctgaagaaagacttggcagagatgcaggaatggatgacccaggccgaggaagaatatttggagcgggattttgagtacaagtcaccagaagagcttgagagtgctgtggaagagatgaagagggcaaaagaggatgtgttgcagaaggaggtgagagtgaagattctcaaggacaacatcaagttattagctgccaaggtgccctctggtggccaggagttgacgtctgagctgaatgttgtgctggagaattaccaacttctttgtaatagaattcgaggaaagtgccacacgctagaggaggtctggtcttgttggattgaactgcttcactatttggatcttgaaactacctggttaaacactttggaagagcggatgaagagcacagaggtcctgcctgagaagacggatgctgtcaacgaagccctggagtctctggaatctgttctgcgccacccggcagataatcgcacccagattcgagagcttggccagactctgattgatggggggatcctggatgatataatcagtgagaaactggaggctttcaacagccgatatgaagatctaagtcacctggcagagagcaagcagatttctttggaaaagcaactccaggtgctgcgggaaactgaccagatgcttcaagtcttgcaagagagcttgggggagctggacaaacagctcaccacatacctgactgacaggatagatgctttccaagttccacaggaagctcagaaaatccaagcagagatctcagcccatgagctaaccctagaggagttgagaagaaatatgcgttctcagcccctgacctccccagagagtaggactgccagaggaggaagtcagatggatgtgctacagaggaaactccgagaggtgtccacaaagttccagcttttccagaagccagctaacttcgagcagcgcatgctggactgcaagcgtgtgctggatggcgtgaaagcagaacttcacgttctggatgtgaaggacgtagaccctgacgtcatacagacgcacctggacaagtgtatgaaactgtataaaactttgagtgaagtcaaacttgaagtggaaactgtgattaaaacaggaagacatattgtccagaaacagcaaacggacaacccaaaagggatggatgagcagctgacttccctgaaggttctttacaatgacctgggcgcacaggtgacagaaggaaaacaggatctggaaagagcatcacagttggcccggaaaatgaagaaagaggctgcttctctctctgaatggctttctgctactgaaactgaattggtacagaagtccacttcagaaggtctgcttggtgacttggatacagaaatttcctgggctaaaaatgttctgaaggatctggaaaagagaaaagctgatttaaataccatcacagagagtagtgctgccctgcaaaacttgattgagggcagtgagcctattttagaagagaggctctgcgtccttaacgctgggtggagccgagttcgtacctggactgaagattggtgcaataccttgatgaaccatcagaaccagctagaaatatttgatgggaacgtggctcacataagtacctggctttatcaagctgaagctctattggatgaaattgaaaagaaaccaacaagtaaacaggaagaaattgtgaagcgtttagtatctgagctggatgatgccaacctccaggttgaaaatgtccgcgatcaagcccttattttgatgaatgcccgtggaagctcaagcagggagcttgtagaaccaaagttagctgagctgaataggaactttgaaaaggtgtctcaacatatcaaaagtgccaaattgctaattgctcaggaaccattataccaatgtttggtcaccactgaaacatttgaaactggtgtgcctttctctgacttggaaaaattagaaaatgacatagaaaatatgttaaaatttgtggaaaaacacttggaatccagtgatgaagatgaaaagatggatgaggagagtgcccagattgaggaagttctacaaagaggagaagaaatgttacatcaacctatggaagataataaaaaagaaaagatccgtttgcaattattacttttgcatactagatacaacaaaattaaggcaatccctattcaacagaggaaaatgggtcaacttgcttctggaattagatcatcacttcttcctacagattatctggttgaaattaacaaaattttactttgcatggatgatgttgaattatcgcttaatgttccagagctcaacactgctatttacgaagacttctcttttcaggaagactctctgaagaatatcaaagaccaactggacaaacttggagagcagattgcagtcattcatgaaaaacagccagatgtcatccttgaagcctctggacctgaagccattcagatcagagatacacttactcagctgaatgcaaaatgggacagaattaatagaatgtacagtgatcggaaaggttgttttgacagggcaatggaagaatggagacagttccattgtgaccttaatgacctcacacagtggataacagaggctgaagaattactggttgatacctgtgctccaggtggcagcctggacttagagaaagccaggatacatcagcaggaacttgaggtgggcatcagcagccaccagcccagttttgcagcactaaaccgaactggggatgggattgtgcagaaactctcccaggcagatggaagcttcttgaaagaaaaactggcaggtttaaaccaacgctgggatgcaattgttgcagaagtgaaggataggcagccaaggctaaaaggagaaagtaagcaggtgatgaagtacaggcatcagctagatgagattatctgttggttaacaaaggctgagcatgctatgcaaaagagatcaaccaccgaattgggagaaaacctgcaagaattaagagacttaactcaagaaatggaagtacatgctgaaaaactcaaatggctgaatagaactgaattggagatgctttcagataaaagtctgagtttacctgaaagggataaaatttcagaaagcttaaggactgtaaatatgacatggaataagatttgcagagaggtgcctaccaccctgaaggaatgcatccaggagcccagttctgtttcacagacaaggattgctgctcatcctaatgtccaaaaggtggtgctagtatcatctgcgtcagatattcctgttcagtctcatcgtacttcggaaatttcaattcctgctgatcttgataaaactataacagaactagccgactggctggtattaatcgaccagatgctgaagtccaacattgtcactgttggggatgtagaagagatcaataagaccgtttcccgaatgaaaattacaaaggctgacttagaacagcgccatcctcagctggattatgtttttacatgggcacagaaattgaaaaataaagcttccagttcagatatgagaacagcaattacagaaaaattggaaagggtcaagaaccagtgggatggcacccagcatggcgttgagctaagacagcagcagcttgaggacatgattattgacagtcttcagtgggatgaccatagggaggagactgaagaactgatgagaaaatatgaggctcgactctatattcttcagcaagcccgacgggatccactcaccaaacaaatttctgtgcccaatactgcttcaagaactgggtcctggagatggtatcgtcatggcgttcgataacgtcctgcagaaactcctggaggaatatgggagtgatgacacaaggaatgtgaaagaaaccacagagtacttaaaaacatcatggatcaatctcaaacaaagtattgctgacagacagaacgccttggaggctgagtggaggacggtgcaggcctctcgcagagatctggaaaacttcctgaagtggatccaagaagcagagaccacagtgaatgtgcttgtggatgcctctcatcgggagaatgctcttcaggatagtatcttggccagggaactcaaacagcagatgcaggacatccaggcagaaattgatgcccacaatgacatatttaaaagcattgacggaaacaggcagaagatggtaaaagctttgggaaattctgaagaggctactatgcttcaacatcgactggatgatatgaaccaaagatggaatgacttaaaagcaaaatctgctagcatcagggcccatttggaggccagcgctgagaagtggaacaggttgctgatgtccttagaagaactgatcaaatggctgaatatgaaagatgaagagcttaagaaacaaatgcctattggaggagatgttccagccttacagctccagtatgaccattgtaaggccctgagacgggagttaaaggagaaagaatattctgtcctgaatgctgtcgaccaggcccgagttttcttggctgatcagccaattgaggcccctgaagagccaagaagaaacctacaatcaaaaacagaattaactcctgaggagagagcccaaaagattgccaaagccatgcgcaaacagtcttctgaagtcaaagaaaaatgggaaagtctaaatgctgtaactagcaattggcaaaagcaagtggacaaggcattggagaaactcagagacctgcagggagctatggatgacctggacgctgacatgaaggaggcagagtccgtgcggaatggctggaagcccgtgggagacttactcattgactcgctgcaggatcacattgaaaaaatcatggcatttagagaagaaattgcaccaatcaactttaaagttaaaacggtgaatgatttatccagtcagctgtctccacttgacctgcatccctctctaaagatgtctcgccagctagatgaccttaatatgcgatggaaacttttacaggtttctgtggatgatcgccttaaacagcttcaggaagcccacagagattttggaccatcctctcagcattttctctctacgtcagtccagctgccgtggcaaagatccatttcacataataaagtgccctattacatcaaccatcaaacacagaccacctgttgggaccatcctaaaatgaccgaactctttcaatcccttgctgacctgaataatgtacgtttttctgcctaccgtacagcaatcaaaatccgaagactacaaaaagcactatgtttggatctcttagagttgagtacaacaaatgaaattttcaaacagcacaagttgaaccaaaatgaccagctcctcagtgttccagatgtcatcaactgtctgacaacaacttatgatggacttgagcaaatgcataaggacctggtcaacgttccactctgtgttgatatgtgtctcaattggttgctcaatgtctatgacacgggtcgaactggaaaaattagagtgcagagtctgaagattggattaatgtctctctccaaaggtctcttggaagaaaaatacagatatctctttaaggaagttgcagggccaacagaaatgtgtgaccagaggcagctgggcctgttacttcatgatgccatccagatcccccggcagctaggtgaagtagcagcttttggaggcagtaatattgagcctagtgttcgcagctgcttccaacagaataacaataaaccagaaataagtgtgaaagagtttatagattggatgcatttggaaccacagtccatggtttggctcccagttttacatcgagtggcagcagcggagactgcaaaacatcaggccaaatgcaacatctgtaaagaatgtccaattgtcgggttcaggtatagaagccttaagcattttaactatgatgtctgccagagttgtttcttttcgggtcgaacagcaaaaggtcacaaattacattacccaatggtggaatattgtatacctacaacatctggggaagatgtacgagacttcacaaaggtacttaagaacaagttcaggtcgaagaagtactttgccaaacaccctcgacttggttacctgcctgtccagacagttcttgaaggtgacaacttagagactcctatcacactcatcagtatgtggccagagcactatgacccctcacaatctcctcaactgtttcatgatgacacccattcaagaatagaacaatatgccacacgactggcccagatggaaaggactaatgggtcttttctcactgatagcagctccaccacaggaagtgtggaagacgagcacgccctcatccagcagtattgccaaacactcggaggagagtccccagtgagccagccgcagagcccagctcagatcctgaagtcagtagagagggaagaacgtggagaactggagaggatcattgctgacctggaggaagaacaaagaaatctacaggtggagtatgagcagctgaaggaccagcacctccgaagggggctccctgtcggttcaccgccagagtcgattatatctccccatcacacgtctgaggattcagaacttatagcagaagcaaaactcctcaggcagcacaaaggtcggctggaggctaggatgcagattttagaagatcacaataaacagctggagtctcagctccaccgcctccgacagctgctggagcagcctgaatctgattcccgaatcaatggtgtttccccatgggcttctcctcagcattctgcactgagctactcgcttgatccagatgcctccggcccacagttccaccaggcagcgggagaggacctgctggccccaccgcacgacaccagcacggatctcacggaggtcatggagcagattcacagcacgtttccatcttgctgcccaaatgttcccagcaggccacaggcaatgtgaagtattcatccggccaaccaatgtttcctgacgtacagtgttgcccttttcagcaaatgccaattccaagttccattaaatcagaagctccatggctccttggcccacgatgttgagtgctgactgtgtgttctactgaaagagtaaaacactgactatccaaagagaaatggatattttgtttttataataaccatatattattgttttcttcttccctttctatgcaagtgtaaattaatgaacagagaggtatttggaaatggtaatacatttgtcacggatttgtataatgtatacagcattgggaaagtgggtgggggctttctaatatgataccgtctttttaataactatgacaaagcttacataagaattagaagaccactttacatttttacattccttctgctgttcatattaaccttgcacaattacttcattttttctttgactcttttaccacaatgttttggttatttataatttatcagccatatgtttatcagccatataaccaactagatcccaaatagatccatgtatttgtttccgtgatttggccacattaataaattcataaatttcaatcaaatatcttatatatacacacatatggtttaagctacagccctgtgtatgccgtttaactttatttgacgttgcccacttacttctttgctgaccacttggataaccgtaatattccctttttatataagtaggaattaattatttattttatgtcttaatctatttgataaagaagactacattataataatctcaaagatcatattaccaaaggttgcccacttgagcatattttcattttgacacagaaacaaaatttagtacaacctttcctagttcccatgtcttgattttcatcattacatgcacagcagacctttacctattgtgataccagaacacatcattgtctttggttcccttcaaagagaattttattgttgttttgtattttcaagtccttaatagttcttgaaactcctagttgttttcttgttgaaagcagacacacatttagtgcacggcttattttacctttcgggtgaaagatcagatgtttttatacccttcacttgatcaatatatttggaaagaatgtttatcaaaagtctatgtcactgcttctacagaagaatgaaattaatgcttaggtgatggtacctccacctacatctttttgagtgcattcaattatgtattttggtttagcttctgatttaacatttaattgattcagtttaaacatgttacttaattagcaaatgtagaggaaccaaaaaaaggtgaaaataatatgttttgattcaaacctaaagacataaaaacataaagacattttaactttgggttctctttagctgggatctggccagaaggaggcttaaagttagaaattgctattattttagaataggttgggtgggttggggggcaagggtgtctatttgcagcagagatattttgaaaagaagaaaattgttttatataaaaaggaaagccatgaccacctttctacctcagatccatcttcatccattgcattggaaactgctttatgctgctgcagtctgcaaagtctagagcttttatcaggccatgtcatacccaagaaagcacctatttaaagaaaaaacaattccctgagctctcaactccaagttgtagatttggtgtcttccttgttcttactttaaaaagtcatgtgttaattttttttctgcctgtatttgtatgcaaaatgtcctctatctgctattaaagaaaagctacgtaaaacactacattgtaaccttctaagtaataataaataaaaagaaatatattgcagtaacaatgggaagtaagtatgtagttcttttgaaatatgtggtaaagaactaatcacagactatcatctaatctggttacatattgtatttttcatcctgaataaaagtaattttaacacaaaaaaactataaaacttcagctgg

SEQ ID NO: 322301 - DNA, 11965 bp, Homo sapiens
  misc_feature (11763)..(11763): n is a, c, g, or t
  misc_feature (11768)..(11768): n is a, c, g, or t
  misc_feature (11965)..(11965): n is a, c, g, or t
aaatacatcgcaccaccaaactaacactcgcacacacccccgcggttactccgtgtcaaactcctagaggagcccttggccagctcggggtgcggcggtggcgaccggcaggcgaggaggcccgcgggcagcaggtattgatgtcaagctgaaccatcgtaggaagttgaaagccttagaaagaggacttggtaaagtttttggattatcttgaaactcttgcatatggcatggccaagtatggagaacatgaagccagtcctgacaatgggcagaacgaattcagtgatatcattaagtccagatctgatgaacacaatgacgtacagaagaaaacctttaccaaatggataaatgctcgattttcaaagagtgggaaaccacccatcaatgatatgttcacagacctcaaagatggaaggaagctattggatcttctagaaggcctcacaggaacatcactgccaaaggaacgtggttccacaagggtacatgccttaaataacgtcaacagagtgctgcaggttttacatcagaacaatgtggaattagtgaatatagggggaactgacattgtggatggaaatcacaaactgactttggggttactttggagcatcattttgcactggcaggtgaaagatgtcatgaaggatgtcatgtcggacctgcagcagacgaacagtgagaagatcctgctcagctgggtgcgtcagaccaccaggccctacagccaagtcaacgtcctcaacttcaccaccagctggacagatggactcgcctttaatgctgtcctccaccgacataaacctgatctcttcagctgggataaagttgtcaaaatgtcaccaattgagagacttgaacatgccttcagcaaggctcaaacttatttgggaattgaaaagctgttagatcctgaagatgttgccgttcagcttcctgacaagaaatccataattatgtatttaacatctttgtttgaggtgctacctcagcaagtcaccatagacgccatccgtgaggtagagacactcccaaggaaatataaaaaagaatgtgaagaagaggcaattaatatacagagtacagcgcctgaggaggagcatgagagtccccgagctgaaactcccagcactgtcactgaggtcgacatggatctggacagctatcagattgcgttggaggaagtgctgacctggttgctttctgctgaggacactttccaggagcaggatgatatttctgatgatgttgaagaagtcaaagaccagtttgcaacccatgaagcttttatgatggaactgactgcacaccagagcagtgtgggcagcgtcctgcaggcaggcaaccaactgataacacaaggaactctgtcagacgaagaagaatttgagattcaggaacagatgaccctgctgaatgctagatgggaggctcttagggtggagagtatggacagacagtcccggctgcacgatgtgctgatggaactgcagaagaagcaactgcagcagctctccgcctggttaacactcacagaggagcgcattcagaagatggaaacttgccccctggatgatgatgtaaaatctctacaaaagctgctagaagaacataaaagtttgcaaagtgatcttgaggctgaacaggtgaaagtaaattcactaactcacatggtggtcattgttgatgaaaacagtggtgagagtgctacagctatcctagaagaccagttacagaaacttggtgagcgctggacagcagtatgccgttggactgaagaacgctggaataggttacaagaaatcaatatattgtggcaggaattattggaagaacagtgcttgttgaaagcttggttaaccgaaaaagaagaggctttaaataaagtccagacaagcaacttcaaagaccaaaaggaactaagtgtcagtgttcgacgtctggctattttgaaggaagacatggaaatgaagcgtcaaacattggatcagctgagtgagattggccaggatgtgggacaattacttgataattccaaggcatctaagaagatcaacagtgactcagaggaactgactcaaagatgggattctttggttcagagactagaagattcctccaaccaggtgactcaggctgtagcaaagctggggatgtctcagattcctcagaaggaccttttggagactgttcgtgtaagagaacaagcaattacaaaaaaatctaagcaggaactgcctcctcctcctcccccaaagaagagacagatccatgtggatattgaagctaagaaaaagtttgatgctataagtgcagagctgttgaactggattttgaaatggaaaactgccattcagaccacagagataaaagagtatatgaagatgcaagacacttccgaaatgaaaaagaagttgaaggcattagaaaaagaacagagagaaagaatccccagagcagatgaattaaaccaaactggacaaatccttgtggagcaaatgggaaaagaaggccttcctactgaagaaataaaaaatgttctggagaaggtttcatcagaatggaagaatgtatctcaacatttggaagatctagaaagaaagattcagctacaggaagatataaatgcttatttcaagcagcttgatgagcttgaaaaggtcatcaagacaaaggaggagtgggtaaaacacacttccatttctgaatcttcccggcagtccttgccaagcttgaaggattcctgtcagcgggaattgacaaatcttcttggccttcaccccaaaattgaaatggctcgtgcaagctgctcggccctgatgtctcagccttctgccccagattttgtccagcggggcttcgatagctttctgggccgctaccaagctgtacaagaggctgtagaggatcgtcaacaacatctagagaatgaactgaagggccaacctggacatgcatatctggaaacattgaaaacactgaaagatgtgctaaatgattcagaaaataaggcccaggtgtctctgaatgtccttaatgatcttgccaaggtggagaaggccctgcaagaaaaaaagacccttgatgaaatccttgagaatcagaaacctgcattacataaacttgcagaagaaacaaaggctctggagaaaaatgttcatcctgatgtagaaaaattatataagcaagaatttgatgatgtgcaaggaaagtggaacaagctaaaggtcttggtttccaaagatctacatttgcttgaggaaattgctctcacactcagagcttttgaggccgattcaacagtcattgagaagtggatggatggcgtgaaagacttcttaatgaaacagcaggctgcccaaggagacgacgcaggtctacagaggcagttagaccagtgctctgcatttgttaatgaaatagaaacaattgaatcatctctgaaaaacatgaaggaaatagagactaatcttcgaagtggtccagttgctggaataaaaacttgggtgcagacaagactaggtgactaccaaactcaactggagaaacttagcaaggagatcgctactcaaaaaagtaggttgtctgaaagtcaagaaaaagctgcgaacctgaagaaagacttggcagagatgcaggaatggatgacccaggccgaggaagaatatttggagcgggattttgagtacaagtcaccagaagagcttgagagtgctgtggaagagatgaagagggcaaaagaggatgtgttgcagaaggaggtgagagtgaagattctcaaggacaacatcaagttattagctgccaaggtgccctctggtggccaggagttgacgtctgagctgaatgttgtgctggagaattaccaacttctttgtaatagaattcgaggaaagtgccacacgctagaggaggtctggtcttgttggattgaactgcttcactatttggatcttgaaactacctggttaaacactttggaagagcggatgaagagcacagaggtcctgcctgagaagacggatgctgtcaacgaagccctggagtctctggaatctgttctgcgccacccggcagataatcgcacccagattcgagagcttggccagactctgattgatggggggatcctggatgatataatcagtgagaaactggaggctttcaacagccgatatgaagatctaagtcacctggcagagagcaagcagatttctttggaaaagcaactccaggtgctgcgggaaactgaccagatgcttcaagtcttgcaagagagcttgggggagctggacaaacagctcaccacatacctgactgacaggatagatgctttccaagttccacaggaagctcagaaaatccaagcagagatctcagcccatgagctaaccctagaggagttgagaagaaatatgcgttctcagcccctgacctccccagagagtaggactgccagaggaggaagtcagatggatgtgctacagaggaaactccgagaggtgtccacaaagttccagcttttccagaagccagctaacttcgagcagcgcatgctggactgcaagcgtgtgctggatggcgtgaaagcagaacttcacgttctggatgtgaaggacgtagaccctgacgtcatacagacgcacctggacaagtgtatgaaactgtataaaactttgagtgaagtcaaacttgaagtggaaactgtgattaaaacaggaagacatattgtccagaaacagcaaacggacaacccaaaagggatggatgagcagctgacttccctgaaggttctttacaatgacctgggcgcacaggtgacagaaggaaaacaggatctggaaagagcatcacagttggcccggaaaatgaagaaagaggctgcttctctctctgaatggctttctgctactgaaactgaattggtacagaagtccacttcagaaggtctgcttggtgacttggatacagaaatttcctgggctaaaaatgttctgaaggatctggaaaagagaaaagctgatttaaataccatcacagagagtagtgctgccctgcaaaacttgattgagggcagtgagcctattttagaagagaggctctgcgtccttaacgctgggtggagccgagttcgtacctggactgaagattggtgcaataccttgatgaaccatcagaaccagctagaaatatttgatgggaacgtggctcacataagtacctggctttatcaagctgaagctctattggatgaaattgaaaagaaaccaacaagtaaacaggaagaaattgtgaagcgtttagtatctgagctggatgatgccaacctccaggttgaaaatgtccgcgatcaagcccttattttgatgaatgcccgtggaagctcaagcagggagcttgtagaaccaaagttagctgagctgaataggaactttgaaaaggtgtctcaacatatcaaaagtgccaaattgctaattgctcaggaaccattataccaatgtttggtcaccactgaaacatttgaaactggtgtgcctttctctgacttggaaaaattagaaaatgacatagaaaatatgttaaaatttgtggaaaaacacttggaatccagtgatgaagatgaaaagatggatgaggagagtgcccagattgaggaagttctacaaagaggagaagaaatgttacatcaacctatggaagataataaaaaagaaaagatccgtttgcaattattacttttgcatactagatacaacaaaattaaggcaatccctattcaacagaggaaaatgggtcaacttgcttctggaattagatcatcacttcttcctacagattatctggttgaaattaacaaaattttactttgcatggatgatgttgaattatcgcttaatgttccagagctcaacactgctatttacgaagacttctcttttcaggaagactctctgaagaatatcaaagaccaactggacaaacttggagagcagattgcagtcattcatgaaaaacagccagatgtcatccttgaagcctctggacctgaagccattcagatcagagatacacttactcagctgaatgcaaaatgggacagaattaatagaatgtacagtgatcggaaaggttgttttgacagggcaatggaagaatggagacagttccattgtgaccttaatgacctcacacagtggataacagaggctgaagaattactggttgatacctgtgctccaggtggcagcctggacttagagaaagccaggatacatcagcaggaacttgaggtgggcatcagcagccaccagcccagttttgcagcactaaaccgaactggggatgggattgtgcagaaactctcccaggcagatggaagcttcttgaaagaaaaactggcaggtttaaaccaacgctgggatgcaattgttgcagaagtgaaggataggcagccaaggctaaaaggagaaagtaagcaggtgatgaagtacaggcatcagctagatgagattatctgttggttaacaaaggctgagcatgctatgcaaaagagatcaaccaccgaattgggagaaaacctgcaagaattaagagacttaactcaagaaatggaagtacatgctgaaaaactcaaatggctgaatagaactgaattggagatgctttcagataaaagtctgagtttacctgaaagggataaaatttcagaaagcttaaggactgtaaatatgacatggaataagatttgcagagaggtgcctaccaccctgaaggaatgcatccaggagcccagttctgtttcacagacaaggattgctgctcatcctaatgtccaaaaggtggtgctagtatcatctgcgtcagatattcctgttcagtctcatcgtacttcggaaatttcaattcctgctgatcttgataaaactataacagaactagccgactggctggtattaatcgaccagatgctgaagtccaacattgtcactgttggggatgtagaagagatcaataagaccgtttcccgaatgaaaattacaaaggctgacttagaacagcgccatcctcagctggattatgtttttacatgggcacagaaattgaaaaataaagcttccagttcagatatgagaacagcaattacagaaaaattggaaagggtcaagaaccagtgggatggcacccagcatggcgttgagctaagacagcagcagcttgaggacatgattattgacagtcttcagtgggatgaccatagggaggagactgaagaactgatgagaaaatatgaggctcgactctatattcttcagcaagcccgacgggatccactcaccaaacaaatttctgtgcccaatactgcttcaagaactgggtcctggagatggtatcgtcatggcgttcgataacgtcctgcagaaactcctggaggaatatgggagtgatgacacaaggaatgtgaaagaaaccacagagtacttaaaaacatcatggatcaatctcaaacaaagtattgctgacagacagaacgccttggaggctgagtggaggacggtgcaggcctctcgcagagatctggaaaacttcctgaagtggatccaagaagcagagaccacagtgaatgtgcttgtggatgcctctcatcgggagaatgctcttcaggatagtatcttggccagggaactcaaacagcagatgcaggacatccaggcagaaattgatgcccacaatgacatatttaaaagcattgacggaaacaggcagaagatggtaaaagctttgggaaattctgaagaggctactatgcttcaacatcgactggatgatatgaaccaaagatggaatgacttaaaagcaaaatctgctagcatcagggcccatttggaggccagcgctgagaagtggaacaggttgctgatgtccttagaagaactgatcaaatggctgaatatgaaagatgaagagcttaagaaacaaatgcctattggaggagatgttccagccttacagctccagtatgaccattgtaaggccctgagacgggagttaaaggagaaagaatattctgtcctgaatgctgtcgaccaggcccgagttttcttggctgatcagccaattgaggcccctgaagagccaagaagaaacctacaatcaaaaacagaattaactcctgaggagagagcccaaaagattgccaaagccatgcgcaaacagtcttctgaagtcaaagaaaaatgggaaagtctaaatgctgtaactagcaattggcaaaagcaagtggacaaggcattggagaaactcagagacctgcagggagctatggatgacctggacgctgacatgaaggaggcagagtccgtgcggaatggctggaagcccgtgggagacttactcattgactcgctgcaggatcacattgaaaaaatcatggcatttagagaagaaattgcaccaatcaactttaaagttaaaacggtgaatgatttatccagtcagctgtctccacttgacctgcatccctctctaaagatgtctcgccagctagatgaccttaatatgcgatggaaacttttacaggtttctgtggatgatcgccttaaacagcttcaggaagcccacagagattttggaccatcctctcagcattttctctctacgtcagtccagctgccgtggcaaagatccatttcacataataaagtgccctattacatcaaccatcaaacacagaccacctgttgggaccatcctaaaatgaccgaactctttcaatcccttgctgacctgaataatgtacgtttttctgcctaccgtacagcaatcaaaatccgaagactacaaaaagcactatgtttggatctcttagagttgagtacaacaaatgaaattttcaaacagcacaagttgaaccaaaatgaccagctcctcagtgttccagatgtcatcaactgtctgacaacaacttatgatggacttgagcaaatgcataaggacctggtcaacgttccactctgtgttgatatgtgtctcaattggttgctcaatgtctatgacacgggtcgaactggaaaaattagagtgcagagtctgaagattggattaatgtctctctccaaaggtctcttggaagaaaaatacagatatctctttaaggaagttgcagggccaacagaaatgtgtgaccagaggcagctgggcctgttacttcatgatgccatccagatcccccggcagctaggtgaagtagcagcttttggaggcagtaatattgagcctagtgttcgcagctgcttccaacagaataacaataaaccagaaataagtgtgaaagagtttatagattggatgcatttggaaccacagtccatggtttggctcccagttttacatcgagtggcagcagcggagactgcaaaacatcaggccaaatgcaacatctgtaaagaatgtccaattgtcgggttcaggtatagaagccttaagcattttaactatgatgtctgccagagttgtttcttttcgggtcgaacagcaaaaggtcacaaattacattacccaatggtggaatattgtatacctacaacatctggggaagatgtacgagacttcacaaaggtacttaagaacaagttcaggtcgaagaagtactttgccaaacaccctcgacttggttacctgcctgtccagacagttcttgaaggtgacaacttagagactcctatcacactcatcagtatgtggccagagcactatgacccctcacaatctcctcaactgtttcatgatgacacccattcaagaatagaacaatatgccacacgactggcccagatggaaaggactaatgggtcttttctcactgatagcagctccaccacaggaagtgtggaagacgagcacgccctcatccagcagtattgccaaacactcggaggagagtccccagtgagccagccgcagagcccagctcagatcctgaagtcagtagagagggaagaacgtggagaactggagaggatcattgctgacctggaggaagaacaaagaaatctacaggtggagtatgagcagctgaaggaccagcacctccgaagggggctccctgtcggttcaccgccagagtcgattatatctccccatcacacgtctgaggattcagaacttatagcagaagcaaaactcctcaggcagcacaaaggtcggctggaggctaggatgcagattttagaagatcacaataaacagctggagtctcagctccaccgcctccgacagctgctggagcagcctgaatctgattcccgaatcaatggtgtttccccatgggcttctcctcagcattctgcactgagctactcgcttgatccagatgcctccggcccacagttccaccaggcagcgggagaggacctgctggccccaccgcacgacaccagcacggatctcacggaggtcatggagcagattcacagcacgtttccatcttgctgcccaaatgttcccagcaggccacaggcaatgtgaagtattcatccggccaaccaatgtttcctgacgtacagtgttgcccttttcagcaaatgccaattccaagttccattaaatcagaagctccatggctccttggcccacgatgttgagtgctgactgtgtgttctactgaaagagtaaaacactgactatccaaagagaaatggatattttgtttttataataaccatatattattgttttcttcttccctttctatgcaagtgtaaattaatgaacagagaggtatttggaaatggtaatacatttgtcacggatttgtataatgtatacagcattgggaaagtgggtgggggctttctaatatgataccgtctttttaataactatgacaaagcttacataagaattagaagaccactttacatttttacattccttctgctgttcatattaaccttgcacaattacttcattttttctttgactcttttaccacaatgttttggttatttataatttatcagccatatgtttatcagccatataaccaactagatcccaaatagatccatgtatttgtttccgtgatttggccacattaataaattcataaatttcaatcaaatatcttatatatacacacatatggtttaagctacagccctgtgtatgccgtttaactttatttgacgttgcccacttacttctttgctgaccacttggataaccgtaataaaaatcctataagcctaaatggcatttcttttgggatatttttcctgcattttattccctttttatataagtaggaattaattatttattttatgtcttaatctatttgataaagaagactacattataataatctcaaagatcatattaccaaaggttgcccacttgagcatattttcattttgacacagaaacaaaatttagtacaacctttcctagttcccatgtcttgattttcatcattacatgcacagcagacctttacctattgtgataccagaacacatcattgtctttggttcccttcaaagagaattttattgttgttttgtattttcaagtccttaatagttcttgaaactcctagttgttttcttgttgaaagcagacacacatttagtgcacggcttattttacctttcgggtgaaagatcagatgtttttatacccttcacttgatcaatatatttggaaagaatgtttatcaaaagtctatgtcactgcttctacaaaaaaaaaaaaaaaaanaaaanaaattggttactgagaaagggagacgtttttcaagttcatccatcctttcttggaacagagcgcaaagaggatgtgttgcagaaggacggtgagagtgaagattctcaaggacaacatcaagttattagctgccaggtgccctctgtggccaggagtgacgtctgagctgaatgttgtgctagaagccaggccgccn

SEQ ID NO: 322302 - DNA, 12387 bp, Homo sapiens
cagatgtaggtgatgagcggcctggcagccaccacgtttcattggaaaaagtgcagattggatttgccagggcatgtagctctccaggcttgcaagcgattaccagatgaacacaatgacgtacagaagaaaacctttaccaaatggataaatgctcgattttcaaagagtgggaaaccacccatcaatgatatgttcacagacctcaaagatggaaggaagctattggatcttctagaaggcctcacaggaacatcactgccaaaggaacgtggttccacaagggtacatgccttaaataacgtcaacagagtgctgcaggttttacatcagaacaatgtggaattagtgaatatagggggaactgacattgtggatggaaatcacaaactgactttggggttactttggagcatcattttgcactggcaggtgaaagatgtcatgaaggatgtcatgtcggacctgcagcagacgaacagtgagaagatcctgctcagctgggtgcgtcagaccaccaggccctacagccaagtcaacgtcctcaacttcaccaccagctggacagatggactcgcctttaatgctgtcctccaccgacataaacctgatctcttcagctgggataaagttgtcaaaatgtcaccaattgagagacttgaacatgccttcagcaaggctcaaacttatttgggaattgaaaagctgttagatcctgaagatgttgccgttcagcttcctgacaagaaatccataattatgtatttaacatctttgtttgaggtgctacctcagcaagtcaccatagacgccatccgtgaggtagagacactcccaaggaaatataaaaaagaatgtgaagaagaggcaattaatatacagagtacagcgcctgaggaggagcatgagagtccccgagctgaaactcccagcactgtcactgaggtcgacatggatctggacagctatcagattgcgttggaggaagtgctgacctggttgctttctgctgaggacactttccaggagcaggatgatatttctgatgatgttgaagaagtcaaagaccagtttgcaacccatgaagcttttatgatggaactgactgcacaccagagcagtgtgggcagcgtcctgcaggcaggcaaccaactgataacacaaggaactctgtcagacgaagaagaatttgagattcaggaacagatgaccctgctgaatgctagatgggaggctcttagggtggagagtatggacagacagtcccggctgcacgatgtgctgatggaactgcagaagaagcaactgcagcagctctccgcctggttaacactcacagaggagcgcattcagaagatggaaacttgccccctggatgatgatgtaaaatctctacaaaagctgctagaagaacataaaagtttgcaaagtgatcttgaggctgaacaggtgaaagtaaattcactaactcacatggtggtcattgttgatgaaaacagtggtgagagtgctacagctatcctagaagaccagttacagaaacttggtgagcgctggacagcagtatgccgttggactgaagaacgctggaataggttacaagaaatcaatatattgtggcaggaattattggaagaacagtgcttgttgaaagcttggttaaccgaaaaagaagaggctttaaataaagtccagacaagcaacttcaaagaccaaaaggaactaagtgtcagtgttcgacgtctggctattttgaaggaagacatggaaatgaagcgtcaaacattggatcagctgagtgagattggccaggatgtgggacaattacttgataattccaaggcatctaagaagatcaacagtgactcagaggaactgactcaaagatgggattctttggttcagagactagaagattcctccaaccaggtgactcaggctgtagcaaagctggggatgtctcagattcctcagaaggaccttttggagactgttcgtgtaagagaacaagcaattacaaaaaaatctaagcaggaactgcctcctcctcctcccccaaagaagagacagatccatgtggatattgaagctaagaaaaagtttgatgctataagtgcagagctgttgaactggattttgaaatggaaaactgccattcagaccacagagataaaagagtatatgaagatgcaagacacttccgaaatgaaaaagaagttgaaggcattagaaaaagaacagagagaaagaatccccagagcagatgaattaaaccaaactggacaaatccttgtggagcaaatgggaaaagaaggccttcctactgaagaaataaaaaatgttctggagaaggtttcatcagaatggaagaatgtatctcaacatttggaagatctagaaagaaagattcagctacaggaagatataaatgcttatttcaagcagcttgatgagcttgaaaaggtcatcaagacaaaggaggagtgggtaaaacacacttccatttctgaatcttcccggcagtccttgccaagcttgaaggattcctgtcagcgggaattgacaaatcttcttggccttcaccccaaaattgaaatggctcgtgcaagctgctcggccctgatgtctcagccttctgccccagattttgtccagcggggcttcgatagctttctgggccgctaccaagctgtacaagaggctgtagaggatcgtcaacaacatctagagaatgaactgaagggccaacctggacatgcatatctggaaacattgaaaacactgaaagatgtgctaaatgattcagaaaataaggcccaggtgtctctgaatgtccttaatgatcttgccaaggtggagaaggccctgcaagaaaaaaagacccttgatgaaatccttgagaatcagaaacctgcattacataaacttgcagaagaaacaaaggctctggagaaaaatgttcatcctgatgtagaaaaattatataagcaagaatttgatgatgtgcaaggaaagtggaacaagctaaaggtcttggtttccaaagatctacatttgcttgaggaaattgctctcacactcagagcttttgaggccgattcaacagtcattgagaagtggatggatggcgtgaaagacttcttaatgaaacagcaggctgcccaaggagacgacgcaggtctacagaggcagttagaccagtgctctgcatttgttaatgaaatagaaacaattgaatcatctctgaaaaacatgaaggaaatagagactaatcttcgaagtggtccagttgctggaataaaaacttgggtgcagacaagactaggtgactaccaaactcaactggagaaacttagcaaggagatcgctactcaaaaaagtaggttgtctgaaagtcaagaaaaagctgcgaacctgaagaaagacttggcagagatgcaggaatggatgacccaggccgaggaagaatatttggagcgggattttgagtacaagtcaccagaagagcttgagagtgctgtggaagagatgaagagggcaaaagaggatgtgttgcagaaggaggtgagagtgaagattctcaaggacaacatcaagttattagctgccaaggtgccctctggtggccaggagttgacgtctgagctgaatgttgtgctggagaattaccaacttctttgtaatagaattcgaggaaagtgccacacgctagaggaggtctggtcttgttggattgaactgcttcactatttggatcttgaaactacctggttaaacactttggaagagcggatgaagagcacagaggtcctgcctgagaagacggatgctgtcaacgaagccctggagtctctggaatctgttctgcgccacccggcagataatcgcacccagattcgagagcttggccagactctgattgatggggggatcctggatgatataatcagtgagaaactggaggctttcaacagccgatatgaagatctaagtcacctggcagagagcaagcagatttctttggaaaagcaactccaggtgctgcgggaaactgaccagatgcttcaagtcttgcaagagagcttgggggagctggacaaacagctcaccacatacctgactgacaggatagatgctttccaagttccacaggaagctcagaaaatccaagcagagatctcagcccatgagctaaccctagaggagttgagaagaaatatgcgttctcagcccctgacctccccagagagtaggactgccagaggaggaagtcagatggatgtgctacagaggaaactccgagaggtgtccacaaagttccagcttttccagaagccagctaacttcgagcagcgcatgctggactgcaagcgtgtgctggatggcgtgaaagcagaacttcacgttctggatgtgaaggacgtagaccctgacgtcatacagacgcacctggacaagtgtatgaaactgtataaaactttgagtgaagtcaaacttgaagtggaaactgtgattaaaacaggaagacatattgtccagaaacagcaaacggacaacccaaaagggatggatgagcagctgacttccctgaaggttctttacaatgacctgggcgcacaggtgacagaaggaaaacaggatctggaaagagcatcacagttggcccggaaaatgaagaaagaggctgcttctctctctgaatggctttctgctactgaaactgaattggtacagaagtccacttcagaaggtctgcttggtgacttggatacagaaatttcctgggctaaaaatgttctgaaggatctggaaaagagaaaagctgatttaaataccatcacagagagtagtgctgccctgcaaaacttgattgagggcagtgagcctattttagaagagaggctctgcgtccttaacgctgggtggagccgagttcgtacctggactgaagattggtgcaataccttgatgaaccatcagaaccagctagaaatatttgatgggaacgtggctcacataagtacctggctttatcaagctgaagctctattggatgaaattgaaaagaaaccaacaagtaaacaggaagaaattgtgaagcgtttagtatctgagctggatgatgccaacctccaggttgaaaatgtccgcgatcaagcccttattttgatgaatgcccgtggaagctcaagcagggagcttgtagaaccaaagttagctgagctgaataggaactttgaaaaggtgtctcaacatatcaaaagtgccaaattgctaattgctcaggaaccattataccaatgtttggtcaccactgaaacatttgaaactggtgtgcctttctctgacttggaaaaattagaaaatgacatagaaaatatgttaaaatttgtggaaaaacacttggaatccagtgatgaagatgaaaagatggatgaggagagtgcccagattgaggaagttctacaaagaggagaagaaatgttacatcaacctatggaagataataaaaaagaaaagatccgtttgcaattattacttttgcatactagatacaacaaaattaaggcaatccctattcaacagaggaaaatgggtcaacttgcttctggaattagatcatcacttcttcctacagattatctggttgaaattaacaaaattttactttgcatggatgatgttgaattatcgcttaatgttccagagctcaacactgctatttacgaagacttctcttttcaggaagactctctgaagaatatcaaagaccaactggacaaacttggagagcagattgcagtcattcatgaaaaacagccagatgtcatccttgaagcctctggacctgaagccattcagatcagagatacacttactcagctgaatgcaaaatgggacagaattaatagaatgtacagtgatcggaaaggttgttttgacagggcaatggaagaatggagacagttccattgtgaccttaatgacctcacacagtggataacagaggctgaagaattactggttgatacctgtgctccaggtggcagcctggacttagagaaagccaggatacatcagcaggaacttgaggtgggcatcagcagccaccagcccagttttgcagcactaaaccgaactggggatgggattgtgcagaaactctcccaggcagatggaagcttcttgaaagaaaaactggcaggtttaaaccaacgctgggatgcaattgttgcagaagtgaaggataggcagccaaggctaaaaggagaaagtaagcaggtgatgaagtacaggcatcagctagatgagattatctgttggttaacaaaggctgagcatgctatgcaaaagagatcaaccaccgaattgggagaaaacctgcaagaattaagagacttaactcaagaaatggaagtacatgctgaaaaactcaaatggctgaatagaactgaattggagatgctttcagataaaagtctgagtttacctgaaagggataaaatttcagaaagcttaaggactgtaaatatgacatggaataagatttgcagagaggtgcctaccaccctgaaggaatgcatccaggagcccagttctgtttcacagacaaggattgctgctcatcctaatgtccaaaaggtggtgctagtatcatctgcgtcagatattcctgttcagtctcatcgtacttcggaaatttcaattcctgctgatcttgataaaactataacagaactagccgactggctggtattaatcgaccagatgctgaagtccaacattgtcactgttggggatgtagaagagatcaataagaccgtttcccgaatgaaaattacaaaggctgacttagaacagcgccatcctcagctggattatgtttttacatgggcacagaaattgaaaaataaagcttccagttcagatatgagaacagcaattacagaaaaattggaaagggtcaagaaccagtgggatggcacccagcatggcgttgagctaagacagcagcagcttgaggacatgattattgacagtcttcagtgggatgaccatagggaggagactgaagaactgatgagaaaatatgaggctcgactctatattcttcagcaagcccgacgggatccactcaccaaacaaatttctgtgcccaatactgcttcaagaactgggtcctggagatggtatcgtcatggcgttcgataacgtcctgcagaaactcctggaggaatatgggagtgatgacacaaggaatgtgaaagaaaccacagagtacttaaaaacatcatggatcaatctcaaacaaagtattgctgacagacagaacgccttggaggctgagtggaggacggtgcaggcctctcgcagagatctggaaaacttcctgaagtggatccaagaagcagagaccacagtgaatgtgcttgtggatgcctctcatcgggagaatgctcttcaggatagtatcttggccagggaactcaaacagcagatgcaggacatccaggcagaaattgatgcccacaatgacatatttaaaagcattgacggaaacaggcagaagatggtaaaagctttgggaaattctgaagaggctactatgcttcaacatcgactggatgatatgaaccaaagatggaatgacttaaaagcaaaatctgctagcatcagggcccatttggaggccagcgctgagaagtggaacaggttgctgatgtccttagaagaactgatcaaatggctgaatatgaaagatgaagagcttaagaaacaaatgcctattggaggagatgttccagccttacagctccagtatgaccattgtaaggccctgagacgggagttaaaggagaaagaatattctgtcctgaatgctgtcgaccaggcccgagttttcttggctgatcagccaattgaggcccctgaagagccaagaagaaacctacaatcaaaaacagaattaactcctgaggagagagcccaaaagattgccaaagccatgcgcaaacagtcttctgaagtcaaagaaaaatgggaaagtctaaatgctgtaactagcaattggcaaaagcaagtggacaaggcattggagaaactcagagacctgcagggagctatggatgacctggacgctgacatgaaggaggcagagtccgtgcggaatggctggaagcccgtgggagacttactcattgactcgctgcaggatcacattgaaaaaatcatggcatttagagaagaaattgcaccaatcaactttaaagttaaaacggtgaatgatttatccagtcagctgtctccacttgacctgcatccctctctaaagatgtctcgccagctagatgaccttaatatgcgatggaaacttttacaggtttctgtggatgatcgccttaaacagcttcaggaagcccacagagattttggaccatcctctcagcattttctctctacgtcagtccagctgccgtggcaaagatccatttcacataataaagtgccctattacatcaaccatcaaacacagaccacctgttgggaccatcctaaaatgaccgaactctttcaatcccttgctgacctgaataatgtacgtttttctgcctaccgtacagcaatcaaaatccgaagactacaaaaagcactatgtttggatctcttagagttgagtacaacaaatgaaattttcaaacagcacaagttgaaccaaaatgaccagctcctcagtgttccagatgtcatcaactgtctgacaacaacttatgatggacttgagcaaatgcataaggacctggtcaacgttccactctgtgttgatatgtgtctcaattggttgctcaatgtctatgacacgggtcgaactggaaaaattagagtgcagagtctgaagattggattaatgtctctctccaaaggtctcttggaagaaaaatacagatatctctttaaggaagttgcagggccaacagaaatgtgtgaccagaggcagctgggcctgttacttcatgatgccatccagatcccccggcagctaggtgaagtagcagcttttggaggcagtaatattgagcctagtgttcgcagctgcttccaacagaataacaataaaccagaaataagtgtgaaagagtttatagattggatgcatttggaaccacagtccatggtttggctcccagttttacatcgagtggcagcagcggagactgcaaaacatcaggccaaatgcaacatctgtaaagaatgtccaattgtcgggttcaggtatagaagccttaagcattttaactatgatgtctgccagagttgtttcttttcgggtcgaacagcaaaaggtcacaaattacattacccaatggtggaatattgtatacctacaacatctggggaagatgtacgagacttcacaaaggtacttaagaacaagttcaggtcgaagaagtactttgccaaacaccctcgacttggttacctgcctgtccagacagttcttgaaggtgacaacttagagactcctatcacactcatcagtatgtggccagagcactatgacccctcacaatctcctcaactgtttcatgatgacacccattcaagaatagaacaatatgccacacgactggcccagatggaaaggactaatgggtcttttctcactgatagcagctccaccacaggaagtgtggaagacgagcacgccctcatccagcagtattgccaaacactcggaggagagtccccagtgagccagccgcagagcccagctcagatcctgaagtcagtagagagggaagaacgtggagaactggagaggatcattgctgacctggaggaagaacaaagaaatctacaggtggagtatgagcagctgaaggaccagcacctccgaagggggctccctgtcggttcaccgccagagtcgattatatctccccatcacacgtctgaggattcagaacttatagcagaagcaaaactcctcaggcagcacaaaggtcggctggaggctaggatgcagattttagaagatcacaataaacagctggagtctcagctccaccgcctccgacagctgctggagcagcctgaatctgattcccgaatcaatggtgtttccccatgggcttctcctcagcattctgcactgagctactcgcttgatccagatgcctccggcccacagttccaccaggcagcgggagaggacctgctggccccaccgcacgacaccagcacggatctcacggaggtcatggagcagattcacagcacgtttccatcttgctgcccaaatgttcccagcaggccacaggcaatgtgaagtattcatccggccaaccaatgtttcctgacgtacagtgttgcccttttcagcaaatgccaattccaagttccattaaatcagaagctccatggctccttggcccacgatgttgagtgctgactgtgtgttctactgaaagagtaaaacactgactatccaaagagaaatggatattttgtttttataataaccatatattattgttttcttcttccctttctatgcaagtgtaaattaatgaacagagaggtatttggaaatggtaatacatttgtcacggatttgtataatgtatacagcattgggaaagtgggtgggggctttctaatatgataccgtctttttaataactatgacaaagcttacataagaattagaagaccactttacatttttacattccttctgctgttcatattaaccttgcacaattacttcattttttctttgactcttttaccacaatgttttggttatttataatttatcagccatatgtttatcagccatataaccaactagatcccaaatagatccatgtatttgtttccgtgatttggccacattaataaattcataaatttcaatcaaatatcttatatatacacacatatggtttaagctacagccctgtgtatgccgtttaactttatttgacgttgcccacttacttctttgctgaccacttggataaccgtaataaaaatcctataagcctaaatggcatttcttttgggatatttttcctgcattttattccctttttatataagtaggaattaattatttattttatgtcttaatctatttgataaagaagactacattataataatctcaaagatcatattaccaaaggttgcccacttgagcatattttcattttgacacagaaacaaaatttagtacaacctttcctagttcccatgtcttgattttcatcattacatgcacagcagacctttacctattgtgataccagaacacatcattgtctttggttcccttcaaagagaattttattgttgttttgtattttcaagtccttaatagttcttgaaactcctagttgttttcttgttgaaagcagacacacatttagtgcacggcttattttacctttcgggtgaaagatcagatgtttttatacccttcacttgatcaatatatttggaaagaatgtttatcaaaagtctatgtcactgcttctacagaagaatgaaattaatgcttaggtgatggtacctccacctacatctttttgagtgcattcaattatgtattttggtttagcttctgatttaacatttaattgattcagtttaaacatgttacttaattagcaaatgtagaggaaccaaaaaaaggtgaaaataatatgttttgattcaaacctaaagacataaaaacataaagacattttaactttgggttctctttagctgggatctggccagaaggaggcttaaagttagaaattgctattattttagaataggttgggtgggttggggggcaagggtgtctatttgcagcagagatattttgaaaagaagaaaattgttttatataaaaaggaaagccatgaccacctttctacctcagatccatcttcatccattgcattggaaactgctttatgctgctgcagtctgcaaagtctagagcttttatcaggccatgtcatacccaagaaagcacctatttaaagaaaaaacaattccctgagctctcaactccaagttgtagatttggtgtcttccttgttcttactttaaaaagtcatgtgttaattttttttctgcctgtatttgtatgcaaaatgtcctctatctgctattaaagaaaagctacgtaaaacactacattgtaaccttctaagtaataataaataaaaagaaatatattgcagtaacaatgggaagtaagtatgtagttcttttgaaatatgtggtaaagaactaatcacagactatcatctaatctggttacatattgtatttttcatcctgaataaaagtaattttaacacaaaaaaactataaaacttcagctgg

SEQ ID NO: 322303 - DNA, 9252 bp, Homo sapiens
cagatgtaggtgatgagcggcctggcagccaccacgtttcattggaaaaagtgcagattggatttgccagggcatgtagctctccaggcttgcaagcgattaccagatgaacacaatgacgtacagaagaaaacctttaccaaatggataaatgctcgattttcaaagagtgggaaaccacccatcaatgatatgttcacagacctcaaagatggaaggaagctattggatcttctagaaggcctcacaggaacatcactgccaaaggaacgtggttccacaagggtacatgccttaaataacgtcaacagagtgctgcaggttttacatcagaacaatgtggaattagtgaatatagggggaactgacattgtggatggaaatcacaaactgactttggggttactttggagcatcattttgcactggcaggtgaaagatgtcatgaaggatgtcatgtcggacctgcagcagacgaacagtgagaagatcctgctcagctgggtgcgtcagaccaccaggccctacagccaagtcaacgtcctcaacttcaccaccagctggacagatggactcgcctttaatgctgtcctccaccgacataaacctgatctcttcagctgggataaagttgtcaaaatgtcaccaattgagagacttgaacatgccttcagcaaggctcaaacttatttgggaattgaaaagctgttagatcctgaagatgttgccgttcagcttcctgacaagaaatccataattatgtatttaacatctttgtttgaggtgctacctcagcaagtcaccatagacgccatccgtgaggtagagacactcccaaggaaatataaaaaagaatgtgaagaagaggcaattaatatacagagtacagcgcctgaggaggagcatgagagtccccgagctgaaactcccagcactgtcactgaggtcgacatggatctggacagctatcagattgcgttggaggaagtgctgacctggttgctttctgctgaggacactttccaggagcaggatgatatttctgatgatgttgaagaagtcaaagaccagtttgcaacccatgaagcttttatgatggaactgactgcacaccagagcagtgtgggcagcgtcctgcaggcaggcaaccaactgataacacaaggaactctgtcagacgaagaagaatttgagattcaggaacagatgaccctgctgaatgctagatgggaggctcttagggtggagagtatggacagacagtcccggctgcacgatgtgctgatggaactgcagaagaagcaactgcagcagctctccgcctggttaacactcacagaggagcgcattcagaagatggaaacttgccccctggatgatgatgtaaaatctctacaaaagctgctagaagaacataaaagtttgcaaagtgatcttgaggctgaacaggtgaaagtaaattcactaactcacatggtggtcattgttgatgaaaacagtggtgagagtgctacagctatcctagaagaccagttacagaaacttggtgagcgctggacagcagtatgccgttggactgaagaacgctggaataggttacaagaaatcaatatattgtggcaggaattattggaagaacagtgcttgttgaaagcttggttaaccgaaaaagaagaggctttaaataaagtccagacaagcaacttcaaagaccaaaaggaactaagtgtcagtgttcgacgtctggctattttgaaggaagacatggaaatgaagcgtcaaacattggatcaccgagttcgtacctggactgaagattggtgcaataccttgatgaaccatcagaaccagctagaaatatttgatgggaacgtggctcacataagtacctggctttatcaagctgaagctctattggatgaaattgaaaagaaaccaacaagtaaacaggaagaaattgtgaagcgtttagtatctgagctggatgatgccaacctccaggttgaaaatgtccgcgatcaagcccttattttgatgaatgcccgtggaagctcaagcagggagcttgtagaaccaaagttagctgagctgaataggaactttgaaaaggtgtctcaacatatcaaaagtgccaaattgctaattgctcaggaaccattataccaatgtttggtcaccactgaaacatttgaaactggtgtgcctttctctgacttggaaaaattagaaaatgacatagaaaatatgttaaaatttgtggaaaaacacttggaatccagtgatgaagatgaaaagatggatgaggagagtgcccagattgaggaagttctacaaagaggagaagaaatgttacatcaacctatggaagataataaaaaagaaaagatccgtttgcaattattacttttgcatactagatacaacaaaattaaggcaatccctattcaacagaggaaaatgggtcaacttgcttctggaattagatcatcacttcttcctacagattatctggttgaaattaacaaaattttactttgcatggatgatgttgaattatcgcttaatgttccagagctcaacactgctatttacgaagacttctcttttcaggaagactctctgaagaatatcaaagaccaactggacaaacttggagagcagattgcagtcattcatgaaaaacagccagatgtcatccttgaagcctctggacctgaagccattcagatcagagatacacttactcagctgaatgcaaaatgggacagaattaatagaatgtacagtgatcggaaaggttgttttgacagggcaatggaagaatggagacagttccattgtgaccttaatgacctcacacagtggataacagaggctgaagaattactggttgatacctgtgctccaggtggcagcctggacttagagaaagccaggatacatcagcaggaacttgaggtgggcatcagcagccaccagcccagttttgcagcactaaaccgaactggggatgggattgtgcagaaactctcccaggcagatggaagcttcttgaaagaaaaactggcaggtttaaaccaacgctgggatgcaattgttgcagaagtgaaggataggcagccaaggctaaaaggagaaagtaagcaggtgatgaagtacaggcatcagctagatgagattatctgttggttaacaaaggctgagcatgctatgcaaaagagatcaaccaccgaattgggagaaaacctgcaagaattaagagacttaactcaagaaatggaagtacatgctgaaaaactcaaatggctgaatagaactgaattggagatgctttcagataaaagtctgagtttacctgaaagggataaaatttcagaaagcttaaggactgtaaatatgacatggaataagatttgcagagaggtgcctaccaccctgaaggaatgcatccaggagcccagttctgtttcacagacaaggattgctgctcatcctaatgtccaaaaggtggtgctagtatcatctgcgtcagatattcctgttcagtctcatcgtacttcggaaatttcaattcctgctgatcttgataaaactataacagaactagccgactggctggtattaatcgaccagatgctgaagtccaacattgtcactgttggggatgtagaagagatcaataagaccgtttcccgaatgaaaattacaaaggctgacttagaacagcgccatcctcagctggattatgtttttacatgggcacagaaattgaaaaataaagcttccagttcagatatgagaacagcaattacagaaaaattggaaagggtcaagaaccagtgggatggcacccagcatggcgttgagctaagacagcagcagcttgaggacatgattattgacagtcttcagtgggatgaccatagggaggagactgaagaactgatgagaaaatatgaggctcgactctatattcttcagcaagcccgacgggatccactcaccaaacaaatttctgtgcccaatactgcttcaagaactgggtcctggagatggtatcgtcatggcgttcgataacgtcctgcagaaactcctggaggaatatgggagtgatgacacaaggaatgtgaaagaaaccacagagtacttaaaaacatcatggatcaatctcaaacaaagtattgctgacagacagaacgccttggaggctgagtggaggacggtgcaggcctctcgcagagatctggaaaacttcctgaagtggatccaagaagcagagaccacagtgaatgtgcttgtggatgcctctcatcgggagaatgctcttcaggatagtatcttggccagggaactcaaacagcagatgcaggacatccaggcagaaattgatgcccacaatgacatatttaaaagcattgacggaaacaggcagaagatggtaaaagctttgggaaattctgaagaggctactatgcttcaacatcgactggatgatatgaaccaaagatggaatgacttaaaagcaaaatctgctagcatcagggcccatttggaggccagcgctgagaagtggaacaggttgctgatgtccttagaagaactgatcaaatggctgaatatgaaagatgaagagcttaagaaacaaatgcctattggaggagatgttccagccttacagctccagtatgaccattgtaaggccctgagacgggagttaaaggagaaagaatattctgtcctgaatgctgtcgaccaggcccgagttttcttggctgatcagccaattgaggcccctgaagagccaagaagaaacctacaatcaaaaacagaattaactcctgaggagagagcccaaaagattgccaaagccatgcgcaaacagtcttctgaagtcaaagaaaaatgggaaagtctaaatgctgtaactagcaattggcaaaagcaagtggacaaggcattggagaaactcagagacctgcagggagctatggatgacctggacgctgacatgaaggaggcagagtccgtgcggaatggctggaagcccgtgggagacttactcattgactcgctgcaggatcacattgaaaaaatcatggcatttagagaagaaattgcaccaatcaactttaaagttaaaacggtgaatgatttatccagtcagctgtctccacttgacctgcatccctctctaaagatgtctcgccagctagatgaccttaatatgcgatggaaacttttacaggtttctgtggatgatcgccttaaacagcttcaggaagcccacagagattttggaccatcctctcagcattttctctctacgtcagtccagctgccgtggcaaagatccatttcacataataaagtgccctattacatcaaccatcaaacacagaccacctgttgggaccatcctaaaatgaccgaactctttcaatcccttgctgacctgaataatgtacgtttttctgcctaccgtacagcaatcaaaatccgaagactacaaaaagcactatgtttggatctcttagagttgagtacaacaaatgaaattttcaaacagcacaagttgaaccaaaatgaccagctcctcagtgttccagatgtcatcaactgtctgacaacaacttatgatggacttgagcaaatgcataaggacctggtcaacgttccactctgtgttgatatgtgtctcaattggttgctcaatgtctatgacacgggtcgaactggaaaaattagagtgcagagtctgaagattggattaatgtctctctccaaaggtctcttggaagaaaaatacagatatctctttaaggaagttgcagggccaacagaaatgtgtgaccagaggcagctgggcctgttacttcatgatgccatccagatcccccggcagctaggtgaagtagcagcttttggaggcagtaatattgagcctagtgttcgcagctgcttccaacagaataacaataaaccagaaataagtgtgaaagagtttatagattggatgcatttggaaccacagtccatggtttggctcccagttttacatcgagtggcagcagcggagactgcaaaacatcaggccaaatgcaacatctgtaaagaatgtccaattgtcgggttcaggtatagaagccttaagcattttaactatgatgtctgccagagttgtttcttttcgggtcgaacagcaaaaggtcacaaattacattacccaatggtggaatattgtatacctacaacatctggggaagatgtacgagacttcacaaaggtacttaagaacaagttcaggtcgaagaagtactttgccaaacaccctcgacttggttacctgcctgtccagacagttcttgaaggtgacaacttagagactcctatcacactcatcagtatgtggccagagcactatgacccctcacaatctcctcaactgtttcatgatgacacccattcaagaatagaacaatatgccacacgactggcccagatggaaaggactaatgggtcttttctcactgatagcagctccaccacaggaagtgtggaagacgagcacgccctcatccagcagtattgccaaacactcggaggagagtccccagtgagccagccgcagagcccagctcagatcctgaagtcagtagagagggaagaacgtggagaactggagaggatcattgctgacctggaggaagaacaaagaaatctacaggtggagtatgagcagctgaaggaccagcacctccgaagggggctccctgtcggttcaccgccagagtcgattatatctccccatcacacgtctgaggattcagaacttatagcagaagcaaaactcctcaggcagcacaaaggtcggctggaggctaggatgcagattttagaagatcacaataaacagctggagtctcagctccaccgcctccgacagctgctggagcagcctgaatctgattcccgaatcaatggtgtttccccatgggcttctcctcagcattctgcactgagctactcgcttgatccagatgcctccggcccacagttccaccaggcagcgggagaggacctgctggccccaccgcacgacaccagcacggatctcacggaggtcatggagcagattcacagcacgtttccatcttgctgcccaaatgttcccagcaggccacaggcaatgtgaagtattcatccggccaaccaatgtttcctgacgtacagtgttgcccttttcagcaaatgccaattccaagttccattaaatcagaagctccatggctccttggcccacgatgttgagtgctgactgtgtgttctactgaaagagtaaaacactgactatccaaagagaaatggatattttgtttttataataaccatatattattgttttcttcttccctttctatgcaagtgtaaattaatgaacagagaggtatttggaaatggtaatacatttgtcacggatttgtataatgtatacagcattgggaaagtgggtgggggctttctaatatgataccgtctttttaataactatgacaaagcttacataagaattagaagaccactttacatttttacattccttctgctgttcatattaaccttgcacaattacttcattttttctttgactcttttaccacaatgttttggttatttataatttatcagccatatgtttatcagccatataaccaactagatcccaaatagatccatgtatttgtttccgtgatttggccacattaataaattcataaatttcaatcaaatatcttatatatacacacatatggtttaagctacagccctgtgtatgccgtttaactttatttgacgttgcccacttacttctttgctgaccacttggataaccgtaataaaaatcctataagcctaaatggcatttcttttgggatatttttcctgcattttattccctttttatataagtaggaattaattatttattttatgtcttaatctatttgataaagaagactacattataataatctcaaagatcatattaccaaaggttgcccacttgagcatattttcattttgacacagaaacaaaatttagtacaacctttcctagttcccatgtcttgattttcatcattacatgcacagcagacctttacctattgtgataccagaacacatcattgtctttggttcccttcaaagagaattttattgttgttttgtattttcaagtccttaatagttcttgaaactcctagttgttttcttgttgaaagcagacacacatttagtgcacggcttattttacctttcgggtgaaagatcagatgtttttatacccttcacttgatcaatatatttggaaagaatgtttatcaaaagtctatgtcactgcttctacagaagaatgaaattaatgcttaggtgatggtacctccacctacatctttttgagtgcattcaattatgtattttggtttagcttctgatttaacatttaattgattcagtttaaacatgttacttaattagcaaatgtagaggaaccaaaaaaaggtgaaaataatatgttttgattcaaacctaaagacataaaaacataaagacattttaactttgggttctctttagctgggatctggccagaaggaggcttaaagttagaaattgctattattttagaataggttgggtgggttggggggcaagggtgtctatttgcagcagagatattttgaaaagaagaaaattgttttatataaaaaggaaagccatgaccacctttctacctcagatccatcttcatccattgcattggaaactgctttatgctgctgcagtctgcaaagtctagagcttttatcaggccatgtcatacccaagaaagcacctatttaaagaaaaaacaattccctgagctctcaactccaagttgtagatttggtgtcttccttgttcttactttaaaaagtcatgtgttaattttttttctgcctgtatttgtatgcaaaatgtcctctatctgctattaaagaaaagctacgtaaaacactacattgtaaccttctaagtaataataaataaaaagaaatatattgcagtaacaatgggaagtaagtatgtagttcttttgaaatatgtggtaaagaactaatcacagactatcatctaatctggttacatattgtatttttcatcctgaataaaagtaattttaacacaaaaaaactataaaacttcagctgg

SEQ ID NO: 322304 - DNA, 7195 bp, Homo sapiens
cagaggacccccaacgtacagcagtctatccaaggataggaacttagaaacggtgtctcaacgtatcaaaagtgccaaattgctaattgctcaggaaccattataccaatgtttggtcaccactgaaacatttgaaactggtgtgcctttctctgacttggaaaaattagaaaatgacatagaaaatatgttaaaatttgtggaaaaacacttggaatccagtgatgaagatgaaaagatggatgaggagagtgcccagattgaggaagttctacaaagaggagaagaaatgttacatcaacctatggaagataataaaaaagaaaagatccgtttgcaattattacttttgcatactagatacaacaaaattaaggcaatccctattcaacagaggaaaatgggtcaacttgcttctggaattagatcatcacttcttcctacagattatctggttgaaattaacaaaattttactttgcatggatgatgttgaattatcgcttaatgttccagagctcaacactgctatttacgaagacttctcttttcaggaagactctctgaagaatatcaaagaccaactggacaaacttggagagcagattgcagtcattcatgaaaaacagccagatgtcatccttgaagcctctggacctgaagccattcagatcagagatacacttactcagctgaatgcaaaatgggacagaattaatagaatgtacagtgatcggaaaggttgttttgacagggcaatggaagaatggagacagttccattgtgaccttaatgacctcacacagtggataacagaggctgaagaattactggttgatacctgtgctccaggtggcagcctggacttagagaaagccaggatacatcagcaggaacttgaggtgggcatcagcagccaccagcccagttttgcagcactaaaccgaactggggatgggattgtgcagaaactctcccaggcagatggaagcttcttgaaagaaaaactggcaggtttaaaccaacgctgggatgcaattgttgcagaagtgaaggataggcagccaaggctaaaaggagaaagtaagcaggtgatgaagtacaggcatcagctagatgagattatctgttggttaacaaaggctgagcatgctatgcaaaagagatcaaccaccgaattgggagaaaacctgcaagaattaagagacttaactcaagaaatggaagtacatgctgaaaaactcaaatggctgaatagaactgaattggagatgctttcagataaaagtctgagtttacctgaaagggataaaatttcagaaagcttaaggactgtaaatatgacatggaataagatttgcagagaggtgcctaccaccctgaaggaatgcatccaggagcccagttctgtttcacagacaaggattgctgctcatcctaatgtccaaaaggtggtgctagtatcatctgcgtcagatattcctgttcagtctcatcgtacttcggaaatttcaattcctgctgatcttgataaaactataacagaactagccgactggctggtattaatcgaccagatgctgaagtccaacattgtcactgttggggatgtagaagagatcaataagaccgtttcccgaatgaaaattacaaaggctgacttagaacagcgccatcctcagctggattatgtttttacatgggcacagaaattgaaaaataaagcttccagttcagatatgagaacagcaattacagaaaaattggaaagggtcaagaaccagtgggatggcacccagcatggcgttgagctaagacagcagcagcttgaggacatgattattgacagtcttcagtgggatgaccatagggaggagactgaagaactgatgagaaaatatgaggctcgactctatattcttcagcaagcccgacgggatccactcaccaaacaaatttctgtgcccaatactgcttcaagaactgggtcctggagatggtatcgtcatggcgttcgataacgtcctgcagaaactcctggaggaatatgggagtgatgacacaaggaatgtgaaagaaaccacagagtacttaaaaacatcatggatcaatctcaaacaaagtattgctgacagacagaacgccttggaggctgagtggaggacggtgcaggcctctcgcagagatctggaaaacttcctgaagtggatccaagaagcagagaccacagtgaatgtgcttgtggatgcctctcatcgggagaatgctcttcaggatagtatcttggccagggaactcaaacagcagatgcaggacatccaggcagaaattgatgcccacaatgacatatttaaaagcattgacggaaacaggcagaagatggtaaaagctttgggaaattctgaagaggctactatgcttcaacatcgactggatgatatgaaccaaagatggaatgacttaaaagcaaaatctgctagcatcagggcccatttggaggccagcgctgagaagtggaacaggttgctgatgtccttagaagaactgatcaaatggctgaatatgaaagatgaagagcttaagaaacaaatgcctattggaggagatgttccagccttacagctccagtatgaccattgtaaggccctgagacgggagttaaaggagaaagaatattctgtcctgaatgctgtcgaccaggcccgagttttcttggctgatcagccaattgaggcccctgaagagccaagaagaaacctacaatcaaaaacagaattaactcctgaggagagagcccaaaagattgccaaagccatgcgcaaacagtcttctgaagtcaaagaaaaatgggaaagtctaaatgctgtaactagcaattggcaaaagcaagtggacaaggcattggagaaactcagagacctgcagggagctatggatgacctggacgctgacatgaaggaggcagagtccgtgcggaatggctggaagcccgtgggagacttactcattgactcgctgcaggatcacattgaaaaaatcatggcatttagagaagaaattgcaccaatcaactttaaagttaaaacggtgaatgatttatccagtcagctgtctccacttgacctgcatccctctctaaagatgtctcgccagctagatgaccttaatatgcgatggaaacttttacaggtttctgtggatgatcgccttaaacagcttcaggaagcccacagagattttggaccatcctctcagcattttctctctacgtcagtccagctgccgtggcaaagatccatttcacataataaagtgccctattacatcaaccatcaaacacagaccacctgttgggaccatcctaaaatgaccgaactctttcaatcccttgctgacctgaataatgtacgtttttctgcctaccgtacagcaatcaaaatccgaagactacaaaaagcactatgtttggatctcttagagttgagtacaacaaatgaaattttcaaacagcacaagttgaaccaaaatgaccagctcctcagtgttccagatgtcatcaactgtctgacaacaacttatgatggacttgagcaaatgcataaggacctggtcaacgttccactctgtgttgatatgtgtctcaattggttgctcaatgtctatgacacgggtcgaactggaaaaattagagtgcagagtctgaagattggattaatgtctctctccaaaggtctcttggaagaaaaatacagatatctctttaaggaagttgcagggccaacagaaatgtgtgaccagaggcagctgggcctgttacttcatgatgccatccagatcccccggcagctaggtgaagtagcagcttttggaggcagtaatattgagcctagtgttcgcagctgcttccaacagaataacaataaaccagaaataagtgtgaaagagtttatagattggatgcatttggaaccacagtccatggtttggctcccagttttacatcgagtggcagcagcggagactgcaaaacatcaggccaaatgcaacatctgtaaagaatgtccaattgtcgggttcaggtatagaagccttaagcattttaactatgatgtctgccagagttgtttcttttcgggtcgaacagcaaaaggtcacaaattacattacccaatggtggaatattgtatacctacaacatctggggaagatgtacgagacttcacaaaggtacttaagaacaagttcaggtcgaagaagtactttgccaaacaccctcgacttggttacctgcctgtccagacagttcttgaaggtgacaacttagagactcctatcacactcatcagtatgtggccagagcactatgacccctcacaatctcctcaactgtttcatgatgacacccattcaagaatagaacaatatgccacacgactggcccagatggaaaggactaatgggtcttttctcactgatagcagctccaccacaggaagtgtggaagacgagcacgccctcatccagcagtattgccaaacactcggaggagagtccccagtgagccagccgcagagcccagctcagatcctgaagtcagtagagagggaagaacgtggagaactggagaggatcattgctgacctggaggaagaacaaagaaatctacaggtggagtatgagcagctgaaggaccagcacctccgaagggggctccctgtcggttcaccgccagagtcgattatatctccccatcacacgtctgaggattcagaacttatagcagaagcaaaactcctcaggcagcacaaaggtcggctggaggctaggatgcagattttagaagatcacaataaacagctggagtctcagctccaccgcctccgacagctgctggagcagcctgaatctgattcccgaatcaatggtgtttccccatgggcttctcctcagcattctgcactgagctactcgcttgatccagatgcctccggcccacagttccaccaggcagcgggagaggacctgctggccccaccgcacgacaccagcacggatctcacggaggtcatggagcagattcacagcacgtttccatcttgctgcccaaatgttcccagcaggccacaggcaatgtgaagtattcatccggccaaccaatgtttcctgacgtacagtgttgcccttttcagcaaatgccaattccaagttccattaaatcagaagctccatggctccttggcccacgatgttgagtgctgactgtgtgttctactgaaagagtaaaacactgactatccaaagagaaatggatattttgtttttataataaccatatattattgttttcttcttccctttctatgcaagtgtaaattaatgaacagagaggtatttggaaatggtaatacatttgtcacggatttgtataatgtatacagcattgggaaagtgggtgggggctttctaatatgataccgtctttttaataactatgacaaagcttacataagaattagaagaccactttacatttttacattccttctgctgttcatattaaccttgcacaattacttcattttttctttgactcttttaccacaatgttttggttatttataatttatcagccatatgtttatcagccatataaccaactagatcccaaatagatccatgtatttgtttccgtgatttggccacattaataaattcataaatttcaatcaaatatcttatatatacacacatatggtttaagctacagccctgtgtatgccgtttaactttatttgacgttgcccacttacttctttgctgaccacttggataaccgtaataaaaatcctataagcctaaatggcatttcttttgggatatttttcctgcattttattccctttttatataagtaggaattaattatttattttatgtcttaatctatttgataaagaagactacattataataatctcaaagatcatattaccaaaggttgcccacttgagcatattttcattttgacacagaaacaaaatttagtacaacctttcctagttcccatgtcttgattttcatcattacatgcacagcagacctttacctattgtgataccagaacacatcattgtctttggttcccttcaaagagaattttattgttgttttgtattttcaagtccttaatagttcttgaaactcctagttgttttcttgttgaaagcagacacacatttagtgcacggcttattttacctttcgggtgaaagatcagatgtttttatacccttcacttgatcaatatatttggaaagaatgtttatcaaaagtctatgtcactgcttctacagaagaatgaaattaatgcttaggtgatggtacctccacctacatctttttgagtgcattcaattatgtattttggtttagcttctgatttaacatttaattgattcagtttaaacatgttacttaattagcaaatgtagaggaaccaaaaaaaggtgaaaataatatgttttgattcaaacctaaagacataaaaacataaagacattttaactttgggttctctttagctgggatctggccagaaggaggcttaaagttagaaattgctattattttagaataggttgggtgggttggggggcaagggtgtctatttgcagcagagatattttgaaaagaagaaaattgttttatataaaaaggaaagccatgaccacctttctacctcagatccatcttcatccattgcattggaaactgctttatgctgctgcagtctgcaaagtctagagcttttatcaggccatgtcatacccaagaaagcacctatttaaagaaaaaacaattccctgagctctcaactccaagttgtagatttggtgtcttccttgttcttactttaaaaagtcatgtgttaattttttttctgcctgtatttgtatgcaaaatgtcctctatctgctattaaagaaaagctacgtaaaacactacattgtaaccttctaagtaataataaataaaaagaaatatattgcagtaacaatgggaagtaagtatgtagttcttttgaaatatgtggtaaagaactaatcacagactatcatctaatctggttacatattgtatttttcatcctgaataaaagtaattttaacacaaaaaaactataaaacttcagctgg

SEQ ID NO: 322305 - DNA, 6302 bp, Homo sapiens
tccttttctttaaggatttaactatcaacttgataaataacttataggtgatagtgataattcctgatttcaagaagcaggaactggccagttcctgcttcttgaaagaaaaactggcaggtttaaaccaacgctgggatgcaattgttgcagaagtgaaggataggcagccaaggctaaaaggagaaagtaagcaggtgatgaagtacaggcatcagctagatgagattatctgttggttaacaaaggctgagcatgctatgcaaaagagatcaaccaccgaattgggagaaaacctgcaagaattaagagacttaactcaagaaatggaagtacatgctgaaaaactcaaatggctgaatagaactgaattggagatgctttcagataaaagtctgagtttacctgaaagggataaaatttcagaaagcttaaggactgtaaatatgacatggaataagatttgcagagaggtgcctaccaccctgaaggaatgcatccaggagcccagttctgtttcacagacaaggattgctgctcatcctaatgtccaaaaggtggtgctagtatcatctgcgtcagatattcctgttcagtctcatcgtacttcggaaatttcaattcctgctgatcttgataaaactataacagaactagccgactggctggtattaatcgaccagatgctgaagtccaacattgtcactgttggggatgtagaagagatcaataagaccgtttcccgaatgaaaattacaaaggctgacttagaacagcgccatcctcagctggattatgtttttacatgggcacagaaattgaaaaataaagcttccagttcagatatgagaacagcaattacagaaaaattggaaagggtcaagaaccagtgggatggcacccagcatggcgttgagctaagacagcagcagcttgaggacatgattattgacagtcttcagtgggatgaccatagggaggagactgaagaactgatgagaaaatatgaggctcgactctatattcttcagcaagcccgacgggatccactcaccaaacaaatttctgtgcccaatactgcttcaagaactgggtcctggagatggtatcgtcatggcgttcgataacgtcctgcagaaactcctggaggaatatgggagtgatgacacaaggaatgtgaaagaaaccacagagtacttaaaaacatcatggatcaatctcaaacaaagtattgctgacagacagaacgccttggaggctgagtggaggacggtgcaggcctctcgcagagatctggaaaacttcctgaagtggatccaagaagcagagaccacagtgaatgtgcttgtggatgcctctcatcgggagaatgctcttcaggatagtatcttggccagggaactcaaacagcagatgcaggacatccaggcagaaattgatgcccacaatgacatatttaaaagcattgacggaaacaggcagaagatggtaaaagctttgggaaattctgaagaggctactatgcttcaacatcgactggatgatatgaaccaaagatggaatgacttaaaagcaaaatctgctagcatcagggcccatttggaggccagcgctgagaagtggaacaggttgctgatgtccttagaagaactgatcaaatggctgaatatgaaagatgaagagcttaagaaacaaatgcctattggaggagatgttccagccttacagctccagtatgaccattgtaaggccctgagacgggagttaaaggagaaagaatattctgtcctgaatgctgtcgaccaggcccgagttttcttggctgatcagccaattgaggcccctgaagagccaagaagaaacctacaatcaaaaacagaattaactcctgaggagagagcccaaaagattgccaaagccatgcgcaaacagtcttctgaagtcaaagaaaaatgggaaagtctaaatgctgtaactagcaattggcaaaagcaagtggacaaggcattggagaaactcagagacctgcagggagctatggatgacctggacgctgacatgaaggaggcagagtccgtgcggaatggctggaagcccgtgggagacttactcattgactcgctgcaggatcacattgaaaaaatcatggcatttagagaagaaattgcaccaatcaactttaaagttaaaacggtgaatgatttatccagtcagctgtctccacttgacctgcatccctctctaaagatgtctcgccagctagatgaccttaatatgcgatggaaacttttacaggtttctgtggatgatcgccttaaacagcttcaggaagcccacagagattttggaccatcctctcagcattttctctctacgtcagtccagctgccgtggcaaagatccatttcacataataaagtgccctattacatcaaccatcaaacacagaccacctgttgggaccatcctaaaatgaccgaactctttcaatcccttgctgacctgaataatgtacgtttttctgcctaccgtacagcaatcaaaatccgaagactacaaaaagcactatgtttggatctcttagagttgagtacaacaaatgaaattttcaaacagcacaagttgaaccaaaatgaccagctcctcagtgttccagatgtcatcaactgtctgacaacaacttatgatggacttgagcaaatgcataaggacctggtcaacgttccactctgtgttgatatgtgtctcaattggttgctcaatgtctatgacacgggtcgaactggaaaaattagagtgcagagtctgaagattggattaatgtctctctccaaaggtctcttggaagaaaaatacagatatctctttaaggaagttgcagggccaacagaaatgtgtgaccagaggcagctgggcctgttacttcatgatgccatccagatcccccggcagctaggtgaagtagcagcttttggaggcagtaatattgagcctagtgttcgcagctgcttccaacagaataacaataaaccagaaataagtgtgaaagagtttatagattggatgcatttggaaccacagtccatggtttggctcccagttttacatcgagtggcagcagcggagactgcaaaacatcaggccaaatgcaacatctgtaaagaatgtccaattgtcgggttcaggtatagaagccttaagcattttaactatgatgtctgccagagttgtttcttttcgggtcgaacagcaaaaggtcacaaattacattacccaatggtggaatattgtatacctacaacatctggggaagatgtacgagacttcacaaaggtacttaagaacaagttcaggtcgaagaagtactttgccaaacaccctcgacttggttacctgcctgtccagacagttcttgaaggtgacaacttagagactcctatcacactcatcagtatgtggccagagcactatgacccctcacaatctcctcaactgtttcatgatgacacccattcaagaatagaacaatatgccacacgactggcccagatggaaaggactaatgggtcttttctcactgatagcagctccaccacaggaagtgtggaagacgagcacgccctcatccagcagtattgccaaacactcggaggagagtccccagtgagccagccgcagagcccagctcagatcctgaagtcagtagagagggaagaacgtggagaactggagaggatcattgctgacctggaggaagaacaaagaaatctacaggtggagtatgagcagctgaaggaccagcacctccgaagggggctccctgtcggttcaccgccagagtcgattatatctccccatcacacgtctgaggattcagaacttatagcagaagcaaaactcctcaggcagcacaaaggtcggctggaggctaggatgcagattttagaagatcacaataaacagctggagtctcagctccaccgcctccgacagctgctggagcagcctgaatctgattcccgaatcaatggtgtttccccatgggcttctcctcagcattctgcactgagctactcgcttgatccagatgcctccggcccacagttccaccaggcagcgggagaggacctgctggccccaccgcacgacaccagcacggatctcacggaggtcatggagcagattcacagcacgtttccatcttgctgcccaaatgttcccagcaggccacaggcaatgtgaagtattcatccggccaaccaatgtttcctgacgtacagtgttgcccttttcagcaaatgccaattccaagttccattaaatcagaagctccatggctccttggcccacgatgttgagtgctgactgtgtgttctactgaaagagtaaaacactgactatccaaagagaaatggatattttgtttttataataaccatatattattgttttcttcttccctttctatgcaagtgtaaattaatgaacagagaggtatttggaaatggtaatacatttgtcacggatttgtataatgtatacagcattgggaaagtgggtgggggctttctaatatgataccgtctttttaataactatgacaaagcttacataagaattagaagaccactttacatttttacattccttctgctgttcatattaaccttgcacaattacttcattttttctttgactcttttaccacaatgttttggttatttataatttatcagccatatgtttatcagccatataaccaactagatcccaaatagatccatgtatttgtttccgtgatttggccacattaataaattcataaatttcaatcaaatatcttatatatacacacatatggtttaagctacagccctgtgtatgccgtttaactttatttgacgttgcccacttacttctttgctgaccacttggataaccgtaataaaaatcctataagcctaaatggcatttcttttgggatatttttcctgcattttattccctttttatataagtaggaattaattatttattttatgtcttaatctatttgataaagaagactacattataataatctcaaagatcatattaccaaaggttgcccacttgagcatattttcattttgacacagaaacaaaatttagtacaacctttcctagttcccatgtcttgattttcatcattacatgcacagcagacctttacctattgtgataccagaacacatcattgtctttggttcccttcaaagagaattttattgttgttttgtattttcaagtccttaatagttcttgaaactcctagttgttttcttgttgaaagcagacacacatttagtgcacggcttattttacctttcgggtgaaagatcagatgtttttatacccttcacttgatcaatatatttggaaagaatgtttatcaaaagtctatgtcactgcttctacagaagaatgaaattaatgcttaggtgatggtacctccacctacatctttttgagtgcattcaattatgtattttggtttagcttctgatttaacatttaattgattcagtttaaacatgttacttaattagcaaatgtagaggaaccaaaaaaaggtgaaaataatatgttttgattcaaacctaaagacataaaaacataaagacattttaactttgggttctctttagctgggatctggccagaaggaggcttaaagttagaaattgctattattttagaataggttgggtgggttggggggcaagggtgtctatttgcagcagagatattttgaaaagaagaaaattgttttatataaaaaggaaagccatgaccacctttctacctcagatccatcttcatccattgcattggaaactgctttatgctgctgcagtctgcaaagtctagagcttttatcaggccatgtcatacccaagaaagcacctatttaaagaaaaaacaattccctgagctctcaactccaagttgtagatttggtgtcttccttgttcttactttaaaaagtcatgtgttaattttttttctgcctgtatttgtatgcaaaatgtcctctatctgctattaaagaaaagctacgtaaaacactacattgtaaccttctaagtaataataaataaaaagaaatatattgcagtaacaatgggaagtaagtatgtagttcttttgaaatatgtggtaaagaactaatcacagactatcatctaatctggttacatattgtatttttcatcctgaataaaagtaattttaacacaaaaaaactataaaacttcagctgg

SEQ ID NO: 322306 - DNA, 6035 bp, Homo sapiens
agtcggaaaaattaacttcggtacggtaacaattcgacaggttcagcaataaaaaagcgctgtcggcgtgttaatcatcaatcaaatggctgaatagaactgaattggagatgctttcagataaaagtctgagtttacctgaaagggataaaatttcagaaagcttaaggactgtaaatatgacatggaataagatttgcagagaggtgcctaccaccctgaaggaatgcatccaggagcccagttctgtttcacagacaaggattgctgctcatcctaatgtccaaaaggtggtgctagtatcatctgcgtcagatattcctgttcagtctcatcgtacttcggaaatttcaattcctgctgatcttgataaaactataacagaactagccgactggctggtattaatcgaccagatgctgaagtccaacattgtcactgttggggatgtagaagagatcaataagaccgtttcccgaatgaaaattacaaaggctgacttagaacagcgccatcctcagctggattatgtttttacatgggcacagaaattgaaaaataaagcttccagttcagatatgagaacagcaattacagaaaaattggaaagggtcaagaaccagtgggatggcacccagcatggcgttgagctaagacagcagcagcttgaggacatgattattgacagtcttcagtgggatgaccatagggaggagactgaagaactgatgagaaaatatgaggctcgactctatattcttcagcaagcccgacgggatccactcaccaaacaaatttctgtgcccaatactgcttcaagaactgggtcctggagatggtatcgtcatggcgttcgataacgtcctgcagaaactcctggaggaatatgggagtgatgacacaaggaatgtgaaagaaaccacagagtacttaaaaacatcatggatcaatctcaaacaaagtattgctgacagacagaacgccttggaggctgagtggaggacggtgcaggcctctcgcagagatctggaaaacttcctgaagtggatccaagaagcagagaccacagtgaatgtgcttgtggatgcctctcatcgggagaatgctcttcaggatagtatcttggccagggaactcaaacagcagatgcaggacatccaggcagaaattgatgcccacaatgacatatttaaaagcattgacggaaacaggcagaagatggtaaaagctttgggaaattctgaagaggctactatgcttcaacatcgactggatgatatgaaccaaagatggaatgacttaaaagcaaaatctgctagcatcagggcccatttggaggccagcgctgagaagtggaacaggttgctgatgtccttagaagaactgatcaaatggctgaatatgaaagatgaagagcttaagaaacaaatgcctattggaggagatgttccagccttacagctccagtatgaccattgtaaggccctgagacgggagttaaaggagaaagaatattctgtcctgaatgctgtcgaccaggcccgagttttcttggctgatcagccaattgaggcccctgaagagccaagaagaaacctacaatcaaaaacagaattaactcctgaggagagagcccaaaagattgccaaagccatgcgcaaacagtcttctgaagtcaaagaaaaatgggaaagtctaaatgctgtaactagcaattggcaaaagcaagtggacaaggcattggagaaactcagagacctgcagggagctatggatgacctggacgctgacatgaaggaggcagagtccgtgcggaatggctggaagcccgtgggagacttactcattgactcgctgcaggatcacattgaaaaaatcatggcatttagagaagaaattgcaccaatcaactttaaagttaaaacggtgaatgatttatccagtcagctgtctccacttgacctgcatccctctctaaagatgtctcgccagctagatgaccttaatatgcgatggaaacttttacaggtttctgtggatgatcgccttaaacagcttcaggaagcccacagagattttggaccatcctctcagcattttctctctacgtcagtccagctgccgtggcaaagatccatttcacataataaagtgccctattacatcaaccatcaaacacagaccacctgttgggaccatcctaaaatgaccgaactctttcaatcccttgctgacctgaataatgtacgtttttctgcctaccgtacagcaatcaaaatccgaagactacaaaaagcactatgtttggatctcttagagttgagtacaacaaatgaaattttcaaacagcacaagttgaaccaaaatgaccagctcctcagtgttccagatgtcatcaactgtctgacaacaacttatgatggacttgagcaaatgcataaggacctggtcaacgttccactctgtgttgatatgtgtctcaattggttgctcaatgtctatgacacgggtcgaactggaaaaattagagtgcagagtctgaagattggattaatgtctctctccaaaggtctcttggaagaaaaatacagatatctctttaaggaagttgcagggccaacagaaatgtgtgaccagaggcagctgggcctgttacttcatgatgccatccagatcccccggcagctaggtgaagtagcagcttttggaggcagtaatattgagcctagtgttcgcagctgcttccaacagaataacaataaaccagaaataagtgtgaaagagtttatagattggatgcatttggaaccacagtccatggtttggctcccagttttacatcgagtggcagcagcggagactgcaaaacatcaggccaaatgcaacatctgtaaagaatgtccaattgtcgggttcaggtatagaagccttaagcattttaactatgatgtctgccagagttgtttcttttcgggtcgaacagcaaaaggtcacaaattacattacccaatggtggaatattgtatacctacaacatctggggaagatgtacgagacttcacaaaggtacttaagaacaagttcaggtcgaagaagtactttgccaaacaccctcgacttggttacctgcctgtccagacagttcttgaaggtgacaacttagagactcctatcacactcatcagtatgtggccagagcactatgacccctcacaatctcctcaactgtttcatgatgacacccattcaagaatagaacaatatgccacacgactggcccagatggaaaggactaatgggtcttttctcactgatagcagctccaccacaggaagtgtggaagacgagcacgccctcatccagcagtattgccaaacactcggaggagagtccccagtgagccagccgcagagcccagctcagatcctgaagtcagtagagagggaagaacgtggagaactggagaggatcattgctgacctggaggaagaacaaagaaatctacaggtggagtatgagcagctgaaggaccagcacctccgaagggggctccctgtcggttcaccgccagagtcgattatatctccccatcacacgtctgaggattcagaacttatagcagaagcaaaactcctcaggcagcacaaaggtcggctggaggctaggatgcagattttagaagatcacaataaacagctggagtctcagctccaccgcctccgacagctgctggagcagcctgaatctgattcccgaatcaatggtgtttccccatgggcttctcctcagcattctgcactgagctactcgcttgatccagatgcctccggcccacagttccaccaggcagcgggagaggacctgctggccccaccgcacgacaccagcacggatctcacggaggtcatggagcagattcacagcacgtttccatcttgctgcccaaatgttcccagcaggccacaggcaatgtgaagtattcatccggccaaccaatgtttcctgacgtacagtgttgcccttttcagcaaatgccaattccaagttccattaaatcagaagctccatggctccttggcccacgatgttgagtgctgactgtgtgttctactgaaagagtaaaacactgactatccaaagagaaatggatattttgtttttataataaccatatattattgttttcttcttccctttctatgcaagtgtaaattaatgaacagagaggtatttggaaatggtaatacatttgtcacggatttgtataatgtatacagcattgggaaagtgggtgggggctttctaatatgataccgtctttttaataactatgacaaagcttacataagaattagaagaccactttacatttttacattccttctgctgttcatattaaccttgcacaattacttcattttttctttgactcttttaccacaatgttttggttatttataatttatcagccatatgtttatcagccatataaccaactagatcccaaatagatccatgtatttgtttccgtgatttggccacattaataaattcataaatttcaatcaaatatcttatatatacacacatatggtttaagctacagccctgtgtatgccgtttaactttatttgacgttgcccacttacttctttgctgaccacttggataaccgtaataaaaatcctataagcctaaatggcatttcttttgggatatttttcctgcattttattccctttttatataagtaggaattaattatttattttatgtcttaatctatttgataaagaagactacattataataatctcaaagatcatattaccaaaggttgcccacttgagcatattttcattttgacacagaaacaaaatttagtacaacctttcctagttcccatgtcttgattttcatcattacatgcacagcagacctttacctattgtgataccagaacacatcattgtctttggttcccttcaaagagaattttattgttgttttgtattttcaagtccttaatagttcttgaaactcctagttgttttcttgttgaaagcagacacacatttagtgcacggcttattttacctttcgggtgaaagatcagatgtttttatacccttcacttgatcaatatatttggaaagaatgtttatcaaaagtctatgtcactgcttctacagaagaatgaaattaatgcttaggtgatggtacctccacctacatctttttgagtgcattcaattatgtattttggtttagcttctgatttaacatttaattgattcagtttaaacatgttacttaattagcaaatgtagaggaaccaaaaaaaggtgaaaataatatgttttgattcaaacctaaagacataaaaacataaagacattttaactttgggttctctttagctgggatctggccagaaggaggcttaaagttagaaattgctattattttagaataggttgggtgggttggggggcaagggtgtctatttgcagcagagatattttgaaaagaagaaaattgttttatataaaaaggaaagccatgaccacctttctacctcagatccatcttcatccattgcattggaaactgctttatgctgctgcagtctgcaaagtctagagcttttatcaggccatgtcatacccaagaaagcacctatttaaagaaaaaacaattccctgagctctcaactccaagttgtagatttggtgtcttccttgttcttactttaaaaagtcatgtgttaattttttttctgcctgtatttgtatgcaaaatgtcctctatctgctattaaagaaaagctacgtaaaacactacattgtaaccttctaagtaataataaataaaaagaaatatattgcagtaacaatgggaagtaagtatgtagttcttttgaaatatgtggtaaagaactaatcacagactatcatctaatctggttacatattgtatttttcatcctgaataaaagtaattttaacacaaaaaaactataaaacttcagctgg

SEQ ID NO: 322307 - DNA, 3370 bp, Homo sapiens
agcggagaagattatgaagcaacaacactagctacagtttaaatgaaggcatttcttcacttttaatatatttcttttttcaccagaataacaataaaccagaaataagtgtgaaagagtttatagattggatgcatttggaaccacagtccatggtttggctcccagttttacatcgagtggcagcagcggagactgcaaaacatcaggccaaatgcaacatctgtaaagaatgtccaattgtcgggttcaggtatagaagccttaagcattttaactatgatgtctgccagagttgtttcttttcgggtcgaacagcaaaaggtcacaaattacattacccaatggtggaatattgtatacctacaacatctggggaagatgtacgagacttcacaaaggtacttaagaacaagttcaggtcgaagaagtactttgccaaacaccctcgacttggttacctgcctgtccagacagttcttgaaggtgacaacttagagactcctatcacactcatcagtatgtggccagagcactatgacccctcacaatctcctcaactgtttcatgatgacacccattcaagaatagaacaatatgccacacgactggcccagatggaaaggactaatgggtcttttctcactgatagcagctccaccacaggaagtgtggaagacgagcacgccctcatccagcagtattgccaaacactcggaggagagtccccagtgagccagccgcagagcccagctcagatcctgaagtcagtagagagggaagaacgtggagaactggagaggatcattgctgacctggaggaagaacaaagaaatctacaggtggagtatgagcagctgaaggaccagcacctccgaagggggctccctgtcggttcaccgccagagtcgattatatctccccatcacacgtctgaggattcagaacttatagcagaagcaaaactcctcaggcagcacaaaggtcggctggaggctaggatgcagattttagaagatcacaataaacagctggagtctcagctccaccgcctccgacagctgctggagcagcctgaatctgattcccgaatcaatggtgtttccccatgggcttctcctcagcattctgcactgagctactcgcttgatccagatgcctccggcccacagttccaccaggcagcgggagaggacctgctggccccaccgcacgacaccagcacggatctcacggaggtcatggagcagattcacagcacgtttccatcttgctgcccaaatgttcccagcaggccacaggcaatgtgaagtattcatccggccaaccaatgtttcctgacgtacagtgttgcccttttcagcaaatgccaattccaagttccattaaatcagaagctccatggctccttggcccacgatgttgagtgctgactgtgtgttctactgaaagagtaaaacactgactatccaaagagaaatggatattttgtttttataataaccatatattattgttttcttcttccctttctatgcaagtgtaaattaatgaacagagaggtatttggaaatggtaatacatttgtcacggatttgtataatgtatacagcattgggaaagtgggtgggggctttctaatatgataccgtctttttaataactatgacaaagcttacataagaattagaagaccactttacatttttacattccttctgctgttcatattaaccttgcacaattacttcattttttctttgactcttttaccacaatgttttggttatttataatttatcagccatatgtttatcagccatataaccaactagatcccaaatagatccatgtatttgtttccgtgatttggccacattaataaattcataaatttcaatcaaatatcttatatatacacacatatggtttaagctacagccctgtgtatgccgtttaactttatttgacgttgcccacttacttctttgctgaccacttggataaccgtaataaaaatcctataagcctaaatggcatttcttttgggatatttttcctgcattttattccctttttatataagtaggaattaattatttattttatgtcttaatctatttgataaagaagactacattataataatctcaaagatcatattaccaaaggttgcccacttgagcatattttcattttgacacagaaacaaaatttagtacaacctttcctagttcccatgtcttgattttcatcattacatgcacagcagacctttacctattgtgataccagaacacatcattgtctttggttcccttcaaagagaattttattgttgttttgtattttcaagtccttaatagttcttgaaactcctagttgttttcttgttgaaagcagacacacatttagtgcacggcttattttacctttcgggtgaaagatcagatgtttttatacccttcacttgatcaatatatttggaaagaatgtttatcaaaagtctatgtcactgcttctacagaagaatgaaattaatgcttaggtgatggtacctccacctacatctttttgagtgcattcaattatgtattttggtttagcttctgatttaacatttaattgattcagtttaaacatgttacttaattagcaaatgtagaggaaccaaaaaaaggtgaaaataatatgttttgattcaaacctaaagacataaaaacataaagacattttaactttgggttctctttagctgggatctggccagaaggaggcttaaagttagaaattgctattattttagaataggttgggtgggttggggggcaagggtgtctatttgcagcagagatattttgaaaagaagaaaattgttttatataaaaaggaaagccatgaccacctttctacctcagatccatcttcatccattgcattggaaactgctttatgctgctgcagtctgcaaagtctagagcttttatcaggccatgtcatacccaagaaagcacctatttaaagaaaaaacaattccctgagctctcaactccaagttgtagatttggtgtcttccttgttcttactttaaaaagtcatgtgttaattttttttctgcctgtatttgtatgcaaaatgtcctctatctgctattaaagaaaagctacgtaaaacactacattgtaaccttctaagtaataataaataaaaagaaatatattgcagtaacaatgggaagtaagtatgtagttcttttgaaatatgtggtaaagaactaatcacagactatcatctaatctggttacatattgtatttttcatcctgaataaaagtaattttaacacaaaaaaactataaaacttcagctgg

SEQ ID NO: 322308 - DNA, 2898 bp, Homo sapiens
gacttttgtctccctctcccctctttgcagtcctatcacactcatcagtatgtggccagagcactatgacccctcacaatctcctcaactgtttcatgatgacacccattcaagaatagaacaatatgccacacgactggcccagatggaaaggactaatgggtcttttctcactgatagcagctccaccacaggaagtgtggaagacgagcacgccctcatccagcagtattgccaaacactcggaggagagtccccagtgagccagccgcagagcccagctcagatcctgaagtcagtagagagggaagaacgtggagaactggagaggatcattgctgacctggaggaagaacaaagaaatctacaggtggagtatgagcagctgaaggaccagcacctccgaagggggctccctgtcggttcaccgccagagtcgattatatctccccatcacacgtctgaggattcagaacttatagcagaagcaaaactcctcaggcagcacaaaggtcggctggaggctaggatgcagattttagaagatcacaataaacagctggagtctcagctccaccgcctccgacagctgctggagcagcctgaatctgattcccgaatcaatggtgtttccccatgggcttctcctcagcattctgcactgagctactcgcttgatccagatgcctccggcccacagttccaccaggcagcgggagaggacctgctggccccaccgcacgacaccagcacggatctcacggaggtcatggagcagattcacagcacgtttccatcttgctgcccaaatgttcccagcaggccacaggcaatgtgaagtattcatccggccaaccaatgtttcctgacgtacagtgttgcccttttcagcaaatgccaattccaagttccattaaatcagaagctccatggctccttggcccacgatgttgagtgctgactgtgtgttctactgaaagagtaaaacactgactatccaaagagaaatggatattttgtttttataataaccatatattattgttttcttcttccctttctatgcaagtgtaaattaatgaacagagaggtatttggaaatggtaatacatttgtcacggatttgtataatgtatacagcattgggaaagtgggtgggggctttctaatatgataccgtctttttaataactatgacaaagcttacataagaattagaagaccactttacatttttacattccttctgctgttcatattaaccttgcacaattacttcattttttctttgactcttttaccacaatgttttggttatttataatttatcagccatatgtttatcagccatataaccaactagatcccaaatagatccatgtatttgtttccgtgatttggccacattaataaattcataaatttcaatcaaatatcttatatatacacacatatggtttaagctacagccctgtgtatgccgtttaactttatttgacgttgcccacttacttctttgctgaccacttggataaccgtaataaaaatcctataagcctaaatggcatttcttttgggatatttttcctgcattttattccctttttatataagtaggaattaattatttattttatgtcttaatctatttgataaagaagactacattataataatctcaaagatcatattaccaaaggttgcccacttgagcatattttcattttgacacagaaacaaaatttagtacaacctttcctagttcccatgtcttgattttcatcattacatgcacagcagacctttacctattgtgataccagaacacatcattgtctttggttcccttcaaagagaattttattgttgttttgtattttcaagtccttaatagttcttgaaactcctagttgttttcttgttgaaagcagacacacatttagtgcacggcttattttacctttcgggtgaaagatcagatgtttttatacccttcacttgatcaatatatttggaaagaatgtttatcaaaagtctatgtcactgcttctacagaagaatgaaattaatgcttaggtgatggtacctccacctacatctttttgagtgcattcaattatgtattttggtttagcttctgatttaacatttaattgattcagtttaaacatgttacttaattagcaaatgtagaggaaccaaaaaaaggtgaaaataatatgttttgattcaaacctaaagacataaaaacataaagacattttaactttgggttctctttagctgggatctggccagaaggaggcttaaagttagaaattgctattattttagaataggttgggtgggttggggggcaagggtgtctatttgcagcagagatattttgaaaagaagaaaattgttttatataaaaaggaaagccatgaccacctttctacctcagatccatcttcatccattgcattggaaactgctttatgctgctgcagtctgcaaagtctagagcttttatcaggccatgtcatacccaagaaagcacctatttaaagaaaaaacaattccctgagctctcaactccaagttgtagatttggtgtcttccttgttcttactttaaaaagtcatgtgttaattttttttctgcctgtatttgtatgcaaaatgtcctctatctgctattaaagaaaagctacgtaaaacactacattgtaaccttctaagtaataataaataaaaagaaatatattgcagtaacaatgggaagtaagtatgtagttcttttgaaatatgtggtaaagaactaatcacagactatcatctaatctggttacatattgtatttttcatcctgaataaaagtaattttaacacaaaaaaactataaaacttcagctgg

SEQ ID NO: 322309 - DNA, 9417 bp, Homo sapiens
cagatgtaggtgatgagcggcctggcagccaccacgtttcattggaaaaagtgcagattggatttgccagggcatgtagctctccaggcttgcaagcgattaccagatgaacacaatgacgtacagaagaaaacctttaccaaatggataaatgctcgattttcaaagagtgggaaaccacccatcaatgatatgttcacagacctcaaagatggaaggaagctattggatcttctagaaggcctcacaggaacatcactgccaaaggaacgtggttccacaagggtacatgccttaaataacgtcaacagagtgctgcaggttttacatcagaacaatgtggaattagtgaatatagggggaactgacattgtggatggaaatcacaaactgactttggggttactttggagcatcattttgcactggcaggtgaaagatgtcatgaaggatgtcatgtcggacctgcagcagacgaacagtgagaagatcctgctcagctgggtgcgtcagaccaccaggccctacagccaagtcaacgtcctcaacttcaccaccagctggacagatggactcgcctttaatgctgtcctccaccgacataaacctgatctcttcagctgggataaagttgtcaaaatgtcaccaattgagagacttgaacatgccttcagcaaggctcaaacttatttgggaattgaaaagctgttagatcctgaagatgttgccgttcagcttcctgacaagaaatccataattatgtatttaacatctttgtttgaggtgctacctcagcaagtcaccatagacgccatccgtgaggtagagacactcccaaggaaatataaaaaagaatgtgaagaagaggcaattaatatacagagtacagcgcctgaggaggagcatgagagtccccgagctgaaactcccagcactgtcactgaggtcgacatggatctggacagctatcagattgcgttggaggaagtgctgacctggttgctttctgctgaggacactttccaggagcaggatgatatttctgatgatgttgaagaagtcaaagaccagtttgcaacccatgaagcttttatgatggaactgactgcacaccagagcagtgtgggcagcgtcctgcaggcaggcaaccaactgataacacaaggaactctgtcagacgaagaagaatttgagattcaggaacagatgaccctgctgaatgctagatgggaggctcttagggtggagagtatggacagacagtcccggctgcacgatgtgctgatggaactgcagaagaagcaactgcagcagctctccgcctggttaacactcacagaggagcgcattcagaagatggaaacttgccccctggatgatgatgtaaaatctctacaaaagctgctagaagaacataaaagtttgcaaagtgatcttgaggctgaacaggtgaaagtaaattcactaactcacatggtggtcattgttgatgaaaacagtggtgagagtgctacagctatcctagaagaccagttacagaaacttggtgagcgctggacagcagtatgccgttggactgaagaacgctggaataggttacaagaaatcaatatattgtggcaggaattattggaagaacagtgcttgttgaaagcttggttaaccgaaaaagaagaggctttaaataaagtccagacaagcaacttcaaagaccaaaaggaactaagtgtcagtgttcgacgtctggctattttgaaggaagacatggaaatgaagcgtcaaacattggatcagctgagtgagattggccaggatgtgggacaattacttgataattccaaggcatctaagaagatcaacagtgactcagaggaactgactcaaagatgggattctttggttcagagactagaagattcctccaaccaggtgactcaggctgtagcaaagctggggatgtctcagattcctcagaaggaccttttggagactgttcgtgtaagagaacaagcaattacaaaaaaatctaagcaggaactgcctcctcctcctcccccaaagaagagacagatccatgtggatattgaagctaagaaaaagtttgatgctataagtgcagagctgttgaactggattttgaaatggaaaactgccattcagaccacagagataaaagagtatatgaagatgcaagacacttccgaaatgaaaaagaagttgaaggcattagaaaaagaacagagagaaagaatccccagagcagatgaattaaaccaaactggacaaatccttgtggagcaaatgggaaaagaaggccttcctactgaagaaataaaaaatgttctggagaaggtttcatcagaatggaagaatgtatctcaacatttggaagatctagaaagaaagattcagctacaggaagatataaatgcttatttcaagcagcttgatgagcttgaaaaggtcatcaagacaaaggaggagtgggtaaaacacacttccatttctgaatcttcccggcagtccttgccaagcttgaaggattcctgtcagcgggaattgacaaatcttcttggccttcaccccaaaattgaaatggctcgtgcaagctgctcggccctgatgtctcagccttctgccccagattttgtccagcggggcttcgatagctttctgggccgctaccaagctgtacaagaggctgtagaggatcgtcaacaacatctagagaatgaactgaagggccaacctggacatgcatatctggaaacattgaaaacactgaaagatgtgctaaatgattcagaaaataaggcccaggtgtctctgaatgtccttaatgatcttgccaaggtggagaaggccctgcaagaaaaaaagacccttgatgaaatccttgagaatcagaaacctgcattacataaacttgcagaagaaacaaaggctctggagaaaaatgttcatcctgatgtagaaaaattatataagcaagaatttgatgatgtgcaaggaaagtggaacaagctaaaggtcttggtttccaaagatctacatttgcttgaggaaattgctctcacactcagagcttttgaggccgattcaacagtcattgagaagtggatggatggcgtgaaagacttcttaatgaaacagcaggctgcccaaggagacgacgcaggtctacagaggcagttagaccagtgctctgcatttgttaatgaaatagaaacaattgaatcatctctgaaaaacatgaaggaaatagagactaatcttcgaagtggtccagttgctggaataaaaacttgggtgcagacaagactaggtgactaccaaactcaactggagaaacttagcaaggagatcgctactcaaaaaagtaggttgtctgaaagtcaagaaaaagctgcgaacctgaagaaagacttggcagagatgcaggaatggatgacccaggccgaggaagaatatttggagcgggattttgagtacaagtcaccagaagagcttgagagtgctgtggaagagatgaagagggcaaaagaggatgtgttgcagaaggaggtgagagtgaagattctcaaggacaacatcaagttattagctgccaaggtgccctctggtggccaggagttgacgtctgagctgaatgttgtgctggagaattaccaacttctttgtaatagaattcgaggaaagtgccacacgctagaggaggtctggtcttgttggattgaactgcttcactatttggatcttgaaactacctggttaaacactttggaagagcggatgaagagcacagaggtcctgcctgagaagacggatgctgtcaacgaagccctggagtctctggaatctgttctgcgccacccggcagataatcgcacccagattcgagagcttggccagactctgattgatggggggatcctggatgatataatcagtgagaaactggaggctttcaacagccgatatgaagatctaagtcacctggcagagagcaagcagatttctttggaaaagcaactccaggtgctgcgggaaactgaccagatgcttcaagtcttgcaagagagcttgggggagctggacaaacagctcaccacatacctgactgacaggatagatgctttccaagttccacaggaagctcagaaaatccaagcagagatctcagcccatgagctaaccctagaggagttgagaagaaatatgcgttctcagcccctgacctccccagagagtaggactgccagaggaggaagtcagatggatgtgctacagaggaaactccgagaggtgtccacaaagttccagcttttccagaagccagctaacttcgagcagcgcatgctggactgcaagcgtgtgctggatggcgtgaaagcagaacttcacgttctggatgtgaaggacgtagaccctgacgtcatacagacgcacctggacaagtgtatgaaactgtataaaactttgagtgaagtcaaacttgaagtggaaactgtgattaaaacaggaagacatattgtccagaaacagcaaacggacaacccaaaagggatggatgagcagctgacttccctgaaggttctttacaatgacctgggcgcacaggtgacagaaggaaaacaggatctggaaagagcatcacagttggcccggaaaatgaagaaagaggctgcttctctctctgaatggctttctgctactgaaactgaattggtacagaagtccacttcagaaggtctgcttggtgacttggatacagaaatttcctgggctaaaaatgttctgaaggatctggaaaagagaaaagctgatttaaataccatcacagagagtagtgctgccctgcaaaacttgattgagggcagtgagcctattttagaagagaggctctgcgtccttaacgctgggtggagccgagttcgtacctggactgaagattggtgcaataccttgatgaaccatcagaaccagctagaaatatttgatgggaacgtggctcacataagtacctggctttatcaagctgaagctctattggatgaaattgaaaagaaaccaacaagtaaacaggaagaaattgtgaagcgtttagtatctgagctggatgatgccaacctccaggttgaaaatgtccgcgatcaagcccttattttgatgaatgcccgtggaagctcaagcagggagcttgtagaaccaaagttagctgagctgaataggaactttgaaaaggtgtctcaacatatcaaaagtgccaaattgctaattgctcaggaaccattataccaatgtttggtcaccactgaaacatttgaaactggtgtgcctttctctgacttggaaaaattagaaaatgacatagaaaatatgttaaaatttgtggaaaaacacttggaatccagtgatgaagatgaaaagatggatgaggagagtgcccagattgaggaagttctacaaagaggagaagaaatgttacatcaacctatggaagataataaaaaagaaaagatccgtttgcaattattacttttgcatactagatacaacaaaattaaggcaatccctattcaacagaggaaaatgggtcaacttgcttctggaattagatcatcacttcttcctacagattatctggttgaaattaacaaaattttactttgcatggatgatgttgaattatcgcttaatgttccagagctcaacactgctatttacgaagacttctcttttcaggaagactctctgaagaatatcaaagaccaactggacaaacttggagagcagattgcagtcattcatgaaaaacagccagatgtcatccttgaagcctctggacctgaagccattcagatcagagatacacttactcagctgaatgcaaaatgggacagaattaatagaatgtacagtgatcggaaaggttgttttgacagggcaatggaagaatggagacagttccattgtgaccttaatgacctcacacagtggataacagaggctgaagaattactggttgatacctgtgctccaggtggcagcctggacttagagaaagccaggatacatcagcaggaacttgaggtgggcatcagcagccaccagcccagttttgcagcactaaaccgaactggggatgggattgtgcagaaactctcccaggcagatggaagcttcttgaaagaaaaactggcaggtttaaaccaacgctgggatgcaattgttgcagaagtgaaggataggcagccaaggctaaaaggagaaagtaagcaggtgatgaagtacaggcatcagctagatgagattatctgttggttaacaaaggctgagcatgctatgcaaaagagatcaaccaccgaattgggagaaaacctgcaagaattaagagacttaactcaagaaatggaagtacatgctgaaaaactcaaatggctgaatagaactgaattggagatgctttcagataaaagtctgagtttacctgaaagggataaaatttcagaaagcttaaggactgtaaatatgacatggaataagatttgcagagaggtgcctaccaccctgaaggaatgcatccaggagcccagttctgtttcacagacaaggattgctgctcatcctaatgtccaaaaggtggtgctagtatcatctgcgtcagatattcctgttcagtctcatcgtacttcggaaatttcaattcctgctgatcttgataaaactataacagaactagccgactggctggtattaatcgaccagatgctgaagtccaacattgtcactgttggggatgtagaagagatcaataagaccgtttcccgaatgaaaattacaaaggctgacttagaacagcgccatcctcagctggattatgtttttacatgggcacagaaattgaaaaataaagcttccagttcagatatgagaacagcaattacagaaaaattggaaagggtcaagaaccagtgggatggcacccagcatggcgttgagctaagacagcagcagcttgaggacatgattattgacagtcttcagtgggatgaccatagggaggagactgaagaactgatgagaaaatatgaggctcgactctatattcttcagcaagcccgacgggatccactcaccaaacaaatttctgtgcccaatactgcttcaagaactgggtcctggagatggtatcgtcatggcgttcgataacgtcctgcagaaactcctggaggaatatgggagtgatgacacaaggaatgtgaaagaaaccacagagtacttaaaaacatcatggatcaatctcaaacaaagtattgctgacagacagaacgccttggaggctgagtggaggacggtgcaggcctctcgcagagatctggaaaacttcctgaagtggatccaagaagcagagaccacagtgaatgtgcttgtggatgcctctcatcgggagaatgctcttcaggatagtatcttggccagggaactcaaacagcagatgcaggacatccaggcagaaattgatgcccacaatgacatatttaaaagcattgacggaaacaggcagaagatggtaaaagctttgggaaattctgaagaggctactatgcttcaacatcgactggatgatatgaaccaaagatggaatgacttaaaagcaaaatctgctagcatcagggcccatttggaggccagcgctgagaagtggaacaggttgctgatgtccttagaagaactgatcaaatggctgaatatgaaagatgaagagcttaagaaacaaatgcctattggaggagatgttccagccttacagctccagtatgaccattgtaaggccctgagacgggagttaaaggagaaagaatattctgtcctgaatgctgtcgaccaggcccgagttttcttggctgatcagccaattgaggcccctgaagagccaagaagaaacctacaatcaaaaacagaattaactcctgaggagagagcccaaaagattgccaaagccatgcgcaaacagtcttctgaagtcaaagaaaaatgggaaagtctaaatgctgtaactagcaattggcaaaagcaagtggacaaggcattggagaaactcagagacctgcagggagctatggatgacctggacgctgacatgaaggaggcagagtccgtgcggaatggctggaagcccgtgggagacttactcattgactcgctgcaggatcacattgaaaaaatcatggcatttagagaagaaattgcaccaatcaactttaaagttaaaacggtgaatgatttatccagtcagctgtctccacttgacctgcatccctctctaaagatgtctcgccagctagatgaccttaatatgcgatggaaacttttacaggtttctgtggatgatcgccttaaacagcttcaggaagcccacagagattttggaccatcctctcagcattttctctctacgtcagtccagctgccgtggcaaagatccatttcacataataaagtgccctattacatcaaccatcaaacacagaccacctgttgggaccatcctaaaatgaccgaactctttcaatcccttgctgacctgaataatgtacgtttttctgcctaccgtacagcaatcaaaatccgaagactacaaaaagcactatgtttggatctcttagagttgagtacaacaaatgaaattttcaaacagcacaagttgaaccaaaatgaccagctcctcagtgttccagatgtcatcaactgtctgacaacaacttatgatggacttgagcaaatgcataaggacctggtcaacgttccactctgtgttgatatgtgtctcaattggttgctcaatgtctatgacacgggtcgaactggaaaaattagagtgcagagtctgaagattggattaatgtctctctccaaaggtctcttggaagaaaaatacagatatctctttaaggaagttgcagggccaacagaaatgtgtgaccagaggcagctgggcctgttacttcatgatgccatccagatcccccggcagctaggtgaagtagcagcttttggaggcagtaatattgagcctagtgttcgcagctgcttccaacaggtaagcatgaaggatcactggtgtgtaggatgtgttggcgaagggttttgaggatgttctgagacatggaatagggaactcgggctggagccaaatactggaagactttgggtaccatccaacaagtggtgtattttatttcctaaggctcatttgcttcaaaaaatagcaacccttgcaaagagacttgctgtttttctttgataaaatctacaatctttaacctgtgccattagattgctgtttgtcctgcccttttcctggcctcatctcctaccattcctctccttgctctccgctttccagctgcactg

SEQ ID NO: 322310 - DNA, 8841 bp, Homo sapiens
cagatgtaggtgatgagcggcctggcagccaccacgtttcattggaaaaagtgcagattggatttgccagggcatgtagctctccaggcttgcaagcgattaccagatgaacacaatgacgtacagaagaaaacctttaccaaatggataaatgctcgattttcaaagagtgggaaaccacccatcaatgatatgttcacagacctcaaagatggaaggaagctattggatcttctagaaggcctcacaggaacatcactgccaaaggaacgtggttccacaagggtacatgccttaaataacgtcaacagagtgctgcaggttttacatcagaacaatgtggaattagtgaatatagggggaactgacattgtggatggaaatcacaaactgactttggggttactttggagcatcattttgcactggcaggtgaaagatgtcatgaaggatgtcatgtcggacctgcagcagacgaacagtgagaagatcctgctcagctgggtgcgtcagaccaccaggccctacagccaagtcaacgtcctcaacttcaccaccagctggacagatggactcgcctttaatgctgtcctccaccgacataaacctgatctcttcagctgggataaagttgtcaaaatgtcaccaattgagagacttgaacatgccttcagcaaggctcaaacttatttgggaattgaaaagctgttagatcctgaagatgttgccgttcagcttcctgacaagaaatccataattatgtatttaacatctttgtttgaggtgctacctcagcaagtcaccatagacgccatccgtgaggtagagacactcccaaggaaatataaaaaagaatgtgaagaagaggcaattaatatacagagtacagcgcctgaggaggagcatgagagtccccgagctgaaactcccagcactgtcactgaggtcgacatggatctggacagctatcagattgcgttggaggaagtgctgacctggttgctttctgctgaggacactttccaggagcaggatgatatttctgatgatgttgaagaagtcaaagaccagtttgcaacccatgaagcttttatgatggaactgactgcacaccagagcagtgtgggcagcgtcctgcaggcaggcaaccaactgataacacaaggaactctgtcagacgaagaagaatttgagattcaggaacagatgaccctgctgaatgctagatgggaggctcttagggtggagagtatggacagacagtcccggctgcacgatgtgctgatggaactgcagaagaagcaactgcagcagctctccgcctggttaacactcacagaggagcgcattcagaagatggaaacttgccccctggatgatgatgtaaaatctctacaaaagctgctagaagaacataaaagtttgcaaagtgatcttgaggctgaacaggtgaaagtaaattcactaactcacatggtggtcattgttgatgaaaacagtggtgagagtgctacagctatcctagaagaccagttacagaaacttggtgagcgctggacagcagtatgccgttggactgaagaacgctggaataggttacaagaaatcaatatattgtggcaggaattattggaagaacagtgcttgttgaaagcttggttaaccgaaaaagaagaggctttaaataaagtccagacaagcaacttcaaagaccaaaaggaactaagtgtcagtgttcgacgtctggctattttgaaggaagacatggaaatgaagcgtcaaacattggatcagctgagtgagattggccaggatgtgggacaattacttgataattccaaggcatctaagaagatcaacagtgactcagaggaactgactcaaagatgggattctttggttcagagactagaagattcctccaaccaggtgactcaggctgtagcaaagctggggatgtctcagattcctcagaaggaccttttggagactgttcgtgtaagagaacaagcaattacaaaaaaatctaagcaggaactgcctcctcctcctcccccaaagaagagacagatccatgtggatattgaagctaagaaaaagtttgatgctataagtgcagagctgttgaactggattttgaaatggaaaactgccattcagaccacagagataaaagagtatatgaagatgcaagacacttccgaaatgaaaaagaagttgaaggcattagaaaaagaacagagagaaagaatccccagagcagatgaattaaaccaaactggacaaatccttgtggagcaaatgggaaaagaaggccttcctactgaagaaataaaaaatgttctggagaaggtttcatcagaatggaagaatgtatctcaacatttggaagatctagaaagaaagattcagctacaggaagatataaatgcttatttcaagcagcttgatgagcttgaaaaggtcatcaagacaaaggaggagtgggtaaaacacacttccatttctgaatcttcccggcagtccttgccaagcttgaaggattcctgtcagcgggaattgacaaatcttcttggccttcaccccaaaattgaaatggctcgtgcaagctgctcggccctgatgtctcagccttctgccccagattttgtccagcggggcttcgatagctttctgggccgctaccaagctgtacaagaggctgtagaggatcgtcaacaacatctagagaatgaactgaagggccaacctggacatgcatatctggaaacattgaaaacactgaaagatgtgctaaatgattcagaaaataaggcccaggtgtctctgaatgtccttaatgatcttgccaaggtggagaaggccctgcaagaaaaaaagacccttgatgaaatccttgagaatcagaaacctgcattacataaacttgcagaagaaacaaaggctctggagaaaaatgttcatcctgatgtagaaaaattatataagcaagaatttgatgatgtgcaaggaaagtggaacaagctaaaggtcttggtttccaaagatctacatttgcttgaggaaattgctctcacactcagagcttttgaggccgattcaacagtcattgagaagtggatggatggcgtgaaagacttcttaatgaaacagcaggctgcccaaggagacgacgcaggtctacagaggcagttagaccagtgctctgcatttgttaatgaaatagaaacaattgaatcatctctgaaaaacatgaaggaaatagagactaatcttcgaagtggtccagttgctggaataaaaacttgggtgcagacaagactaggtgactaccaaactcaactggagaaacttagcaaggagatcgctactcaaaaaagtaggttgtctgaaagtcaagaaaaagctgcgaacctgaagaaagacttggcagagatgcaggaatggatgacccaggccgaggaagaatatttggagcgggattttgagtacaagtcaccagaagagcttgagagtgctgtggaagagatgaagagggcaaaagaggatgtgttgcagaaggaggtgagagtgaagattctcaaggacaacatcaagttattagctgccaaggtgccctctggtggccaggagttgacgtctgagctgaatgttgtgctggagaattaccaacttctttgtaatagaattcgaggaaagtgccacacgctagaggaggtctggtcttgttggattgaactgcttcactatttggatcttgaaactacctggttaaacactttggaagagcggatgaagagcacagaggtcctgcctgagaagacggatgctgtcaacgaagccctggagtctctggaatctgttctgcgccacccggcagataatcgcacccagattcgagagcttggccagactctgattgatggggggatcctggatgatataatcagtgagaaactggaggctttcaacagccgatatgaagatctaagtcacctggcagagagcaagcagatttctttggaaaagcaactccaggtgctgcgggaaactgaccagatgcttcaagtcttgcaagagagcttgggggagctggacaaacagctcaccacatacctgactgacaggatagatgctttccaagttccacaggaagctcagaaaatccaagcagagatctcagcccatgagctaaccctagaggagttgagaagaaatatgcgttctcagcccctgacctccccagagagtaggactgccagaggaggaagtcagatggatgtgctacagaggaaactccgagaggtgtccacaaagttccagcttttccagaagccagctaacttcgagcagcgcatgctggactgcaagcgtgtgctggatggcgtgaaagcagaacttcacgttctggatgtgaaggacgtagaccctgacgtcatacagacgcacctggacaagtgtatgaaactgtataaaactttgagtgaagtcaaacttgaagtggaaactgtgattaaaacaggaagacatattgtccagaaacagcaaacggacaacccaaaagggatggatgagcagctgacttccctgaaggttctttacaatgacctgggcgcacaggtgacagaaggaaaacaggatctggaaagagcatcacagttggcccggaaaatgaagaaagaggctgcttctctctctgaatggctttctgctactgaaactgaattggtacagaagtccacttcagaaggtctgcttggtgacttggatacagaaatttcctgggctaaaaatgttctgaaggatctggaaaagagaaaagctgatttaaataccatcacagagagtagtgctgccctgcaaaacttgattgagggcagtgagcctattttagaagagaggctctgcgtccttaacgctgggtggagccgagttcgtacctggactgaagattggtgcaataccttgatgaaccatcagaaccagctagaaatatttgatgggaacgtggctcacataagtacctggctttatcaagctgaagctctattggatgaaattgaaaagaaaccaacaagtaaacaggaagaaattgtgaagcgtttagtatctgagctggatgatgccaacctccaggttgaaaatgtccgcgatcaagcccttattttgatgaatgcccgtggaagctcaagcagggagcttgtagaaccaaagttagctgagctgaataggaactttgaaaaggtgtctcaacatatcaaaagtgccaaattgctaattgctcaggaaccattataccaatgtttggtcaccactgaaacatttgaaactggtgtgcctttctctgacttggaaaaattagaaaatgacatagaaaatatgttaaaatttgtggaaaaacacttggaatccagtgatgaagatgaaaagatggatgaggagagtgcccagattgaggaagttctacaaagaggagaagaaatgttacatcaacctatggaagataataaaaaagaaaagatccgtttgcaattattacttttgcatactagatacaacaaaattaaggcaatccctattcaacagaggaaaatgggtcaacttgcttctggaattagatcatcacttcttcctacagattatctggttgaaattaacaaaattttactttgcatggatgatgttgaattatcgcttaatgttccagagctcaacactgctatttacgaagacttctcttttcaggaagactctctgaagaatatcaaagaccaactggacaaacttggagagcagattgcagtcattcatgaaaaacagccagatgtcatccttgaagcctctggacctgaagccattcagatcagagatacacttactcagctgaatgcaaaatgggacagaattaatagaatgtacagtgatcggaaaggttgttttgacagggcaatggaagaatggagacagttccattgtgaccttaatgacctcacacagtggataacagaggctgaagaattactggttgatacctgtgctccaggtggcagcctggacttagagaaagccaggatacatcagcaggaacttgaggtgggcatcagcagccaccagcccagttttgcagcactaaaccgaactggggatgggattgtgcagaaactctcccaggcagatggaagcttcttgaaagaaaaactggcaggtttaaaccaacgctgggatgcaattgttgcagaagtgaaggataggcagccaaggctaaaaggagaaagtaagcaggtgatgaagtacaggcatcagctagatgagattatctgttggttaacaaaggctgagcatgctatgcaaaagagatcaaccaccgaattgggagaaaacctgcaagaattaagagacttaactcaagaaatggaagtacatgctgaaaaactcaaatggctgaatagaactgaattggagatgctttcagataaaagtctgagtttacctgaaagggataaaatttcagaaagcttaaggactgtaaatatgacatggaataagatttgcagagaggtgcctaccaccctgaaggaatgcatccaggagcccagttctgtttcacagacaaggattgctgctcatcctaatgtccaaaaggtggtgctagtatcatctgcgtcagatattcctgttcagtctcatcgtacttcggaaatttcaattcctgctgatcttgataaaactataacagaactagccgactggctggtattaatcgaccagatgctgaagtccaacattgtcactgttggggatgtagaagagatcaataagaccgtttcccgaatgaaaattacaaaggctgacttagaacagcgccatcctcagctggattatgtttttacatgggcacagaaattgaaaaataaagcttccagttcagatatgagaacagcaattacagaaaaattggaaagggtcaagaaccagtgggatggcacccagcatggcgttgagctaagacagcagcagcttgaggacatgattattgacagtcttcagtgggatgaccatagggaggagactgaagaactgatgagaaaatatgaggctcgactctatattcttcagcaagcccgacgggatccactcaccaaacaaatttctgtgcccaatactgcttcaagaactgggtcctggagatggtatcgtcatggcgttcgataacgtcctgcagaaactcctggaggaatatgggagtgatgacacaaggaatgtgaaagaaaccacagagtacttaaaaacatcatggatcaatctcaaacaaagtattgctgacagacagaacgccttggaggctgagtggaggacggtgcaggcctctcgcagagatctggaaaacttcctgaagtggatccaagaagcagagaccacagtgaatgtgcttgtggatgcctctcatcgggagaatgctcttcaggatagtatcttggccagggaactcaaacagcagatgcaggacatccaggcagaaattgatgcccacaatgacatatttaaaagcattgacggaaacaggcagaagatggtaaaagctttgggaaattctgaagaggctactatgcttcaacatcgactggatgatatgaaccaaagatggaatgacttaaaagcaaaatctgctagcatcagggcccatttggaggccagcgctgagaagtggaacaggttgctgatgtccttagaagaactgatcaaatggctgaatatgaaagatgaagagcttaagaaacaaatgcctattggaggagatgttccagccttacagctccagtatgaccattgtaaggccctgagacgggagttaaaggagaaagaatattctgtcctgaatgctgtcgaccaggcccgagttttcttggctgatcagccaattgaggcccctgaagagccaagaagaaacctacaatcaaaaacagaattaactcctgaggagagagcccaaaagattgccaaagccatgcgcaaacagtcttctgaagtcaaagaaaaatgggaaagtctaaatgctgtaactagcaattggcaaaagcaagtggacaaggcattggagaaactcagagacctgcagggagctatggatgacctggacgctgacatgaaggaggcagagtccgtgcggaatggctggaagcccgtgggagacttactcattgactcgctgcaggatcacattgaaaaaatcatggcatttagagaagaaattgcaccaatcaactttaaagttaaaacggtgaatgatttatccagtcagctgtctccacttgacctgcatccctctctaaagatgtctcgccagctagatgaccttaatatgcgatggaaacttttacaggtttctgtggatgatcgccttaaacagcttcaggaagcccacagagattttggaccatcctctcagcattttctctctacgtcagtccagctgccgtggcaaagatccatttcacataataaagtgccctattacatcaagtaagttgattttaattctcctttatgataccaagaaaatcatgttttattgataacttaagaggcttctctccccataacttttaaaaatagaattcagtcctattatctgaaagaaactgtgatatagttaatattaaaaagaaactacttttaacatgagaattatatttttcatgtatcagattagggatataggtgtgtttagctgatatattttaaagtagagatttaaatatttggagacagacaataagctatgatggccatactgtattccagcctggacaacaaagcaagatccagtctctaaaaagtaaa

SEQ ID NO: 322311 - DNA, 6541 bp, Homo sapiens
cagatgtaggtgatgagcggcctggcagccaccacgtttcattggaaaaagtgcagattggatttgccagggcatgtagctctccaggcttgcaagcgattaccagatgaacacaatgacgtacagaagaaaacctttaccaaatggataaatgctcgattttcaaagagtgggaaaccacccatcaatgatatgttcacagacctcaaagatggaaggaagctattggatcttctagaaggcctcacaggaacatcactgccaaaggaacgtggttccacaagggtacatgccttaaataacgtcaacagagtgctgcaggttttacatcagaacaatgtggaattagtgaatatagggggaactgacattgtggatggaaatcacaaactgactttggggttactttggagcatcattttgcactggcaggtgaaagatgtcatgaaggatgtcatgtcggacctgcagcagacgaacagtgagaagatcctgctcagctgggtgcgtcagaccaccaggccctacagccaagtcaacgtcctcaacttcaccaccagctggacagatggactcgcctttaatgctgtcctccaccgacataaacctgatctcttcagctgggataaagttgtcaaaatgtcaccaattgagagacttgaacatgccttcagcaaggctcaaacttatttgggaattgaaaagctgttagatcctgaagatgttgccgttcagcttcctgacaagaaatccataattatgtatttaacatctttgtttgaggtgctacctcagcaagtcaccatagacgccatccgtgaggtagagacactcccaaggaaatataaaaaagaatgtgaagaagaggcaattaatatacagagtacagcgcctgaggaggagcatgagagtccccgagctgaaactcccagcactgtcactgaggtcgacatggatctggacagctatcagattgcgttggaggaagtgctgacctggttgctttctgctgaggacactttccaggagcaggatgatatttctgatgatgttgaagaagtcaaagaccagtttgcaacccatgaagcttttatgatggaactgactgcacaccagagcagtgtgggcagcgtcctgcaggcaggcaaccaactgataacacaaggaactctgtcagacgaagaagaatttgagattcaggaacagatgaccctgctgaatgctagatgggaggctcttagggtggagagtatggacagacagtcccggctgcacgatgtgctgatggaactgcagaagaagcaactgcagcagctctccgcctggttaacactcacagaggagcgcattcagaagatggaaacttgccccctggatgatgatgtaaaatctctacaaaagctgctagaagaacataaaagtttgcaaagtgatcttgaggctgaacaggtgaaagtaaattcactaactcacatggtggtcattgttgatgaaaacagtggtgagagtgctacagctatcctagaagaccagttacagaaacttggtgagcgctggacagcagtatgccgttggactgaagaacgctggaataggttacaagaaatcaatatattgtggcaggaattattggaagaacagtgcttgttgaaagcttggttaaccgaaaaagaagaggctttaaataaagtccagacaagcaacttcaaagaccaaaaggaactaagtgtcagtgttcgacgtctggctattttgaaggaagacatggaaatgaagcgtcaaacattggatcagctgagtgagattggccaggatgtgggacaattacttgataattccaaggcatctaagaagatcaacagtgactcagaggaactgactcaaagatgggattctttggttcagagactagaagattcctccaaccaggtgactcaggctgtagcaaagctggggatgtctcagattcctcagaaggaccttttggagactgttcgtgtaagagaacaagcaattacaaaaaaatctaagcaggaactgcctcctcctcctcccccaaagaagagacagatccatgtggatattgaagctaagaaaaagtttgatgctataagtgcagagctgttgaactggattttgaaatggaaaactgccattcagaccacagagataaaagagtatatgaagatgcaagacacttccgaaatgaaaaagaagttgaaggcattagaaaaagaacagagagaaagaatccccagagcagatgaattaaaccaaactggacaaatccttgtggagcaaatgggaaaagaaggccttcctactgaagaaataaaaaatgttctggagaaggtttcatcagaatggaagaatgtatctcaacatttggaagatctagaaagaaagattcagctacaggaagatataaatgcttatttcaagcagcttgatgagcttgaaaaggtcatcaagacaaaggaggagtgggtaaaacacacttccatttctgaatcttcccggcagtccttgccaagcttgaaggattcctgtcagcgggaattgacaaatcttcttggccttcaccccaaaattgaaatggctcgtgcaagctgctcggccctgatgtctcagccttctgccccagattttgtccagcggggcttcgatagctttctgggccgctaccaagctgtacaagaggctgtagaggatcgtcaacaacatctagagaatgaactgaagggccaacctggacatgcatatctggaaacattgaaaacactgaaagatgtgctaaatgattcagaaaataaggcccaggtgtctctgaatgtccttaatgatcttgccaaggtggagaaggccctgcaagaaaaaaagacccttgatgaaatccttgagaatcagaaacctgcattacataaacttgcagaagaaacaaaggctctggagaaaaatgttcatcctgatgtagaaaaattatataagcaagaatttgatgatgtgcaaggaaagtggaacaagctaaaggtcttggtttccaaagatctacatttgcttgaggaaattgctctcacactcagagcttttgaggccgattcaacagtcattgagaagtggatggatggcgtgaaagacttcttaatgaaacagcaggctgcccaaggagacgacgcaggtctacagaggcagttagaccagtgctctgcatttgttaatgaaatagaaacaattgaatcatctctgaaaaacatgaaggaaatagagactaatcttcgaagtggtccagttgctggaataaaaacttgggtgcagacaagactaggtgactaccaaactcaactggagaaacttagcaaggagatcgctactcaaaaaagtaggttgtctgaaagtcaagaaaaagctgcgaacctgaagaaagacttggcagagatgcaggaatggatgacccaggccgaggaagaatatttggagcgggattttgagtacaagtcaccagaagagcttgagagtgctgtggaagagatgaagagggcaaaagaggatgtgttgcagaaggaggtgagagtgaagattctcaaggacaacatcaagttattagctgccaaggtgccctctggtggccaggagttgacgtctgagctgaatgttgtgctggagaattaccaacttctttgtaatagaattcgaggaaagtgccacacgctagaggaggtctggtcttgttggattgaactgcttcactatttggatcttgaaactacctggttaaacactttggaagagcggatgaagagcacagaggtcctgcctgagaagacggatgctgtcaacgaagccctggagtctctggaatctgttctgcgccacccggcagataatcgcacccagattcgagagcttggccagactctgattgatggggggatcctggatgatataatcagtgagaaactggaggctttcaacagccgatatgaagatctaagtcacctggcagagagcaagcagatttctttggaaaagcaactccaggtgctgcgggaaactgaccagatgcttcaagtcttgcaagagagcttgggggagctggacaaacagctcaccacatacctgactgacaggatagatgctttccaagttccacaggaagctcagaaaatccaagcagagatctcagcccatgagctaaccctagaggagttgagaagaaatatgcgttctcagcccctgacctccccagagagtaggactgccagaggaggaagtcagatggatgtgctacagaggaaactccgagaggtgtccacaaagttccagcttttccagaagccagctaacttcgagcagcgcatgctggactgcaagcgtgtgctggatggcgtgaaagcagaacttcacgttctggatgtgaaggacgtagaccctgacgtcatacagacgcacctggacaagtgtatgaaactgtataaaactttgagtgaagtcaaacttgaagtggaaactgtgattaaaacaggaagacatattgtccagaaacagcaaacggacaacccaaaagggatggatgagcagctgacttccctgaaggttctttacaatgacctgggcgcacaggtgacagaaggaaaacaggatctggaaagagcatcacagttggcccggaaaatgaagaaagaggctgcttctctctctgaatggctttctgctactgaaactgaattggtacagaagtccacttcagaaggtctgcttggtgacttggatacagaaatttcctgggctaaaaatgttctgaaggatctggaaaagagaaaagctgatttaaataccatcacagagagtagtgctgccctgcaaaacttgattgagggcagtgagcctattttagaagagaggctctgcgtccttaacgctgggtggagccgagttcgtacctggactgaagattggtgcaataccttgatgaaccatcagaaccagctagaaatatttgatgggaacgtggctcacataagtacctggctttatcaagctgaagctctattggatgaaattgaaaagaaaccaacaagtaaacaggaagaaattgtgaagcgtttagtatctgagctggatgatgccaacctccaggttgaaaatgtccgcgatcaagcccttattttgatgaatgcccgtggaagctcaagcagggagcttgtagaaccaaagttagctgagctgaataggaactttgaaaaggtgtctcaacatatcaaaagtgccaaattgctaattgctcaggaaccattataccaatgtttggtcaccactgaaacatttgaaactggtgtgcctttctctgacttggaaaaattagaaaatgacatagaaaatatgttaaaatttgtggaaaaacacttggaatccagtgatgaagatgaaaagatggatgaggagagtgcccagattgaggaagttctacaaagaggagaagaaatgttacatcaacctatggaagataataaaaaagaaaagatccgtttgcaattattacttttgcatactagatacaacaaaattaaggcaatccctattcaacagaggaaaatgggtcaacttgcttctggaattagatcatcacttcttcctacagattatctggttgaaattaacaaaattttactttgcatggatgatgttgaattatcgcttaatgttccagagctcaacactgctatttacgaagacttctcttttcaggaagactctctgaagaatatcaaagaccaactggacaaacttggagagcagattgcagtcattcatgaaaaacagccagatgtcatccttgaagcctctggacctgaagccattcagatcagagatacacttactcagctgaatgcaaaatgggacagaattaatagaatgtacagtgatcggaaaggttgttttgacagggcaatggaagaatggagacagttccattgtgaccttaatgacctcacacagtggataacagaggctgaagaattactggttgatacctgtgctccaggtggcagcctggacttagagaaagccaggatacatcagcaggaacttgaggtgggcatcagcagccaccagcccagttttgcagcactaaaccgaactggggatgggattgtgcagaaactctcccaggcagatggaagcttcttgaaagaaaaactggcaggtttaaaccaacgctgggatgcaattgttgcagaagtgaaggataggcagccaaggctaaaaggagaaagtaagcaggtgatgaagtacaggcatcagctagatgagattatctgttggttaacaaaggctgagcatgctatgcaaaagagatcaaccaccgaattgggagaaaacctgcaagaattaagagacttaactcaagaaatggaagtacatgctgaaaaactcaaatggctgaatagaactgaattggagagtgcccagattgaggaagttctacaaagaggagaagaaatgttacatcaaccatgaaatcgggccgagctcgattcgc

SEQ ID NO: 322312 - DNA, 655 bp, Homo sapiens
aaatacatcgcaccaccaaactaacactcgcacacacccccgcggttactccgtgtcaaactcctagaggagcccttggccagctcggggtgcggcggtggcgaccggcaggcgaggaggcccgcgggcagcaggtattgatgtcaagctgaaccatcgtaggaagttgaaagccttagaaagaggacttggtaaagtttttggattatcttgaaactcttgcatatggcatggccaagtatggagaacatgaagccagtcctgacaatgggcagaacgaattcagtgatatcattaagtccagatctgccctctcctactacaggagagagagataatggccctttgctcctcattccgcattcagaccagattccccagctgcaatctcctgccatcggattgcatcaccaactcaacctaattgataagaggtttcaccatgttgcccaggctggtctcaaactcctgggctcaagcaatccatccacctcagcctcccgaagtgttgggattacaggtgtgagccaccatgcccggctgactttgcctactcttgccctaagaaaattgaagcaaaccaaagaggaatccagaaacttcaataccacatctatcctcaaccagaacccacccttggccttgccatatgcaa

SEQ ID NO: 322313 - DNA, 828 bp, Homo sapiens
accgagtagctaccttataaagaccatctgtacatccactgtgaaatggagtttcaaaatcacaagcttctttcccacatgaacataagactaggagcacatatggaagagtaaagttgaagggaatttggatgatgatttggcaagatgctgtgggatagtaacatctttttgagggaagaattggcttcctttcttgaaagtggtgaaggtacagcatatagctgcatggaagaaacagtaatcggatggctaccttctacattttgtattaggaaacaaagtccattgtaagagtccatgttgatcttggaaatagaaggattgaaaaaagctaaatttccacaaagaacaagaacttgaccatctcctttttgatctgaagactaggggacaatggatatcatagagacagcaaaacttgaagaacatttggaaaatcaacccagtgatcctacgaacacttatgcaagacccgctgaacctgttgaagaagaaaacaaaaatggcaatggtaaacccaagagcttatccagtgggctgcgaaaaggcaccaaaaagtacccggactatatccaaattgctatgcccactgaatcaaggaacaaatttccactagagtggtggaaaacgggcattgccttcatatatgcagttttcaacctcgtcttgacaaccgtcatgatcacagttgtacatgagagggtccctcccaaggagcttagccctccactcccagacaagtttttgattacattgatagggtgaaatgggcattttctgtatcagaaataaatgggattatattagttggattatggatcaccc

SEQ ID NO: 322314 - DNA, 855 bp, Homo sapiens
tgtggcattccagagctgctccctttacggaagggaagacttggtttctcagcgaaaataaggggcggggaacccctgtcaacatccatccagagagctgcatcctgtggccctataacactcttctccaaaaggacctgccagagactgggagtgttgactgctgcaaggaccaaggtgtgggatagtaacatctttttgagggaagaattggcttcctttcttgaaagtggtgaaggtacagcatatagctgcatggaagaaacagtaatcggatggctaccttctacattttgtattaggaaacaaagtccattgtaagagtccatgttgatcttggaaatagaaggattgaaaaaagctaaatttccacaaagaacaagaacttgaccatctcctttttgatctgaagactaggggacaatggatatcatagagacagcaaaacttgaagaacatttggaaaatcaacccagtgatcctacgaacacttatgcaagacccgctgaacctgttgaagaagaaaacaaaaatggcaatggtaaacccaagagcttatccagtgggctgcgaaaaggcaccaaaaagtacccggactatatccaaattgctatgcccactgaatcaaggaacaaatttccactagagtggtggaaaacgggcattgccttcatatatgcagttttcaacctcgtcttgacaaccgtcatgatcacagttgtacatgagagggtccctcccaaggagcttagccctccactcccagacaagtttttgattacattgatagggtgaaatgggcattttctgtatcagaaataaatgggattatattagttggattatggatcaccc

SEQ ID NO: 322315 - DNA, 1104 bp, Homo sapiens
accgagtagctaccttataaagaccatctgtacatccactgtgaaatggagtttcaaaatcacaagcttctttcccacatgaacataagactaggagcacatatggaagagtaaagttgaagggaatttggatgatgatttggcaagatgctgtaagtggattaggcaaggctgctaaagagagacaggaaatggctgtgttagtgcttcggacctccgttagaagtagcagttcatggtgttgaaggtttgttgttgaaaataccttcctgaggcacctcttcattgtgcttattcttcccacaacattgtgccaagacactgtcaagcctgggcctgtcaaagcctgggatgtcaaaggcctgggtctttctcatcctgctgtaatgtattgatagctgggggctctgcagaaggacaagggaaaggtgggatagtaacatctttttgagggaagaattggcttcctttcttgaaagtggtgaaggtacagcatatagctgcatggaagaaacagtaatcggatggctaccttctacattttgtattaggaaacaaagtccattgtaagagtccatgttgatcttggaaatagaaggattgaaaaaagctaaatttccacaaagaacaagaacttgaccatctcctttttgatctgaagactaggggacaatggatatcatagagacagcaaaacttgaagaacatttggaaaatcaacccagtgatcctacgaacacttatgcaagacccgctgaacctgttgaagaagaaaacaaaaatggcaatggtaaacccaagagcttatccagtgggctgcgaaaaggcaccaaaaagtacccggactatatccaaattgctatgcccactgaatcaaggaacaaatttccactagagtggtggaaaacgggcattgccttcatatatgcagttttcaacctcgtcttgacaaccgtcatgatcacagttgtacatgagagggtccctcccaaggagcttagccctccactcccagacaagtttttgattacattgatagggtgaaatgggcattttctgtatcagaaataaatgggattatattagttggattatggatcaccc

SEQ ID NO: 322316 - DNA, 2243 bp, Homo sapiens
cgtgtgggaggccggaagttgcggcttcattactcgccatttcaaaatgctgccgaggccctaggatctgtgactgccacccctccccccacccgggctcggcgggggagcgactcatggagctgccgtaagttttaccaacagactgcagtttcttcactaccaaaatgacatcattttccacctctgctcagtgttcaacatctgacagtgcttgcaggatctctcctggacaaatcaatcaggtacgaccaaaactgccgcttttgaagattttgcatgcagcaggtgcgcaaggtgaaatgttcactgttaaagaggtcatgcactatttaggtcagtacataatggtgaagcaactttatgatcagcaggagcagcatatggtatattgtggtggagatcttttgggagaactactgggacgtcagagcttctccgtgaaagacccaagccctctctatgatatgctaagaaagaatcttgtcactttagccactgctactacagatgctgctcagactctcgctctcgcacaggatcacagtatggatattccaagtcaagaccaactgaagcaaagtgcagaggaaagttccacttccagaaaaagaactacagaagacgatatccccacactgcctacctcagagcataaatgcatacattctagagaagatgaagacttaattgaaaatttagcccaagatgaaacatctaggctggaccttggatttgaggagtgggatgtagctggcctgccttggtggtttttaggaaacttgagaagcaactatacacctagaagtaatggctcaactgatttacagacaaatcaggatgtgggtactgccattgtttcagatactacagatgacttgtggtttttgaatgagtcagtatcagagcagttaggtgttggaataaaagttgaagctgctgatactgaacaaacaagtgaagaagtagggaaagtaagtgacaaaaaggtgattgaagtgggaaaaaatgatgacctggaggactctaagtccttaagtgatgataccgatgtagaggttacctctgaggatgagtggcagtgtactgaatgcaagaaatttaactctccaagcaagaggtactgttttcgttgttgggccttgaggaaggattggtattcagattgttcaaagttaacccattctctctccacgtctgatatcactgccatacctgaaaaggaaaatgaaggaaatgatgtccctgattgtcgaagaaccatttcggctcctgtcgttagacctaaagatgcgtatataaagaaagaaaactccaaactttttgatccctgcaactcagtggaattcttggatttggctcacagttctgaaagccaagagaccatctcaagcatgggagaacagttagataacctttctgaacagagaacagatacagaaaacatggaggattgccagaatctcttgaagccatgtagcttatgtgagaaaagaccacgagacgggaacattattcatggaaggacgggccatcttgtcacttgttttcactgtgccagaagactaaagaaggctggggcttcatgccctatttgcaagaaagagattcagctggttattaaggtttttatagcataatggtagtacgaacataaaaatgcatttattcagttcacttaccacattatttgaaaatcaatcctttatttaattttatttccaacctgtcagagaatgttcttaggcatcaaaatccaaggtagctgtaagaaaaatactggagctaacaatgaagaacagaagtaatctgattagtcaaattattaagtgccatggattactttatgcagcagtcaggtacatagttaggtgaacccaaaagaaaaactcttgaaaacaagagatttcttccatgcacatttacaatattgaggtataattaacatgataaagtgtttccttctaacgagttgtagaaatctgagtaaccacccaaaaaagcaatagaatgtttgtgtcaccccaaaacactcccttctgcccctcttcagacagtccttcagctatttcatggctctcaccctagtttttttttttttttgcacttttttttttccgggggtataggggaggtgtggggcgacagggtctgtcttgttctgtctcccaggctgaagtgcagtgagtcaagattgagccactgcactccagcctgggtgacagcgcgagactccatctcag

SEQ ID NO: 322317 - DNA, 382 bp, Homo sapiens
gggactacaagcgtgcctcaccacacctggctaagttttgtatgttatgtagagacaggttttgccatgttgcccaggctggtatcaaactcctgggttcaagcaatttgcctgccttggcctcccaaagtgctgggattacaggtgtgaaccacttcagccgactaaatttttatttgataaacacttggattttatgttttgtccacttacaatgctgatggctcttattaaacattgtacttcatttgccaaaaagaattattatgtgaacacatatcaaaagcctaaagtcgtttatgtgccctggactgggaaaatatttttataatccaggcaaattacttctagtaatagaatagacttctttatttggacgtct

SEQ ID NO: 322318 - DNA, 3939 bp, Homo sapiens
cgtgtgggaggccggaagttgcggcttcattactcgccatttcaaaatgctgccgaggccctaggatctgtgactgccacccctccccccacccgggctcggcgggggagcgactcatggagctgccgtaagttttaccaacagactgcagtttcttcactaccaaaatgacatcattttccacctctgctcagtgttcaacatctgacagtgcttgcaggatctctcctggacaaatcaatcaggtacgaccaaaactgccgcttttgaagattttgcatgcagcaggtgcgcaaggtgaaatgttcactgttaaagaggtcatgcactatttaggtcagtacataatggtgaagcaactttatgatcagcaggagcagcatatggtatattgtggtggagatcttttgggagaactactgggacgtcagagcttctccgtgaaagacccaagccctctctatgatatgctaagaaagaatcttgtcactttagccactgctactacagatgctgctcagactctcgctctcgcacaggatcacagtatggatattccaagtcaagaccaactgaagcaaagtgcagaggaaagttccacttccagaaaaagaactacagaagacgatatccccacactgcctacctcagagcataaatgcatacattctagagaagatgaagacttaattgaaaatttagcccaagatgaaacatctaggctggaccttggatttgaggagtgggatgtagctggcctgccttggtggtttttaggaaacttgagaagcaactatacacctagaagtaatggctcaactgatttacagacaaatcaggatgtgggtactgccattgtttcagatactacagatgacttgtggtttttgaatgagtcagtatcagagcagttaggtgttggaataaaagttgaagctgctgatactgaacaaacaagtgaagaagtagggaaagtaagtgacaaaaaggtgattgaagtgggaaaaaatgatgacctggaggactctaagtccttaagtgatgataccgatgtagaggttacctctgaggatgagtggcagtgtactgaatgcaagaaatttaactctccaagcaagaggtactgttttcgttgttgggccttgaggaaggattggtattcagattgttcaaagttaacccattctctctccacgtctgatatcactgccatacctgaaaaggaaaatgaaggaaatgatgtccctgattgtcgaagaaccatttcggctcctgtcgttagacctaaagatgcgtatataaagaaagaaaactccaaactttttgatccctgcaactcagtggaattcttggatttggctcacagttctgaaagccaagagaccatctcaagcatgggagaacagttagataacctttctgaacagagaacagatacagaaaacatggaggattgccagaatctcttgaagccatgtagcttatgtgagaaaagaccacgagacgggaacattattcatggaaggacgggccatcttgtcacttgttttcactgtgccagaagactaaagaaggctggggcttcatgccctatttgcaagaaagagattcagctggttattaaggtttttatagcataatggtagtacgaacataaaaatgcatttattcagttcacttaccacattatttgaaaatcaatcctttatttaattttatttccaacctgtcagagaatgttcttaggcatcaaaatccaaggtagctgtaagaaaaatactggagctaacaatgaagaacagaagtaatctgattagtcaaattattaagtgccatggattactttatgcagcagtcaggtacatagttaggtgaacccaaaagaaaaactcttgaaaacaagagatttcttccatgcacatttacaatattgaggtataattaacatgataaagtgtttccttctaacgagttgtagaaatctgagtaaccacccaaaaaagcaatagaatgtttgtgtcaccccaaaacactcccttctgcccctcttcagacagtccttcagctatttcatggctctcaccctagtttttttttttttttgcacttttttttttccgggggtataggggaggtgtggggcgacagggtctgtcttgttctgtctcccaggctgaagtgcagtgcagtggtatgatcatggctcactgcagccttggtttcctgggcataagtggtcttcccacttcagcctcctgagtagctgagactatagactagcataaccacactggctaattttttgtggagatgaagtctcactatgttgcccaggctggtctcgaactcctgggctcaaacaatcctcccgcctcagccttccaaattgctgggattatagtcatgaggcacctagtctggcccttttgcaagactttaatctgaaatctaaatttttaaaatttaagtacttacaaaggatatactatccaacatattgcatattatatatgtgctttaaagttttttttttttttgagagacggtctcgctttgtcatccaagctggagtgcagtggtgcaaacacggcccacctcctgggctcaagtgatcctccagcctcagcttccctcacaggcattcactatcactcccagctaattaaaataatttgtagacggtgtctcgttatgttgcccaggctggtctcgaactcctgggtttaagtgattcccccgcctcagcctcccaaagtgttgggcttacagccttgagccactatgcttggctcaaagatatttttatgaaagccctgggactatagatttagctgattaaatttatagaaaaagtcctgtcatataaactggcaaagtctgttcttaatttaattagccaaatcagacttaacttccgtcagaacatgtcttggttttaattcagataaacacacaaacatacttctctggcacagccttcagaagcatcagtttttgttttgttttgttttgttttttgagacagggtcttgctctgttgcccaggctggagtgcactggcacaatcacagttcactgcagcctcgacctcccagatccaagcaatcctcccacctaagcctcccaagtagctgggtctataggcgcgtgccaccaccatgcccagctgaattttgtattttttgtacagacagcattttgccatgttgcccaggctggtcccaaacttctagcctcaagcaaccctcctgcctcagcctctcaaagtgctaggattgcagtcctgagctactgccccctaccctctttgcgtcttaggagtcatttagattttttttgatccttttgtttagtgcctctggagctgcttacaccaaggcaatacgccttgatatactggatggttgagaggcagcctcttttttttttttttttttttttggaggatagggagtatggctgttgtgaaaagggaggtaaagagaaatggtagatctgaagaggcctcatcagagcacatattttaggacaacacatatggaaattggacatctttaagttggtttccatagagctatgcatgtatccttacccccatgggaaaatgttggtgtgttctcaagggtatgcatgtgtcattttgaagaccaaggccctagaattgtcaaacttaaggatcataaaaatcatgagggttgcttgttaaaaatgtccaaacgtgcagagactgatctttgagatctggaccaggaatttgcatttgaacaagtgttcctggaatctctatgcaagttttatacagaacatacttttggaatccttgccctagacaggggtgtccaatcttttggcttccctggtccacaatggaagaagaattgtcttggaccacacataaaatacactaacactaacaatagctgatgagctaaaaaaaaa

SEQ ID NO: 322319 - DNA, 3871 bp, Homo sapiens
cgtgtgggaggccggaagttgcggcttcattactcgccatttcaaaatgctgccgaggccctaggatctgtgactgccacccctccccccacccgggctcggcgggggagcgactcatggagctgccgtaagttttaccaacagactgcagtttcttcactaccaaaatgacatcattttccacctctgctcagtgttcaacatctgacagtgcttgcaggatctctcctggacaaatcaatcaggtacgaccaaaactgccgcttttgaagattttgcatgcagcaggtgcgcaaggtgaaatgttcactgttaaagaggtcatgcactatttaggtcagtacataatggtgaagcaactttatgatcagcaggagcagcatatggtatattgtggtggagatcttttgggagaactactgggacgtcagagcttctccgtgaaagacccaagccctctctatgatatgctaagaaagaatcttgtcactttagccactgctactacagcaaagtgcagaggaaagttccacttccagaaaaagaactacagaagacgatatccccacactgcctacctcagagcataaatgcatacattctagagaagatgaagacttaattgaaaatttagcccaagatgaaacatctaggctggaccttggatttgaggagtgggatgtagctggcctgccttggtggtttttaggaaacttgagaagcaactatacacctagaagtaatggctcaactgatttacagacaaatcaggatgtgggtactgccattgtttcagatactacagatgacttgtggtttttgaatgagtcagtatcagagcagttaggtgttggaataaaagttgaagctgctgatactgaacaaacaagtgaagaagtagggaaagtaagtgacaaaaaggtgattgaagtgggaaaaaatgatgacctggaggactctaagtccttaagtgatgataccgatgtagaggttacctctgaggatgagtggcagtgtactgaatgcaagaaatttaactctccaagcaagaggtactgttttcgttgttgggccttgaggaaggattggtattcagattgttcaaagttaacccattctctctccacgtctgatatcactgccatacctgaaaaggaaaatgaaggaaatgatgtccctgattgtcgaagaaccatttcggctcctgtcgttagacctaaagatgcgtatataaagaaagaaaactccaaactttttgatccctgcaactcagtggaattcttggatttggctcacagttctgaaagccaagagaccatctcaagcatgggagaacagttagataacctttctgaacagagaacagatacagaaaacatggaggattgccagaatctcttgaagccatgtagcttatgtgagaaaagaccacgagacgggaacattattcatggaaggacgggccatcttgtcacttgttttcactgtgccagaagactaaagaaggctggggcttcatgccctatttgcaagaaagagattcagctggttattaaggtttttatagcataatggtagtacgaacataaaaatgcatttattcagttcacttaccacattatttgaaaatcaatcctttatttaattttatttccaacctgtcagagaatgttcttaggcatcaaaatccaaggtagctgtaagaaaaatactggagctaacaatgaagaacagaagtaatctgattagtcaaattattaagtgccatggattactttatgcagcagtcaggtacatagttaggtgaacccaaaagaaaaactcttgaaaacaagagatttcttccatgcacatttacaatattgaggtataattaacatgataaagtgtttccttctaacgagttgtagaaatctgagtaaccacccaaaaaagcaatagaatgtttgtgtcaccccaaaacactcccttctgcccctcttcagacagtccttcagctatttcatggctctcaccctagtttttttttttttttgcacttttttttttccgggggtataggggaggtgtggggcgacagggtctgtcttgttctgtctcccaggctgaagtgcagtgcagtggtatgatcatggctcactgcagccttggtttcctgggcataagtggtcttcccacttcagcctcctgagtagctgagactatagactagcataaccacactggctaattttttgtggagatgaagtctcactatgttgcccaggctggtctcgaactcctgggctcaaacaatcctcccgcctcagccttccaaattgctgggattatagtcatgaggcacctagtctggcccttttgcaagactttaatctgaaatctaaatttttaaaatttaagtacttacaaaggatatactatccaacatattgcatattatatatgtgctttaaagttttttttttttttgagagacggtctcgctttgtcatccaagctggagtgcagtggtgcaaacacggcccacctcctgggctcaagtgatcctccagcctcagcttccctcacaggcattcactatcactcccagctaattaaaataatttgtagacggtgtctcgttatgttgcccaggctggtctcgaactcctgggtttaagtgattcccccgcctcagcctcccaaagtgttgggcttacagccttgagccactatgcttggctcaaagatatttttatgaaagccctgggactatagatttagctgattaaatttatagaaaaagtcctgtcatataaactggcaaagtctgttcttaatttaattagccaaatcagacttaacttccgtcagaacatgtcttggttttaattcagataaacacacaaacatacttctctggcacagccttcagaagcatcagtttttgttttgttttgttttgttttttgagacagggtcttgctctgttgcccaggctggagtgcactggcacaatcacagttcactgcagcctcgacctcccagatccaagcaatcctcccacctaagcctcccaagtagctgggtctataggcgcgtgccaccaccatgcccagctgaattttgtattttttgtacagacagcattttgccatgttgcccaggctggtcccaaacttctagcctcaagcaaccctcctgcctcagcctctcaaagtgctaggattgcagtcctgagctactgccccctaccctctttgcgtcttaggagtcatttagattttttttgatccttttgtttagtgcctctggagctgcttacaccaaggcaatacgccttgatatactggatggttgagaggcagcctcttttttttttttttttttttttggaggatagggagtatggctgttgtgaaaagggaggtaaagagaaatggtagatctgaagaggcctcatcagagcacatattttaggacaacacatatggaaattggacatctttaagttggtttccatagagctatgcatgtatccttacccccatgggaaaatgttggtgtgttctcaagggtatgcatgtgtcattttgaagaccaaggccctagaattgtcaaacttaaggatcataaaaatcatgagggttgcttgttaaaaatgtccaaacgtgcagagactgatctttgagatctggaccaggaatttgcatttgaacaagtgttcctggaatctctatgcaagttttatacagaacatacttttggaatccttgccctagacaggggtgtccaatcttttggcttccctggtccacaatggaagaagaattgtcttggaccacacataaaatacactaacactaacaatagctgatgagctaaaaaaaaa

SEQ ID NO: 322320 - DNA, 3643 bp, Homo sapiens
actgtgctagctgggaaggatataaagattttataccatagttggcatattgtttgtgcttcctggatcctgccctcaaatagttcagaccaaaagaatgtaaacccagttatagaatgaggtaaaaatttaatcatcaatatatgtacaggattaagaagtactatagaggtgatttattctgtcagggtcagcttaacaaagaagttgtcatctgacttgatgtataaaaaatgggtcattgattagggatagaaaatgggatgaggaaggaaaaatggggagtgattccttaatggttacagagtgttgggcgataacatcacgtatgatatccccacactgcctacctcagagcataaatgcatacattctagagaagatgaagacttaattgaaaatttagcccaagatgaaacatctaggctggaccttggatttgaggagtgggatgtagctggcctgccttggtggtttttaggaaacttgagaagcaactatacacctagaagtaatggctcaactgatttacagacaaatcaggatgtgggtactgccattgtttcagatactacagatgacttgtggtttttgaatgagtcagtatcagagcagttaggtgttggaataaaagttgaagctgctgatactgaacaaacaagtgaagaagtagggaaagtaagtgacaaaaaggtgattgaagtgggaaaaaatgatgacctggaggactctaagtccttaagtgatgataccgatgtagaggttacctctgaggatgagtggcagtgtactgaatgcaagaaatttaactctccaagcaagaggtactgttttcgttgttgggccttgaggaaggattggtattcagattgttcaaagttaacccattctctctccacgtctgatatcactgccatacctgaaaaggaaaatgaaggaaatgatgtccctgattgtcgaagaaccatttcggctcctgtcgttagacctaaagatgcgtatataaagaaagaaaactccaaactttttgatccctgcaactcagtggaattcttggatttggctcacagttctgaaagccaagagaccatctcaagcatgggagaacagttagataacctttctgaacagagaacagatacagaaaacatggaggattgccagaatctcttgaagccatgtagcttatgtgagaaaagaccacgagacgggaacattattcatggaaggacgggccatcttgtcacttgttttcactgtgccagaagactaaagaaggctggggcttcatgccctatttgcaagaaagagattcagctggttattaaggtttttatagcataatggtagtacgaacataaaaatgcatttattcagttcacttaccacattatttgaaaatcaatcctttatttaattttatttccaacctgtcagagaatgttcttaggcatcaaaatccaaggtagctgtaagaaaaatactggagctaacaatgaagaacagaagtaatctgattagtcaaattattaagtgccatggattactttatgcagcagtcaggtacatagttaggtgaacccaaaagaaaaactcttgaaaacaagagatttcttccatgcacatttacaatattgaggtataattaacatgataaagtgtttccttctaacgagttgtagaaatctgagtaaccacccaaaaaagcaatagaatgtttgtgtcaccccaaaacactcccttctgcccctcttcagacagtccttcagctatttcatggctctcaccctagtttttttttttttttgcacttttttttttccgggggtataggggaggtgtggggcgacagggtctgtcttgttctgtctcccaggctgaagtgcagtgcagtggtatgatcatggctcactgcagccttggtttcctgggcataagtggtcttcccacttcagcctcctgagtagctgagactatagactagcataaccacactggctaattttttgtggagatgaagtctcactatgttgcccaggctggtctcgaactcctgggctcaaacaatcctcccgcctcagccttccaaattgctgggattatagtcatgaggcacctagtctggcccttttgcaagactttaatctgaaatctaaatttttaaaatttaagtacttacaaaggatatactatccaacatattgcatattatatatgtgctttaaagttttttttttttttgagagacggtctcgctttgtcatccaagctggagtgcagtggtgcaaacacggcccacctcctgggctcaagtgatcctccagcctcagcttccctcacaggcattcactatcactcccagctaattaaaataatttgtagacggtgtctcgttatgttgcccaggctggtctcgaactcctgggtttaagtgattcccccgcctcagcctcccaaagtgttgggcttacagccttgagccactatgcttggctcaaagatatttttatgaaagccctgggactatagatttagctgattaaatttatagaaaaagtcctgtcatataaactggcaaagtctgttcttaatttaattagccaaatcagacttaacttccgtcagaacatgtcttggttttaattcagataaacacacaaacatacttctctggcacagccttcagaagcatcagtttttgttttgttttgttttgttttttgagacagggtcttgctctgttgcccaggctggagtgcactggcacaatcacagttcactgcagcctcgacctcccagatccaagcaatcctcccacctaagcctcccaagtagctgggtctataggcgcgtgccaccaccatgcccagctgaattttgtattttttgtacagacagcattttgccatgttgcccaggctggtcccaaacttctagcctcaagcaaccctcctgcctcagcctctcaaagtgctaggattgcagtcctgagctactgccccctaccctctttgcgtcttaggagtcatttagattttttttgatccttttgtttagtgcctctggagctgcttacaccaaggcaatacgccttgatatactggatggttgagaggcagcctcttttttttttttttttttttttggaggatagggagtatggctgttgtgaaaagggaggtaaagagaaatggtagatctgaagaggcctcatcagagcacatattttaggacaacacatatggaaattggacatctttaagttggtttccatagagctatgcatgtatccttacccccatgggaaaatgttggtgtgttctcaagggtatgcatgtgtcattttgaagaccaaggccctagaattgtcaaacttaaggatcataaaaatcatgagggttgcttgttaaaaatgtccaaacgtgcagagactgatctttgagatctggaccaggaatttgcatttgaacaagtgttcctggaatctctatgcaagttttatacagaacatacttttggaatccttgccctagacaggggtgtccaatcttttggcttccctggtccacaatggaagaagaattgtcttggaccacacataaaatacactaacactaacaatagctgatgagctaaaaaaaaa

SEQ ID NO: 322321 - DNA, 3885 bp, Homo sapiens
cgtgtgggaggccggaagttgcggcttcattactcgccatttcaaaatgctgccgaggccctaggatctgtgactgccacccctccccccacccgggctcggcgggggagcgactcatggagctgccgtaagttttaccaacagactgcagtttcttcactaccaaaatgacatcattttccacctctgctcagtgttcaacatctgacagtgcttgcaggatctctcctggacaaatcaatcaggtacgaccaaaactgccgcttttgaagattttgcatgcagcaggtgcgcaaggtgaaatgttcactgttaaagaggtcatgcactatttaggtcagtacataatggtgaagcaactttatgatcagcaggagcagcatatggtatattgtggtggagatcttttgggagaactactgggacgtcagagcttctccgtgaaagacccaagccctctctatgatatgctaagaaagaatcttgtcactttagccactgctactacagatgctgctcagactctcgctctcgcacaggatcacagtatggatattccaagtcaagaccaactgaagcaaagtgcagaggaaagttccacttccagaaaaagaactacagaagacgatatccccacactgcctacctcagagcataaatgcatacattctagagaagatgaagacttaattgaaaatttagcccaagatgaaacatctaggctggaccttggatttgaggagtgggatgtagctggcctgccttggtggtttttaggaaacttgagaagcaactatacacctagaagtaatggctcaactgatttacagacaaatcaggatgtgggtactgccattgtttcagatactacagatgacttgtggtttttgaatgagtcagtatcagagcagttaggtgttggaataaaagttgaagctgctgatactgaacaaacaagtgaagaagtagggaaagtaagtgacaaaaaggtgattgaagtgggaaaaaatgatgacctggaggactctaagtccttaagtgatgataccgatgtagaggttacctctgaggatgagtggcagtgtactgaatgcaagaaatttaactctccaagcaagaggtactgttttcgttgttgggccttgaggaaggattggtattcagattgttcaaagttaacccattctctctccacgtctgatatcactgccatacctgaaaaggaaaatgaaggaaatgatgtccctgattgtcgaagaaccatttcggctcctgtcgttagacctaaagatgcgtatataaagaaagaaaactccaaactttttgatccctgcaactcagtggaattcttggatttggctcacagttctgaaagccaagagaccatctcaagcatgggagaacagttagataacctttctgaacagagaacagatacagaaaacatggaggattgccagaatctcttgaagccatgtagcttatgtgagaaaagaccacgagacgggaacattattcatggaaggacgggccatcttgtcacttgttttcactgtgccagaagactaaagaaggctggggcttcatgccctatttgcaagaaagagattcagctggttattaaggtttttatagcataatggtagtacgaacataaaaatgcatttattcagttcacttaccacattatttgaaaatcaatcctttatttaattttatttccaacctgtcagagaatgttcttaggcatcaaaatccaaggtagctgtaagaaaaatactggagctaacaatgaagaacagaagtaatctgattagtcaaattattaagtgccatggattactttatgcagcagtcaggtacatagttaggtgaacccaaaagaaaaactcttgaaaacaagagatttcttccatgcacatttacaatattgaggtataattaacatgataaagtgtttccttctaacgagttgtagaaatctgagtaaccacccaaaaaagcaatagaatgtttgtgtcaccccaaaacactcccttctgcccctcttcagacagtccttcagctatttcatggctctcaccctagtttttttttttttttgcacttttttttttccgggggtataggggaggtgtggggcgacagggtctgtcttgttctgtctcccaggctgaagtgcagtgcagtggtatgatcatggctcactgcagccttggtttcctgggcataagtggtcttcccacttcagcctcctgagtagctgagactatagactagcataaccacactggctaattttttgtggagatgaagtctcactatgttgcccaggctggtctcgaactcctgggctcaaacaatcctcccgcctcagccttccaaattgctgggattatagtcatgaggcacctagtctggcccttttgcaagactttaatctgaaatctaaatttttaaaatttaagtacttacaaaggatatactatccaacatattgcatattatatatgtgctttaaagttttttttttttttgagagacggtctcgctttgtcatccaagctggagtgcagtggtgcaaacacggcccacctcctgggctcaagtgatcctccagcctcagcttccctcacaggcattcactatcactcccagctaattaaaataatttgtagacggtgtctcgttatgttgcccaggctggtctcgaactcctgggtttaagtgattcccccgcctcagcctcccaaagtgttgggcttacagccttgagccactatgcttggctcaaagatatttttatgaaagccctgggactatagatttagctgattaaatttatagaaaaagtcctgtcatataaactggcaaagtctgttcttaatttaattagccaaatcagacttaacttccgtcagaacatgtcttggttttaattcagataaacacacaaacatacttctctggcacagccttcagaagcatcagtttttgttttgttttgttttgttttttgagacagggtcttgctctgttgcccaggctggagtgcactggcacaatcacagttcactgcagcctcgacctcccagatccaagcaatcctcccacctaagcctcccaagtagctgggtctataggcgcgtgccaccaccatgcccagctgaattttgtattttttgtacagacagcattttgccatgttgcccaggctggtcccaaacttctagcctcaagcaaccctcctgcctcagcctctcaaagtgctaggattgcagtcctgagctactgccccctaccctctttgcgtcttaggagtcatttagattttttttgatccttttgtttagtgcctctggagctgcttacaccaaggcaatacgccttgatatactggatggttgagaggcagcctcttttttttttttttttttttttggaggatagggagtatggctgttgtgaaaagggaggtaaagagaaatggtagatctgaagaggcctcatcagagcacatattttaggacaacacatatggaaattggacatctttaagttggtttccatagagctatgcatgtatctgaagaccaaggccctagaattgtcaaacttaaggatcataaaaatcatgagggttgcttgttaaaaatgtccaaacgtgcagagactgatctttgagatctggaccaggaatttgcatttgaacaagtgttcctggaatctctatgcaagttttatacagaacatacttttggaatccttgccctagacaggggtgtccaatcttttggcttccctggtccacaatggaagaagaattgtcttggaccacacataaaatacactaacactaacaatagctgatgagctaaaaaaaaa

SEQ ID NO: 322322 - DNA, 3124 bp, Homo sapiens
  misc_feature (2881)..(2881): n is a, c, g, or t
cgtgtgggaggccggaagttgcggcttcattactcgccatttcaaaatgctgccgaggccctaggatctgtgactgccacccctccccccacccgggctcggcgggggagcgactcatggagctgccgtaagttttaccaacagactgcagtttcttcactaccaaaatgacatcattttccacctctgctcagtgttcaacatctgacagtgcttgcaggatctctcctggacaaatcaatcaggtacgaccaaaactgccgcttttgaagattttgcatgcagcaggtgcgcaaggtgaaatgttcactgttaaagaggtcatgcactatttaggtcagtacataatggtgaagcaactttatgatcagcaggagcagcatatggtatattgtggtggagatcttttgggagaactactgggacgtcagagcttctccgtgaaagacccaagccctctctatgatatgctaagaaagaatcttgtcactttagccactgctactacagatgctgctcagactctcgctctcgcacaggatcacagtatggatattccaagtcaagaccaactgaagcaaagtgcagaggaaagttccacttccagaaaaagaactacagaagacgatatccccacactgcctacctcagagcataaatgcatacattctagagaagatgaagacttaattgaaaatttagcccaagatgaaacatctaggctggaccttggatttgaggagtgggatgtagctggcctgccttggtggtttttaggaaacttgagaagcaactatacacctagaagtaatggctcaactgatttacagacaaatcaggatgtgggtactgccattgtttcagatactacagatgacttgtggtttttgaatgagtcagtatcagagcagttaggtgttggaataaaagttgaagctgctgatactgaacaaacaagtgaagaagtagggaaagtaagtgacaaaaaggtgattgaagtgggaaaaaatgatgacctggaggactctaagtccttaagtgatgataccgatgtagaggttacctctgaggatgagtggcagtgtactgaatgcaagaaatttaactctccaagcaagaggtactgttttcgttgttgggccttgaggaaggattggtattcagattgttcaaagttaacccattctctctccacgtctgatatcactgccatacctgaaaaggaaaatgaaggaaatgatgtccctgattgtcgaagaaccatttcggctcctgtcgttagacctaaagatgcgtatataaagaaagaaaactccaaactttttgatccctgcaactcagtggaattcttggatttggctcacagttctgaaagccaagagaccatctcaagcatgggagaacagttagataacctttctgaacagagaacagatacagaaaacatggaggattgccagaatctcttgaagccatgtagcttatgtgagaaaagaccacgagacgggaacattattcatggaaggacgggccatcttgtcacttgttttcactgtgccagaagactaaagaaggctggggcttcatgccctatttgcaagaaagagattcagctggttattaaggtttttatagcataatggtagtacgaacataaaaatgcatttattcagttcacttaccacattatttgaaaatcaatcctttatttaattttatttccaacctgtcagagaatgttcttaggcatcaaaatccaaggtagctgtaagaaaaatactggagctaacaatgaagaacagaagtaatctgattagtcaaattattaagtgccatggattactttatgcagcagtcaggtacatagttaggtgaacccaaaagaaaaactcttgaaaacaagagatttcttccatgcacatttacaatattgaggtataattaacatgataaagtgtttccttctaacgagttgtagaaatctgagtaaccacccaaaaaagcaatagaatgtttgtgtcaccccaaaacactcccttctgcccctcttcagacagtccttcagctatttcatggctctcaccctagtttttttttttttttgcacttttttttttccgggggtataggggaggtgtggggcgacagggtctgtcttgttctgtctcccaggctgaagtgcagtgcagtggtatgatcatggctcactgcagccttggtttcctgggcataagtggtcttcccacttcagcctcctgagtagctgagactatagactagcataaccacactggctaattttttgtggagatgaagtctcactatgttgcccaggctggtctcgaactcctgggctcaaacaatcctcccgcctcagccttccaaattgctgggattatagtcatgaggcacctagtctggcccttttgcaagactttaatctgaaatctaaatttttaaaatttaagtacttacaaaggatatactatccaacatattgcatattatatatgtgctttaaagttttttttttttttgagagacggtctcgctttgtcatccaagctggagtgcagtggtgcaaacacggcccacctcctgggctcaagtgatcctccagcctcagcttccctcacaggcattcactatcactcccagctaattaaaataatttgtagacggtgtctcgttatgttgcccaggctggtctcgaactcctgggtttaagtgattcccccgcctcagcctcccaaagtgttgggcttacagccttgagccacagcgcccagtaaactatttctgggctgttcgattttcttttttccttgccactggcgtacagatttctctgtactcacgtgccactaaaactaaaagcaangggataagtttatattggtgaacgggtccagacgttcacttggtataagggaaacttccaaatctgacattcaccctttaagctggagtatgtgggcccacgtgttccggtttctcggaagacggcaaatggcccatttttggtcccacggtttttctggatggccccttacttcaacgctttctgcgggtggcaatttggcgccacttttgaaacctgcggaagaaatcgtgggaagagatc

SEQ ID NO: 322323 - DNA, 3210 bp, Homo sapiens
gactctagcgatcccttaaatagttgagcattacttctaggtgtaagttgcttctcaagtttcctaaaaaccaccaaggcaggccagctgcatcccactcctcaaatcaggatgtgggtactgccattgtttcagatactacagatgacttgtggtttttgaatgagtcagtatcagagcagttaggtgttggaataaaagttgaagctgctgatactgaacaaacaagtgaagaagtagggaaagtaagtgacaaaaaggtgattgaagtgggaaaaaatgatgacctggaggactctaagtccttaagtgatgataccgatgtagaggttacctctgaggatgagtggcagtgtactgaatgcaagaaatttaactctccaagcaagaggtactgttttcgttgttgggccttgaggaaggattggtattcagattgttcaaagttaacccattctctctccacgtctgatatcactgccatacctgaaaaggaaaatgaaggaaatgatgtccctgattgtcgaagaaccatttcggctcctgtcgttagacctaaagatgcgtatataaagaaagaaaactccaaactttttgatccctgcaactcagtggaattcttggatttggctcacagttctgaaagccaagagaccatctcaagcatgggagaacagttagataacctttctgaacagagaacagatacagaaaacatggaggattgccagaatctcttgaagccatgtagcttatgtgagaaaagaccacgagacgggaacattattcatggaaggacgggccatcttgtcacttgttttcactgtgccagaagactaaagaaggctggggcttcatgccctatttgcaagaaagagattcagctggttattaaggtttttatagcataatggtagtacgaacataaaaatgcatttattcagttcacttaccacattatttgaaaatcaatcctttatttaattttatttccaacctgtcagagaatgttcttaggcatcaaaatccaaggtagctgtaagaaaaatactggagctaacaatgaagaacagaagtaatctgattagtcaaattattaagtgccatggattactttatgcagcagtcaggtacatagttaggtgaacccaaaagaaaaactcttgaaaacaagagatttcttccatgcacatttacaatattgaggtataattaacatgataaagtgtttccttctaacgagttgtagaaatctgagtaaccacccaaaaaagcaatagaatgtttgtgtcaccccaaaacactcccttctgcccctcttcagacagtccttcagctatttcatggctctcaccctagtttttttttttttttgcacttttttttttccgggggtataggggaggtgtggggcgacagggtctgtcttgttctgtctcccaggctgaagtgcagtgcagtggtatgatcatggctcactgcagccttggtttcctgggcataagtggtcttcccacttcagcctcctgagtagctgagactatagactagcataaccacactggctaattttttgtggagatgaagtctcactatgttgcccaggctggtctcgaactcctgggctcaaacaatcctcccgcctcagccttccaaattgctgggattatagtcatgaggcacctagtctggcccttttgcaagactttaatctgaaatctaaatttttaaaatttaagtacttacaaaggatatactatccaacatattgcatattatatatgtgctttaaagttttttttttttttgagagacggtctcgctttgtcatccaagctggagtgcagtggtgcaaacacggcccacctcctgggctcaagtgatcctccagcctcagcttccctcacaggcattcactatcactcccagctaattaaaataatttgtagacggtgtctcgttatgttgcccaggctggtctcgaactcctgggtttaagtgattcccccgcctcagcctcccaaagtgttgggcttacagccttgagccactatgcttggctcaaagatatttttatgaaagccctgggactatagatttagctgattaaatttatagaaaaagtcctgtcatataaactggcaaagtctgttcttaatttaattagccaaatcagacttaacttccgtcagaacatgtcttggttttaattcagataaacacacaaacatacttctctggcacagccttcagaagcatcagtttttgttttgttttgttttgttttttgagacagggtcttgctctgttgcccaggctggagtgcactggcacaatcacagttcactgcagcctcgacctcccagatccaagcaatcctcccacctaagcctcccaagtagctgggtctataggcgcgtgccaccaccatgcccagctgaattttgtattttttgtacagacagcattttgccatgttgcccaggctggtcccaaacttctagcctcaagcaaccctcctgcctcagcctctcaaagtgctaggattgcagtcctgagctactgccccctaccctctttgcgtcttaggagtcatttagattttttttgatccttttgtttagtgcctctggagctgcttacaccaaggcaatacgccttgatatactggatggttgagaggcagcctcttttttttttttttttttttttggaggatagggagtatggctgttgtgaaaagggaggtaaagagaaatggtagatctgaagaggcctcatcagagcacatattttaggacaacacatatggaaattggacatctttaagttggtttccatagagctatgcatgtatccttacccccatgggaaaatgttggtgtgttctcaagggtatgcatgtgtcattttgaagaccaaggccctagaattgtcaaacttaaggatcataaaaatcatgagggttgcttgttaaaaatgtccaaacgtgcagagactgatctttgagatctggaccaggaatttgcatttgaacaagtgttcctggaatctctatgcaagttttatacagaacatacttttggaatccttgccctagacaggggtgtccaatcttttggcttccctggtccacaatggaagaagaattgtcttggaccacacataaaatacactaacactaacaatagctgatgagctaaaaaaaaa

SEQ ID NO: 322324 - DNA, 1188 bp, Homo sapiens
cgtgtgggaggccggaagttgcggcttcattactcgccatttcaaaatgctgccgaggccctaggatctgtgactgccacccctccccccacccgggctcggcgggggagcgactcatggagctgccgtaagttttaccaacagactgcagtttcttcactaccaaaatgacatcattttccacctctgctcagtgttcaacatctgacagtgcttgcaggatctctcctggacaaatcaatcaggtacgaccaaaactgccgcttttgaagattttgcatgcagcaggtgcgcaaggtgaaatgttcactgttaaagaggtcatgcactatttaggtcagtacataatggtgaagcaactttatgatcagcaggagcagcatatggtatattgtggtggagatcttttgggagaactactgggacgtcagagcttctccgtgaaagacccaagccctctctatgatatgctaagaaagaatcttgtcactttagccactgctactacagaaatgggtcatttgttctgtagaatttcccacgctctagagttggcagattaatgtcgctttagatgaagatgctattgttttatgaagcaaacggggaaaaatccagatttcaagatcccataaccctgtatgacttaacacttgaaagttgaaattaaatgtaaaaagccatacactcttttccttttgtttgtgagttaggcgaatttggtaatatataggaagagatgacaaaaatagactccattatgtcctgcttggaaccagttttcatataaaaatttaaaagcttgatatggaagaacatttttagctatttttcactgttttttttcccgattatattttggtaatatattttggatatggcctgtcttggtctttgtcatttttatcaattttgatttttcccttgcaaatgagagctttgtccagccaacatggagaagtacatttctagggactaaacctggctcccgggttgtttgctgaggtcctttttgtgtggaaagaatggttattaccagggaaggttttccttttgttttacttgctatccagatgctgctcagactctcgctctcgcacaggatcacagtatggatattccaagtcaagaccaactgaaggtaaaatcaccacacggtgacttcttttgttgtacagagtggcccct

SEQ ID NO: 322325 - DNA, 387 bp, Homo sapiens
ggaaagaatatgtcagaactaatggaatgttttgtagcttcttagagtgtcacctgtagaagggaatttagggaatagattctatttacttgagcaactacaagtccttaccttttaaactcttcagtactgtttcttaggtgttatacctgatttagtgttaaaagagaaaagtccatgcctgacaccattatatccatccattagtttatccacagtaggtgtcaagtagatatatgttgaatgaatacatgtccactgaataaaggcaagatgttctttggcgatgtagtgtgacgacattgagttttgggttcatttgtgttgtttcaacatctctgataaacctctgaatacagaaactcatgtttgttttttttctgttag

SEQ ID NO: 322326 - DNA, 275 bp, Homo sapiens
atgtgtcatatgtgtcttttacttctgctggttgcctttgtgtgaatgctaaatagggaattttctgcattagaatagatgttataaatttttttttctatttagttttaccaacagactgcagtttcttcactaccaaaatgacatcattttccacctctgctcagtgttcaacatctgacagtgcttgcaggatctctcctggacaaatcaatcaggtaaatcattttcggtatttctagttttttggttttttttttttttaatttttaaaa

SEQ ID NO: 322327 - DNA, 614 bp, Homo sapiens
atagaatagacttctttatttggacgtctgagaaaatttttaagaggatactaggtaaattcactgctttttctcattgtcagatcagttcatttctgtgctgaaaagtctgggtctgttaattgtcagaaagacaatgagtagatggacctagtagttgggagcggctttcctgttgtaggaccccttacacaaactttgacagtcttgtaaatatgttatttctttctttagcaaactaacttaccttacctcctctaatgaatttgtgtttttggtagcagctggacagatcacaacatggtattttattccatgcaggtcatgcactatttaggtcagtacataatggtgaagcaactttatgatcagcaggagcagcatatggtatattgtggtggagatcttttgggagaactactgggacgtcagagcttctccgtgaaagacccaaggtaaaaacagtgagggcttgcgtatctttttgggtgcttatacctagccacttaatttctatgggttattaatatttattacttcactcaacaaatatgtaagagcctacatatgttaggtagcctatgaggcactgagaatatggtaatgagcgacac

SEQ ID NO: 322328 - DNA, 300 bp, Homo sapiens
agcagttgtcttttttgctttcagttaattagcctcatctaaaacaagtaaacattactaatgagatgtttttgccttcacaggtgattgaagtgggaaaaaatgatgacctggaggactctaagtccttaagtgatgataccgatgtagaggttacctctgaggtatgaatctttagcaagaactattttgcaccagccccatcttcagatgatgtaatcccagcagttcacttgtgttgaagagtgctgtttacccctcatttctgtctcccttgcctagttgctaagtgatgttggt

SEQ ID NO: 322329 - DNA, 509 bp, Homo sapiens
cgtgtgggaggccggaagttgcggcttcattactcgccatttcaaaatgctgccgaggccctaggatctgtgactgccacccctccccccacccgggctcggcgggggagcgactcatggagctgccgtaagttttaccaacagactgcagtttcttcactaccaaaatgacatcattttccacctctgctcagtgttcaacatctgacagtgcttgcaggatctctcctggacaaatcaatcaggtacgaccaaaactgccgcttttgaagattttgcatgcagcaggtgcgcaaggtgaaatgttcactgttaaagaggtcatgcactatttaggtcagtacataatggtgaagcaactttatgatcagcaggagcagcatatggtatattgtggtggagatcttttgggagaactactgggacgtcagagcttctccgtgaaagacccaagccctctctatgatcgctttctacactgtattacataaataaattaaataaaataa

SEQ ID NO: 322330 - DNA, 4502 bp, Homo sapiens
cgtgtgggaggccggaagttgcggcttcattactcgccatttcaaaatgctgccgaggccctaggatctgtgactgccacccctccccccacccgggctcggcgggggagcgactcatggagctgccgtaagttttaccaacagactgcagtttcttcactaccaaaatgacatcattttccacctctgctcagtgttcaacatctgacagtgcttgcaggatctctcctggacaaatcaatcaggtacgaccaaaactgccgcttttgaagattttgcatgcagcaggtgcgcaaggtgaaatgttcactgttaaagaggtcatgcactatttaggtcagtacataatggtgaagcaactttatgatcagcaggagcagcatatggtatattgtggtggagatcttttgggagaactactgggacgtcagagcttctccgtgaaagacccaagccctctctatgatatgctaagaaagaatcttgtcactttagccactgctactacagaaatgggtcatttgttctgtagaatttcccacgctctagagttggcagattaatgtcgctttagatgaagatgctattgttttatgaagcaaacggggaaaaatccagatttcaagatcccataaccctgtatgacttaacacttgaaagttgaaattaaatgtaaaaagccatacactcttttccttttgtttgtgagttaggcgaatttggtaatatataggaagagatgacaaaaatagactccattatgtcctgcttggaaccagttttcatataaaaatttaaaagcttgatatggaagaacatttttagctatttttcactgttttttttcccgattatattttggtaatatattttggatatggcctgtcttggtctttgtcatttttatcaattttgatttttcccttgcaaatgagagctttgtccagccaacatggagaagtacatttctagggactaaacctggctcccgggttgtttgctgaggtcctttttgtgtggaaagaatggttattaccagggaaggttttccttttgttttacttgctatccagatgctgctcagactctcgctctcgcacaggatcacagtatggatattccaagtcaagaccaactgaagcaaagtgcagaggaaagttccacttccagaaaaagaactacagaagacgatatccccacactgcctacctcagagcataaatgcatacattctagagaagatgaagacttaattgaaaatttagcccaagatgaaacatctaggctggaccttggatttgaggagtgggatgtagctggcctgccttggtggtttttaggaaacttgagaagcaactatacacctagaagtaatggctcaactgatttacagacaaatcaggatgtgggtactgccattgtttcagatactacagatgacttgtggtttttgaatgagtcagtatcagagcagttaggtgttggaataaaagttgaagctgctgatactgaacaaacaagtgaagaagtagggaaagtaagtgacaaaaaggtgattgaagtgggaaaaaatgatgacctggaggactctaagtccttaagtgatgataccgatgtagaggttacctctgaggatgagtggcagtgtactgaatgcaagaaatttaactctccaagcaagaggtactgttttcgttgttgggccttgaggaaggattggtattcagattgttcaaagttaacccattctctctccacgtctgatatcactgccatacctgaaaaggaaaatgaaggaaatgatgtccctgattgtcgaagaaccatttcggctcctgtcgttagacctaaagatgcgtatataaagaaagaaaactccaaactttttgatccctgcaactcagtggaattcttggatttggctcacagttctgaaagccaagagaccatctcaagcatgggagaacagttagataacctttctgaacagagaacagatacagaaaacatggaggattgccagaatctcttgaagccatgtagcttatgtgagaaaagaccacgagacgggaacattattcatggaaggacgggccatcttgtcacttgttttcactgtgccagaagactaaagaaggctggggcttcatgccctatttgcaagaaagagattcagctggttattaaggtttttatagcataatggtagtacgaacataaaaatgcatttattcagttcacttaccacattatttgaaaatcaatcctttatttaattttatttccaacctgtcagagaatgttcttaggcatcaaaatccaaggtagctgtaagaaaaatactggagctaacaatgaagaacagaagtaatctgattagtcaaattattaagtgccatggattactttatgcagcagtcaggtacatagttaggtgaacccaaaagaaaaactcttgaaaacaagagatttcttccatgcacatttacaatattgaggtataattaacatgataaagtgtttccttctaacgagttgtagaaatctgagtaaccacccaaaaaagcaatagaatgtttgtgtcaccccaaaacactcccttctgcccctcttcagacagtccttcagctatttcatggctctcaccctagtttttttttttttttgcacttttttttttccgggggtataggggaggtgtggggcgacagggtctgtcttgttctgtctcccaggctgaagtgcagtgcagtggtatgatcatggctcactgcagccttggtttcctgggcataagtggtcttcccacttcagcctcctgagtagctgagactatagactagcataaccacactggctaattttttgtggagatgaagtctcactatgttgcccaggctggtctcgaactcctgggctcaaacaatcctcccgcctcagccttccaaattgctgggattatagtcatgaggcacctagtctggcccttttgcaagactttaatctgaaatctaaatttttaaaatttaagtacttacaaaggatatactatccaacatattgcatattatatatgtgctttaaagttttttttttttttgagagacggtctcgctttgtcatccaagctggagtgcagtggtgcaaacacggcccacctcctgggctcaagtgatcctccagcctcagcttccctcacaggcattcactatcactcccagctaattaaaataatttgtagacggtgtctcgttatgttgcccaggctggtctcgaactcctgggtttaagtgattcccccgcctcagcctcccaaagtgttgggcttacagccttgagccactatgcttggctcaaagatatttttatgaaagccctgggactatagatttagctgattaaatttatagaaaaagtcctgtcatataaactggcaaagtctgttcttaatttaattagccaaatcagacttaacttccgtcagaacatgtcttggttttaattcagataaacacacaaacatacttctctggcacagccttcagaagcatcagtttttgttttgttttgttttgttttttgagacagggtcttgctctgttgcccaggctggagtgcactggcacaatcacagttcactgcagcctcgacctcccagatccaagcaatcctcccacctaagcctcccaagtagctgggtctataggcgcgtgccaccaccatgcccagctgaattttgtattttttgtacagacagcattttgccatgttgcccaggctggtcccaaacttctagcctcaagcaaccctcctgcctcagcctctcaaagtgctaggattgcagtcctgagctactgccccctaccctctttgcgtcttaggagtcatttagattttttttgatccttttgtttagtgcctctggagctgcttacaccaaggcaatacgccttgatatactggatggttgagaggcagcctcttttttttttttttttttttttggaggatagggagtatggctgttgtgaaaagggaggtaaagagaaatggtagatctgaagaggcctcatcagagcacatattttaggacaacacatatggaaattggacatctttaagttggtttccatagagctatgcatgtatccttacccccatgggaaaatgttggtgtgttctcaagggtatgcatgtgtcattttgaagaccaaggccctagaattgtcaaacttaaggatcataaaaatcatgagggttgcttgttaaaaatgtccaaacgtgcagagactgatctttgagatctggaccaggaatttgcatttgaacaagtgttcctggaatctctatgcaagttttatacagaacatacttttggaatccttgccctagacaggggtgtccaatcttttggcttccctggtccacaatggaagaagaattgtcttggaccacacataaaatacactaacactaacaatagctgatgagctaaaaaaaaa

SEQ ID NO: 322331 - DNA, 3496 bp, Homo sapiens
ggggaaactttatagtcatcttggtacgtggcgagggtttcatatgttttctgaattatgcctaattttgtagtagactggagggtttatacagatagcctgtttttaacagtagattttggcctttgtgcagagcaaagtgcagaggaaagttccacttccagaaaaagaactacagaagacgatatccccacactgcctacctcagagcataaatgcatacattctagagaagatgaagacttaattgaaaatttagcccaagatgaaacatctaggctggaccttggatttgaggagtgggatgtagctggcctgccttggtggtttttaggaaacttgagaagcaactatacacctagaagtaatggctcaactgatttacagacaaatcaggatgtgggtactgccattgtttcagatactacagatgacttgtggtttttgaatgagtcagtatcagagcagttaggtgttggaataaaagttgaagctgctgatactgaacaaacaagtgaagaagtagggaaagtaagtgacaaaaaggtgattgaagtgggaaaaaatgatgacctggaggactctaagtccttaagtgatgataccgatgtagaggttacctctgaggatgagtggcagtgtactgaatgcaagaaatttaactctccaagcaagaggtactgttttcgttgttgggccttgaggaaggattggtattcagattgttcaaagttaacccattctctctccacgtctgatatcactgccatacctgaaaaggaaaatgaaggaaatgatgtccctgattgtcgaagaaccatttcggctcctgtcgttagacctaaagatgcgtatataaagaaagaaaactccaaactttttgatccctgcaactcagtggaattcttggatttggctcacagttctgaaagccaagagaccatctcaagcatgggagaacagttagataacctttctgaacagagaacagatacagaaaacatggaggattgccagaatctcttgaagccatgtagcttatgtgagaaaagaccacgagacgggaacattattcatggaaggacgggccatcttgtcacttgttttcactgtgccagaagactaaagaaggctggggcttcatgccctatttgcaagaaagagattcagctggttattaaggtttttatagcataatggtagtacgaacataaaaatgcatttattcagttcacttaccacattatttgaaaatcaatcctttatttaattttatttccaacctgtcagagaatgttcttaggcatcaaaatccaaggtagctgtaagaaaaatactggagctaacaatgaagaacagaagtaatctgattagtcaaattattaagtgccatggattactttatgcagcagtcaggtacatagttaggtgaacccaaaagaaaaactcttgaaaacaagagatttcttccatgcacatttacaatattgaggtataattaacatgataaagtgtttccttctaacgagttgtagaaatctgagtaaccacccaaaaaagcaatagaatgtttgtgtcaccccaaaacactcccttctgcccctcttcagacagtccttcagctatttcatggctctcaccctagtttttttttttttttgcacttttttttttccgggggtataggggaggtgtggggcgacagggtctgtcttgttctgtctcccaggctgaagtgcagtgcagtggtatgatcatggctcactgcagccttggtttcctgggcataagtggtcttcccacttcagcctcctgagtagctgagactatagactagcataaccacactggctaattttttgtggagatgaagtctcactatgttgcccaggctggtctcgaactcctgggctcaaacaatcctcccgcctcagccttccaaattgctgggattatagtcatgaggcacctagtctggcccttttgcaagactttaatctgaaatctaaatttttaaaatttaagtacttacaaaggatatactatccaacatattgcatattatatatgtgctttaaagttttttttttttttgagagacggtctcgctttgtcatccaagctggagtgcagtggtgcaaacacggcccacctcctgggctcaagtgatcctccagcctcagcttccctcacaggcattcactatcactcccagctaattaaaataatttgtagacggtgtctcgttatgttgcccaggctggtctcgaactcctgggtttaagtgattcccccgcctcagcctcccaaagtgttgggcttacagccttgagccactatgcttggctcaaagatatttttatgaaagccctgggactatagatttagctgattaaatttatagaaaaagtcctgtcatataaactggcaaagtctgttcttaatttaattagccaaatcagacttaacttccgtcagaacatgtcttggttttaattcagataaacacacaaacatacttctctggcacagccttcagaagcatcagtttttgttttgttttgttttgttttttgagacagggtcttgctctgttgcccaggctggagtgcactggcacaatcacagttcactgcagcctcgacctcccagatccaagcaatcctcccacctaagcctcccaagtagctgggtctataggcgcgtgccaccaccatgcccagctgaattttgtattttttgtacagacagcattttgccatgttgcccaggctggtcccaaacttctagcctcaagcaaccctcctgcctcagcctctcaaagtgctaggattgcagtcctgagctactgccccctaccctctttgcgtcttaggagtcatttagattttttttgatccttttgtttagtgcctctggagctgcttacaccaaggcaatacgccttgatatactggatggttgagaggcagcctcttttttttttttttttttttttggaggatagggagtatggctgttgtgaaaagggaggtaaagagaaatggtagatctgaagaggcctcatcagagcacatattttaggacaacacatatggaaattggacatctttaagttggtttccatagagctatgcatgtatccttacccccatgggaaaatgttggtgtgttctcaagggtatgcatgtgtcattttgaagaccaaggccctagaattgtcaaacttaaggatcataaaaatcatgagggttgcttgttaaaaatgtccaaacgtgcagagactgatctttgagatctggaccaggaatttgcatttgaacaagtgttcctggaatctctatgcaagttttatacagaacatacttttggaatccttgccctagacaggggtgtccaatcttttggcttccctggtccacaatggaagaagaattgtcttggaccacacataaaatacactaacactaacaatagctgatgagctaaaaaaaaa

SEQ ID NO: 322332 - DNA, 1669 bp, Homo sapiens
cgtgtgggaggccggaagttgcggcttcattactcgccatttcaaaatgctgccgaggccctaggatctgtgactgccacccctccccccacccgggctcggcgggggagcgactcatggagctgccgtaagttttaccaacagactgcagtttcttcactaccaaaatgacatcattttccacctctgctcagtgttcaacatctgacagtgcttgcaggatctctcctggacaaatcaatcaggtacgaccaaaactgccgcttttgaagattttgcatgcagcaggtgcgcaaggtgaaatgttcactgttaaagaggtcatgcactatttaggtcagtacataatggtgaagcaactttatgatcagcaggagcagcatatggtatattgtggtggagatcttttgggagaactactgggacgtcagagcttctccgtgaaagacccaagccctctctatgatatgctaagaaagaatcttgtcactttagccactgctactacagatgctgctcagactctcgctctcgcacaggatcacagtatggatattccaagtcaagaccaactgaagcaaagtgcagaggaaagttccacttccagaaaaagaactacagaagacgatatccccacactgcctacctcagagcataaatgcatacattctagagaagatgaagacttaattgaaaatttagcccaagatgaaacatctaggctggaccttggatttgaggagtgggatgtagctggcctgccttggtggtttttaggaaacttgagaagcaactatacacctagaagtaatggctcaactgatttacagacaaatcaggatgtgggtactgccattgtttcagatactacagatgacttgtggtttttgaatgagtcagtatcagagcagttaggtgttggaataaaagttgaagctgctgatactgaacaaacaagtgaagaagtagggaaagtaagtgacaaaaaggtgattgaagtgggaaaaaatgatgacctggaggactctaagtccttaagtgatgataccgatgtagaggttacctctgaggatgagtggcagtgtactgaatgcaagaaatttaactctccaagcaagaggtactgttttcgttgttgggccttgaggaaggattggtattcagattgttcaaagttaacccattctctctccacgtctgatatcactgccatacctgaaaaggaaaatgaaggaaatgatgtccctgattgtcgaagaaccatttcggctcctgtcgttagacctaaagatgcgtatataaagaaagaaaactccaaactttttgatccctgcaactcagtggaattcttggatttggctcacagttctgaaagccaagagaccatctcaagcatgggagaacagttagataacctttctgaacagagaacagatacagaaaacatggaggattgccagaatctcttgaagccatgtagcttatgtgagaaaagaccacgagacgggaacattattcatggaaggacgggccatcttgtcacttgttttcactgtgccagaagactaaagaaggctggggcttcatgccctatttgcaagaaagagattcagctggttattaaggtttttatagcataatggtagtacgaacataaaaatgcatttat

SEQ ID NO: 322333 - DNA, 341 bp, Homo sapiens
ataaagtagcctgatgttagcgaaaactctctctgaggtcagatgattgcatttgcaaagtcctatgatgtcacatggaaggcaaatatctgcagtttcttagttctgctctgacatgtgtgtcatcaggaataatctctttgcctctggtgtagttggcaccgacactatccctttctcaaaatctctcccatgttgtttgtgctggaacagcctccccaccccttcattctgtcatccctctcccttgccttaacccacaattcttcatgatgttgatactgtatttgatatccaaaaatgacagcatagtttagctttggggttcaaactgatgtctg

SEQ ID NO: 322334 - DNA, 1417 bp, Homo sapiens
tcatcagtataaacataaatttattaccttggttaaatactacaatgaacagaaaaaacattagcatctgaacgtcttgtaagctagttgtaaggcagaatatgtttgttcactcagaaatcaaattttttaaaaaaaattatttaaatatgcgtaattctcaggcaaaactgataagtgccaaatgagtgatcaataagctccaatccttagctttttgtatactggttgcatttttaatgcaaaaaaatgcacttctgtggctgaaaaaaaaaaaagatggcaaacgaaataaagaaactgaggaagaactatgagtgaaggaataaaatacataaacatgaatatatcttcataggtatatacaccttatcaaacactatatttttgtagcttctaagtcacctttcccaactttttaattcacatatatgattgagaaaggcactttgtgaatatattttctttaaagatataaaataataccttaaaatgatacagcagagtcaatacgttatacggtagattctaatctggtatggttaggagagctgttatttcaccaaatcaggcatggaaaatcagtaaatagacaagaatgtgatactagtatcaaagcgttgtctgtatatgaagccttaaaagcaaaaaaaccccataaccctgaaaaaaacaaaagtattaataagcttgttttaaaacaactgatttcccagacccacctaacatgcaaagacaagaggaacattcctcactcagtcagaatctacactgaaacttatgtgaatgaacttgacccgggctggcagcaatccagcaatcttcgtcactgaatgacttaacagaacactgtgttcttggcaaaagcacaaaaaatgtgttgaaatccacactaaaaaaaaaaaaaaaatctcagtatagatttaaatcaattttaaaatacaatgataaaagatactaaaatataataagggattttcagtgtttggtacatatttaattcaggtaacatttttaccctcatgccattttggtcactttcaatcttcccttgaacaattgctccaaccctctccccaccacactaaacctacgctctggcctcctcctgtgttacaacttctccaacactgtacctggaaaattccaaagcaacctaagcttgcatattagggagggacagcaagaaaagccagaaacaatgtgttgactcacttccgtggaaagccctagagaaaaatctaggccacagttcagcactctcacgcgttgcagctggagcaggtaagaggcggtgaagttatgtcattctcacacaggtcctgctaattcggccacaagggtaagatgcaaatgagaaggtaagtaaaatacaatctggcgtatatataagtatgcaggcagtctacacactttc

SEQ ID NO: 322335 - DNA, 336 bp, Homo sapiens
tttgaaaagggcagagtcaaacacaattttatgttgttacgggatgttaaaaactgcacccagggctggacacggtggctcactcctgtaatcccagcacctggggaggctgacgcaggcagatcacaaggtcaggagttcaagaccagcctggccaacatagtgaaaccctgtctctactaaaaatacaaaaattagctgggcatggtggtgcatgcctgtagtctcagctacttgagaggctgaggcaagagaatcgcttgaacccaggagttggaggttgcagtgagccaagattgtgccactgggctccagcttgggcaacagagtgacact

SEQ ID NO: 322336 - DNA, 1059 bp, Homo sapiens
atgtcagccccactggatgccgccctccacgcccttcaggaggagcaggccagaccgccctccacgcccttcaggaggagcaggccagactcaagatgaggctgtgggacctgcagcagctgagaaaggagctcggggactcccccaaagacaaggtcccattttcagtgcccaagatccccctggtattccgaggacacacccagcaggacccggaagtgcctaagtctttagtttccaatttgcggatccactgccctctgcttgcgggctctgctctgatcacctttgatgaccccaaagtggctgagcaggtgctgcaacaaaaggagcacacgatcaacatggaggagtgccggctgcgggtgcaggtccagcccttggagctgcccatggtcaccaccatccaggtgatggtgtccagccagttgagtggccggagggtgttggtcactggatttcctgccagcctcaggctgagtgaggaggagctgctggacaagctagagatcttctttggcaagactaggaacggaggtggcgatgtggacgttcgggagctactgccagggagtgtcatgctggggtttgctagggatggagtggctcagcgtctgtgccaaatcggccagttcacagtgccactgggtgggcagcaagtccctctgagagtctctccgtatgtgaatggggagatccagaaggctgagatcaggtcgcagccagttccccgctcggtactggtgctcaacattcctgatatcttggatggcccggagctgcatgacgtcctggagatccacttccagaagcccacccgcgggggcggggaggtagaggccctgacagtcgtaccccaaggacagcagggcctagcagtcttcacctctgagtcaggctaggggcctccccttctcatcctccccacccccccgccaaggttctcacactggcctgggcttgggtgcccatataggaggtctgtatgttcaccaacagtgcggaggggtcacacattgcaaaacactgcccagaacagtaaaaagagcctgcatgcca

SEQ ID NO: 322337 - DNA, 198 bp, Homo sapiens
gtatagaggagaataaggagacacacaaataatgtggtgtgagcagaagaagttatatcctccccacccccccgccaaggttctcacactggcctgggcttgggtgcccatataggaggtctgtatgttcaccaacagtgcggaggggtcacacattgcaaaacactgcccagaacagtaaaaagagcctgcatgcca

SEQ ID NO: 322338 - DNA, 1214 bp, Homo sapiens
aaactaggctaggtacgagcctgggtggtgagaaagctgcgagcagagctcctgaggtgtatttcgggtcttgctggggctgagagagacacagccctttggggggtacaaacaagagttcagttgctgtgaattctgccactgtgcccagctctgaagcctcagctcttgccaaacagacccgagacccatgtcagccccactggatgccgccctccacgcccttcaggaggagcaggccagactcaagatgaggctgtgggacctgcagcagctgagaaaggagctcggggactcccccaaagacaaggtcccattttcagtgcccaagatccccctggtattccgaggacacacccagcaggacccggaagtgcctaagtctttagtttccaatttgcggatccactgccctctgcttgcgggctctgctctgatcacctttgatgaccccaaagtggctgagcaggtgctgcaacaaaaggagcacacgatcaacatggaggagtgccggctgcgggtgcaggtccagcccttggagctgcccatggtcaccaccatccaggtgatggtgtccagccagttgagtggccggagggtgttggtcactggatttcctgccagcctcaggctgagtgaggaggagctgctggacaagctagagatcttctttggcaagactaggaacggaggtggcgatgtggacgttcgggagctactgccagggagtgtcatgctggggtttgctagggatggagtggctcagcgtctgtgccaaatcggccagttcacagtgccactgggtgggcagcaagtccctctgagagtctctccgtatgtgaatggggagatccagaaggctgagatcaggtcgcagccagttccccgctcggtactggtgctcaacattcctgatatcttggatggcccggagctgcatgacgtcctggagatccacttccagaagcccacccgcgggggcggggaggtagaggccctgacagtcgtaccccaaggacagcagggcctagcagtcttcacctctgagtcaggctaggggcctccccttctcatcctccccacccccccgccaaggttctcacactggcctgggcttgggtgcccatataggaggtctgtatgttcaccaacagtgcggaggggtcacacattgcaaaacactgcccagaacagtaaaaagagcctgcatgcca

SEQ ID NO: 322339 - DNA, 1120 bp, Homo sapiens
cttgagcttagcatcaactctgcttttggagcgtccagaataggccccccttcccctgggcttgttgattctctggaagggcgggtagaagtcttgttgtttccttctgccccaaccgccctccacgcccttcaggaggagcaggccagactcaagatgaggctgtgggacctgcagcagctgagaaaggagctcggggactcccccaaagacaaggtcccattttcagtgcccaagatccccctggtattccgaggacacacccagcaggacccggaagtgcctaagtctttagtttccaatttgcggatccactgccctctgcttgcgggctctgctctgatcacctttgatgaccccaaagtggctgagcaggtgctgcaacaaaaggagcacacgatcaacatggaggagtgccggctgcgggtgcaggtccagcccttggagctgcccatggtcaccaccatccaggtgatggtgtccagccagttgagtggccggagggtgttggtcactggatttcctgccagcctcaggctgagtgaggaggagctgctggacaagctagagatcttctttggcaagactaggaacggaggtggcgatgtggacgttcgggagctactgccagggagtgtcatgctggggtttgctagggatggagtggctcagcgtctgtgccaaatcggccagttcacagtgccactgggtgggcagcaagtccctctgagagtctctccgtatgtgaatggggagatccagaaggctgagatcaggtcgcagccagttccccgctcggtactggtgctcaacattcctgatatcttggatggcccggagctgcatgacgtcctggagatccacttccagaagcccacccgcgggggcggggaggtagaggccctgacagtcgtaccccaaggacagcagggcctagcagtcttcacctctgagtcaggctaggggcctccccttctcatcctccccacccccccgccaaggttctcacactggcctgggcttgggtgcccatataggaggtctgtatgttcaccaacagtgcggaggggtcacacattgcaaaacactgcccagaacagtaaaaagagcctgcatgcca

SEQ ID NO: 322340 - DNA, 1287 bp, Homo sapiens
cggacgcgtgggtcgacccacgcgtccgggcatgtgagcgccagaaggcagggatttcacggaaatgaaagtggaagcaaacagcctgcgagcagagcctcctgaggtgtatttcgggtcttgctggggctgagagagaccacagccctttggggggtacaaacaagagttcagttgctgtgaattctgccactgtgcccagctctgaagcctcagctcttgccaaacagacccgagacccatgtcagccccactggatgccgccctccacgcccttcaggaggagcaggccagactcaagatgaggctgtgggacctgcagcagctgagaaaggagctcggggactcccccaaagacaaggtcccattttcagtgcccaagatccccctggtattccgaggacacacccagcaggacccggaagtgcctaagtctttagtttccaatttgcggatccactgccctctgcttgcgggctctgctctgatcacctttgatgaccccaaagtggctgagcaggtgctgcaacaaaaggagcacacgatcaacatggaggagtgccggctgcgggtgcaggtccagcccttggagctgcccatggtcaccaccatccaggtgatggtgtccagccagttgagtggccggagggtgttggtcactggatttcctgccagcctcaggctgagtgaggaggagctgctggacaagctagagatcttctttggcaagactaggaacggaggtggcgatgtggacgttcgggagctactgccagggagtgtcatgctggggtttgctagggatggagtggctcagcgtctgtgccaaatcggccagttcacagtgccactgggtgggcagcaagtccctctgagagtctctccgtatgtgaatggggagatccagaaggctgagatcaggtcgcagccagttccccgctcggtactggtgctcaacattcctgatatcttggatggcccggagctgcatgacgtcctggagatccacttccagaagcccacccgcgggggcggggaggtagaggccctgacagtcgtaccccaaggacagcagggcctagcagtcttcacctctgagtcaggctaggggcctccccttctcatcctccccacccccccgccaaggttctcacactggcctgggcttgggtgcccatataggaggtctgtatgttcaccaacagtgcggaggggtcacacattgcaaaacactgcccagaacagtaaaaagagcctgcatgccaaaaaaaaaaaagaaaagttttg

SEQ ID NO: 322341 - DNA, 1154 bp, Homo sapiens
cggacgcgtgggtcgacccacgcgtccgggcatgtgagcgccagaaggcagggatttcacggaaatgaaagtggaagcaaacagcctgcgagcagagcctcctgaggtgtatttcgggtcttgctggggctgagagagaccacagccctttggggggtacaaacaagagttcagttgctgtgaattctgccactgtgcccagctctgaagcctcagctcttgccaaacagacccgagacccatgtcagccccactggatgccgccctccacgcccttcaggaggagcaggccagactcaagatgaggctgtgggacctgcagcagctgagaaaggagctcggggactcccccaaagacaaggtcccattttcagtgcccaagatccccctggtattccgaggacacacccagcaggacccggaagtgcctaagtctttagtttccaatttgcggatccactgccctctgcttgcgggctctgctctgatcacctttgatgaccccaaagtggctgagcaggtgctgcaacaaaaggagcacacgatcaacatggaggagtgccggctgcgggtgcaggtccagcccttggagctgcccatggtcaccaccatccaggtgatggtgtccagccagttgagtggccggagggtgttggtcactggatttcctgccagcctcaggctgagtgaggaggagctgctggacaagctagagatcttctttggcaagactaggaacggaggtggcgatgtggacgttcgggagctactgccagggagtgtcatgctggggtttgctagggatggagtggctcagcgtctgtgccaaatcggccagttcacagtgccactgggtgggcagcaagtccctctgagagtctctccgtatgtgaatggggagatccagaaggctgagatcaggtcgcagccagttccccgctcggtactggtgctcaacattcctgatatcttggatggcccggagctgcatgacgtcctggagatccacttccagaagcccacccccccgccaaggttctcacactggcctgggcttgggtgcccatataggaggtctgtatgttcaccaacagtgcggaggggtcacacattgcaaaacactgcccagaacagtaaaaagagcctgcatgcca

SEQ ID NO: 322342 - DNA, 1265 bp, Homo sapiens
cggacgcgtgggtcgacccacgcgtccgggcatgtgagcgccagaaggcagggatttcacggaaatgaaagtggaagcaaacagcctgcgagcagagcctcctgaggtgtatttcgggtcttgctggggctgagagagaccacagccctttggggggtacaaacaagagttcagttgctgtgaattctgccactgtgcccagctctgaagcctcagctcttgccaaacagacccgagacccatgtcagccccactggatgccgccctccacgcccttcaggaggagcaggccagactcaagatgaggctgtgggacctgcagcagctgagaaaggagctcggggactcccccaaagacaaggtcccattttcagtgcccaagatccccctggtattccgaggacacacccagcaggacccggaagtgcctaagtctttagtttccaatttgcggatccactgccctctgcttgcgggctctgctctgatcacctttgatgaccccaaagtggctgagcaggtgctgcaacaaaaggagcacacgatcaacatggaggagtgccggctgcgggtgcaggtccagcccttggagctgcccatggtcaccaccatccaggtgatggtgtccagccagttgagtggccggagggtgttggtcactggatttcctgccagcctcaggctgagtgaggaggagctgctggacaagctagagatcttctttggcaagactaggaacggaggtggcgatgtggacgttcgggagctactgccagggagtgtcatgctggggtttgctagggatggagtggctcagcgtctgtgccaaatcggccagttcacagtgccactgggtgggcagcaagtccctctgagagtctctccgtatgtgaatggggagatccagaaggctgagatcaggtcgcagccagttccccgctcggtactggtgctcaacattcctgatatcttggatggcccggagctgcatgacgtcctggagatccacttccagaagcccacccgcgggggcggggaggtagaggccctgacagtcgtaccccaaggacagcagggcctagcagtcttcacctctgagtcaggctaggggcctccccttctcatcctccccacccccccgccaaggttctcacactggcctgggcttgggtgcccatataggaggtctgtatgttcaccaacagtgcggaggggtcacacattgcaaaacactgcccagaacagtaaaaagagcctgcatgcca

SEQ ID NO: 322343 - DNA, 1358 bp, Homo sapiens
cggacgcgtgggtcgacccacgcgtccgggcatgtgagcgccagaaggcagggatttcacggaaatgaaagtggaagcaaacagcctgcgagcagagcctcctgaggtgtatttcgggtcttgctggggctgagagagaccacagccctttggggggtacaaacaagagttcagttgctgtgaattctgccactgtgcccagctctgaagcctcagctcttgccaaacagacccgagacccatgtcagccccactggatgccgccctccacgcccttcaggaggagcaggccagactcaagatgaggctgtgggacctgcagcagctgagaaaggagctcggggactcccccaaagacaaggtcccattttcagtgcccaagatccccctggtattccgaggacacacccagcaggacccggaagtgcctaagtctttagtttccaatttgcggatccactgccctctgcttgcgggctctgctctgatcacctttgatgaccccaaagtggctgagcaggtgctgcaacaaaaggagcacacgatcaacatggaggagtgccggctgcgggtgcaggtccagcccttggagctgcccatggtcaccaccatccaggtgatggtgtccagccagttgagtggccggagggtgttggtcactggatttcctgccagcctcaggctgagtgaggaggagctgctggacaagctagagatcttctttggcaagactaggaacggaggtggcgatgtggacgttcgggagctactgccagggagtgtcatgctggggtttgctagggatggagtggctcagcgtctgtgccaaatcggccagttcacagtgccactgggtgggcagcaagtccctctgagagtctctccgtatgtgaatggggagatccagaaggctgagatcaggtcgcagccagttccccgctcggtactggtgctcaacattcctgatatcttggatggcccggagctgcatgacgtcctggagatccacttccagaagcccacccgcgggggcggggaggtagaggccctgacagtcgtaccccaaggacagcagggcctagcagtcttcacctctgagtcaggctaggggcctccccttctcatcctccccacccccccgccaaggttctcacactggcctgggcttgggtgcccatataggaggtctgtatgttcaccaacagtgcggaggggtcacacattgcaaaacactgcccagaacagtaaaaagagcctgcatgccaaacaatcataacatcaaaaaagggggcgcctaaaattcccgggggccaattttcgtatcccgttttttccagggccataggaggctttaacca

SEQ ID NO: 322344 - DNA, 957 bp, Homo sapiens
cttcctcctaggtgggagtgaggaacactcctactcccctcccctacttccaggtcccattttcagtgcccaagatccccctggtattccgaggacacacccagcaggacccggaagtgcctaagtctttagtttccaatttgcggatccactgccctctgcttgcgggctctgctctgatcacctttgatgaccccaaagtggctgagcaggtgctgcaacaaaaggagcacacgatcaacatggaggagtgccggctgcgggtgcaggtccagcccttggagctgcccatggtcaccaccatccaggtgatggtgtccagccagttgagtggccggagggtgttggtcactggatttcctgccagcctcaggctgagtgaggaggagctgctggacaagctagagatcttctttggcaagactaggaacggaggtggcgatgtggacgttcgggagctactgccagggagtgtcatgctggggtttgctagggatggagtggctcagcgtctgtgccaaatcggccagttcacagtgccactgggtgggcagcaagtccctctgagagtctctccgtatgtgaatggggagatccagaaggctgagatcaggtcgcagccagttccccgctcggtactggtgctcaacattcctgatatcttggatggcccggagctgcatgacgtcctggagatccacttccagaagcccacccgcgggggcggggaggtagaggccctgacagtcgtaccccaaggacagcagggcctagcagtcttcacctctgagtcaggctaggggcctccccttctcatcctccccacccccccgccaaggttctcacactggcctgggcttgggtgcccatataggaggtctgtatgttcaccaacagtgcggaggggtcacacattgcaaaacactgcccagaacagtaaaaagagcctgcatgcca

SEQ ID NO: 322345 - DNA, 1130 bp, Homo sapiens
tgcagggcggggtgggcgggggtagcaggaagaatgtctcagggctatgtgagactggcaggagaagataagactttatgcctgagctcagtcgtttagttcctggtgtatgtgcttttgaatgtttatgttcataaagtcaccattttctgtttcctcttcgggaatgtttttactaacatgagtggctattcagagtattgcaatagatgagctgcttttaaatttgctttaagtcaggtgttcaaggttttctttggacagctcccaaggtagaaatggaagactctagacactatatgaagaaaaagatcaggaaagctctcctcttctttggtcttaggggatgttttgtttttagtgtttccatcctggtgaatgtctccatagccttcacttcttatgtttgttatacagagactcatgtttttctagatgcagagtttttatccacaaggaaacagttcttaacaccacacagtaaccactctcaatatttcttgcataagttcatgggatcagagactagagctaagtcaggctgttttgctacatgggattgttttggtcaccaagtgtacaagcagtggtggtctgtggtcgcctgcacataggccaggaggacagtgtgtgtcatgactgaaactctcctttgtctctgtgtgtggcaggtctggcagacccgtctgcgttaacacaagcggttgctgcctaccaaggctgtcattttataggcatgcctgaatgtgaggtaaagtaatcagctcatttcttgcaaatcacttcttttctctctcgtgctctgtccctttgtagatttgaataaatgtccctccttcaccattggtgtattggacccactgagtatgctgcttggctttggaattccaattgtagactcttagactcctagagagggaaaccttctgtgtcaacgaggtcatgtttcaaactgttctcgggattccggggttcagagcacatgctccatatgttccagggagcagaaaggttaaaggagctgaacagcaaagcctctgcaagttcgcccccagagcagcttcatattcatctcttttatatattgggggcttaagaaaaatttaatgtagtaaaaagtccttcagtaa

SEQ ID NO: 322346 - DNA, 1504 bp, Homo sapiens
gtttagtcttgggagggtgtatatgtccaggaatttatccatttcttctagattttctagcttatttttgtagcagtgtttgtagtattctctgctggcagctttgtgcaatgaattaatgttataaggaattatctattttgtcatagtatttaagtcataatgtcatttcagaattcagttctgtaggattttcttttctttaaaaaatgtatattctgggtagttttaattggtaaaaaaatgtaattgtgatttaatactgcatagtgttttgggtattttttttatatgcaaaggtcttacgagccaataaaactatttcaaagtactcttcgattctgtcatggttttcctgcctggatgctaggtaccagcgttgtcaccattgcatttggtgggtggatactgggaaggagaaatcaccccagatgggaagagtggggagcttaagttaagaagtcagtgttatcttgttgaaagttaactctgatctctttaaaggaatacataaaggaattctttaaatggcttgtggaagactccagtagtcccatgcccattttttcccacttgtcctggtttcttcttgcagctccatatttctaaacagtcgtttttcttttactttatgtgtgtcctgaacacaaaatacgccactccttctgctcagttaagagttatttgtccctactgctacttcctctccctctccttagttgcatgtcgtgcatatgcccacaaggatggccccttcaggtagtcggttctcctcctgccgttgcgtgatccctcctggggtcctcctgccatgtctggaaggctgccggctgttggcctgggacgtcctctgcctttattctgagtgagatgcccattttctggatgctccatcccgccttactggtttattccgctatttcagtgcaacccatcctctagtagttttatcaggctggagggactgtatgttgcagaggcttggcccgactggcctccctccttctgtctggagtggttgcactgcagtgtgcagttgccatccccagaatctcccttcatcatcaccctggagctttcctctgcttctccctgcaccccatctgatgacaggactgactgctttctggcacaggtggcatgtaccctctagtagctttatggagcaggggtgtgtggaggaaaagtatttttagacctcaggagactcaaaatgcttttattgtaccttcagacgtgtctgagggtttggctagtaataaattgtaggtaagaaattgtgcattgttttacactttcccacattgttgtcaagtttgaaggcatcctgatgtgtgtggtcttttgtttgtaacctctatcaacttgtagactcttctgtctttgctccccgtgttttaaaagtctgcactgggtacttgttgggcctttcaatctggaaactcctttcagttctagggaagtttctttttttattcaataaatttatttatttatgaaaaaa

SEQ ID NO: 322347 - DNA, 4129 bp, Homo sapiens
cacttcactttctccacctcttccctgcactgaaaaaaggccattttctccagctggttgctgttataacacgtgttgaattcttccagcctcttcacttttaacatcttagtagtgagtccgattaagctactttctggagtgtggttttcgtctccctctgtctccgatttataaatcaggacacaattatgactcttcagtgcttctttctcttgaatgccgcgcgaggcgcctccgccgccggggcaaacggccacgaactacacttcccgacacgccgcgtgaggcgctgccagcggccggccgagggcgggcggacgcgggagctgcggacgtgaggcatgagcggcgccctcctccggcccgcgagcgtcctgctggttccccgagcgagggtctcgcggcgcggggcctagcggagggcatcgaaggcctccgcgtgcgcacgggttgctgcggccgcgccgggcgccggggagggcggcggccgccatggaggtgagcgggccggaagacgaccccttcctttcgcagctgcaccaggtgcagtgccccgtgtgccagcagatgatgcccgccgcgcacatcaactcgcacctggaccgctgtctgctgctccacccggcggggcacgcggagcccgcggccgggtcgcaccgcgccggggagcgggccaaggggccctcgccgcccggcgccaagaggcggcggctgtcggagagctcggcgctgaagcagccagccaccccgacggcagccgagagcagcgagggcgagggtgaggagggcgacgacggcggcgagaccgagagccgcgagagctacgacgcgccgcccacacccagcggcgcccgccttatccccgacttcccggtggcccgctccagcagccccgggaggaaggggtcggggaagaggccggcggccgccgccgcggcggggagcgcgtctccgcgcagctgggacgaggcggaggcgcaggaggaggaggaggccgtgggcgacggcgatggcgacggggacgcggacgcggacggcgaggacgacccggggcactgggacgcggacgctgccgaagccgccaccgccttcggggccagtggcgggggccgcccgcacccccgggcgctggctgccgaggagatccgacagatgctacagggcaagccgctggccgacacgatgcgtcctgacacgctgcaggattacttcgggcagagcaaggccgtgggccaggataccctgctgcgctcgctcctggagaccaacgaaatcccctcgcttatcctgtgggggccgccgggctgcggcaagaccactctggctcacatcatagccagcaacagcaagaaacatagcataaggtttgtgacattatctgcaacaaatgccaagacaaatgatgtgcgagatgtcataaaacaagctcaaaatgaaaagagctttttcaaaaggaaaaccatcctttttattgatgagattcatcggttcaataaatctcagcaggacactttccttcctcacgtggaatgtgggacgatcactctgattggggcaaccactgaaaacccttccttccaggtcaacgctgctcttctgagccgctgtcgagtgattgttcttgagaagcttccagtagaggcaatggtgactattttaatgcgagcgatcaactccctgggaatccacgtcctagactctagccgtcccactgaccctctgagccacagcagcaacagcagctcagagcccgccatgttcatagaggataaagcagtagacaccctggcttacctcagtgacggtgacgcccgagctgggttgaacggactgcagctggcggtgctggctaggttaagctctaggaagatgttctgtaagaagagtgggcaatcctattctcccagtagagttctgatcacagagaatgacgtgaaggagggcctacagcgatcccacattttatatgaccgggcaggtgaggagcattacaactgcatctccgccctgcacaagtccatgcggggctcagaccagaacgcctccctctactggctggctcgcatgctcgagggaggagaggacccactctacgtggcacggaggcttgtcaggtttgccagcgaggacataggtctggcagacccgtctgcgttaacacaagcggttgctgcctaccaaggctgtcattttataggcatgcctgaatgtgaggtgcttctggcccagtgtgtggtctactttgccagagccccaaagtccattgaggtgtacagcgcctacaacaacgtcaaagcctgcctgaggaaccaccaggggccactgccccccgtgcccctgcacctgaggaacgcgcccactaggctgatgaaggatttgggctatggcaaaggctacaagtacaaccccatgtacagcgagcctgtggatcaggagtacctgcctgaagagttgaggggggtagatttcttcaagcagaggaggtgctgactcctcagggcacgacagcagaaggatgttgcttttttaagggagggccagaaagaaagttagtggattgcaaagttggttgcctggtggaagttagaacagaccaacattttgtgccagaaatttaagagttccataggtggaggcgcagttctttcgaataaatgtgtaactttgaaattgtgttcatttgcactcggtgcagcggttatgcttatgaaaatacctggcagctttgtgcaatgaattaatgttataaggaattatctattttgtcatagtatttaagtcataatgtcatttcagaattcagttctgtaggattttcttttctttaaaaaatgtatattctgggtagttttaattggtaaaaaaatgtaattgtgatttaatactgcatagtgttttgggtattttttttatatgcaaaggtcttacgagccaataaaactatttcaaagtactcttcgattctgtcatggttttcctgcctggatgctaggtaccagcgttgtcaccattgcatttggtgggtggatactgggaaggagaaatcaccccagatgggaagagtggggagcttaagttaagaagtcagtgttatcttgttgaaagttaactctgatctctttaaaggaatacataaaggaattctttaaatggcttgtggaagactccagtagtcccatgcccattttttcccacttgtcctggtttcttcttgcagctccatatttctaaacagtcgtttttcttttactttatgtgtgtcctgaacacaaaatacgccactccttctgctcagttaagagttatttgtccctactgctacttcctctccctctccttagttgcatgtcgtgcatatgcccacaaggatggccccttcaggtagtcggttctcctcctgccgttgcgtgatccctcctggggtcctcctgccatgtctggaaggctgccggctgttggcctgggacgtcctctgcctttattctgagtgagatgcccattttctggatgctccatcccgccttactggtttattccgctatttcagtgcaacccatcctctagtagttttatcaggctggagggactgtatgttgcagaggcttggcccgactggcctccctccttctgtctggagtggttgcactgcagtgtgcagttgccatccccagaatctcccttcatcatcaccctggagctttcctctgcttctccctgcaccccatctgatgacaggactgactgctttctggcacaggtggcatgtaccctctagtagctttatggagcaggggtgtgtggaggaaaagtatttttagacctcaggagactcaaaatgcttttattgtaccttcagacgtgtctgagggtttggctagtaataaattgtaggtaagaaattgtgcattgttttacactttcccacattgttgtcaagtttgaaggcatcctgatgtgtgtggtcttttgtttgtaacctctatcaacttgtagactcttctgtctttgctccccgtgttttaaaagtctgcactgggtacttgttgggcctttcaatctggaaactcctttcagttctagggaagtttctttttttattcaataaatttatttatttatgaaaaaa

SEQ ID NO: 322348 - DNA, 2881 bp, Homo sapiens
cacttcactttctccacctcttccctgcactgaaaaaaggccattttctccagctggttgctgttataacacgtgttgaattcttccagcctcttcacttttaacatcttagtagtgagtccgattaagctactttctggagtgtggttttcgtctccctctgtctccgatttataaatcaggacacaattatgactcttcagtgcttctttctcttgaatgccgcgcgaggcgcctccgccgccggggcaaacggccacgaactacacttcccgacacgccgcgtgaggcgctgccagcggccggccgagggcgggcggacgcgggagctgcggacgtgaggcatgagcggcgccctcctccggcccgcgagcgtcctgctggttccccgagcgagggtctcgcggcgcggggcctagcggagggcatcgaaggcctccgcgtgcgcacgggttgctgcggccgcgccgggcgccggggagggcggcggccgccatggaggtgagcgggccggaagacgaccccttcctttcgcagctgcaccaggtgcagtgccccgtgtgccagcagatgatgcccgccgcgcacatcaactcgcacctggaccgctgtctgctgctccacccggcggggcacgcggagcccgcggccgggtcgcaccgcgccggggagcgggccaaggggccctcgccgcccggcgccaagaggcggcggctgtcggagagctcggcgctgaagcagccagccaccccgacggcagccgagagcagcgagggcgagggtgaggagggcgacgacggcggcgagaccgagagccgcgagagctacgacgcgccgcccacacccagcggcgcccgccttatccccgacttcccggtggcccgctccagcagccccgggaggaaggggtcggggaagaggccggcggccgccgccgcggcggggagcgcgtctccgcgcagctgggacgaggcggaggcgcaggaggaggaggaggccgtgggcgacggcgatggcgacggggacgcggacgcggacggcgaggacgacccggggcactgggacgcggacgctgccgaagccgccaccgccttcggggccagtggcgggggccgcccgcacccccgggcgctggctgccgaggagatccgacagatgctacagggcaagccgctggccgacacgatgcgtcctgacacgctgcaggattacttcgggcagagcaaggccgtgggccaggataccctgctgcgctcgctcctggagaccaacgaaatcccctcgcttatcctgtgggggccgccgggctgcggcaagaccactctggctcacatcatagccagcaacagcaagaaacatagcataaggtttgtgacattatctgcaacaaatgccaagacaaatgatgtgcgagatgtcataaaacaagctcaaaatgaaaagagctttttcaaaaggaaaaccatcctttttattgatgagattcatcggttcaataaatctcagcaggtcaacgctgctcttctgagccgctgtcgagtgattgttcttgagaagcttccagtagaggcaatggtgactattttaatgcgagcgatcaactccctgggaatccacgtcctagactctagccgtcccactgaccctctgagccacagcagcaacagcagctcagagcccgccatgttcatagaggataaagcagtagacaccctggcttacctcagtgacggtgacgcccgagctgggttgaacggactgcagctggcggtgctggctaggttaagctctaggaagatgttctgtaagaagagtgggcaatcctattctcccagtagagttctgatcacagagaatgacgtgaaggagggcctacagcgatcccacattttatatgaccgggcaggtgaggagcattacaactgcatctccgccctgcacaagtccatgcggggctcagaccagaacgcctccctctactggctggctcgcatgctcgagggaggagaggacccactctacgtggcacggaggcttgtcaggtttgccagcgaggacataggtctggcagacccgtctgcgttaacacaagcggttgctgcctaccaaggctgtcattttataggcatgcctgaatgtgaggtgcttctggcccagtgtgtggtctactttgccagagccccaaagtccattgaggtgtacagcgcctacaacaacgtcaaagcctgcctgaggaaccaccaggggccactgccccccgtgcccctgcacctgaggaacgcgcccactaggctgatgaaggatttgggctatggcaaaggctacaagtacaaccccatgtacagcgagcctgtggatcaggagtacctgcctgaagagttgaggggggtagatttcttcaagcagaggaggtgctgactcctcagggcacgacagcagaaggatgttgcttttttaagggagggccagaaagaaagttagtggattgcaaagttggttgcctggtggaagttagaacagaccaacattttgtgccagaaatttaagagttccataggtggaggcgcagttctttcgaataaatgtgtaactttgaaattgtgttcatttgcactcggtgcagcggttatgcttatgaaaatacctggcagctttgtgcaatgaattaatgttataaggaattatctattttgtcatagtatttaagtcataatgtcatttcagaattcagttctgtaggattttcttttctttaaaaaatgtatattctgggtagttttaattggtaaaaaaatgtaattgtgatttaatactgcatagtgttttgggtattttttttatatgcaaaggtcttacgagccaataaaactatttcaaagta

SEQ ID NO: 322349 - DNA, 2596 bp, Homo sapiens
cacttcactttctccacctcttccctgcactgaaaaaaggccattttctccagctggttgctgttataacacgtgttgaattcttccagcctcttcacttttaacatcttagtagtgagtccgattaagctactttctggagtgtggttttcgtctccctctgtctccgatttataaatcaggacacaattatgactcttcagtgcttctttctcttgaatgccgcgcgaggcgcctccgccgccggggcaaacggccacgaactacacttcccgacacgccgcgtgaggcgctgccagcggccggccgagggcgggcggacgcgggagctgcggacgtgaggcatgagcggcgccctcctccggcccgcgagcgtcctgctggttccccgagcgagggtctcgcggcgcggggcctagcggagggcatcgaaggcctccgcgtgcgcacgggttgctgcggccgcgccgggcgccggggagggcggcggccgccatggaggtgagcgggccggaagacgaccccttcctttcgcagctgcaccaggtgcagtgccccgtgtgccagcagatgatgcccgccgcgcacatcaactcgcacctggaccgctgtctgctgctccacccggcggggcacgcggagcccgcggccgggtcgcaccgcgccggggagcgggccaaggggccctcgccgcccggcgccaagaggcggcggctgtcggagagctcggcgctgaagcagccagccaccccgacggcagccgagagcagcgagggcgagggtgaggagggcgacgacggcggcgagaccgagagccgcgagagctacgacgcgccgcccacacccagcggcgcccgccttatccccgacttcccggtggcccgctccagcagccccgggaggaaggggtcggggaagaggccggcggccgccgccgcggcggggagcgcgtctccgcgcagctgggacgaggcggaggcgcaggaggaggaggaggccgtgggcgacggcgatggcgacggggacgcggacgcggacggcgaggacgacccggggcactgggacgcggacgctgccgaagccgccaccgccttcggggccagtggcgggggccgcccgcacccccgggcgctggctgccgaggagatccgacagatgctacagggcaagccgctggccgacacgatgcgtcctgacacgctgcaggattacttcgggcagagcaaggccgtgggccaggataccctgctgcgctcgctcctggagaccaacgaaatcccctcgcttatcctgtgggggccgccgggctgcggcaagaccactctggctcacatcatagccagcaacagcaagaaacatagcataaggtttgtgacattatctgcaacaaatgccaagacaaatgatgtgcgagatgtcataaaacaagctcaaaatgaaaagagctttttcaaaaggaaaaccatcctttttattgatgagattcatcggttcaataaatctcagcaggacactttccttcctcacgtggaatgtgggacgatcactctgattggggcaaccactgaaaacccttccttccaggtcaacgctgctcttctgagccgctgtcgagtgattgttcttgagaagcttccagtagaggcaatggtgactattttaatgcgagcgatcaactccctgggaatccacgtcctagactctagccgtcccactgaccctctgagccacagcagcaacagcagctcagagcccgccatgttcatagaggataaagcagtagacaccctggcttacctcagtgacggtgacgcccgagctgggttgaacggactgcagctggcggtgctggctaggttaagctctaggaagatgttctgtaagaagagtgggcaatcctattctcccagtagagttctgatcacagagaatgacgtgaaggagggcctacagcgatcccacattttatatgaccgggcaggtgaggagcattacaactgcatctccgccctgcacaagtccatgcggggctcagaccagaacgcctccctctactggctggctcgcatgctcgagggaggagaggacccactctacgtggcacggaggcttgtcaggtttgccagcgaggacataggtctggcagacccgtctgcgttaacacaagcggttgctgcctaccaaggctgtcattttataggcatgcctgaatgtgaggtaaagtaatcagctcatttcttgcaaatcacttcttttctctctcgtgctctgtccctttgtagatttgaataaatgtccctccttcaccattggtgtattggacccactgagtatgctgcttggctttggaattccaattgtagactcttagactcctagagagggaaaccttctgtgtcaacgaggtcatgtttcaaactgttctcgggattccggggttcagagcacatgctccatatgttccagggagcagaaaggttaaaggagctgaacagcaaagcctctgcaagttcgcccccagagcagcttcatattcatctcttttatatattgggggcttaagaaaaatttaatgtagtaaaaagtccttcagtaa

SEQ ID NO: 322350 - DNA, 2169 bp, Homo sapiens
cacttcactttctccacctcttccctgcactgaaaaaaggccattttctccagctggttgctgttataacacgtgttgaattcttccagcctcttcacttttaacatcttagtagtgagtccgattaagctactttctggagtgtggttttcgtctccctctgtctccgatttataaatcaggacacaattatgactcttcagtgcttctttctcttgaatgccgcgcgaggcgcctccgccgccggggcaaacggccacgaactacacttcccgacacgccgcgtgaggcgctgccagcggccggccgagggcgggcggacgcgggagctgcggacgtgaggcatgagcggcgccctcctccggcccgcgagcgtcctgctggttccccgagcgagggtctcgcggcgcggggcctagcggagggcatcgaaggcctccgcgtgcgcacgggttgctgcggccgcgccgggcgccggggagggcggcggccgccatggaggtgagcgggccggaagacgaccccttcctttcgcagctgcaccaggtgcagtgccccgtgtgccagcagatgatgcccgccgcgcacatcaactcgcacctggaccgctgtctgctgctccacccggcggggcacgcggagcccgcggccgggtcgcaccgcgccggggagcgggccaaggggccctcgccgcccggcgccaagaggcggcggctgtcggagagctcggcgctgaagcagccagccaccccgacggcagccgagagcagcgagggcgagggtgaggagggcgacgacggcggcgagaccgagagccgcgagagctacgacgcgccgcccacacccagcggcgcccgccttatccccgacttcccggtggcccgctccagcagccccgggaggaaggggtcggggaagaggccggcggccgccgccgcggcggggagcgcgtctccgcgcagctgggacgaggcggaggcgcaggaggaggaggaggccgtgggcgacggcgatggcgacggggacgcggacctgggttgaacggactgcagctggcggtgctggctaggttaagctctaggaagatgttctgtaagaagagtgggcaatcctattctcccagtagagttctgatcacagagaatgacgtgaaggagggcctacagcgatcccacattttatatgaccgggcaggtgaggagcattacaactgcatctccgccctgcacaagtccatgcggggctcagaccagaacgcctccctctactggctggctcgcatgctcgagggaggagaggacccactctacgtggcacggaggcttgtcaggtttgccagcgaggacataggtctggcagacccgtctgcgttaacacaagcggttgctgcctaccaaggctgtcattttataggcatgcctgaatgtgaggtgcttctggcccagtgtgtggtctactttgccagagccccaaagtccattgaggtgtacagcgcctacaacaacgtcaaagcctgcctgaggaaccaccaggggccactgccccccgtgcccctgcacctgaggaacgcgcccactaggctgatgaaggatttgggctatggcaaaggctacaagtacaaccccatgtacagcgagcctgtggatcaggagtacctgcctgaagagttgaggggggtagatttcttcaagcagaggaggtgctgactcctcagggcacgacagcagaaggatgttgcttttttaagggagggccagaaagaaagttagtggattgcaaagttggttgcctggtggaagttagaacagaccaacattttgtgccagaaatttaagagttccataggtggaggcgcagttctttcgaataaatgtgtaactttgaaattgtgttcatttgcactcggtgcagcggttatgcttatgaaaatacctggcagctttgtgcaatgaattaatgttataaggaattatctattttgtcatagtatttaagtcataatgtcatttcagaattcagttctgtaggattttcttttctttaaaaaatgtatattctgggtagttttaattggtaaaaaaatgtaattgtgatttaatactgcatagtgttttgggtattttttttatatgcaaaggtcttacgagccaataaaactatttcaaagta

SEQ ID NO: 322351 - DNA, 1490 bp, Homo sapiens
tgcagggcggggtgggcgggggtagcaggaagaatgtctcagggctatgtgagactggcaggagaagataagactttatgcctgagctcagtcgtttagttcctggtgtatgtgcttttgaatgtttatgttcataaagtcaccattttctgtttcctcttcgggaatgtttttactaacatgagtggctattcagagtattgcaatagatgagctgcttttaaatttgctttaagtcaggtgttcaaggttttctttggacagctcccaaggtagaaatggaagactctagacactatatgaagaaaaagatcaggaaagctctcctcttctttggtcttaggggatgttttgtttttagtgtttccatcctggtgaatgtctccatagccttcacttcttatgtttgttatacagagactcatgtttttctagatgcagagtttttatccacaaggaaacagttcttaacaccacacagtaaccactctcaatatttcttgcataagttcatgggatcagagactagagctaagtcaggctgttttgctacatgggattgttttggtcaccaagtgtacaagcagtggtggtctgtggtcgcctgcacataggccaggaggacagtgtgtgtcatgactgaaactctcctttgtctctgtgtgtggcaggtctggcagacccgtctgcgttaacacaagcggttgctgcctaccaaggctgtcattttataggcatgcctgaatgtgaggtgcttctggcccagtgtgtggtctactttgccagagccccaaagtccattgaggtgtacagcgcctacaacaacgtcaaagcctgcctgaggaaccaccaggggccactgccccccgtgcccctgcacctgaggaacgcgcccactaggctgatgaaggatttgggctatggcaaaggctacaagtacaaccccatgtacagcgagcctgtggatcaggagtacctgcctgaagagttgaggggggtagatttcttcaagcagaggaggtgctgactcctcagggcacgacagcagaaggatgttgcttttttaagggagggccagaaagaaagttagtggattgcaaagttggttgcctggtggaagttagaacagaccaacattttgtgccagaaatttaagagttccataggtggaggcgcagttctttcgaataaatgtgtaactttgaaattgtgttcatttgcactcggtgcagcggttatgcttatgaaaatacctggcagctttgtgcaatgaattaatgttataaggaattatctattttgtcatagtatttaagtcataatgtcatttcagaattcagttctgtaggattttcttttctttaaaaaatgtatattctgggtagttttaattggtaaaaaaatgtaattgtgatttaatactgcatagtgttttgggtattttttttatatgcaaaggtcttacgagccaataaaactatttcaaagta

SEQ ID NO: 322352 - DNA, 2956 bp, Homo sapiens
cacttcactttctccacctcttccctgcactgaaaaaaggccattttctccagctggttgctgttataacacgtgttgaattcttccagcctcttcacttttaacatcttagtagtgagtccgattaagctactttctggagtgtggttttcgtctccctctgtctccgatttataaatcaggacacaattatgactcttcagtgcttctttctcttgaatgccgcgcgaggcgcctccgccgccggggcaaacggccacgaactacacttcccgacacgccgcgtgaggcgctgccagcggccggccgagggcgggcggacgcgggagctgcggacgtgaggcatgagcggcgccctcctccggcccgcgagcgtcctgctggttccccgagcgagggtctcgcggcgcggggcctagcggagggcatcgaaggcctccgcgtgcgcacgggttgctgcggccgcgccgggcgccggggagggcggcggccgccatggaggtgagcgggccggaagacgaccccttcctttcgcagctgcaccaggtgcagtgccccgtgtgccagcagatgatgcccgccgcgcacatcaactcgcacctggaccgctgtctgctgctccacccggcggggcacgcggagcccgcggccgggtcgcaccgcgccggggagcgggccaaggggccctcgccgcccggcgccaagaggcggcggctgtcggagagctcggcgctgaagcagccagccaccccgacggcagccgagagcagcgagggcgagggtgaggagggcgacgacggcggcgagaccgagagccgcgagagctacgacgcgccgcccacacccagcggcgcccgccttatccccgacttcccggtggcccgctccagcagccccgggaggaaggggtcggggaagaggccggcggccgccgccgcggcggggagcgcgtctccgcgcagctgggacgaggcggaggcgcaggaggaggaggaggccgtgggcgacggcgatggcgacggggacgcggacgcggacggcgaggacgacccggggcactgggacgcggacgctgccgaagccgccaccgccttcggggccagtggcgggggccgcccgcacccccgggcgctggctgccgaggagatccgacagatgctacagggcaagccgctggccgacacgatgcgtcctgacacgctgcaggattacttcgggcagagcaaggccgtgggccaggataccctgctgcgctcgctcctggagaccaacgaaatcccctcgcttatcctgtgggggccgccgggctgcggcaagaccactctggctcacatcatagccagcaacagcaagaaacatagcataaggtttgtgacattatctgcaacaaatgccaagacaaatgatgtgcgagatgtcataaaacaagctcaaaatgaaaagagctttttcaaaaggaaaaccatcctttttattgatgagattcatcggttcaataaatctcagcaggacactttccttcctcacgtggaatgtgggacgatcactctgattggggcaaccactgaaaacccttccttccaggtcaacgctgctcttctgagccgctgtcgagtgattgttcttgagaagcttccagtagaggcaatggtgactattttaatgcgagcgatcaactccctgggaatccacgtcctagactctagccgtcccactgaccctctgagccacagcagcaacagcagctcagagcccgccatgttcatagaggataaagcagtagacaccctggcttacctcagtgacggtgacgcccgagctgggttgaacggactgcagctggcggtgctggctaggttaagctctaggaagatgttctgtaagaagagtgggcaatcctattctcccagtagagttctgatcacagagaatgacgtgaaggagggcctacagcgatcccacattttatatgaccgggcaggtgaggagcattacaactgcatctccgccctgcacaagtccatgcggggctcagaccagaacgcctccctctactggctggctcgcatgctcgagggaggagaggacccactctacgtggcacggaggcttgtcaggtttgccagcgaggacataggtctggcagacccgtctgcgttaacacaagcggttgctgcctaccaaggctgtcattttataggcatgcctgaatgtgaggtgcttctggcccagtgtgtggtctactttgccagagccccaaagtccattgaggtgtacagcgcctacaacaacgtcaaagcctgcctgaggaaccaccaggggccactgccccccgtgcccctgcacctgaggaacgcgcccactaggctgatgaaggatttgggctatggcaaaggctacaagtacaaccccatgtacagcgagcctgtggatcaggagtacctgcctgaagagttgaggggggtagatttcttcaagcagaggaggtgctgactcctcagggcacgacagcagaaggatgttgcttttttaagggagggccagaaagaaagttagtggattgcaaagttggttgcctggtggaagttagaacagaccaacattttgtgccagaaatttaagagttccataggtggaggcgcagttctttcgaataaatgtgtaactttgaaattgtgttcatttgcactcggtgcagcggttatgcttatgaaaatacctggcagctttgtgcaatgaattaatgttataaggaattatctattttgtcatagtatttaagtcataatgtcatttcagaattcagttctgtaggattttcttttctttaaaaaatgtatattctgggtagttttaattggtaaaaaaatgtaattgtgatttaatactgcatagtgttttgggtattttttttatatgcaaaggtcttacgagccaataaaactatttcaaagta

SEQ ID NO: 322353 - DNA, 2386 bp, Homo sapiens
cacttcactttctccacctcttccctgcactgaaaaaaggccattttctccagctggttgctgttataacacgtgttgaattcttccagcctcttcacttttaacatcttagtagtgagtccgattaagctactttctggagtgtggttttcgtctccctctgtctccgatttataaatcaggacacaattatgactcttcagtgcttctttctcttgaatgccgcgcgaggcgcctccgccgccggggcaaacggccacgaactacacttcccgacacgccgcgtgaggcgctgccagcggccggccgagggcgggcggacgcgggagctgcggacgtgaggcatgagcggcgccctcctccggcccgcgagcgtcctgctggttccccgagcgagggtctcgcggcgcggggcctagcggagggcatcgaaggcctccgcgtgcgcacgggttgctgcggccgcgccgggcgccggggagggcggcggccgccatggaggtgagcgggccggaagacgaccccttcctttcgcagctgcaccaggtgcagtgccccgtgtgccagcagatgatgcccgccgcgcacatcaactcgcacctggaccgctgtctgctgctccacccggcggggcacgcggagcccgcggccgggtcgcaccgcgccggggagcgggccaaggggccctcgccgcccggcgccaagaggcggcggctgtcggagagctcggcgctgaagcagccagccaccccgacggcagccgagagcagcgagggcgagggtgaggagggcgacgacggcggcgagaccgagagccgcgagagctacgacgcgccgcccacacccagcggcgcccgccttatccccgacttcccggtggcccgctccagcagccccgggaggaaggggtcggggaagaggccggcggccgccgccgcggcggggagcgcgtctccgcgcagctgggacgaggcggaggcgcaggaggaggaggaggccgtgggcgacggcgatggcgacggggacgcggacgcggacggcgaggacgacccggggcactgggacgcggacgctgccgaagccgccaccgccttcggggccagtggcgggggccgcccgcacccccgggcgctggctgccgaggagatccgacagatgctacagggcaagccgctggccgacacgatgcgtcctgacacgctgcaggattacttcgggcagagcaaggccgtgggccaggataccctgctgcgctcgctcctggagaccaacgaaatcccctcgcttatcctgtgggggccgccgggctgcggcaagaccactctggctcacatcatagccagcaacagcaagaaacatagcataaggtttgtgacattatctgcaacaaatgccaagacaaatgatgtgcgagatgtcataaaacaagctcaaaatgaaaagagctttttcaaaaggaaaaccatcctttttattgatgagattcatcggttcaataaatctcagcaggacactttccttcctcacgtggaatgtgggacgatcactctgattggggcaaccactgaaaacccttccttccaggtcaacgctgctcttctgagccgctgtcgagtgattgttcttgagaagcttccagtagaggcaatggtgactattttaatgcgagcgatcaactccctgggaatccacgtcctagactctagccgtcccactgaccctctgagccacagcagcaacagcagctcagagcccgccatgttcatagaggataaagcagtagacaccctggcttacctcagtgacggtgacgcccgagctgggttgaacggactgcagctggcggtgctggctaggttaagctctaggaagatgttctgtaagaagagtgggcaatcctattctcccagtagagttctgatcacagagaatgacgtgaaggagggcctacagcgatcccacattttatatgaccgggcaggtaagtaattcacctgtggaaagagtgaaaccatacggaaagaagtgtgtgcacacattctcatttccggaagcctgactgggttccggaagcattccagctgggtccagagcattccagtgattctcaggtggatctgcatgttggtattaagctttctacacagggctgacctttccgaagagaggcatgaagcagaagctgccctgttgagaatctagaggagttttggggttggaaatggcaggctgcacattcaccttagaaggtagttggctattccccaccttgcagaatacaatcacctttgaaagcctgtgcattcacttgacaatgaatatgttttgtgatcatttacaacggcagtaaataaaaagaggacttttgtcataatgacttattagt

SEQ ID NO: 322354 - DNA, 2522 bp, Homo sapiens
cacttcactttctccacctcttccctgcactgaaaaaaggccattttctccagctggttgctgttataacacgtgttgaattcttccagcctcttcacttttaacatcttagtagtgagtccgattaagctactttctggagtgtggttttcgtctccctctgtctccgatttataaatcaggacacaattatgactcttcagtgcttctttctcttgaatgccgcgcgaggcgcctccgccgccggggcaaacggccacgaactacacttcccgacacgccgcgtgaggcgctgccagcggccggccgagggcgggcggacgcgggagctgcggacgtgaggcatgagcggcgccctcctccggcccgcgagcgtcctgctggttccccgagcgagggtctcgcggcgcggggcctagcggagggcatcgaaggcctccgcgtgcgcacgggttgctgcggccgcgccgggcgccggggagggcggcggccgccatggaggtgagcgggccggaagacgaccccttcctttcgcagctgcaccaggtgcagtgccccgtgtgccagcagatgatgcccgccgcgcacatcaactcgcacctggaccgctgtctgctgctccacccggcggggcacgcggagcccgcggccgggtcgcaccgcgccggggagcgggccaaggggccctcgccgcccggcgccaagaggcggcggctgtcggagagctcggcgctgaagcagccagccaccccgacggcagccgagagcagcgagggcgagggtgaggagggcgacgacggcggcgagaccgagagccgcgagagctacgacgcgccgcccacacccagcggcgcccgccttatccccgacttcccggtggcccgctccagcagccccgggaggaaggggtcggggaagaggccggcggccgccgccgcggcggggagcgcgtctccgcgcagctgggacgaggcggaggcgcaggaggaggaggaggccgtgggcgacggcgatggcgacggggacgcggacgcggacggcgaggacgacccggggcactgggacgcggacgctgccgaagccgccaccgccttcggggccagtggcgggggccgcccgcacccccgggcgctggctgccgaggagatccgacagatgctacagggcaagccgctggccgacacgatgcgtcctgacacgctgcaggattacttcgggcagagcaaggccgtgggccaggataccctgctgcgctcgctcctggagaccaacgaaatcccctcgcttatcctgtgggggccgccgggctgcggcaaggcccgccatgttcatagaggataaagcagtagacaccctggcttacctcagtgacggtgacgcccgagctgggttgaacggactgcagctggcggtgctggctaggttaagctctaggaagatgttctgtaagaagagtgggcaatcctattctcccagtagagttctgatcacagagaatgacgtgaaggagggcctacagcgatcccacattttatatgaccgggcaggtgaggagcattacaactgcatctccgccctgcacaagtccatgcggggctcagaccagaacgcctccctctactggctggctcgcatgctcgagggaggagaggacccactctacgtggcacggaggcttgtcaggtttgccagcgaggacataggtctggcagacccgtctgcgttaacacaagcggttgctgcctaccaaggctgtcattttataggcatgcctgaatgtgaggtgcttctggcccagtgtgtggtctactttgccagagccccaaagtccattgaggtgtacagcgcctacaacaacgtcaaagcctgcctgaggaaccaccaggggccactgccccccgtgcccctgcacctgaggaacgcgcccactaggctgatgaaggatttgggctatggcaaaggctacaagtacaaccccatgtacagcgagcctgtggatcaggagtacctgcctgaagagttgaggggggtagatttcttcaagcagaggaggtgctgactcctcagggcacgacagcagaaggatgttgcttttttaagggagggccagaaagaaagttagtggattgcaaagttggttgcctggtggaagttagaacagaccaacattttgtgccagaaatttaagagttccataggtggaggcgcagttctttcgaataaatgtgtaactttgaaattgtgttcatttgcactcggtgcagcggttatgcttatgaaaatacctggcagctttgtgcaatgaattaatgttataaggaattatctattttgtcatagtatttaagtcataatgtcatttcagaattcagttctgtaggattttcttttctttaaaaaatgtatattctgggtagttttaattggtaaaaaaatgtaattgtgatttaatactgcatagtgttttgggtattttttttatatgcaaaggtcttacgagccaataaaactatttcaaagta

SEQ ID NO: 322355 - DNA, 447 bp, Homo sapiens
cggggagcgcgtctccgcgcagctgggacgaggcggaggcgcaggaggaggaggaggccgtgggcgacggcgatggcgacggggacgcggacgcggacggcgaggacgacccggggcactgggacgcggacgctgccgaagccgccaccgccttcggggccagtggcgggggccgcccgcacccccgggcgctggctgccgaggagatccgacagatgctacagggcaagccgctggccgacacgatgcgtcctgacacgctgcaggattacttcgggcagagcaaggccgtgggccaggataccctgctgcgctcgctcctggagaccaacgaaatcccctcgcttatcctgtgggggccgccgggctgcggcaaggtgagtgcggccttggccgttgggcttccgtagttatctcggcggtggatgcagctgatggtcggagagc

SEQ ID NO: 322356 - DNA, 532 bp, Homo sapiens
agcttacagtggcgtgaagcatagtggcgtgaaagcaaggatacagaggcagcacaaaggcaattaattcatcaaattgtgacaggtgcataattcaggattacatactgtgtcggaattgatgggttcttggtctcactgacttcaagaaagaagccacggaccctcatgaggtcattttcttctgaggaagtcattcttaaggactgttctgtccccaaccccagctggaacaaggacctaagactgctctttgaccagtttatgaagaaatgtgaagatggctcctggaaacgtttgccttcatataaacgtacacctactgaatggattcaagacttcaaaacccattttcttggtagaaacagccactttcccattaatatatctgagcatcaaatataaagctaagaacagattgaagtactagttactacctgaaaaaaagaaagaatataatgcaggattatggttctatagtcaccaattttatagaccagaaatcacaataaattttgcagattggagagca

SEQ ID NO: 322357 - DNA, 979 bp, Homo sapiens
tgggcggacgcggtgggcggacgcgtgggttgttatgataaatagccaacttgataaagttgaaggaaggaaattttttgtttcctgtaatgttcagagtgttgatgagaagaccctatactcagaggcgacaagcttatttataaagctgaatcctgctaaaagtctgacataaagagctgctggtgaactccatctcattctcgcccctccagaagaagcagttgtcccccaaatactctgctccctcactgctgaatccctgtagggagaagcctgccaacagtgaccttccgaaacagccttctgaatacaaagaggattcagtttccatcttctcaactttttaacacagaaacacttcctgcgagcatatcgacaactctcgggccaggcgctgtggctcacacagtgctgggattacaggcgtgagcccaccttggcccagccccacatcatacagtttgaacatgaaaactttgccacaacagcctttgctgtagcacacaacatatatcactggaacctgtttgaacttaacgttttcttctttttcatgattcgggctttgagtactccaggctgaaagactgttgtaccagtaaaaacttaaagggccaattctcttggaagacttctcccttttatgtggccccctatttatgttgccttaatcttcgaaattctggctgaacggcatgactgggctccgatgaacatgtccttagcggaatattatgttccatggacaatttttttctccctggccgtccgggcggaacacggaacgcagtcaagtagattccccctcgggagacgagaagattcgcgggaaggcgcgaaacggtgcccgggacatgtgacccatttcgtgcgcaggactcggcgccaacgtgcacgattagggaaaataccatgttgaccacactatcaacaaagcggccctgcgcacgctgagctatacggcgaggaagtatta

SEQ ID NO: 322358 - DNA, 438 bp, Homo sapiens
cttagaaattgggagaatatgttatgaaatagaatgcacctcccattacttacttttctttttcttctgtcttttagaggtcattttcttctgaggaagtcattcttaaggactgttctgtccccaaccccagctggaacaaggacctaagactgctctttgaccagtttatgaagaaatgtgaagatggctcctggaaacgtttgccttcatataaacgtacacctactgaatggattcaagacttcaaaacccattttcttggtagaaacagccactttcccattaatatatctgagcatcaaatataaagctaagaacagattgaagtactagttactacctgaaaaaaagaaagaatataatgcaggattatggttctatagtcaccaattttatagaccagaaatcacaataaattttgcagattggagagca

SEQ ID NO: 322359 - DNA, 505 bp, Homo sapiens
agcttacagtggcgtgaagcatagtggcgtgaaagcaaggatacagaggcagcacaaaggcaattaattcatcaaattgtgacaggtgcataattcaggattacatactgtgtcggaattgatgggttcttggtctcactgacttcaagaaagaagccacggaccctcatggtgagtgttatagttcttaaaggcggcatgtccggcgtttgttccttctgatgttcggatgtgttcagagtttcttccttctggtgggttcatggtcttgctggctcaagagtgaaattgcggaccttcgtggtgagtgttatagctcttaaggcagcacgtctggagttgttcgttcctcccggtgggtttgtggtctcgttggcttcaggagtgaagctgcagaccttcgcggtgagtgttacagctcataaaggcagtgtggacccaaagagtgagcagcagcaagatttattgcaaagagcgaaagaacaaagcttccacagtgtggaag

SEQ ID NO: 322360 - DNA, 2385 bp, Homo sapiens
gcgcgggttccggggctgaggggctgaggggcccaaggcgataaccgggatccgctccggccgcgctcctcttgcctttgagaagccccggaagtggcccggctgttggccgcagcgggaggtcttcggaaagaaaaggccggaaccagaagatagactcaacagcgatgccctacccggaccccgccggcctcacaccccggccagccagccgccagtagtgcgcaccgcctcctccccaagccccgccctgcgtccaccccaggggttaactcgcacgcgcgctcttgtggcggaggtagagtgcgccgtccagggctagagcaagcgcggccccgcggcccggagccatgctgaggagctgcgccgcgcgcctccgcacgctgggggctctgtgccggccgccagtaggccggcgcctgccgggaagcgagccgcgacccgagctgaggtcattttcttctgaggaagtcattcttaaggactgttctgtccccaaccccagctggaacaaggacctaagactgctctttgaccagtttatgaagaaatgtgaagatggctcctggaaacgtttgccttcatataaacgtacacctactgaatggattcaagacttcaaaacccattttcttgacccaaagcttatgaaagaagaacaaatgtcacaggcccagctcttcaccagaagctttgatgatggcctgggctttgaatacgtgatgttctacaatgacattgagaaaaggatggtttgcttatttcaaggaggcccttacctggaaggaccacctggattcattcatggaggtgccattgcaaccatgattgatgctactgttggtatgtgtgcaatgatggctgggggaatcgtcatgactgccaatctcaacatcaattataaaagacctatccctctttgttctgttgttatgataaatagccaacttgataaagttgaaggaaggaaattttttgtttcctgtaatgttcagagtgttgatgagaagaccctatactcagaggcgacaagcttatttataaagctgaatcctgctaaaagtctgacataaagagctgctggtgaactccatctcattctcgcccctccagaagaagcagttgtcccccaaatactctgctccctcactgctgaatccctgtagggagaagcctgccaacagtgaccttccgaaacagccttctgaatacaaagaggattcagtttccatcttctcaactttttaacacagaaacacttcctgcgagcatatcgacaactctcgggccaggcgctgtggctcacacctataatcccagcactttaggaggccgaggcaggcggattgcctgagctcaggagttcaagatcagtctgggcaacacgatgaaactccgtctctactaaaatacaaaaaattatccaggcatggtggcgtacgcctgtagtcccagctactcaggaggctgaggcaggagaattgcttgaacccaggaggaagaggttgcagtgagccaagatcatgccacatcactccaacctgggcaacagaacaagaacccatctcaaacaaacaaacaaacaaacaaaaaaaaactcttgtctccttaggatatgttacctgctccactgcagactagagaaataaatgtgtattgaaccttttactgcaaacttgaaaatgctagaaaaccaagcatgaagaataaatacatggcgggaaacacacaggcatgtgcatatgcatatacattgtaagttagtaagttagaaagctagctttgttgtatctgaacacatgaatcttttttggtcagtgtaggaagcacagccagatcctataggaatgaatacctcaaatctgttgtctgagattctagagattaaaccactgtgccatttttaacccaggctgtactgttgtttcttaccaacagcataggttttcatcactggaaggagcctgtgttcatttcctagggctgctgtagcaaagtagtacaaactggattgtttaaaccaacaaaaactcattgtctctcagttctggaggccagaagttcaaaatcaaggtgttgaccaaggccattctcctgaaagtgctagggaaggagctgtccacgcctccctcctggcttctgggagcctcaggtgttccttggcttctagatgcatcattccagtcctccatcttcacatggcattccctctgtgtgtctccacagtgtcttccctctgtgcagatctatctctgtgtccaagtctcctctttttataaggaaaccagtcataatggacccacctgaatgacctcattttaacttgattacctctgtaaaaaatgtatttccaaataaagtgaccttatgaggtattgaaaatta

SEQ ID NO: 322361 - DNA, 2306 bp, Homo sapiens
gcgcgggttccggggctgaggggctgaggggcccaaggcgataaccgggatccgctccggccgcgctcctcttgcctttgagaagccccggaagtggcccggctgttggccgcagcgggaggtcttcggaaagaaaaggccggaaccagaagatagactcaacagcgatgccctacccggaccccgccggcctcacaccccggccagccagccgccagtagtgcgcaccgcctcctccccaagccccgccctgcgtccaccccaggggttaactcgcacgcgcgctcttgtggcggaggtagagtgcgccgtccagggctagagcaagcgcggccccgcggcccggagccatgctgaggagctgcgccgcgcgcctccgcacgctgggggctctgtgccggccgccagtaggccggcgcctgccgggaagcgagccgcgacccgagctgaggtcattttcttctgaggaagtcattcttaaggactgttctgtccccaaccccagctggaacaaggacctaagactgctctttgaccagtttatgaagaaatgtgaagatggctcctggaaacgtttgccttcatataaacgtacacctactgaatggattcaagacttcaaaacccattttcttgacccaaagcttatgaaagaagaacaaatgtcacaggcccagctcttcaccagaagctttgatgatggcctgggctttgaatacgtgatgttctacaatgacattgagaaaaggatggtttgcttatttcaaggaggcccttacctggaaggaccacctggattcattcatggaggtgccattgcaaccatgattgatgctactgttggtatgtgtgcaatgatggctgggggaatcgtcatgactgccaatctcaacatcaattataaaagacctatccctctttgttctgttgttatgataaatagccaacttgataaagttgaaggaaggaaattttttgtttcctgtaatgttcagagtgttgatgagaagaccctatactcagaggcgacaagcttatttataaagctgaatcctgctaaaagtctgacataaagagctgctggtgaactccatctcattctcgcccctccagaagaagcagttgtcccccaaatactctgctccctcactgctgaatccctgtagggagaagcctgccaacagtgaccttccgaaacagccttctgaatacaaagaggattcagtttccatcttctcaactttttaacacagaaacacttcctgcgagcatatcgacaactctcgggccaggcgctgtggctcacacctataatcccagcactttaggaggccgaggcaggcggattgcctgagctcaggagttcaagatcagtctgggcaacacgatgaaactccgtctctactaaaatacaaaaaattatccaggcatggtggcgtacgcctgtagtcccagctactcaggaggctgaggcaggagaattgcttgaacccaggaggaagaggttgcagtgagccaagatcatgccacatcactccaacctgggcaacagaacaagaacccatctcaaacaaacaaacaaacaaacaaaaaaaaactcttgtctccttaggatatgttacctgctccactgcagactagagaaataaatgtgtattgaaccttttactgcaaacttgaaaatgctagaaaaccaagcatgaagaataaatacatggcgggaaacacacaggcatgtgcatatgcatatacattgtaagttagtaagttagaaagctagctttgttgtatctgaacacatgaatcttttttggtcagtgtaggaagcacagccagatcctataggaatgaatacctcaaatctgttgtctgagattctagagattaaaccactgtgccatttttaacccaggctgtactgttgtttcttaccaacagcataggttttcatcactggaaggagcctgtgttcatttcctagggctgctgtagcaaagtagtacaaactggattgtttaaaccaacaaaaactcattgtctctcagttctggaggccagaagttcaaaatcaaggtgttccttggcttctagatgcatcattccagtcctccatcttcacatggcattccctctgtgtgtctccacagtgtcttccctctgtgcagatctatctctgtgtccaagtctcctctttttataaggaaaccagtcataatggacccacctgaatgacctcattttaacttgattacctctgtaaaaaatgtatttccaaataaagtgaccttatgaggtattgaaaatta

SEQ ID NO: 322362 - DNA, 2471 bp, Homo sapiens
gcgcgggttccggggctgaggggctgaggggcccaaggcgataaccgggatccgctccggccgcgctcctcttgcctttgagaagccccggaagtggcccggctgttggccgcagcgggaggtcttcggaaagaaaaggccggaaccagaagatagactcaacagcgatgccctacccggaccccgccggcctcacaccccggccagccagccgccagtagtgcgcaccgcctcctccccaagccccgccctgcgtccaccccaggggttaactcgcacgcgcgctcttgtggcggaggtagagtgcgccgtccagggctagagcaagcgcggccccgcggcccggagccatgctgaggagctgcgccgcgcgcctccgcacgctgggggctctgtgccggccgccagtaggccggcgcctgccgggaagcgagccgcgacccgagctggtgcataattcaggattacatactgtgtcggaattgatgggttcttggtctcactgacttcaagaaagaagccacggaccctcatgaggtcattttcttctgaggaagtcattcttaaggactgttctgtccccaaccccagctggaacaaggacctaagactgctctttgaccagtttatgaagaaatgtgaagatggctcctggaaacgtttgccttcatataaacgtacacctactgaatggattcaagacttcaaaacccattttcttgacccaaagcttatgaaagaagaacaaatgtcacaggcccagctcttcaccagaagctttgatgatggcctgggctttgaatacgtgatgttctacaatgacattgagaaaaggatggtttgcttatttcaaggaggcccttacctggaaggaccacctggattcattcatggaggtgccattgcaaccatgattgatgctactgttggtatgtgtgcaatgatggctgggggaatcgtcatgactgccaatctcaacatcaattataaaagacctatccctctttgttctgttgttatgataaatagccaacttgataaagttgaaggaaggaaattttttgtttcctgtaatgttcagagtgttgatgagaagaccctatactcagaggcgacaagcttatttataaagctgaatcctgctaaaagtctgacataaagagctgctggtgaactccatctcattctcgcccctccagaagaagcagttgtcccccaaatactctgctccctcactgctgaatccctgtagggagaagcctgccaacagtgaccttccgaaacagccttctgaatacaaagaggattcagtttccatcttctcaactttttaacacagaaacacttcctgcgagcatatcgacaactctcgggccaggcgctgtggctcacacctataatcccagcactttaggaggccgaggcaggcggattgcctgagctcaggagttcaagatcagtctgggcaacacgatgaaactccgtctctactaaaatacaaaaaattatccaggcatggtggcgtacgcctgtagtcccagctactcaggaggctgaggcaggagaattgcttgaacccaggaggaagaggttgcagtgagccaagatcatgccacatcactccaacctgggcaacagaacaagaacccatctcaaacaaacaaacaaacaaacaaaaaaaaactcttgtctccttaggatatgttacctgctccactgcagactagagaaataaatgtgtattgaaccttttactgcaaacttgaaaatgctagaaaaccaagcatgaagaataaatacatggcgggaaacacacaggcatgtgcatatgcatatacattgtaagttagtaagttagaaagctagctttgttgtatctgaacacatgaatcttttttggtcagtgtaggaagcacagccagatcctataggaatgaatacctcaaatctgttgtctgagattctagagattaaaccactgtgccatttttaacccaggctgtactgttgtttcttaccaacagcataggttttcatcactggaaggagcctgtgttcatttcctagggctgctgtagcaaagtagtacaaactggattgtttaaaccaacaaaaactcattgtctctcagttctggaggccagaagttcaaaatcaaggtgttgaccaaggccattctcctgaaagtgctagggaaggagctgtccacgcctccctcctggcttctgggagcctcaggtgttccttggcttctagatgcatcattccagtcctccatcttcacatggcattccctctgtgtgtctccacagtgtcttccctctgtgcagatctatctctgtgtccaagtctcctctttttataaggaaaccagtcataatggacccacctgaatgacctcattttaacttgattacctctgtaaaaaatgtatttccaaataaagtgaccttatgaggtattgaaaatta

SEQ ID NO: 322363 - DNA, 1905 bp, Homo sapiens
gcgcgggttccggggctgaggggctgaggggcccaaggcgataaccgggatccgctccggccgcgctcctcttgcctttgagaagccccggaagtggcccggctgttggccgcagcgggaggtcttcggaaagaaaaggccggaaccagaagatagactcaacagcgatgccctacccggaccccgccggcctcacaccccggccagccagccgccagtagtgcgcaccgcctcctccccaagccccgccctgcgtccaccccaggggttaactcgcacgcgcgctcttgtggcggaggtagagtgcgccgtccagggctagagcaagcgcggccccgcggcccggagccatgctgaggagctgcgccgcgcgcctccgcacgctgggggctctgtgccggccgccagtaggccggcgcctgccgggaagcgagccgcgacccgagctgaggtcattttcttctgaggaagtcattcttaaggactgttctgtccccaaccccagctggaacaaggacctaagactgctctttgaccagtttatgaagaaatgtgaagatggctcctggaaacgtttgccttcatataaacgtacacctactgaatggattcaagacttcaaaacccattttcttgacccaaagcttatgaaagaagaacaaatgtcacaggcccagctcttcaccagaagctttgatgatggcctgggctttgaatacgtgatgttctacaatgacattgagaaaaggatggtttgcttatttcaaggaggcccttacctggaaggaccacctggattcattcatggaggtgccattgcaaccatgattgatgctactgttggtatgtgtgcaatgatggctgggggaatcgtcatgactgccaatctcaacatcaattataaaagacctatccctctttgttctgttgttatgataaatagccaacttgataaagttgaaggaaggaaattttttgtttcctgtaatgttcagagtgttgatgagaagaccctatactcagaggcgacaagcttatttataaagctgaatcctgctaaaagtctgacataaagagctgctggtgaactccatctcattctcgcccctccagaagaagcagttgtcccccaaatactctgctccctcactgctgaatccctgtagggagaagcctgccaacagtgaccttccgaaacagccttctgaatacaaagaggattcagtttccatcttctcaactttttaacacagaaacacttcctgcgagcatatcgacaactctcgggccaggcgctgtggctcacacctataatcccagcactttaggaggccgaggcaggcggattgcctgagctcaggagttcaagatcagtctgggcaacacgatgaaactccgtctctactaaaatacaaaaaattatccaggcatggtggcgtacgcctgtagtcccagctactcaggaggctgaggcaggagaattgcttgaacccaggaggaagaggttgcagtgagccaagatcatgccacatcactccaacctgggcaacagaacaagaacccatctcaaacaaacaaacaaacaaacaaaaaaaaactcttgtctccttaggatatgttacctgctccactgcagactagagaaataaatgtgtattgaaccttttactgcaaacttgaaaatgctagaaaaccaagcatgaagaataaatacatggcgggaaacacacaggcatgtgcatatgcatatacattgtaagttagtaagttagaaagctagctttgttgtatctgaacacatgaatcttttttggtcagtgtaggaagcacagccagatcctataggaatgaatacctcaaatctgttgtctgagattctagagattaaaccactgtgccattttt

SEQ ID NO: 322364 - DNA, 2250 bp, Homo sapiens
gcgcgggttccggggctgaggggctgaggggcccaaggcgataaccgggatccgctccggccgcgctcctcttgcctttgagaagccccggaagtggcccggctgttggccgcagcgggaggtcttcggaaagaaaaggccggaaccagaagatagactcaacagcgatgccctacccggaccccgccggcctcacaccccggccagccagccgccagtagtgcgcaccgcctcctccccaagccccgccctgcgtccaccccaggggttaactcgcacgcgcgctcttgtggcggaggtagagtgcgccgtccagggctagagcaagcgcggccccgcggcccggagccatgctgaggagctgcgccgcgcgcctccgcacgctgggggctctgtgccggccgccagtaggccggcgcctgccgggaagcgagccgcgacccgagctgaggtcattttcttctgaggaagtcattcttaaggactgttctgtccccaaccccagctggaacaaggacctaagactgctctttgaccagtttatgaagaaatgtgaagatggctcctggaaacgtttgccttcatataaacgtacacctactgaatggattcaagacttcaaaacccattttcttgacccaaagcttatgaaagaagaacaaatgtcacaggcccagctcttcaccagaagctttgatgatggcctgggctttgaatacgtgatgttctacaatgacattgagaaaaggatggtttgcttatttcaaggaggcccttacctggaaggaccacctggattcattcatggaggtgccattgcaaccatgattgatgctactgttggtatgtgtgcaatgatggctgggggaatcgtcatgactgccaatctcaacatcaattataaaagacctatccctctttgttctgttgttatgataaatagccaacttgataaagttgaaggaaggaaattttttgtttcctgtaatgttcagagtgttgatgagaagaccctatactcagaggcgacaagcttatttataaagctgaatcctgctaaaagtctgacataaagagctgctggtgaactccatctcattctcgcccctccagaagaagcagttgtcccccaaatactctgctccctcactgctgaatccctgtagggagaagcctgccaacagtgaccttccgaaacagccttctgaatacaaagaggattcagtttccatcttctcaactttttaacacagaaacacttcctgcgagcatatcgacaactctcgggccaggcgctgtggctcacacctgtagtcccagctactcaggaggctgaggcaggagaattgcttgaacccaggaggaagaggttgcagtgagccaagatcatgccacatcactccaacctgggcaacagaacaagaacccatctcaaacaaacaaacaaacaaacaaaaaaaaactcttgtctccttaggatatgttacctgctccactgcagactagagaaataaatgtgtattgaaccttttactgcaaacttgaaaatgctagaaaaccaagcatgaagaataaatacatggcgggaaacacacaggcatgtgcatatgcatatacattgtaagttagtaagttagaaagctagctttgttgtatctgaacacatgaatcttttttggtcagtgtaggaagcacagccagatcctataggaatgaatacctcaaatctgttgtctgagattctagagattaaaccactgtgccatttttaacccaggctgtactgttgtttcttaccaacagcataggttttcatcactggaaggagcctgtgttcatttcctagggctgctgtagcaaagtagtacaaactggattgtttaaaccaacaaaaactcattgtctctcagttctggaggccagaagttcaaaatcaaggtgttgaccaaggccattctcctgaaagtgctagggaaggagctgtccacgcctccctcctggcttctgggagcctcaggtgttccttggcttctagatgcatcattccagtcctccatcttcacatggcattccctctgtgtgtctccacagtgtcttccctctgtgcagatctatctctgtgtccaagtctcctctttttataaggaaaccagtcataatggacccacctgaatgacctcattttaacttgattacctctgtaaaaaatgtatttccaaataaagtgaccttatgaggtattgaaaatta

SEQ ID NO: 322365 - DNA, 615 bp, Homo sapiens
cctggtggtactcctccagaactgaacacatgaatcttttttggtcagtgtaggaagcacagccagatcctataggaatgaatacctcaaatctgttgtctgagattctagagattaaaccactgtgccatttttaacccaggctgtactgttgtttcttaccaacagcataggttttcatcactggaaggagcctgtgttcatttcctagggctgctgtagcaaagtagtacaaactggattgtttaaaccaacaaaaactcattgtctctcagttctggaggccagaagttcaaaatcaaggtgttgaccaaggccattctcctgaaagtgctagggaaggagctgtccacgcctccctcctggcttctgggagcctcaggtgttccttggcttctagatgcatcattccagtcctccatcttcacatggcattccctctgtgtgtctccacagtgtcttccctctgtgcagatctatctctgtgtccaagtctcctctttttataaggaaaccagtcataatggacccacctgaatgacctcattttaacttgattacctctgtaaaaaatgtatttccaaataaagtgaccttatgaggtattgaaaatta

SEQ ID NO: 322366 - DNA, 941 bp, Homo sapiens
ggcttagagtcacaatcacttgagtgttgggctgaactgaccctgttgctgattcagactcaactcatgtctgccagggaaacctcctttctgttacattttttattttctgtaaattgcatttaaaccacagttcttccaagaaggatttccgtctttaccgtaccattttattcagtatattgttagcgtttatatactatattcctgattgccatgtgtgggtacttcattttgatttcatgtctgtttactctgtccccagttggactgttaattccacaagggcaaagatcctatcttctgtttcattgagacgctcccattcctttcaattttgcaccctgtggacatttgaatcaatcatctattgacatgtgattctagcagggtacaggtgcttggctctgccatggcatttctctcacccttgtttctcatttgccatccacctcattttctatagacccaaagcttatgaaagaagaacaaatgtcacaggcccagctcttcaccagaagctttgatgatggcctgggctttgaatacgtgatgttctacaatgacattgagaaaaggatggtttgcttatttcaaggaggcccttacctggaaggaccacctggattcattcatggaggtgccattgcaaccatgattgatgctactgttggtatgtgtgcaatgatggctgggggaatcgtcatgactgccaatctcaacatcaattataaaagacctatccctctttgttctgttgttatgataaatagccaacttgataaagttgaaggaaggaaattttttgtttcctgtaatgttcagagtgttgatgagaagaccctatactcagaggcgacaagcgggatctctagatcgactgcagctgcaagctggctggcgcgtcatccagggaaaaaaaaaaaagggaaaaaaattac

SEQ ID NO: 322367 - DNA, 2617 bp, Homo sapiens
gcgcgggttccggggctgaggggctgaggggcccaaggcgataaccgggatccgctccggccgcgctcctcttgcctttgagaagccccggaagtggcccggctgttggccgcagcgggaggtcttcggaaagaaaaggccggaaccagaagatagactcaacagcgatgccctacccggaccccgccggcctcacaccccggccagccagccgccagtagtgcgcaccgcctcctccccaagccccgccctgcgtccaccccaggggttaactcgcacgcgcgctcttgtggcggaggtagagtgcgccgtccagggctagagcaagcgcggccccgcggcccggagccatgctgaggagctgcgccgcgcgcctccgcacgctgggggctctgtgccggccgccagtaggccggcgcctgccgggaagcgagccgcgacccgagctgaggtcattttcttctgaggaagtcattcttaaggactgttctgtccccaaccccagctggaacaaggacctaagactgctctttgaccagtttatgaagaaatgtgaagatggctcctggaaacgtttgccttcatataaacgtacacctactgaatggattcaagacttcaaaacccattttcttgcctggttaatggccgggcgctgtggctcacgcctataatcccagcactttgggaggccaaggcaggcggatccctgagttcgggagttcaagaccagcctgaccaacacggagaaaccccgtctctactaaaaatacagaattagtcaggcgtggtggtgggcgcctgtaatcccagctactcaggaggctgaggcaggagaatcgcttgaacccgggaggcggaggttgcgacccaaagcttatgaaagaagaacaaatgtcacaggcccagctcttcaccagaagctttgatgatggcctgggctttgaatacgtgatgttctacaatgacattgagaaaaggatggtttgcttatttcaaggaggcccttacctggaaggaccacctggattcattcatggaggtgccattgcaaccatgattgatgctactgttggtatgtgtgcaatgatggctgggggaatcgtcatgactgccaatctcaacatcaattataaaagacctatccctctttgttctgttgttatgataaatagccaacttgataaagttgaaggaaggaaattttttgtttcctgtaatgttcagagtgttgatgagaagaccctatactcagaggcgacaagcttatttataaagctgaatcctgctaaaagtctgacataaagagctgctggtgaactccatctcattctcgcccctccagaagaagcagttgtcccccaaatactctgctccctcactgctgaatccctgtagggagaagcctgccaacagtgaccttccgaaacagccttctgaatacaaagaggattcagtttccatcttctcaactttttaacacagaaacacttcctgcgagcatatcgacaactctcgggccaggcgctgtggctcacacctataatcccagcactttaggaggccgaggcaggcggattgcctgagctcaggagttcaagatcagtctgggcaacacgatgaaactccgtctctactaaaatacaaaaaattatccaggcatggtggcgtacgcctgtagtcccagctactcaggaggctgaggcaggagaattgcttgaacccaggaggaagaggttgcagtgagccaagatcatgccacatcactccaacctgggcaacagaacaagaacccatctcaaacaaacaaacaaacaaacaaaaaaaaactcttgtctccttaggatatgttacctgctccactgcagactagagaaataaatgtgtattgaaccttttactgcaaacttgaaaatgctagaaaaccaagcatgaagaataaatacatggcgggaaacacacaggcatgtgcatatgcatatacattgtaagttagtaagttagaaagctagctttgttgtatctgaacacatgaatcttttttggtcagtgtaggaagcacagccagatcctataggaatgaatacctcaaatctgttgtctgagattctagagattaaaccactgtgccatttttaacccaggctgtactgttgtttcttaccaacagcataggttttcatcactggaaggagcctgtgttcatttcctagggctgctgtagcaaagtagtacaaactggattgtttaaaccaacaaaaactcattgtctctcagttctggaggccagaagttcaaaatcaaggtgttgaccaaggccattctcctgaaagtgctagggaaggagctgtccacgcctccctcctggcttctgggagcctcaggtgttccttggcttctagatgcatcattccagtcctccatcttcacatggcattccctctgtgtgtctccacagtgtcttccctctgtgcagatctatctctgtgtccaagtctcctctttttataaggaaaccagtcataatggacccacctgaatgacctcattttaacttgattacctctgtaaaaaatgtatttccaaataaagtgaccttatgaggtattgaaaatta

SEQ ID NO: 322368 - DNA, 2215 bp, Homo sapiens
ggcttagagtcacaatcacttgagtgttgggctgaactgaccctgttgctgattcagactcaactcatgtctgccagggaaacctcctttctgttacattttttattttctgtaaattgcatttaaaccacagttcttccaagaaggatttccgtctttaccgtaccattttattcagtatattgttagcgtttatatactatattcctgattgccatgtgtgggtacttcattttgatttcatgtctgtttactctgtccccagttggactgttaattccacaagggcaaagatcctatcttctgtttcattgagacgctcccattcctttcaattttgcaccctgtggacatttgaatcaatcatctattgacatgtgattctagcagggtacaggtgcttggctctgccatggcatttctctcacccttgtttctcatttgccatccacctcattttctatagacccaaagcttatgaaagaagaacaaatgtcacaggcccagctcttcaccagaagctttgatgatggcctgggctttgaatacgtgatgttctacaatgacattgagaaaaggatggtttgcttatttcaaggaggcccttacctggaaggaccacctggattcattcatggaggtgccattgcaaccatgattgatgctactgttggtatgtgtgcaatgatggctgggggaatcgtcatgactgccaatctcaacatcaattataaaagacctatccctctttgttctgttgttatgataaatagccaacttgataaagttgaaggaaggaaattttttgtttcctgtaatgttcagagtgttgatgagaagaccctatactcagaggcgacaagcttatttataaagctgaatcctgctaaaagtctgacataaagagctgctggtgaactccatctcattctcgcccctccagaagaagcagttgtcccccaaatactctgctccctcactgctgaatccctgtagggagaagcctgccaacagtgaccttccgaaacagccttctgaatacaaagaggattcagtttccatcttctcaactttttaacacagaaacacttcctgcgagcatatcgacaactctcgggccaggcgctgtggctcacacctataatcccagcactttaggaggccgaggcaggcggattgcctgagctcaggagttcaagatcagtctgggcaacacgatgaaactccgtctctactaaaatacaaaaaattatccaggcatggtggcgtacgcctgtagtcccagctactcaggaggctgaggcaggagaattgcttgaacccaggaggaagaggttgcagtgagccaagatcatgccacatcactccaacctgggcaacagaacaagaacccatctcaaacaaacaaacaaacaaacaaaaaaaaactcttgtctccttaggatatgttacctgctccactgcagactagagaaataaatgtgtattgaaccttttactgcaaacttgaaaatgctagaaaaccaagcatgaagaataaatacatggcgggaaacacacaggcatgtgcatatgcatatacattgtaagttagtaagttagaaagctagctttgttgtatctgaacacatgaatcttttttggtcagtgtaggaagcacagccagatcctataggaatgaatacctcaaatctgttgtctgagattctagagattaaaccactgtgccatttttaacccaggctgtactgttgtttcttaccaacagcataggttttcatcactggaaggagcctgtgttcatttcctagggctgctgtagcaaagtagtacaaactggattgtttaaaccaacaaaaactcattgtctctcagttctggaggccagaagttcaaaatcaaggtgttgaccaaggccattctcctgaaagtgctagggaaggagctgtccacgcctccctcctggcttctgggagcctcaggtgttccttggcttctagatgcatcattccagtcctccatcttcacatggcattccctctgtgtgtctccacagtgtcttccctctgtgcagatctatctctgtgtccaagtctcctctttttataaggaaaccagtcataatggacccacctgaatgacctcattttaacttgattacctctgtaaaaaatgtatttccaaataaagtgaccttatgaggtattgaaaatta

SEQ ID NO: 322369 - DNA, 2105 bp, Homo sapiens
caatccagttcccccaacttgctcacaattgtgtaagtgaaaaaaaactgtgtctaaacaagtgcactattacttacccagagtatatggttctgttaactaagtgttctgtttctttttaaagcctggttaatggccgggcgctgtggctcacgcctataatcccagcactttgggaggccaaggcaggcggatccctgagttcgggagttcaagaccagcctgaccaacacggagaaaccccgtctctactaaaaatacagaattagtcaggcgtggtggtgggcgcctgtaatcccagctactcaggaggctgaggcaggagaatcgcttgaacccgggaggcggaggttgcgacccaaagcttatgaaagaagaacaaatgtcacaggcccagctcttcaccagaagctttgatgatggcctgggctttgaatacgtgatgttctacaatgacattgagaaaaggatggtttgcttatttcaaggaggcccttacctggaaggaccacctggattcattcatggaggtgccattgcaaccatgattgatgctactgttggtatgtgtgcaatgatggctgggggaatcgtcatgactgccaatctcaacatcaattataaaagacctatccctctttgttctgttgttatgataaatagccaacttgataaagttgaaggaaggaaattttttgtttcctgtaatgttcagagtgttgatgagaagaccctatactcagaggcgacaagcttatttataaagctgaatcctgctaaaagtctgacataaagagctgctggtgaactccatctcattctcgcccctccagaagaagcagttgtcccccaaatactctgctccctcactgctgaatccctgtagggagaagcctgccaacagtgaccttccgaaacagccttctgaatacaaagaggattcagtttccatcttctcaactttttaacacagaaacacttcctgcgagcatatcgacaactctcgggccaggcgctgtggctcacacctataatcccagcactttaggaggccgaggcaggcggattgcctgagctcaggagttcaagatcagtctgggcaacacgatgaaactccgtctctactaaaatacaaaaaattatccaggcatggtggcgtacgcctgtagtcccagctactcaggaggctgaggcaggagaattgcttgaacccaggaggaagaggttgcagtgagccaagatcatgccacatcactccaacctgggcaacagaacaagaacccatctcaaacaaacaaacaaacaaacaaaaaaaaactcttgtctccttaggatatgttacctgctccactgcagactagagaaataaatgtgtattgaaccttttactgcaaacttgaaaatgctagaaaaccaagcatgaagaataaatacatggcgggaaacacacaggcatgtgcatatgcatatacattgtaagttagtaagttagaaagctagctttgttgtatctgaacacatgaatcttttttggtcagtgtaggaagcacagccagatcctataggaatgaatacctcaaatctgttgtctgagattctagagattaaaccactgtgccatttttaacccaggctgtactgttgtttcttaccaacagcataggttttcatcactggaaggagcctgtgttcatttcctagggctgctgtagcaaagtagtacaaactggattgtttaaaccaacaaaaactcattgtctctcagttctggaggccagaagttcaaaatcaaggtgttgaccaaggccattctcctgaaagtgctagggaaggagctgtccacgcctccctcctggcttctgggagcctcaggtgttccttggcttctagatgcatcattccagtcctccatcttcacatggcattccctctgtgtgtctccacagtgtcttccctctgtgcagatctatctctgtgtccaagtctcctctttttataaggaaaccagtcataatggacccacctgaatgacctcattttaacttgattacctctgtaaaaaatgtatttccaaataaagtgaccttatgaggtattgaaaatta

SEQ ID NO: 322370 - DNA, 810 bp, Homo sapiens
gcgcgggttccggggctgaggggctgaggggcccaaggcgataaccgggatccgctccggccgcgctcctcttgcctttgagaagccccggaagtggcccggctgttggccgcagcgggaggtcttcggaaagaaaaggccggaaccagaagatagactcaacagcgatgccctacccggaccccgccggcctcacaccccggccagccagccgccagtagtgcgcaccgcctcctccccaagccccgccctgcgtccaccccaggggttaactcgcacgcgcgctcttgtggcggaggtagagtgcgccgtccagggctagagcaagcgcggccccgcggcccggagccatgctgaggagctgcgccgcgcgcctccgcacgctgggggctctgtgccggccgccagtaggccggcgcctgccgggaagcgagccgcgacccgagctgaggtcattttcttctgaggaagtcattcttaaggactgttctgtccccaaccccagctggaacaaggacctaagactgctctttgaccagtttatgaagaaatgtgaagatggctcctggaaacgtttgccttcatataaacgtacacctactgaatggattcaagacttcaaaacccattttcttggtagaaacagccactttcccattaatatatctgagcatcaaatataaagctaagaacagattgaagtactagttactacctgaaaaaaagaaagaatataatgcaggattatggttctatagtcaccaattttatagaccagaaatcacaataaattttgcagattggagagca

SEQ ID NO: 322371 - DNA, 1507 bp, Homo sapiens
cttaggagtttagtaggttctcagtctctgaaacctgcttcctctacccattctcccactctgcaccttaggaatcccgttatctacatggggaggggaggtctaaatccagctcccttttggagtttgtgccattctccgatttgagcagcagccctgtgtgccccctgccgccagacctgctcattccaggagcttctgggagaaggaacagtaagagaggaactgtgtcccaagctgatgtctcttaatgagatttttacaggaattgttcaaattcagcaaatatttattgagggtctattgtgtgtcttgacctgtgctgagcaccaagcatataaggatgtaccaccagagcctgacctaaatttgaagcctggccatgatcaaaaccccaccttcaggcacccaagtttttggattaagaagggtgaatgatgttctccaaatcctgggggctcatgcagtataattctaggacttcatgttgatacaaatttttagttaaggcaaaacgcttgtgaaaatgttgattaaatgtgtacgagtagttttaattactggtgaacaactagcgtgcacatttatgatttgagcagaacagccctttaagtacagtgttaagtttcattgtttaaaagcttggcagctacgagtatttgaggtacataggggcgggcacagaaccagcctcctgaattccatttactctggtttgggggtggaacaaagatgatccagtgcagggtctgagctagaacctagcaggtggccagaaccattttagggtttcacctcagcatttcggcagaaatcagctctctcgtgagtcagggcaccttaggctttgctgtatatccctttgttaagccagcagctagactcctagattgaattcttttagaaatgggagaatgagcttttttattgactgccagtgttgtctgtattggatgatagcaaaaagtgtagttggacaggttgcccactagatggagtgagaagtaccagactccttttttctctaaagcagatcctttcaggatctgagtcactgggcagtttctctaatgcgagcagacagaccctgttaaccaaggagcaaaggaaagtatatttaaagaggctaaggtgtttggccacatattgctttaggttcatctccattggtctcagtgtggacataactcctggaattcactccagtgcaaagtttaaataataccagcatgagaatgtacttgaaggtttcccaaaatgtgctagacaagaaagagaaaaggtcccagctgagagaaaaatccacctgtctcccatctggggctctttggcctcactgatagaaaaggaaaaggggcccaagctaagcttactttgagggttcatgatgttcagagatgctcaggggacttctccgctgcaggaggtggggtgaggacattggattcatttcctcaaaatgtggagagaaaggagaaaaatcagaattctatttgtaaatctgctt

SEQ ID NO: 322372 - DNA, 485 bp, Homo sapiens
tatttttaattttagaaatatcacagttccattgcaatattccctttaatttactatttttaaaggggtattgtaaatatgaaagtatttataaagtgaattgctattttttctgttcagaaaagtacacacttaaaattgttattgttaacaatgtgtaaacacatttaaaattgttattgttaacaaagaaatcatggagaactgtagaggttttcacagtggatccattttctgacagttttctactatctattaaatcatatctgcttaaatatatagcttctatctgtctttaaatcttctcattaaaatgtataagcagtgactttgatctcaaaaataggtaatttttctttgccgacctgtaaaagtgtgccaatacactaaatttgtgattttaaattaattcctccagctgttgaaatgaagtctgccaaatcttgctctaacaaataaaatgttatctaaatgaaaaaattccg

SEQ ID NO: 322373 - DNA, 2908 bp, Homo sapiens
ctccgccgcgctctccgccaccgcaccactgcggcaccgcaatgaaacgcctcccgctcctagtggttttttccacttgttgaattgttcctatactcaaaattgcaccaagacaccttgtctcccaaatgcaaaatgtgaaatacgcaatggaattgaagcctgctattgcaacatgggattttcaggaaatggtgtcacaattgtgaagatgataatgaatgtggaaatttaactcagtcctgtggcgaaaatgctaattgcactaacacagaaggaagttattattgtatgtgtgtacctggcttcagatccagcagtaaccaagacaggtttatcactaatgatggaaccgtctgtatagaaaatgtgaatgcaaactgccatttagataatgtctgtatagctgcaaatattaataaaactttaacaaaaatcagatccataaaagaacctgtggctttgctacaagaagtctatagaaattctgtgacagatctttcaccaacagatataattacatatatagaaatattagctgaatcatcttcattactaggttacaagaacaacactatctcagccaaggacaccctttctaactcaactcttactgaatttgtaaaaaccgtgaataattttgttcaaagggatacatttgtagtttgggacaagttatctgtgaatcataggagaacacatcttacaaaactcatgcacactgttgaacaagctactttaaggatatcccagagcttccaaaagaccacagagtttgatacaaattcaacggatatagctctcaaagttttcttttttgattcatataacatgaaacatattcatcctcatatgaatatggatggagactacataaatatatttccaaagagaaaagctgcatatgattcaaatggcaatgttgcagttgcatttttatattataagagtattggtcctttgctttcatcatctgacaacttcttattgaaacctcaaaattatgataattctgaagaggaggaaagagtcatatcttcagtaatttcagtctcaatgagctcaaacccacccacattatatgaacttgaaaaaataacatttacattaagtcatcgaaaggtcacagataggtataggagtctatgtgcattttggaattactcacctgataccatgaatggcagctggtcttcagagggctgtgagctgacatactcaaatgagacccacacctcatgccgctgtaatcacctgacacattttgcaattttgatgtcctctggtccttccattggtattaaagattataatattcttacaaggatcactcaactaggaataattatttcactgatttgtcttgccatatgcatttttaccttctggttcttcagtgaaattcaaagcaccaggacaacaattcacaaaaatctttgctgtagcctatttcttgctgaacttgtttttcttgttgggatcaatacaaatactaataagctcttctgttcaatcattgccggactgctacactacttctttttagctgcttttgcatggatgtgcattgaaggcatacatctctatctcattgttgtgggtgtcatctacaacaagggatttttgcacaagaatttttatatctttggctatctaagcccagccgtggtagttggattttcggcagcactaggatacagatattatggcacaaccaaagtatgttggcttagcaccgaaaacaactttatttggagttttataggaccagcatgcctaatcattcttgttaatctcttggcttttggagtcatcatatacaaagtttttcgtcacactgcagggttgaaaccagaagttagttgctttgagaacataaggtcttgtgcaagaggagccctcgctcttctgttccttctcggcaccacctggatctttggggttctccatgttgtgcacgcatcagtggttacagcttacctcttcacagtcagcaatgctttccaggggatgttcatttttttattcctgtgtgttttatctagaaagattcaagaagaatattacagattgttcaaaaatgtcccctgttgttttggatgtttaaggtaaacatagagaatggtggataattacaactgcacaaaaataaaaattccaagctgtggatgaccaatgtataaaaatgactcatcaaattatccaattattaactactagacaaaaagtattttaaatcagtttttctgtttatgctataggaactgtagataataaggtaaaattatgtatcatatagatatactatgtttttctatgtgaaatagttctgtcaaaaatagtattgcagatatttggaaagtaattggtttctcaggagtgatatcactgcacccaaggaaagattttctttctaacacgagaagtatatgaatgtcctgaaggaaaccactggcttgatatttctgtgactcgtgttgcctttgaaactagtcccctaccacctcggtaatgagctccattacagaaagtggaacataagagaatgaaggggcagaatatcaaacagtgaaaagggaatgataagatgtattttgaatgaactgttttttctgtagactagctgagaaattgttgacataaaataaagaattgaagaaacacattttaccattttgtgaattgttctgaacttaaatgtccactaaaacaacttagacttctgtttgctaaatctgtttctttttctaatattctaaaaaaaacaaaaaggtttacctccacaaattgaaaaaaaaaaagtgaaaaaaatctgtttctaaggttagactgagatatatactatttccttacttatttcacagattgtgactttggatagttaatcagtaaaatataaatgtgtcaa

SEQ ID NO: 322374 - DNA, 1178 bp, Homo sapiens
atatagtaagacatagcatcataaaattaagtatttggcataaacaaacaacctccaggttaatctcttggcttttggagtcatcatatacaaagtttttcgtcacactgcagggttgaaaccagaagttagttgctttgagaacataaggtcttgtgcaagaggagccctcgctcttctgttccttctcggcaccacctggatctttggggttctccatgttgtgcacgcatcagtggttacagcttacctcttcacagtcagcaatgctttccaggggatgttcatttttttattcctgtgtgttttatctagaaagattcaagaagaatattacagattgttcaaaaatgtcccctgttgttttggatgtttaaggtaaacatagagaatggtggataattacaactgcacaaaaataaaaattccaagctgtggatgaccaatgtataaaaatgactcatcaaattatccaattattaactactagacaaaaagtattttaaatcagtttttctgtttatgctataggaactgtagataataaggtaaaattatgtatcatatagatatactatgtttttctatgtgaaatagttctgtcaaaaatagtattgcagatatttggaaagtaattggtttctcaggagtgatatcactgcacccaaggaaagattttctttctaacacgagaagtatatgaatgtcctgaaggaaaccactggcttgatatttctgtgactcgtgttgcctttgaaactagtcccctaccacctcggtaatgagctccattacagaaagtggaacataagagaatgaaggggcagaatatcaaacagtgaaaagggaatgataagatgtattttgaatgaactgttttttctgtagactagctgagaaattgttgacataaaataaagaattgaagaaacacattttaccattttgtgaattgttctgaacttaaatgtccactaaaacaacttagacttctgtttgctaaatctgtttctttttctaatattctaaaaaaaacaaaaaggtttacctccacaaattgaaaaaaaaaaagtgaaaaaaatctgtttctaaggttagactgagatatatactatttccttacttatttcacagattgtgactttggatagttaatcagtaaaatataaatgtgtcaa

SEQ ID NO: 322375 - DNA, 933 bp, Homo sapiens
atatagtaagacatagcatcataaaattaagtatttggcataaacaaacaacctccaggttaatctcttggcttttggagtcatcatatacaaagtttttcgtcacactgcagggttgaaaccagaagttagttgctttgagaacataaggtcttgtgcaagaggagccctcgctcttctgttccttctcggcaccacctggatctttggggttctccatgttgtgcacgcatcagtggttacagcttacctcttcacagtcagcaatgctttccaggggatgttcatttttttattcctgtgtgttttatctagaaagattcaagaagaatattacagattgttcaaaaatgtcccctgttgttttggatgtttaaggtaaacatagagaatggtggataattacaactgcacaaaaataaaaattccaagctgtggatgaccaatgtataaaaatgactcatcaaattatccaattattaactactagacaaaaagtattttaaatcagtttttctgtttatgctataggaactgtagataataaggtaaaattatgtatcatatagatatactatgtttttctatgtgaaatagttctgtcaaaaatagtattgcagatatttggaaagtaattggtttctcaggagtgatatcactgcacccaaggaaagattttctttctaacacgagaagtatatgaatgtcctgaaggaaaccactggcttgatatttctgtgactcgtgttgcctttgaaactagtcccctaccacctcggtaatgagctccattacagaaagtggaacataagagaatgaaggggcagaatatcaaacagtgaaaagggaatgataagatgtattttgaatgaactgttttttctgtagactagctgagaaattgttgacataaaataaagaattgaagaaaca

SEQ ID NO: 322376 - DNA, 2175 bp, Homo sapiens
ctccgccgcgctctccgccaccgcaccactgcggcaccgcaatgaaacgcctcccgctcctagtggttttttccacttgttgaattgttcctatactcaaaattgcaccaagacaccttgtctcccaaatgcaaaatgtgaaatacgcaatggaattgaagcctgctattgcaacatgggattttcaggaaatggtgtcacaattgtgaagatgataatgaatgtggaaatttaactcagtcctgtggcgaaaatgctaattgcactaacacagaaggaagttattattgtatgtgtgtacctggcttcagatccagcagtaaccaagacaggtttatcactaatgatggaaccgtctgtatagaaaatgtgaatgcaaactgccatttagataatgtctgtatagctgcaaatattaataaaactttaacaaaaatcagatccataaaagaacctgtggctttgctacaagaagtctatagaaattctgtgacagatctttcaccaacagatataattacatatatagaaatattagctgaatcatcttcattactaggttacaagaacaacactatctcagccaaggacaccctttctaactcaactcttactgaatttgtaaaaaccgtgaataattttgttcaaagggatacatttgtagtttgggacaagttatctgtgaatcataggagaacacatcttacaaaactcatgcacactgttgaacaagctactttaaggatatcccagagcttccaaaagaccacagagtttgatacaaattcaacggatatagctctcaaagttttcttttttgattcatataacatgaaacatattcatcctcatatgaatatggatggagactacataaatatatttccaaagagaaaagctgcatatgattcaaatggcaatgttgcagttgcatttttatattataagagtattggtcctttgctttcatcatctgacaacttcttattgaaacctcaaaattatgataattctgaagaggaggaaagagtcatatcttcagtaatttcagtctcaatgagctcaaacccacccacattatatgaacttgaaaaaataacatttacattaagtcatcgaaaggtcacagataggtataggagtctatgtgcattttggaattactcacctgataccatgaatggcagctggtcttcagagggctgtgagctgacatactcaaatgagacccacacctcatgccgctgtaatcacctgacacattttgcaattttgatgtcctctggtccttccattggtattaaagattataatattcttacaaggatcactcaactaggaataattatttcactgatttgtcttgccatatgcatttttaccttctggttcttcagtgaaattcaaagcaccaggacaacaattcacaaaaatctttgctgtagcctatttcttgctgaacttgtttttcttgttgggatcaatacaaatactaataagctcttctgttcaatcattgccggactgctacactacttctttttagctgcttttgcatggatgtgcattgaaggcatacatctctatctcattgttgtgggtgtcatctacaacaagggatttttgcacaagaatttttatatctttggctatctaagcccagccgtggtagttggattttcggcagcactaggatacagatattatggcacaaccaaagtatgttggcttagcaccgaaaacaactttatttggagttttataggaccagcatgcctaatcattcttgttaatctcttggcttttggagtcatcatatacaaagtttttcgtcacactgcagggttgaaaccagaagttagttgctttgagaacataaggtcttgtgcaagaggagccctcgctcttctgttccttctcggcaccacctggatctttggggttctccatgttgtgcacgcatcagtggttacagcttacctcttcacagtcagcaatgctttccaggggatgttcatttttttattcctgtgtgttttatctagaaagattcaagaagaatattacagattgttcaaaaatgtcccctgttgttttggatgtttaagctgttgaaatgaagtctgccaaatcttgctctaacaaataaaatgttatctaaatgaaaaaattccg

SEQ ID NO: 322377 - DNA, 581 bp, Homo sapiens
tggaaaaaagaattcgttaatatattcagtatatattcatatcaaagcaaagaagaatatctgccaaactattgtagttctcattttctgtacctttcatgtgatcatggcaggtatctgtcatttctttcttcctctagccattccatgttcctttggtcctcagtagtcacctcagatggtctttgttctttgcctggtggggtggcctaaaccttcattctggggtgtatgtaccaataaatggccatattgttttgctctaatatcccgttaactttccataataaacaagtgtaatagaaaatcctaggttccaggcaatttctttccttcttccattgagtatttttttcccattgtgtattttaaacttggttcttccttgataatcgggatcaatcagcctagctattatagtacctgccttacttgtctttggctaagtggcatgaggagcaagaagtgctgagttaacagtctcagctctctgttcagtggaaataatgttgtgtctcccccaaagaagcacttctcccttgaggattaagacctgtaaactgggagagcccacagctgct

SEQ ID NO: 322378 - DNA, 782 bp, Homo sapiens
  misc_feature (729)..(729): n is a, c, g, or t
  misc_feature (771)..(771): n is a, c, g, or t
ctattggcccgcggaggtccccaccctcagcgcggccccgcccccggggtaaggagccggggcggactctgggacgctcagacgccgcgcggggcggggcggggattggtctgtggtcctctctcggctcctcgcggctcgcggcggccgacggttcctgggacacctgcttgcttggcccgtccggcggctcagggcttctctgctgcgctcccggttcgctggacgggaagaagggctgggccgtcccgtcccgtccccatcggaaccccaagtcgcgccgctgacccgtcgcagggcgagatgagcgcggacgcagcggccggggcgcccctgccccggctctgctgcctggagaagggtccgaacggctacggcttccacctgcacggggagaagggcaagttgggccagtacatccggctggtggagcccggctcgccggccgagaaggcggggctgctggcgggggaccggctggtggaggtgaacggcgaaaacgtggagaaggagacccaccagcaggtggtgagccgcatccgcgccgcactcaacgccgtgcgcctgctggtggtcgaccccgagacggacgagcagctgcagaagctcggcgtccaggtccgagaggagctgctgcgcgcccaggaagcgccggggcaggccgagccgccggccgccgccgaggtgcagggggctggcaacgaaaaattaaacctccgccaaaggccnaacaagaaaccaccccggaaacaaccgccaagctttcccggncctccggcttc

SEQ ID NO: 322379 - DNA, 2707 bp, Homo sapiens
  misc_feature (2707)..(2707): n is a, c, g, or t
ctattggcccgcggaggtccccaccctcagcgcggccccgcccccggggtaaggagccggggcggactctgggacgctcagacgccgcgcggggcggggcggggattggtctgtggtcctctctcggctcctcgcggctcgcggcggccgacggttcctgggacacctgcttgcttggcccgtccggcggctcagggcttctctgctgcgctcccggttcgctggacgggaagaagggctgggccgtcccgtcccgtccccatcggaaccccaagtcgcgccgctgacccgtcgcagggcgagatgagcgcggacgcagcggccggggcgcccctgccccggctctgctgcctggagaagggtccgaacggctacggcttccacctgcacggggagaagggcaagttgggccagtacatccggctggtggagcccggctcgccggccgagaaggcggggctgctggcgggggaccggctggtggaggtgaacggcgaaaacgtggagaaggagacccaccagcaggtggtgagccgcatccgcgccgcactcaacgccgtgcgcctgctggtggtcgaccccgagacggacgagcagctgcagaagctcggcgtccaggtccgagaggagctgctgcgcgcccaggaagcgccggggcaggccgagccgccggccgccgccgaggtgcagggggctggcaacgaaaatgagcctcgcgaggccgacaagagccacccggagcagcgcgagcttcggcctcggctctgtaccatgaagaagggccccagtggctatggcttcaacctgcacagcgacaagtccaagccaggccagttcatccggtcagtggacccagactccccggctgaggcttcagggctccgggcccaggatcgcattgtggaggtgaacggggtctgcatggaggggaagcagcatggggacgtggtgtccgccatcagggctggcggggacgagaccaagctgctggtggtggacagggaaactgacgagttcttcaagaaatgcagagtgatcccatctcaggagcacctgaatggtcccctgcctgtgcccttcaccaatggggagatacagaaggagaacagtcgtgaagccctggcagaggcagccttggagagccccaggccagccctggtgagatccgcctccagtgacaccagcgaggagctgaattcccaagacagccccccaaaacaggactccacagcgccctcgtctacctcctcctccgaccccatcctagacttcaacatctccctggccatggccaaagagagggcccaccagaaacgcagcagcaaacgggccccgcagatggactggagcaagaaaaacgaactcttcagcaacctctgagcgccctgctgccacccagtgactggcagggccgagccagcattccaccccacctttttccttctccccaattactcccctgaatcaatgtacaaatcagcacccacatcccctttcttgacaaatgatttttctagagaactatgttcttccctgactttagggaaggtgaatgtgttcccgtcctcccgcagtcagaaaggagactctgcctccctcctcctcactgagtgcctcatcctaccgggtgtccctttgccaccctgcctgggacatcgctggaacctgcaccatgccaggatcatgggaccaggcgagagggcaccctcccttcctcccccatgtgataaatgggtccagggctgatcaaagaactctgactgcagaactgccgctctcagtggacagggcatctgttaccctgagacctgtggcagacacgtcttgttttcatttgatttttgttaagagtgcagtattgcagagtctagaggaatttttgtttccttgattaacatgattttcctggttgttacatccagggcatggcagtggcctcagccttaaacttttgttcctactcccaccctcagcgaactgggcagcacggggagggtttggctacccctgcccatccctgagccaggtaccaccattgtaaggaaacactttcagaaattcagctggttcctccaaaaaaaaaaaaaaaaaaaaaaaaaaaaaaaaaaaaaaaaaaaaaaaaaaaaaaaaaaaaaaaaaaaaaaaaaaaaaaagaaggagggggcgcggagcgagcagagacactatctctcctcaaggagggggcgcgcccaacataactaacgagcacacacccgcgattagttagtagaaagagggcggcgcactcaaaaaaggggagagactatattaataagacgcacaggcagcagcgggcggacgccattatcataacaacaccgcgaaaggagagagggaggaacaagagggaagagaacggagggaaacactcagtgagaaggaagaacacccacaactaacatccgcggggtgaggaccaaaaatacaggcgaaggaaaaaacaagctacagcccaaacgaaaataaagaaccgcacagagaaaaggaacagaacacaaacgagaacgagcgaagcagagcaaagagcggggagagcaaaaaaaaaacgagacgggcgacagacgcaggcccgacgcgggagcggcacaaagagtaagagcgacaaaccggaagggaccgaacgagaaatcaacgaaacaaaaatcttgcaaacaccgagcgaacaaaaaaggcagacaagaagggn

SEQ ID NO: 322380 - DNA, 2667 bp, Homo sapiens
  misc_feature (2667)..(2667): n is a, c, g, or t
cacccccccggcccgcgcgtcaaaaaacatagctaggtcgaggcctggtgttaattcggcggggattggtctgtggtcctctctcggctcctcgcggctcgcggcggccgacggttcctgggacacctgcttgcttggcccgtccggcggctcagggcttctctgctgcgctcccggttcgctggacgggaagaagggctgggccgtcccgtcccgtccccatcggaaccccaagtcgcgccgctgacccgtcgcagggcgagatgagcgcggacgcagcggccggggcgcccctgccccggctctgctgcctggagaagggtccgaacggctacggcttccacctgcacggggagaagggcaagttgggccagtacatccggctggtggagcccggctcgccggccgagaaggcggggctgctggcgggggaccggctggtggaggtgaacggcgaaaacgtggagaaggagacccaccagcaggtggtgagccgcatccgcgccgcactcaacgccgtgcgcctgctggtggtcgaccccgagacggacgagcagctgcagaagctcggcgtccaggtccgagaggagctgctgcgcgcccaggaagcgccggggcaggccgagccgccggccgccgccgaggtgcagggggctggcaacgaaaatgagcctcgcgaggccgacaagagccacccggagcagcgcgagcttcggcctcggctctgtaccatgaagaagggccccagtggctatggcttcaacctgcacagcgacaagtccaagccaggccagttcatccggtcagtggacccagactccccggctgaggcttcagggctccgggcccaggatcgcattgtggaggtgaacggggtctgcatggaggggaagcagcatggggacgtggtgtccgccatcagggctggcggggacgagaccaagctgctggtggtggacagggaaactgacgagttcttcaagaaatgcagagtgatcccatctcaggagcacctgaatggtcccctgcctgtgcccttcaccaatggggagatacagaaggagaacagtcgtgaagccctggcagaggcagccttggagagccccaggccagccctggtgagatccgcctccagtgacaccagcgaggagctgaattcccaagacagccccccaaaacaggactccacagcgccctcgtctacctcctcctccgaccccatcctagacttcaacatctccctggccatggccaaagagagggcccaccagaaacgcagcagcaaacgggccccgcagatggactggagcaagaaaaacgaactcttcagcaacctctgagcgccctgctgccacccagtgactggcagggccgagccagcattccaccccacctttttccttctccccaattactcccctgaatcaatgtacaaatcagcacccacatcccctttcttgacaaatgatttttctagagaactatgttcttccctgactttagggaaggtgaatgtgttcccgtcctcccgcagtcagaaaggagactctgcctccctcctcctcactgagtgcctcatcctaccgggtgtccctttgccaccctgcctgggacatcgctggaacctgcaccatgccaggatcatgggaccaggcgagagggcaccctcccttcctcccccatgtgataaatgggtccagggctgatcaaagaactctgactgcagaactgccgctctcagtggacagggcatctgttaccctgagacctgtggcagacacgtcttgttttcatttgatttttgttaagagtgcagtattgcagagtctagaggaatttttgtttccttgattaacatgattttcctggttgttacatccagggcatggcagtggcctcagccttaaacttttgttcctactcccaccctcagcgaactgggcagcacggggagggtttggctacccctgcccatccctgagccaggtaccaccattgtaaggaaacactttcagaaattcagctggttcctccaaaaaaaaaaaaaaaaaaaaaaaaaaaaaaaaaaaaaaaaaaaaaaaaaaaaaaaaaaaaaaaaaaaaaaaaaaaaaaagaaggagggggcgcggagcgagcagagacactatctctcctcaaggagggggcgcgcccaacataactaacgagcacacacccgcgattagttagtagaaagagggcggcgcactcaaaaaaggggagagactatattaataagacgcacaggcagcagcgggcggacgccattatcataacaacaccgcgaaaggagagagggaggaacaagagggaagagaacggagggaaacactcagtgagaaggaagaacacccacaactaacatccgcggggtgaggaccaaaaatacaggcgaaggaaaaaacaagctacagcccaaacgaaaataaagaaccgcacagagaaaaggaacagaacacaaacgagaacgagcgaagcagagcaaagagcggggagagcaaaaaaaaaacgagacgggcgacagacgcaggcccgacgcgggagcggcacaaagagtaagagcgacaaaccggaagggaccgaacgagaaatcaacgaaacaaaaatcttgcaaacaccgagcgaacaaaaaaggcagacaagaagggn

SEQ ID NO: 322381 - DNA, 2063 bp, Homo sapiens
  misc_feature (2063)..(2063): n is a, c, g, or t
ctattggcccgcggaggtccccaccctcagcgcggccccgcccccggggtaaggagccggggcggactctgggacgctcagacgccgcgcggggcggggcggggattggtctgtggtcctctctcggctcctcgcggctcgcggcggccgacggttcctgggacacctgcttgcttggcccgtccggcggctcagggcttctctgctgcgctcccggttcgctggacgggaagaagggctgggccgtcccgtcccgtccccatcggaaccccaagtcgcgccgctgacccgtcgcagggcgagatgagcgcggacgcagcggccggggcgcccctgccccggctctgctgcctggagaagggtccgaacggctacggcttccacctgcacggggagaagggcaagttgggccagtacatccggctggtggagcccggctcgccggccgagaaggcggggctgctggcgggggaccggctggtggaggtgaacggcgaaaacgtggagaaggagacccaccagcaggtggtgagccgcatccgcgccgcactcaacgccgtgcgcctgctggtggtcgaccccgagacggacgagcagctgcagaagctcggcgtccaggtccgagaggagctgctgcgcgcccaggaagcgccggggcaggccgagccgccggccgccgccgaggtgcagggggctggcaacgaaaatgagcctcgcgaggccgacaagagccacccggagcagcgcgagcttcggcctcggctctgtaccatgaagaagggccccagtggctatggcttcaacctgcacagcgacaagtccaagccaggccagttcatccggtcagtggacccagactccccggctgaggcttcagggctccgggcccaggatcgcattgtggaggtgaacggggtctgcatggaggggaagcagcatggggacgtggtgtccgccatcagggctggcggggacgagaccaagctgctggtggtggacagggaaactgacgagttcttcaagaaatgcagagtgatcccatctcaggagcacctgaatgccctcccttcctcccccatgtgataaatgggtccagggctgatcaaagaactctgactgcagaactgccgctctcagtggacagggcatctgttaccctgagacctgtggcagacacgtcttgttttcatttgatttttgttaagagtgcagtattgcagagtctagaggaatttttgtttccttgattaacatgattttcctggttgttacatccagggcatggcagtggcctcagccttaaacttttgttcctactcccaccctcagcgaactgggcagcacggggagggtttggctacccctgcccatccctgagccaggtaccaccattgtaaggaaacactttcagaaattcagctggttcctccaaaaaaaaaaaaaaaaaaaaaaaaaaaaaaaaaaaaaaaaaaaaaaaaaaaaaaaaaaaaaaaaaaaaaaaaaaaaaaagaaggagggggcgcggagcgagcagagacactatctctcctcaaggagggggcgcgcccaacataactaacgagcacacacccgcgattagttagtagaaagagggcggcgcactcaaaaaaggggagagactatattaataagacgcacaggcagcagcgggcggacgccattatcataacaacaccgcgaaaggagagagggaggaacaagagggaagagaacggagggaaacactcagtgagaaggaagaacacccacaactaacatccgcggggtgaggaccaaaaatacaggcgaaggaaaaaacaagctacagcccaaacgaaaataaagaaccgcacagagaaaaggaacagaacacaaacgagaacgagcgaagcagagcaaagagcggggagagcaaaaaaaaaacgagacgggcgacagacgcaggcccgacgcgggagcggcacaaagagtaagagcgacaaaccggaagggaccgaacgagaaatcaacgaaacaaaaatcttgcaaacaccgagcgaacaaaaaaggcagacaagaagggn

SEQ ID NO: 322382 - DNA, 1110 bp, Homo sapiens
  misc_feature (919)..(919): n is a, c, g, or t
ctattggcccgcggaggtccccaccctcagcgcggccccgcccccggggtaaggagccggggcggactctgggacgctcagacgccgcgcggggcggggcggggattggtctgtggtcctctctcggctcctcgcggctcgcggcggccgacggttcctgggacacctgcttgcttggcccgtccggcggctcagggcttctctgctgcgctcccggttcgctggacgggaagaagggctgggccgtcccgtcccgtccccatcggaaccccaagtcgcgccgctgacccgtcgcagggcgagatgagcgcggacgcagcggccggggcgcccctgccccggctctgctgcctggagaagggtccgaacggctacggcttccacctgcacggggagaagggcaagttgggccagtacatccggctggtggagcccggctcgccggccgagaaggcggggctgctggcgggggaccggctggtggaggtgaacggcgaaaacgtggagaaggagacccaccagcaggtggtgagccgcatccgcgccgcactcaacgccgtgcgcctgctggtggtcgaccccgagacggacgagcagctgcagaagctcggcgtccaggtccgagaggagctgctgcgcgcccaggaagcgccggggcaggccgagccgccggccgccgccgaggtgcagggggctggcaacgaaaatgagcctcgcgaggccgacaagagccacccggagcagcgcgagcttcggcctcggctctgtaccatgaagaagggccccagtggctatggcttcaacctgcacagcgacaagtccaagccaggccagttcatccggtcagtggacccagactccccggctgaggcttcagggctccgggcccaggatcgcattgtggaggtgacgggtctgntgggtgggagcgctggggacgtggggccgcccgggctgcggggggaccctgtgcgggggcgggagctggggttcaaagcgggggccttggagctgagccgctgctccggggatcaggagctccgatgctgacacccgggtccaggcggaaccggagcctccaatacgggcccggcctcgctctcaggccgg

SEQ ID NO: 322383 - DNA, 1585 bp, Homo sapiens
  misc_feature (1585)..(1585): n is a, c, g, or t
ttttggggggctgtcttgggaattcagctcctcgctggtgtcactggaggcggatctcaccagggctggcctggggctctccaaggctgcctctgccaggactccacagcgccctcgtctacctcctcctccgaccccatcctagacttcaacatctccctggccatggccaaagagagggcccaccagaaacgcagcagcaaacgggccccgcagatggactggagcaagaaaaacgaactcttcagcaacctctgagcgccctgctgccacccagtgactggcagggccgagccagcattccaccccacctttttccttctccccaattactcccctgaatcaatgtacaaatcagcacccacatcccctttcttgacaaatgatttttctagagaactatgttcttccctgactttagggaaggtgaatgtgttcccgtcctcccgcagtcagaaaggagactctgcctccctcctcctcactgagtgcctcatcctaccgggtgtccctttgccaccctgcctgggacatcgctggaacctgcaccatgccaggatcatgggaccaggcgagagggcaccctcccttcctcccccatgtgataaatgggtccagggctgatcaaagaactctgactgcagaactgccgctctcagtggacagggcatctgttaccctgagacctgtggcagacacgtcttgttttcatttgatttttgttaagagtgcagtattgcagagtctagaggaatttttgtttccttgattaacatgattttcctggttgttacatccagggcatggcagtggcctcagccttaaacttttgttcctactcccaccctcagcgaactgggcagcacggggagggtttggctacccctgcccatccctgagccaggtaccaccattgtaaggaaacactttcagaaattcagctggttcctccaaaaaaaaaaaaaaaaaaaaaaaaaaaaaaaaaaaaaaaaaaaaaaaaaaaaaaaaaaaaaaaaaaaaaaaaaaaaaaagaaggagggggcgcggagcgagcagagacactatctctcctcaaggagggggcgcgcccaacataactaacgagcacacacccgcgattagttagtagaaagagggcggcgcactcaaaaaaggggagagactatattaataagacgcacaggcagcagcgggcggacgccattatcataacaacaccgcgaaaggagagagggaggaacaagagggaagagaacggagggaaacactcagtgagaaggaagaacacccacaactaacatccgcggggtgaggaccaaaaatacaggcgaaggaaaaaacaagctacagcccaaacgaaaataaagaaccgcacagagaaaaggaacagaacacaaacgagaacgagcgaagcagagcaaagagcggggagagcaaaaaaaaaacgagacgggcgacagacgcaggcccgacgcgggagcggcacaaagagtaagagcgacaaaccggaagggaccgaacgagaaatcaacgaaacaaaaatcttgcaaacaccgagcgaacaaaaaaggcagacaagaagggn

SEQ ID NO: 322384 - DNA, 1171 bp, Homo sapiens
  misc_feature (1171)..(1171): n is a, c, g, or t
agaccttgcccttgtaactcattgccatcaagccagtcctggtgcaggcgggtgaggacgctgaccacacgggtacgtgctgtgtactgctgcctcccgcggctttgtcttggcattatgcacctcccacgcggtcacgtaccagttaacttgactcagggtcttcggccctcccttcctcccccatgtgataaatgggtccagggctgatcaaagaactctgactgcagaactgccgctctcagtggacagggcatctgttaccctgagacctgtggcagacacgtcttgttttcatttgatttttgttaagagtgcagtattgcagagtctagaggaatttttgtttccttgattaacatgattttcctggttgttacatccagggcatggcagtggcctcagccttaaacttttgttcctactcccaccctcagcgaactgggcagcacggggagggtttggctacccctgcccatccctgagccaggtaccaccattgtaaggaaacactttcagaaattcagctggttcctccaaaaaaaaaaaaaaaaaaaaaaaaaaaaaaaaaaaaaaaaaaaaaaaaaaaaaaaaaaaaaaaaaaaaaaaaaaaaaaagaaggagggggcgcggagcgagcagagacactatctctcctcaaggagggggcgcgcccaacataactaacgagcacacacccgcgattagttagtagaaagagggcggcgcactcaaaaaaggggagagactatattaataagacgcacaggcagcagcgggcggacgccattatcataacaacaccgcgaaaggagagagggaggaacaagagggaagagaacggagggaaacactcagtgagaaggaagaacacccacaactaacatccgcggggtgaggaccaaaaatacaggcgaaggaaaaaacaagctacagcccaaacgaaaataaagaaccgcacagagaaaaggaacagaacacaaacgagaacgagcgaagcagagcaaagagcggggagagcaaaaaaaaaacgagacgggcgacagacgcaggcccgacgcgggagcggcacaaagagtaagagcgacaaaccggaagggaccgaacgagaaatcaacgaaacaaaaatcttgcaaacaccgagcgaacaaaaaaggcagacaagaagggn

SEQ ID NO: 322385 - DNA, 1057 bp, Homo sapiens
  misc_feature (1057)..(1057): n is a, c, g, or t
atgcaaataaactagaaaatctagaagaaatggatgaattcctgcacacatccaccctcccttcctcccccatgtgataaatgggtccagggctgatcaaagaactctgactgcagaactgccgctctcagtggacagggcatctgttaccctgagacctgtggcagacacgtcttgttttcatttgatttttgttaagagtgcagtattgcagagtctagaggaatttttgtttccttgattaacatgattttcctggttgttacatccagggcatggcagtggcctcagccttaaacttttgttcctactcccaccctcagcgaactgggcagcacggggagggtttggctacccctgcccatccctgagccaggtaccaccattgtaaggaaacactttcagaaattcagctggttcctccaaaaaaaaaaaaaaaaaaaaaaaaaaaaaaaaaaaaaaaaaaaaaaaaaaaaaaaaaaaaaaaaaaaaaaaaaaaaaaagaaggagggggcgcggagcgagcagagacactatctctcctcaaggagggggcgcgcccaacataactaacgagcacacacccgcgattagttagtagaaagagggcggcgcactcaaaaaaggggagagactatattaataagacgcacaggcagcagcgggcggacgccattatcataacaacaccgcgaaaggagagagggaggaacaagagggaagagaacggagggaaacactcagtgagaaggaagaacacccacaactaacatccgcggggtgaggaccaaaaatacaggcgaaggaaaaaacaagctacagcccaaacgaaaataaagaaccgcacagagaaaaggaacagaacacaaacgagaacgagcgaagcagagcaaagagcggggagagcaaaaaaaaaacgagacgggcgacagacgcaggcccgacgcgggagcggcacaaagagtaagagcgacaaaccggaagggaccgaacgagaaatcaacgaaacaaaaatcttgcaaacaccgagcgaacaaaaaaggcagacaagaagggn

SEQ ID NO: 322386 - DNA, 1169 bp, Homo sapiens
  misc_feature (1169)..(1169): n is a, c, g, or t
cacacaaaggtcctgcgactcccatcgccagctgcaagggcccactggggaggccctgtccccttctggcgcaatccaaggcctgaggctcctagaagaggggatggcccctggaagtccctagctggctctgggcatgggaggtggggtaccgccttacccttatctcccaagttcatggaaaccaggtaactcagataatccccttctccactgagggggagactaaggcccagagaagccccagccttcctcctagggatctgatacgaggaagacacagctggaatctggattccactcagctcctggagaaatagtagatggcaagtttgtgggtttttttttacacgaatttgaggaaaaccaaatgaatttgatagccaaattgagacaatttcagccttaaacttttgttcctactcccaccctcagcgaactgggcagcacggggagggtttggctacccctgcccatccctgagccaggtaccaccattgtaaggaaacactttcagaaattcagctggttcctccaaaaaaaaaaaaaaaaaaaaaaaaaaaaaaaaaaaaaaaaaaaaaaaaaaaaaaaaaaaaaaaaaaaaaaaaaaaaaaagaaggagggggcgcggagcgagcagagacactatctctcctcaaggagggggcgcgcccaacataactaacgagcacacacccgcgattagttagtagaaagagggcggcgcactcaaaaaaggggagagactatattaataagacgcacaggcagcagcgggcggacgccattatcataacaacaccgcgaaaggagagagggaggaacaagagggaagagaacggagggaaacactcagtgagaaggaagaacacccacaactaacatccgcggggtgaggaccaaaaatacaggcgaaggaaaaaacaagctacagcccaaacgaaaataaagaaccgcacagagaaaaggaacagaacacaaacgagaacgagcgaagcagagcaaagagcggggagagcaaaaaaaaaacgagacgggcgacagacgcaggcccgacgcgggagcggcacaaagagtaagagcgacaaaccggaagggaccgaacgagaaatcaacgaaacaaaaatcttgcaaacaccgagcgaacaaaaaaggcagacaagaagggn

SEQ ID NO: 322387 - DNA, 961 bp, Homo sapiens
  misc_feature (39)..(39): n is a, c, g, or t
  misc_feature (854)..(854): n is a, c, g, or t
cggcttagcgctccgtaggccccctgggggttaatcggncgagcggggattggtctgtggtcctctctcggctcctcgcggctcgcggcggccgacggttcctgggacacctgcttgcttggcccgtccggcggctcagggcttctctgctgcgctcccggttcgctggacgggaagaagggctgggccgtcccgtcccgtccccatcggaaccccaagtcgcgccgctgacccgtcgcagggcgagatgagcgcggacgcagcggccggggcgcccctgccccggctctgctgcctggagaagggtccgaacggctacggcttccacctgcacggggagaagggcaagttgggccagtacatccggctggtggagcccggctcgccggccgagaaggcggggctgctggcgggggaccggctggtggaggtgaacggcgaaaacgtggagaaggagacccaccagcaggtggtgagccgcatccgcgccgcactcaacgccgtgcgcctgctggtggtcgaccccgagacggacgagcagctgcagaagctcggcgtccaggtccgagaggagctgctgcgcgcccaggaagcgccggggcaggccgagccgccggccgccgccgaggtgcagggggctggcaacgaaaatgagcctcgcgaggccgacaagagccacccggagcagcgcgagcttcggcctcggctctgtaccatgaagaagggccccagtggctatggcttcaacctgcacagcgacaagtccaagccaggccagttcatccggtcagtggacccagactccccggctgaggcttcagggctccgggcccaggatcgcattgtggaggtgnacggggtctgcttggcggggcccccctgcggcccgtgggtcccgccaccggcggcgggccggcaccagcgcgtgtgtggcgcggcacccgcattcttccaacgtctg

SEQ ID NO: 322388 - DNA, 745 bp, Homo sapiens
cacacaaaggtcctgcgactcccatcgccagctgcaagggcccactggggaggccctgtccccttctggcgcaatccaaggcctgaggctcctagaagaggggatggcccctggaagtccctagctggctctgggcatgggaggtggggtaccgccttacccttatctcccaagttcatggaaaccaggtaactcagataatccccttctccactgagggggagactaaggcccagagaagccccagccttcctcctagggatctgatacgaggaagacacagctggaatctggattccactcagctcctgggatactgtcccctgcttcccccaccccttcaccctgcaggtcccctgcctgtgcccttcaccaatggggagatacagaaggagaacagtcgtgaagccctggcagaggcagccttggagagccccaggccagccctggtgagatccgcctccagtgacaccagcgaggagctgaattcccaagacagccccccaaaacaggactccacagcgccctcgtctacctcctcctccgaccccatcctagacttcaacatctccctggccatggccaaagagagggcccaccagaaacgcagcagcaaacgggccccgcagatggactggagcaagaaaacgaaaacatacagaaaacactgagaagccagatgacaagaccaggagacagacagggcgaaacagaatacaacccagcaattacactcacggaagaa

SEQ ID NO: 322389 - DNA, 2651 bp, Homo sapiens
  misc_feature (39)..(39): n is a, c, g, or t
  misc_feature (2651)..(2651): n is a, c, g, or t
cggcttagcgctccgtaggccccctgggggttaatcggncgagcggggattggtctgtggtcctctctcggctcctcgcggctcgcggcggccgacggttcctgggacacctgcttgcttggcccgtccggcggctcagggcttctctgctgcgctcccggttcgctggacgggaagaagggctgggccgtcccgtcccgtccccatcggaaccccaagtcgcgccgctgacccgtcgcagggcgagatgagcgcggacgcagcggccggggcgcccctgccccggctctgctgcctggagaagggtccgaacggctacggcttccacctgcacggggagaagggcaagttgggccagtacatccggctggtggagcccggctcgccggccgagaaggcggggctgctggcgggggaccggctggtggaggtgaacggcgaaaacgtggagaaggagacccaccagcaggtggtgagccgcatccgcgccgcactcaacgccgtgcgcctgctggtggtcgaccccgagacggacgagcagctgcagaagctcggcgtccaggtccgagaggagctgctgcgcgcccaggaagcgccggggcaggccgagccgccggccgccgccgaggtgcagggggctggcaacgaaaatgagcctcgcgaggccgacaagagccacccggagcagcgcgagcttcggcctcggctctgtaccatgaagaagggccccagtggctatggcttcaacctgcacagcgacaagtccaagccaggccagttcatccggtcagtggacccagactccccggctgaggcttcagggctccgggcccaggatcgcattgtggaggtgaacggggtctgcatggaggggaagcagcatggggacgtggtgtccgccatcagggctggcggggacgagaccaagctgctggtggtggacagggaaactgacgagttcttcaagaaatgcagagtgatcccatctcaggagcacctgaatggtcccctgcctgtgcccttcaccaatggggagatacagaaggagaacagtcgtgaagccctggcagaggcagccttggagagccccaggccagccctggtgagatccgcctccagtgacaccagcgaggagctgaattcccaagacagccccccaaaacaggactccacagcgccctcgtctacctcctcctccgaccccatcctagacttcaacatctccctggccatggccaaagagagggcccaccagaaacgcagcagcaaacgggccccgcagatggactggagcaagaaaaacgaactcttcagcaacctctgagcgccctgctgccacccagtgactggcagggccgagccagcattccaccccacctttttccttctccccaattactcccctgaatcaatgtacaaatcagcacccacatcccctttcttgacaaatgatttttctagagaactatgttcttccctgactttagggaaggtgaatgtgttcccgtcctcccgcagtcagaaaggagactctgcctccctcctcctcactgagtgcctcatcctaccgggtgtccctttgccaccctgcctgggacatcgctggaacctgcaccatgccaggatcatgggaccaggcgagagggcaccctcccttcctcccccatgtgataaatgggtccagggctgatcaaagaactctgactgcagaactgccgctctcagtggacagggcatctgttaccctgagacctgtggcagacacgtcttgttttcatttgatttttgttaagagtgcagtattgcagagtctagaggaatttttgtttccttgattaacatgattttcctggttgttacatccagggcatggcagtggcctcagccttaaacttttgttcctactcccaccctcagcgaactgggcagcacggggagggtttggctacccctgcccatccctgagccaggtaccaccattgtaaggaaacactttcagaaattcagctggttcctccaaaaaaaaaaaaaaaaaaaaaaaaaaaaaaaaaaaaaaaaaaaaaaaaaaaaaaaaaaaaaaaaaaaaaaaaaaaaaaagaaggagggggcgcggagcgagcagagacactatctctcctcaaggagggggcgcgcccaacataactaacgagcacacacccgcgattagttagtagaaagagggcggcgcactcaaaaaaggggagagactatattaataagacgcacaggcagcagcgggcggacgccattatcataacaacaccgcgaaaggagagagggaggaacaagagggaagagaacggagggaaacactcagtgagaaggaagaacacccacaactaacatccgcggggtgaggaccaaaaatacaggcgaaggaaaaaacaagctacagcccaaacgaaaataaagaaccgcacagagaaaaggaacagaacacaaacgagaacgagcgaagcagagcaaagagcggggagagcaaaaaaaaaacgagacgggcgacagacgcaggcccgacgcgggagcggcacaaagagtaagagcgacaaaccggaagggaccgaacgagaaatcaacgaaacaaaaatcttgcaaacaccgagcgaacaaaaaaggcagacaagaagggn

SEQ ID NO: 322390 - DNA, 2651 bp, Homo sapiens
  misc_feature (2651)..(2651): n is a, c, g, or t
ctattggcccgcggaggtccccaccctcagcgcggccccgcccccggggtaaggagccggggcggactctgggacgctcagacgccgcgcggggcggggcggggattggtctgtggtcctctctcggctcctcgcggctcgcggcggccgacggttcctgggacacctgcttgcttggcccgtccggcggctcagggcttctctgctgcgctcccggttcgctggacgggaagaagggctgggccgtcccgtcccgtccccatcggaaccccaagtcgcgccgctgacccgtcgcagggcgagatgagcgcggacgcagcggccggggcgcccctgccccggctctgctgcctggagaagggtccgaacggctacggcttccacctgcacggggagaagggcaagttgggccagtacatccggctggtggagcccggctcgccggccgagaaggcggggctgctggcgggggaccggctggtggaggtgaacggcgaaaacgtggagaaggagacccaccagcaggtggtgagccgcatccgcgccgcactcaacgccgtgcgcctgctggtggtcgaccccgagacggacgagcagctgcagaagctcggcgtccaggtccgagaggagctgctgcgcgcccaggaagcgccggggcaggccgagccgccggccgccgccgaggtgcagggggctggcaacgaaaatgagcctcgcgaggccgacaagagccacccggagcagcgcgagcttcggcctcggctctgtaccatgaagaagggccccagtggctatggcttcaacctgcacagcgacaagtccaagccaggccagttcatccggtcagtggacccagactccccggctgaggcttcagggctccgggcccaggatcgcattgtggaggtgaacggggtctgcatggaggggaagcagcatggggacgtggtgtccgccatcagggctggcggggacgagaccaagctgctggtggtggacagggaaactgacgagttcttcaagaaatgcagagtgatcccatctcaggagcacctgaatggtcccctgcctgtgcccttcaccaatggggagatacagaaggagaacagtcgtgaagccctggcagaggcagccttggagagccccaggccagccctggtgagatccgcctccagtgacaccagcgaggagctgaattcccaagacagccccccaaaacaggactccacagcgccctcgtctacctcctcctccgaccccatcctagacttcaacatctccctggccatggccaaagagagggcccaccagaaacgcagcagcaaacgggccccgcagatggactggagcaagggccgagccagcattccaccccacctttttccttctccccaattactcccctgaatcaatgtacaaatcagcacccacatcccctttcttgacaaatgatttttctagagaactatgttcttccctgactttagggaaggtgaatgtgttcccgtcctcccgcagtcagaaaggagactctgcctccctcctcctcactgagtgcctcatcctaccgggtgtccctttgccaccctgcctgggacatcgctggaacctgcaccatgccaggatcatgggaccaggcgagagggcaccctcccttcctcccccatgtgataaatgggtccagggctgatcaaagaactctgactgcagaactgccgctctcagtggacagggcatctgttaccctgagacctgtggcagacacgtcttgttttcatttgatttttgttaagagtgcagtattgcagagtctagaggaatttttgtttccttgattaacatgattttcctggttgttacatccagggcatggcagtggcctcagccttaaacttttgttcctactcccaccctcagcgaactgggcagcacggggagggtttggctacccctgcccatccctgagccaggtaccaccattgtaaggaaacactttcagaaattcagctggttcctccaaaaaaaaaaaaaaaaaaaaaaaaaaaaaaaaaaaaaaaaaaaaaaaaaaaaaaaaaaaaaaaaaaaaaaaaaaaaaaagaaggagggggcgcggagcgagcagagacactatctctcctcaaggagggggcgcgcccaacataactaacgagcacacacccgcgattagttagtagaaagagggcggcgcactcaaaaaaggggagagactatattaataagacgcacaggcagcagcgggcggacgccattatcataacaacaccgcgaaaggagagagggaggaacaagagggaagagaacggagggaaacactcagtgagaaggaagaacacccacaactaacatccgcggggtgaggaccaaaaatacaggcgaaggaaaaaacaagctacagcccaaacgaaaataaagaaccgcacagagaaaaggaacagaacacaaacgagaacgagcgaagcagagcaaagagcggggagagcaaaaaaaaaacgagacgggcgacagacgcaggcccgacgcgggagcggcacaaagagtaagagcgacaaaccggaagggaccgaacgagaaatcaacgaaacaaaaatcttgcaaacaccgagcgaacaaaaaaggcagacaagaagggn

SEQ ID NO: 322391 - DNA, 2350 bp, Homo sapiens
  misc_feature (2350)..(2350): n is a, c, g, or t
ctattggcccgcggaggtccccaccctcagcgcggccccgcccccggggtaaggagccggggcggactctgggacgctcagacgccgcgcggggcggggcggggattggtctgtggtcctctctcggctcctcgcggctcgcggcggccgacggttcctgggacacctgcttgcttggcccgtccggcggctcagggcttctctgctgcgctcccggttcgctggacgggaagaagggctgggccgtcccgtcccgtccccatcggaaccccaagtcgcgccgctgacccgtcgcagggcgagatgagcgcggacgcagcggccggggcgcccctgccccggctctgctgcctggagaagggtccgaacggctacggcttccacctgcacggggagaagggcaagttgggccagtacatccggctggtggagcccggctcgccggccgagaaggcggggctgctggcgggggaccggctggtggaggtgaacggcgaaaacgtggagaaggagacccaccagcaggtggtgagccgcatccgcgccgcactcaacgccgtgcgcctgctggtggtcgaccccgagacggacgagcagctgcagaagctcggcgtccaggtccgagaggagctgctgcgcgcccaggaagcgccggggcaggccgagccgccggccgccgccgaggtgcagggggctggcaacgaaaatgagcctcgcgaggccgacaagagccacccggagcaggagaacagtcgtgaagccctggcagaggcagccttggagagccccaggccagccctggtgagatccgcctccagtgacaccagcgaggagctgaattcccaagacagccccccaaaacaggactccacagcgccctcgtctacctcctcctccgaccccatcctagacttcaacatctccctggccatggccaaagagagggcccaccagaaacgcagcagcaaacgggccccgcagatggactggagcaagaaaaacgaactcttcagcaacctctgagcgccctgctgccacccagtgactggcagggccgagccagcattccaccccacctttttccttctccccaattactcccctgaatcaatgtacaaatcagcacccacatcccctttcttgacaaatgatttttctagagaactatgttcttccctgactttagggaaggtgaatgtgttcccgtcctcccgcagtcagaaaggagactctgcctccctcctcctcactgagtgcctcatcctaccgggtgtccctttgccaccctgcctgggacatcgctggaacctgcaccatgccaggatcatgggaccaggcgagagggcaccctcccttcctcccccatgtgataaatgggtccagggctgatcaaagaactctgactgcagaactgccgctctcagtggacagggcatctgttaccctgagacctgtggcagacacgtcttgttttcatttgatttttgttaagagtgcagtattgcagagtctagaggaatttttgtttccttgattaacatgattttcctggttgttacatccagggcatggcagtggcctcagccttaaacttttgttcctactcccaccctcagcgaactgggcagcacggggagggtttggctacccctgcccatccctgagccaggtaccaccattgtaaggaaacactttcagaaattcagctggttcctccaaaaaaaaaaaaaaaaaaaaaaaaaaaaaaaaaaaaaaaaaaaaaaaaaaaaaaaaaaaaaaaaaaaaaaaaaaaaaaagaaggagggggcgcggagcgagcagagacactatctctcctcaaggagggggcgcgcccaacataactaacgagcacacacccgcgattagttagtagaaagagggcggcgcactcaaaaaaggggagagactatattaataagacgcacaggcagcagcgggcggacgccattatcataacaacaccgcgaaaggagagagggaggaacaagagggaagagaacggagggaaacactcagtgagaaggaagaacacccacaactaacatccgcggggtgaggaccaaaaatacaggcgaaggaaaaaacaagctacagcccaaacgaaaataaagaaccgcacagagaaaaggaacagaacacaaacgagaacgagcgaagcagagcaaagagcggggagagcaaaaaaaaaacgagacgggcgacagacgcaggcccgacgcgggagcggcacaaagagtaagagcgacaaaccggaagggaccgaacgagaaatcaacgaaacaaaaatcttgcaaacaccgagcgaacaaaaaaggcagacaagaagggn

SEQ ID NO: 322392 - DNA, 1017 bp, Homo sapiens
  misc_feature (910)..(910): n is a, c, g, or t
ctattggcccgcggaggtccccaccctcagcgcggccccgcccccggggtaaggagccggggcggactctgggacgctcagacgccgcgcggggcggggcggggattggtctgtggtcctctctcggctcctcgcggctcgcggcggccgacggttcctgggacacctgcttgcttggcccgtccggcggctcagggcttctctgctgcgctcccggttcgctggacgggaagaagggctgggccgtcccgtcccgtccccatcggaaccccaagtcgcgccgctgacccgtcgcagggcgagatgagcgcggacgcagcggccggggcgcccctgccccggctctgctgcctggagaagggtccgaacggctacggcttccacctgcacggggagaagggcaagttgggccagtacatccggctggtggagcccggctcgccggccgagaaggcggggctgctggcgggggaccggctggtggaggtgaacggcgaaaacgtggagaaggagacccaccagcaggtggtgagccgcatccgcgccgcactcaacgccgtgcgcctgctggtggtcgaccccgagacggacgagcagctgcagaagctcggcgtccaggtccgagaggagctgctgcgcgcccaggaagcgccggggcaggccgagccgccggccgccgccgaggtgcagggggctggcaacgaaaatgagcctcgcgaggccgacaagagccacccggagcagcgcgagcttcggcctcggctctgtaccatgaagaagggccccagtggctatggcttcaacctgcacagcgacaagtccaagccaggccagttcatccggtcagtggacccagactccccggctgaggcttcagggctccgggcccaggatcgcattgtggaggtgnacggggtctgcttggcggggcccccctgcggcccgtgggtcccgccaccggcggcgggccggcaccagcgcgtgtgtggcgcggcacccgcattcttccaacgtctg

SEQ ID NO: 322393 - DNA, 1346 bp, Homo sapiens
atgttagcaacatacttgggctcaggaaataattgctagtgattgtatttgattagttttttggccattgtacaaagttagttttgagatgggtcactgcgatgtcacggatctcgaggagtctgtgattacaccacgtccatgtcaagcacatagctatgtgttgttgatgttgtccagtagctgtctagatataattgacgggtttctcttgtattcttgagtgagcagagctgaggttttagagcaccacaaaactgtaggaatggagtatcaaaaggttgaatacctgcctcatgaggaaactgggggaaagatgacagggcagattgtggcagaatgtatgtactgaaaatttgggggaggaactatagcaggaagaaaatacataaccagggacaccaaacagttggattttttgtttagtggttgttgatttggcttcaatttagggaatattttgagggtttttattgcttcagtagtttcaaactattttgtgtctatgtaagttggcttttattctcctgatctctcaaactcaaatctcaaaatattgaaaacttctgttatttttccctaaccctaatttaccttcctcaaaatctaatgaattatcaaatcctattgcatcttccttggaatcatcattagttaaactaaaggcaataggaagtgagtttaaaatcctttcttccagagcctgcaggtctgttcatgtgtttataattttcgttttttgtttttttttccatggattcagtggtctcctactggtttattcatgtttggccttgcgcttctcaaattcctttttatacctcatcagcaagtgaacttattccactgccctcatggctagctgtggcctgtgaaatcgtccagattccttgggcagacactcagggtgctttgtatttttgttcggggctgtgttttcagccttactgcttgccgttcccatatgtggactcttgcctgtcgcactgatttctgtcttcccaatccaatgctcatagagatcactaaggataatcctgcttattaagtgatgagttggtttgaattgtctctggtggtagtctaggaaagtgggatttctttttaattttggggttttgtttttgatttgtggtaccaatgaggattttatttgagacagtgtaatgggggccagatgagagaaccattttctttgtaagcttagcatggctgggctctagccagctccagatgaaattttggctaattatccctttagaaaagtcaggcttaagcagaactgggctctaggtcaattaaccaaaagccagttcacccaatgaccagttcatttatttaaaaaa

SEQ ID NO: 322394 - DNA, 592 bp, Homo sapiens
aatcccacccggggcggcttgggcatttatccgggcgtcagttcctctggctcctgggtttggggaatgagacggtctctgctgacaggcgccctgcagctccctgctactaactgacccctgtggactcccagtcaccaggtgagacccacacgggtcatcctacagacaaggctggcacaaagctccaaatctaggctatgatactatttttgggttccatatgctgcccccaacaaaaacaaaaataaagaccaagccccagaatccatttgtgagagagggcactgttggggtctgtgggcggggctgggaggagcctctatcacaactgtaggtctggaaaaacagtaaggacctttccccctcgtgatacaaatcacaagaagcaaagctttttcagaacaggcagaagattgcttttattctctgtgtactgctgatttgctgtgatttatagtgagaagggaaagagagagaaatttcctccaagagttcctatcagactggggagggagaaaatgaatttttatgtttatccaaagtggcatagtttttcagaaagtctgcttattttgatgtaaatgttcca

SEQ ID NO: 322395 - DNA, 451 bp, Homo sapiens
gccgctctctgcctaccaccattccatatttaagtggaatggtggtaggcagagaggcggtggcccagcaatccttaagtccagattaccagcattccatatttaagtggagcccctacgtagaaaggccccggggctttattttagtctccttttcagggatgtcgtgggcgggggagggggttcttggtgctacagccctctccccacccctaaagggacgccgacgctgtttgctgccttcaccacatattagtgcttgaccctggcaggggaccccatggaaaagatggggaagagcaaaatacatggagacgacgcaccctccaggatgctcgctgggattcccacgcccaccactgtcccccaccccatggctgggaggggcctctgaacggaacagtgtccccacagagcgaataaagccaaggcttcttcccaaaaaaaaaaa

SEQ ID NO: 322396 - DNA, 3491 bp, Homo sapiens
ggacgggaccgcgagcacaggccgctccgcgggcgcttcggatcctcgcgggaccccaccctctcccagcctgcccagcccgctgcagccgccagcgcgccccgtcggcagctctccatctgcacgtctctccgtgaaccccgtgagcggtgtgcagccaccatgttcagctggctgaagcggggcggggcacggggccagcagcccgaggccatccgcacggtgacctcggccctcaaggagctgtaccgcacgaagctgctgccgctggaggagcactaccgctttggggccttccactcgccggccctggaggacgcagacttcgacggcaagcccatggtgctggtggccggccagtacagcacgggcaagaccagcttcatccagtacctgctggagcaggaggtgcccggctcccgcgtggggcctgagcccaccaccgactgctttgtggccgtcatgcacggggacactgagggcaccgtgcccggcaacgccctcgtcgtggacccggacaagcccttccgcaaactcaaccctttcggaaacaccttcctcaacaggttcatgtgtgcccagctccctaatcaggtcctggagagcatcagcatcatcgacaccccgggtatcctgtcgggtgccaagcagagagtgagccgcggctacgacttcccggccgtgctgcgctggttcgcggagcgcgtggacctcatcatcctgctctttgatgcgcacaagctggagatctcggacgagttctcagaggccatcggcgcgttgcggggccatgaggacaagatccgcgtggtgctcaacaaggccgacatggtggagacgcagcagctgatgcgcgtctacggcgcgctcatgtgggcgctgggcaaggtggtgggcacgcccgaggtgctgcgcgtctacatcggctccttctggtcccagcccctcctcgtgcccgacaaccggcgcctcttcgagctggaggagcaggacctcttccgcgacatccagggcctgccccggcacgcagccttgcgcaagctcaacgacctggtgaagagggcccggctggtgcgactacctgaagaaggagatgccctctgtgtttgggaaggagaacaagaagaagcagctgatcctcaaactgcccgtcatctttgcgaagattcagctggaacatcacatctcccctggggactttcctgattgccagaaaatgcaggagctgctgatggcgcacgacttcaccaagtttcactcgctgaagccgaagctgctagaggcactggacgagatgctgacgcacgacatcgccaagctcatgcccctgctgcggcaggaggagctggagagcaccgaggtgggcgtgcaggggggcgcttttgagggcacccacatgggcccgtttgtggagcggggacctgacgaggccatggaggacggcgaggagggctcggacgacgaggccgagtgggtggtgaccaaggacaagtccaaatacgacgagatcttctacaacctggcgcctgccgacggcaagctgagcggctccaaggccaagacctggatggtggggaccaagctccccaactcagtgctggggcgcatctggaagctcagcgatgtggaccgcgacggcatgctggatgatgaggagttcgcgctggccagccacctcatcgaggccaagctggaaggccacgggctgcccgccaacctgccccgtcgcctggtgccaccctccaagcgacgccacaagggctccgccgagtgagccgggcccccctcccatggccctgctgtggctccccagctccagtcggctgcacgcacacccctgctccggctcacacacgccctgcctgccctccctgcccagctgtaaggaccgggggtctccctcctcactaccgccagacaccccggtggaagcatttagaggggaccacgggagggacaaggcttctctgtccgcccttcacacctccagcctcacgttcacttaggcacatcacacacacactggcacacgcaggcatccatccatccgtcattcattcaaatatttattgagcacctactatgtgcccagccctgttctaggcactgggcattaccatagagaacaaaatagacaaatacatctgccctcatggaaggtgacgttcccaggagagggcacctacacagtcacgcaaacacacactaattcctggcagggcccccagcccctcccctggctgagcagccctgtggctgaaatgactagcagataaacagacccccttctgctccgcttcctcctgcccagccaggcaacaccctcaaccggctccatcacatcctcaggtctcgggaccatggggggctcagaggggagacacacctactgcttcctcagatgggcccctccgcagccccttcccttgctcggggaaagcccccaattctgcccacacccatttatttccttccttccttccttcttttctttccttccttccttcttttttgtttttgcccccaattctgcccatacccatttctttctttccttccttccttcttttttgtttttgcccccagttctgtccacaccccttccctttcctgtcctgtcctttctttctttcttttttgatagaatcttgctctgtcgcccaggctggagtgcagtggtgagatctcagctcactgcaacctccacctcctgggttgaagtgattctcgtgcctcagcctcctgagtagctgggactgcaggcacgcgccaccacgcccagctaatttttgtatttgagtagagacggggtttcaccatgttggccaggctggtctcgaactccgcatctcaggtgatctgctcgcctcggcctcccaaagtgatgggattacaggcatgagccaccgtgcccggcttcacacccatttctttaaaaaggatcccgtagcaggcagaaaagccccttccatcctgctcctctgatactgtgcccccttggagatatttccgtcctccacccacgtgtctgtggctggaactgcccagcctgctcctggccccctggaagcctccccacagctggtaatctggacttaaggattgctgggccaccgcctctctgcctaccaccattccatatttaagtggagcccctacgtagaaaggccccggggctttattttagtctccttttcagggatgtcgtgggcgggggagggggttcttggtgctacagccctctccccacccctaaagggacgccgacgctgtttgctgccttcaccacatattagtgcttgaccctggcaggggaccccatggaaaagatggggaagagcaaaatacatggagacgacgcaccctccaggatgctcgctgggattcccacgcccaccactgtcccccaccccatggctgggaggggcctctgaacggaacagtgtccccacagagcgaataaagccaaggcttcttcccaaaaaaaaaaa

SEQ ID NO: 322397 - DNA, 3187 bp, Homo sapiens
ggacgggaccgcgagcacaggccgctccgcgggcgcttcggatcctcgcgggaccccaccctctcccagcctgcccagcccgctgcagccgccagcgcgccccgtcggcagctctccatctgcacgtctctccgtgaaccccgtgagcggtgtgcagccaccatgttcagctggctgaagcggggcggggcacggggccagcagcccgaggccatccgcacggtgacctcggccctcaaggagctgtaccgcacgaagctgctgccgctggaggagcactaccgctttggggccttccactcgccggccctggaggacgcagacttcgacggcaagcccatggtgctggtggccggccagtacagcacgggcaagaccagcttcatccagtacctgctggagcaggaggtgcccggctcccgcgtggggcctgagcccaccaccgactgctttgtggccgtcatgcacggggacactgagggcaccgtgcccggcaacgccctcgtcgtggacccggacaagcccttccgcaaactcaaccctttcggaaacaccttcctcaacaggttcatgtgtgcccagctccctaatcaggtcctggagagcatcagcatcatcgacaccccgggtatcctgtcgggtgccaagcagagagtgagccgcggctacgacttcccggccgtgctgcgctggttcgcggagcgcgtggacctcatcatcctgctctttgatgcgcacaagctggagatctcggacgagttctcagaggccatcggcgcgttgcggggccatgaggacaagatccgcgtggtgctcaacaaggccgacatggtggagacgcagcagctgatgcgcgtctacggcgcgctcatgtgggcgctgggcaaggtggtgggcacgcccgaggtgctgcgcgtctacatcggctccttctggtcccagcccctcctcgtgcccgacaaccggcgcctcttcgagctggaggagcaggacctcttccgcgacatccagggcctgccccggcacgcagccttgcgcaagctcaacgacctggtgaagagggcccggctggtgcgagttcacgcttacatcatcagctacctgaagaaggagatgccctctgtgtttgggaaggagaacaagaagaagcagctgatcctcaaactgcccgtcatctttgcgaagattcagctggaacatcacatctcccctggggactttcctgattgccagaaaatgcaggagctgctgatggcgcacgacttcaccaagtttcactcgctgaagccgaagctgctagaggcactggacgagatgctgacgcacgacatcgccaagctcatgcccctgctgcggcaggaggagctggagagcaccgaggtgggcgtgcaggggggcgcttttgagggcacccacatgggcccgtttgtggagcggggacctgacgaggccatggaggacggcgaggagggctcggacgacgaggccgagtgggtggtgaccaaggacaagtccaaatacgacgagatcttctacaacctggcgcctgccgacggcaagctgagcggctccaaggccaagacctggatggtggggaccaagctccccaactcagtgctggggcgcatctggaagctcagcgatgtggaccgcgacggcatgctggatgatgaggagttcgcgctggccagccacctcatcgaggccaagctggaaggccacgggctgcccgccaacctgccccgtcgcctggtgccaccctccaagcgacgccacaagggctccgccgagtgagccgggcccccctcccatggccctgctgtggctccccagctccagtcggctgcacgcacacccctgctccggctcacacacgccctgcctgccctccctgcccagctgtaaggaccgggggtctccctcctcactaccgccagacaccccggtggaagcatttagaggggaccacgggagggacaaggcttctctgtccgcccttcacacctccagcctcacgttcacttaggcacatcacacacacactggcacacgcaggcatccatccatccgtcattcattcaaatatttattgagcacctactatgtgcccagccctgttctaggcactgggcattaccatagagaacaaaatagacaaatacatctgccctcatggaaggtgacgttcccaggagagggcacctacacagtcacgcaaacacacactaattcctggcagggcccccagcccctcccctggctgagcagccctgtggctgaaatgactagcagataaacagacccccttctgctccgcttcctcctgcccagccaggcaacaccctcaaccggctccatcacatcctcaggtctcgggaccatggggggctcagaggggagacacacctactgcttcctcagatgggcccctccgcagccccttcccttgctcggggaaagcccccaattctgcccacacccatttatttccttccttccttccttcttttctttccttccttccttcttttttgtttttgcccccaattctgcccatacccatttctttctttccttccttccttcttttttgtttttgcccccagttctgtccacaccccttccctttcctgtcctgtcctttctttctttcttttttgatagaatcttgctctgtcgcccaggctggagtgcagtggtgagatctcagctcactgcaacctccacctcctgggttgaagtgattctcgtgcctcagcctcctgagtagctgggactgcaggcacgcgccaccacgcccagctaatttttgtatttgagtagagacggggtttcaccatgttggccaggctggtctcgaactccgcatctcaggtgatctgctcgcctcggcctcccaaagtgatgggattacaggcatgagccaccgtgcccggcttcacacccatttctttaaaaaggatcccgtagcaggcagaaaagccccttccatcctgctcctctgatactgtgcccccttggagatatttccgtcctccacccacgtgtctgtggctggaactgcccagcctgctcctggccccctggaagcctccccacagctggtaatctgtcacacgcctgagccacggagcccggagaacccgagctacgtggagctcttggcggggatgaggagtgttgcagg

SEQ ID NO: 322398 - DNA, 2479 bp, Homo sapiens
ggacgggaccgcgagcacaggccgctccgcgggcgcttcggatcctcgcgggaccccaccctctcccagcctgcccagcccgctgcagccgccagcgcgccccgtcggcagctctccatctgcacgtctctccgtgaaccccgtgagcggtgtgcagccaccatgttcagctggctgaagcggggcggggcacggggccagcagcccgaggccatccgcacggtgacctcggccctcaaggagctgtaccgcacgaagctgctgccgctggaggagcactaccgctttggggccttccactcgccggccctggaggacgcagacttcgacggcaagcccatggtgctggtggccggccagtacagcacgggcaagaccagcttcatccagtacctgctggagcaggaggtgcccggctcccgcgtggggcctgagcccaccaccgactgctttgtggccgtcatgcacggggacactgagggcaccgtgcccggcaacgccctcgtcgtggacccggacaagcccttccgcaaactcaaccctttcggaaacaccttcctcaacaggttcatgtgtgcccagctccctaatcaggtcctggagagcatcagcatcatcgacaccccgggtatcctgtcgggtgccaagcagagagtgagccgcggctacgacttcccggccgtgctgcgctggttcgcggagcgcgtggacctcatcatcctgctctttgatgcgcacaagctggagatctcggacgagttctcagaggccatcggcgcgttgcggggccatgaggacaagatccgcgtggtgctcaacaaggccgacatggtggagacgcagcagctgatgcgcgtctacggcgcgctcatgtgggcgctgggcaaggtggtgggcacgcccgaggtgctgcgcgtctacatcggctccttctggtcccagcccctcctcgtgcccgacaaccggcgcctcttcgagctggaggagcaggacctcttccgcgacatccagggcctgccccggcacgcagccttgcgcaagctcaacgacctggtgaagagggcccggctggtgcgagttcacgcttacatcatcagctacctgaagaaggagatgccctctgtgtttgggaaggagaacaagaagaagcagctgatcctcaaactgcccgtcatctttgcgaagattcagctggaacatcacatctcccctggggactttcctgattgccagaaaatgcaggagctgctgatggcgcacgacttcaccaagtttcactcgctgaagccgaagctgctagaggcactggacgagatgctgacgcacgacatcgccaagctcatgcccctgctgcggcaggaggagctggagagcaccgaggtgggcgtgcaggggggcgcttttgagggcacccacatgggcccgtttgtggagcggggacctgacgaggccatggaggacggcgaggagggctcggacgacgaggccgagtgggtggtgaccaaggacaagtccaaatacgacgagatcttctacaacctggcgcctgccgacggcaagctgagcggctccaaggccaagacctggatggtggggaccaagctccccaactcagtgctggggcgcatctggaagctcagcgatgtggaccgcgacggcatgctggatgatgaggagttcgcgctggccagccacctcatcgaggccaagctggaaggccacgggctgcccgccaacctgccccgtcgcctggtgccaccctccaagcgacgccacaagggctccgccgagtgagccgggcccccctcccatggccctgctgtggctccccagctccagtcggctgcacgcacacccctgctccggctcacacacgccctgcctgccctccctgcccagctgtaaggaccgggggtctccctcctcactaccgccagacaccccggtggaagcatttagaggggaccacgggagggacaaggcttctctgtccgcccttcacacctccagcctcacgttcacttaggcacatcacacacacactggcacacgcaggcatccatccatccgtcattcattcaaatatttattgagcacctactatgtgcccagccctgttctaggcactgggcattaccatagagaacaaaatagacaaatacatctgccctcatggaaggtgacgttcccaggagagggcacctacacagtcacgcaaacacacactaattcctggcagggcccccagcccctcccctggctgagcagccctgtggctgaaatgactagcagataaacagacccccttctgctccgcttcctcctgcccagccaggcaacaccctcaaccggctccatcacatcctcaggtctcgggaccatggggggctcagaggggagacacacctactgcttcctctgaacggaacagtgtccccacagagcgaataaagccaaggcttcttcccaaaaaaaaaaa

SEQ ID NO: 322399 - DNA, 868 bp, Homo sapiens
atggaatataacatgtaaaaagcggctggtcggtcgaatccgggattgcgaccagctcgacgatctaacgccgtatttgcgaagattcagctggaacatcacatctcccctggggactttcctgattgccagaaaatgcaggagctgctgatggcgcacgacttcaccaagtttcactcgctgaagccgaagctgctagaggcactggacgagatgctgacgcacgacatcgccaagctcatgcccctgctgcggcaggaggagctggagagcaccgaggtgggcgtgcaggggggcgcttttgagggcacccacatgggcccgtttgtggagcggggacctgacgaggccatggaggacggcgaggagggctcggacgacgaggccgagtgggtggtgaccaaggacaagtccaaatacgacgagatcttctacaacctggcgcctgccgacggcaagctgagcggctccaaggccaagacctggatggtggggaccaagctccccaactcagtgctggggcgcatctggaagctcagcgatgtggaccgcgacggcatgctggatgatgaggagttcgcgctggccagccacctcatcgaggccaagctggaaggccacgggctgcccgccaacctgccccgtcgcctggtgccaccctccaagcgacgccacaagggctccgccgagggaccccatggaaaagatggggaagagcaaaatacatggagacgacgcaccctccaggatgctcgctgggattcccacgcccaccactgtcccccaccccatggctgggaggggcctctgaacggaacagtgtccccacagagcgaataaagccaaggcttcttcccaaaaaaaaaaa

SEQ ID NO: 322400 - DNA, 1255 bp, Homo sapiens
ggacgggaccgcgagcacaggccgctccgcgggcgcttcggatcctcgcgggaccccaccctctcccagcctgcccagcccgctgcagccgccagcgcgccccgtcggcagctctccatctgcacgtctctccgtgaaccccgtgagcggtgtgcagccaccatgttcagctggctgaagcggggcggggcacggggccagcagcccgaggccatccgcacggtgacctcggccctcaaggagctgtaccgcacgaagctgctgccgctggaggagcactaccgctttggggccttccactcgccggccctggaggacgcagacttcgacggcaagcccatggtgctggtggccggccagtacagcacgggcaagaccagcttcatccagtacctgctggagcaggaggtgcccggctcccgcgtggggcctgagcccaccaccgactgctttgtggccgtcatgcacggggacactgagggcaccgtgcccggcaacgccctcgtcgtggacccggacaagcccttccgcaaactcaaccctttcggaaacaccttcctcaacaggttcatgtgtgcccagctccctaatcaggtcctggagagcatcagcatcatcgacaccccgggtatcctgtcgggtgccaagcagagagtgagccgcggctacgacttcccggccgtgctgcgctggttcgcggagcgcgtggacctcatcatcctgctctttgatgcgcacaagctggagatctcggacgagttctcagaggccatcggcgcgttgcggggccatgaggacaagatccgcgtggtgctcaacaaggccgacatggtggagacgcagcagctgatgcgcgtctacggcgcgctcatgtgggcgctgggcaaggtggtgggcacgcccgaggtgctgcgcgtctacatcggctccttctggtcccagcccctcctcgtgcccgacaaccggcgcctcttcgagctggaggagcaggacctcttccgcgacatccagggcctgccccggcacgcagccttgcgcaagctcaacgacctggtgaagagggcccggctggtgcgaatggagtctctctctatcacccaggctggagagcagtggcatgatctcggctcactgcaacctctgcctcccaggttaaagtgattcttgtgcctcagctttccgagtagctgggactccaggcaggtgccaccacacctggctaatttttgtatttttagtagagatgggttctcac

SEQ ID NO: 322401 - DNA, 3511 bp, Homo sapiens
ggacgggaccgcgagcacaggccgctccgcgggcgcttcggatcctcgcgggaccccaccctctcccagcctgcccagcccgctgcagccgccagcgcgccccgtcggcagctctccatctgcacgtctctccgtgaaccccgtgagcggtgtgcagccaccatgttcagctggctgaagcggggcggggcacggggccagcagcccgaggccatccgcacggtgacctcggccctcaaggagctgtaccgcacgaagctgctgccgctggaggagcactaccgctttggggccttccactcgccggccctggaggacgcagacttcgacggcaagcccatggtgctggtggccggccagtacagcacgggcaagaccagcttcatccagtacctgctggagcaggaggtgcccggctcccgcgtggggcctgagcccaccaccgactgctttgtggccgtcatgcacggggacactgagggcaccgtgcccggcaacgccctcgtcgtggacccggacaagcccttccgcaaactcaaccctttcggaaacaccttcctcaacaggttcatgtgtgcccagctccctaatcaggtcctggagagcatcagcatcatcgacaccccgggtatcctgtcgggtgccaagcagagagtgagccgcggctacgacttcccggccgtgctgcgctggttcgcggagcgcgtggacctcatcatcctgctctttgatgcgcacaagctggagatctcggacgagttctcagaggccatcggcgcgttgcggggccatgaggacaagatccgcgtggtgctcaacaaggccgacatggtggagacgcagcagctgatgcgcgtctacggcgcgctcatgtgggcgctgggcaaggtggtgggcacgcccgaggtgctgcgcgtctacatcggctccttctggtcccagcccctcctcgtgcccgacaaccggcgcctcttcgagctggaggagcaggacctcttccgcgacatccagggcctgccccggcacgcagccttgcgcaagctcaacgacctggtgaagagggcccggctggtgcgagttcacgcttacatcatcagctacctgaagaaggagatgccctctgtgtttgggaaggagaacaagaagaagcagctgatcctcaaactgcccgtcatctttgcgaagattcagctggaacatcacatctcccctggggactttcctgattgccagaaaatgcaggagctgctgatggcgcacgacttcaccaagtttcactcgctgaagccgaagctgctagaggcactggacgagatgctgacgcacgacatcgccaagctcatgcccctgctgcggcaggaggagctggagagcaccgaggtgggcgtgcaggggggcgcttttgagggcacccacatgggcccgtttgtggagcggggacctgacgaggccatggaggacggcgaggagggctcggacgacgaggccgagtgggtggtgaccaaggacaagtccaaatacgacgagatcttctacaacctggcgcctgccgacggcaagctgagcggctccaaggccaagacctggatggtggggaccaagctccccaactcagtgctggggcgcatctggaagctcagcgatgtggaccgcgacggcatgctggatgatgaggagttcgcgctggccagccacctcatcgaggccaagctggaaggccacgggctgcccgccaacctgccccgtcgcctggtgccaccctccaagcgacgccacaagggctccgccgagtgagccgggcccccctcccatggccctgctgtggctccccagctccagtcggctgcacgcacacccctgctccggctcacacacgccctgcctgccctccctgcccagctgtaaggaccgggggtctccctcctcactaccgccagacaccccggtggaagcatttagaggggaccacgggagggacaaggcttctctgtccgcccttcacacctccagcctcacgttcacttaggcacatcacacacacactggcacacgcaggcatccatccatccgtcattcattcaaatatttattgagcacctactatgtgcccagccctgttctaggcactgggcattaccatagagaacaaaatagacaaatacatctgccctcatggaaggtgacgttcccaggagagggcacctacacagtcacgcaaacacacactaattcctggcagggcccccagcccctcccctggctgagcagccctgtggctgaaatgactagcagataaacagacccccttctgctccgcttcctcctgcccagccaggcaacaccctcaaccggctccatcacatcctcaggtctcgggaccatggggggctcagaggggagacacacctactgcttcctcagatgggcccctccgcagccccttcccttgctcggggaaagcccccaattctgcccacacccatttatttccttccttccttccttcttttctttccttccttccttcttttttgtttttgcccccaattctgcccatacccatttctttctttccttccttccttcttttttgtttttgcccccagttctgtccacaccccttccctttcctgtcctgtcctttctttctttcttttttgatagaatcttgctctgtcgcccaggctggagtgcagtggtgagatctcagctcactgcaacctccacctcctgggttgaagtgattctcgtgcctcagcctcctgagtagctgggactgcaggcacgcgccaccacgcccagctaatttttgtatttgagtagagacggggtttcaccatgttggccaggctggtctcgaactccgcatctcaggtgatctgctcgcctcggcctcccaaagtgatgggattacaggcatgagccaccgtgcccggcttcacacccatttctttaaaaaggatcccgtagcaggcagaaaagccccttccatcctgctcctctgatactgtgcccccttggagatatttccgtcctccacccacgtgtctgtggctggaactgcccagcctgctcctggccccctggaagcctccccacagctggtaatctggacttaaggattgctgggccaccgcctctctgcctaccaccattccatatttaagtggagcccctacgtagaaaggccccggggctttattttagtctccttttcagggatgtcgtgggcgggggagggggttcttggtgctacagccctctccccacccctaaagggacgccgacgctgtttgctgccttcaccacatattagtgcttgaccctggcaggggaccccatggaaaagatggggaagagcaaaatacatggagacgacgcaccctccaggatgctcgctgggattcccacgcccaccactgtcccccaccccatggctgggaggggcctctgaacggaacagtgtccccacagagcgaataaagccaaggcttcttcccaaaaaaaaaaa

SEQ ID NO: 322402 - DNA, 3261 bp, Homo sapiens
ctacctgtctgaggaacccgagccctacctggcagctctacctgcactcggagccccggcccaatgcagcgcaactgctcggcaagcccatggtgctggtggccggccagtacagcacgggcaagaccagcttcatccagtacctgctggagcaggaggtgcccggctcccgcgtggggcctgagcccaccaccgactgctttgtggccgtcatgcacggggacactgagggcaccgtgcccggcaacgccctcgtcgtggacccggacaagcccttccgcaaactcaaccctttcggaaacaccttcctcaacaggttcatgtgtgcccagctccctaatcaggtcctggagagcatcagcatcatcgacaccccgggtatcctgtcgggtgccaagcagagagtgagccgcggctacgacttcccggccgtgctgcgctggttcgcggagcgcgtggacctcatcatcctgctctttgatgcgcacaagctggagatctcggacgagttctcagaggccatcggcgcgttgcggggccatgaggacaagatccgcgtggtgctcaacaaggccgacatggtggagacgcagcagctgatgcgcgtctacggcgcgctcatgtgggcgctgggcaaggtggtgggcacgcccgaggtgctgcgcgtctacatcggctccttctggtcccagcccctcctcgtgcccgacaaccggcgcctcttcgagctggaggagcaggacctcttccgcgacatccagggcctgccccggcacgcagccttgcgcaagctcaacgacctggtgaagagggcccggctggtgcgagttcacgcttacatcatcagctacctgaagaaggagatgccctctgtgtttgggaaggagaacaagaagaagcagctgatcctcaaactgcccgtcatctttgcgaagattcagctggaacatcacatctcccctggggactttcctgattgccagaaaatgcaggagctgctgatggcgcacgacttcaccaagtttcactcgctgaagccgaagctgctagaggcactggacgagatgctgacgcacgacatcgccaagctcatgcccctgctgcggcaggaggagctggagagcaccgaggtgggcgtgcaggggggcgcttttgagggcacccacatgggcccgtttgtggagcggggacctgacgaggccatggaggacggcgaggagggctcggacgacgaggccgagtgggtggtgaccaaggacaagtccaaatacgacgagatcttctacaacctggcgcctgccgacggcaagctgagcggctccaaggccaagacctggatggtggggaccaagctccccaactcagtgctggggcgcatctggaagctcagcgatgtggaccgcgacggcatgctggatgatgaggagttcgcgctggccagccacctcatcgaggccaagctggaaggccacgggctgcccgccaacctgccccgtcgcctggtgccaccctccaagcgacgccacaagggctccgccgagtgagccgggcccccctcccatggccctgctgtggctccccagctccagtcggctgcacgcacacccctgctccggctcacacacgccctgcctgccctccctgcccagctgtaaggaccgggggtctccctcctcactaccgccagacaccccggtggaagcatttagaggggaccacgggagggacaaggcttctctgtccgcccttcacacctccagcctcacgttcacttaggcacatcacacacacactggcacacgcaggcatccatccatccgtcattcattcaaatatttattgagcacctactatgtgcccagccctgttctaggcactgggcattaccatagagaacaaaatagacaaatacatctgccctcatggaaggtgacgttcccaggagagggcacctacacagtcacgcaaacacacactaattcctggcagggcccccagcccctcccctggctgagcagccctgtggctgaaatgactagcagataaacagacccccttctgctccgcttcctcctgcccagccaggcaacaccctcaaccggctccatcacatcctcaggtctcgggaccatggggggctcagaggggagacacacctactgcttcctcagatgggcccctccgcagccccttcccttgctcggggaaagcccccaattctgcccacacccatttatttccttccttccttccttcttttctttccttccttccttcttttttgtttttgcccccaattctgcccatacccatttctttctttccttccttccttcttttttgtttttgcccccagttctgtccacaccccttccctttcctgtcctgtcctttctttctttcttttttgatagaatcttgctctgtcgcccaggctggagtgcagtggtgagatctcagctcactgcaacctccacctcctgggttgaagtgattctcgtgcctcagcctcctgagtagctgggactgcaggcacgcgccaccacgcccagctaatttttgtatttgagtagagacggggtttcaccatgttggccaggctggtctcgaactccgcatctcaggtgatctgctcgcctcggcctcccaaagtgatgggattacaggcatgagccaccgtgcccggcttcacacccatttctttaaaaaggatcccgtagcaggcagaaaagccccttccatcctgctcctctgatactgtgcccccttggagatatttccgtcctccacccacgtgtctgtggctggaactgcccagcctgctcctggccccctggaagcctccccacagctggtaatctggacttaaggattgctgggccaccgcctctctgcctaccaccattccatatttaagtggagcccctacgtagaaaggccccggggctttattttagtctccttttcagggatgtcgtgggcgggggagggggttcttggtgctacagccctctccccacccctaaagggacgccgacgctgtttgctgccttcaccacatattagtgcttgaccctggcaggggaccccatggaaaagatggggaagagcaaaatacatggagacgacgcaccctccaggatgctcgctgggattcccacgcccaccactgtcccccaccccatggctgggaggggcctctgaacggaacagtgtccccacagagcgaataaagccaaggcttcttcccaaaaaaaaaaa

SEQ ID NO: 322403 - DNA, 2938 bp, Homo sapiens
ggacgggaccgcgagcacaggccgctccgcgggcgcttcggatcctcgcgggaccccaccctctcccagcctgcccagcccgctgcagccgccagcgcgccccgtcggcagctctccatctgcacgtctctccgtgaaccccgtgagcggtgtgcagccaccatgttcagctggctgaagcggggcggggcacggggccagcagcccgaggccatccgcacggtgacctcggccctcaaggagctgtaccgcacgaagctgctgccgctggaggagcactaccgctttggggccttccactcgccggccctggaggacgcagacttcgacggcaagcccatggtgctggtggccggccagtacagcacgggcaagaccagcttcatccagtacctgctggagcaggaggtgcccggctcccgcgtggggcctgagcccaccaccgactgctttgtggccgtcatgcacggggacactgagggcaccgtgcccggcaacgccctcgtcgtggacccggacaagcccttccgcaaactcaaccctttcggaaacaccttcctcaacaggttcatgtgtgcccagctccctaatcaggtcctggagagcatcagcatcatcgacaccccgggtatcctgtcgggtgccaagcagagagtgagccgcggctacgacttcccggccgtgctgcgctggttcgcggagcgcgtggacctcatcatcctgctctttgatgcgcacaagctggagatctcggacgagttctcagaggccatcggcgcgttgcggggccatgaggacaagatccgcgtggtgctcaacaaggccgacatggtggagacgcagcagctgatgcgcgtctacggcgcgctcatgtgggcgctgggcaaggtggtgggcacgcccgaggtgctgcgcgtctacatcggctccttctggtcccagcccctcctcgtgcccgacaaccggcgcctcttcgagctggaggagcaggacctcttccgcgacatccagggcctgccccggcacgcagccttgcgcaagctcaacgacctggtgaagagggcccggctggtgcgagttcacgcttacatcatcagctacctgaagaaggagatgccctctgtgtttgggaaggagaacaagaagaagcagctgatcctcaaactgcccgtcatctttgcgaagattcagctggaacatcacatctcccctggggactttcctgattgccagaaaatgcaggagctgctgatggcgcacgacttcaccaagtttcactcgctgaagccgaagctgctagaggcactggacgagatgctgacgcacgacatcgccaagctcatgcccctgctgcggcaggaggagctggagagcaccgaggtgggcgtgcaggggggcgcttttgagggcacccacatgggcccgtttgtggagcggggacctgacgaggccatggaggacggcgaggagggctcggacgacgaggccgagtgggtggtgaccaaggacaagtccaaatacgacgagatcttctacaacctggcgcctgccgacggcaagctgagcggctccaaggccaagacctggatggtggggaccaagctccccaactcagtgctggggcgcatctggaagctcagcgatgtggaccgcgacggcatgctggatgatgaggagttcgcgctggccagccacctcatcgaggccaagctggaaggccacgggctgcccgccaacctgccccgtcgcctggtgccaccctccaagcgacgccacaagggctccgccgagtgagccgggcccccctcccatggccctgctgtggctccccagctccagtcggctgcacgcacacccctgctccggctcacacacgccctgcctgccctccctgcccagctgtaaggaccgggggtctccctcctcactaccgccagacaccccggtggaagcatttagaggggaccacgggagggacaaggcttctctgtccgcccttcacacctccagcctcacgttcacttaggcacatcacacacacactggcacacgcaggcatccatccatccgtcattcattcaaatatttattgagcacctactatgtgcccagccctgttctaggcactgggcattaccatagagaacaaaatagacaaatacatctgccctcatggaaggtgacgttcccaggagagggcacctacacagcacgcgccaccacgcccagctaatttttgtatttgagtagagacggggtttcaccatgttggccaggctggtctcgaactccgcatctcaggtgatctgctcgcctcggcctcccaaagtgatgggattacaggcatgagccaccgtgcccggcttcacacccatttctttaaaaaggatcccgtagcaggcagaaaagccccttccatcctgctcctctgatactgtgcccccttggagatatttccgtcctccacccacgtgtctgtggctggaactgcccagcctgctcctggccccctggaagcctccccacagctggtaatctggacttaaggattgctgggccaccgcctctctgcctaccaccattccatatttaagtggagcccctacgtagaaaggccccggggctttattttagtctccttttcagggatgtcgtgggcgggggagggggttcttggtgctacagccctctccccacccctaaagggacgccgacgctgtttgctgccttcaccacatattagtgcttgaccctggcaggggaccccatggaaaagatggggaagagcaaaatacatggagacgacgcaccctccaggatgctcgctgggattcccacgcccaccactgtcccccaccccatggctgggaggggcctctgaacggaacagtgtccccacagagcgaataaagccaaggcttcttcccaaaaaaaaaaa

SEQ ID NO: 322404 - DNA, 1969 bp, Homo sapiens
ggacgggaccgcgagcacaggccgctccgcgggcgcttcggatcctcgcgggaccccaccctctcccagcctgcccagcccgctgcagccgccagcgcgccccgtcggcagctctccatctgcacgtctctccgtgaaccccgtgagcggtgtgcagccaccatgttcagctggctgaagcggggcggggcacggggccagcagcccgaggccatccgcacggtgacctcggccctcaaggagctgtaccgcacgaagctgctgccgctggaggagcactaccgctttggggccttccactcgccggccctggaggacgcagacttcgacggcaagcccatggtgctggtggccggccagtacagcacgggcaagaccagcttcatccagtacctgctggagcaggaggtgcccggctcccgcgtggggcctgagcccaccaccgactgctttgtggccgtcatgcacggggacactgagggcaccgtgcccggcaacgccctcgtcgtggacccggacaagcccttccgcaaactcaaccctttcggaaacaccttcctcaacaggttcatgtgtgcccagctccctaatcaggtcctggagagcatcagcatcatcgacaccccgggtatcctgtcgggtgccaagcagagagtgagccgcggctacgacttcccggccgtgctgcgctggttcgcggagcgcgtggacctcatcatcctgctctttgatgcgcacaagctggagatctcggacgagttctcagaggccatcggcgcgttgcggggccatgaggacaagatccgcgtggtgctcaacaaggccgacatggtggagacgcagcagctgatgcgcgtctacggcgcgctcatgtgggcgctgggcaaggtggtgggcacgcccgaggtgctgcgcgtctacatcggctccttctggtcccagcccctcctcgtgcccgacaaccggcgcctcttcgagctggaggagcaggacctcttccgcgacatccagggcctgccccggcacgcagccttgcgcaagctcaacgacctggtgaagagggcccggctggtgcgagttcacgcttacatcatcagctacctgaagaaggagatgccctctgtgtttgggaaggagaacaagaagaagcagctgatcctcaaactgcccgtcatctttgcgaagattcagctggaacatcacatctcccctggggactttcctgattgccagaaaatgcaggagctgctgatggcgcacgacttcaccaagtttcactcgctgaagccgaagctgctagaggcactggacgagatgctgacgcacgacatcgccaagctcatgcccctgctgcggcaggaggagctggagagcaccgaggtgggcgtgcaggggggcgcttttgagggcacccacatgggcccgtttgtggagcggggacctgacgaggccatggaggacggcgaggagggctcggacgacgaggccgagtgggtggtgaccaaggacaagtccaaatacgacgagatcttctacaacctggcgcctgccgacggcaagctgagcggctccaaggccaagacctggatggtggggaccaagctccccaactcagtgctggggcgcatctggaagctcagcgatgtggaccgcgacggcatgctggatgatgaggagttcgcgctggccagccacctcatcgaggccaagctggaaggccacgggctgcccgccaacctgccccgtcgcctggtgccaccctccaagcgacgccacaagggctccgccgagggaccccatggaaaagatggggaagagcaaaatacatggagacgacgcaccctccaggatgctcgctgggattcccacgcccaccactgtcccccaccccatggctgggaggggcctctgaacggaacagtgtccccacagagcgaataaagccaaggcttcttcccaaaaaaaaaaa

SEQ ID NO: 322405 - DNA, 212 bp, Homo sapiens
tcgagtttaatcaacatgcatcctaattaaggggaaatacagctttttgcagtatggtgggttggttttggtgtaacatcttcaacatgtcacactggctatcaaagaataagaaaattattgagtatgagtgtgttttataaactttctgagtttttcagatgtcttaatattttttaatagaacttaataaaatgtctagattgactatt

SEQ ID NO: 322406 - DNA, 423 bp, Homo sapiens
  misc_feature (421)..(421): n is a, c, g, or t
acaaagacttgggaatcactcactccgaggatgaagaatgggttaaatggctgaggagacagtcaaaggaatagagaggcctggctttgagggcctcttcaccaccagaacccaaaacgtttaccatacaaagaaaaaaacacatcatagaagaagctggagaaagttatgtaaagtgaaataagtcaagcacagaaaaacaaatacctcatgatctcactcatatgtggaatctaaaatgattgaactcatagaaacagagaacaaaatagtggttaccaggggctggggagtgatggaataaggagatgacagtcaaagactacaaagttgcagatagagaggaggattaatgataagcatttatgatgatgggtatgttaattggcttgattcaacccttccaccttgtacagatatnat

SEQ ID NO: 322407 - DNA, 5135 bp, Homo sapiens
cccgtctctactaaaaatacaaaaagtagccgggtgtggtggtgcactcctgtaatctcagctactcaggaagctcaggcaggggaattgcttgaacccaggaggcagaggttgcagtgagctgagatcacgccactgcactccagcctgggtgatggagtgagactttgtctcaaaaaaaatatatatatataaactctttgaaaattacaaaagtagtctgaaaataccatcaccttaaagatagttagttgtttcctaccaaatgtctaccaagtttgctattccttgtgctttaattttacattgttttttcaaaaggtttccttcaagcaggatggtacctttccactttcctccatcaaaatgtgcactttggaacccaacgccaactggagatttcatctacttacatctcagttactacagaaatccaaagcttgtggtgactgagaagaccatccgacttgcttatcgtcatgctaagcagaataaaaaaaattcgtcatgctttttacttggttctctgacagcagacgaagatgaagaaggtgtaacattgacagtagatcgctttgatcctggtcgagaagtacctgaatgcctagaaataacccctactgcttctcttcctggggactttttgattccatgcaaagttcatactcaagaactttgttcaagagaaatgatagttcacagtgtagatgacttcagttcagctttaaaggctctacagtgccatatatgtagcaaagattccttggactgtggtaagctgctttccctaagagttcatatcacttccagggagagtttggacagtgtggaatttgacttgcattgggcagcagtaactctagcaaataactttaaatgcacacctgtgaagcccatccccattattccaacagctctggcaagaaacttgagcagtaatctgaatatttctcaagttcaagggacttataaatatggatatcttaccatggatgaaacacgcaaattgttacttttgttggaatctgatcccaaggtttattctctaccattggtgggaatttggctgtctggaattacacatatctatagtcctcaggtatgggcttgctgtttgcgatacatattcaattcttctgttcaagaaagggttttttcagaatctggaaatttcatcatagttctctattctatgacacataaggaacctgagttttatgaatgcttcccttgtgatggcaagatacctgactttcggtttcagttgctaaccagtaaggaaacattacatcttttcaaaaatgttgaacctcctgacaaaaatccaatccgttgtgaactgagcgctgaaagccaaaatgcagaaacagagtttttcagtaaggcttccaagaatttttcaattaagaggtcttcccaaaagttatcttctgggaagatgccaatacatgatcacgactctggtgttgaagatgaagatttttctccaagaccaattcctagtcctcatccagtgagtcagaagatttctaagatccaaccatcagttcctgaactttcacttgtgttggatggcaatttcatagaatcaaaccctctgcctactccattggaaatggtgaataatgaaaatcctcctttgattaaccacttggaacacttgaagccattgcaaccccagctttatgatgagaaacacagtccagaagttgaagctggagagccttccttgagaggaataccaaatcagttaaaccaggataaaccagctcttttgagacactgcaaagtaagacagccacctgcctataagaaagggaacccccataccaggaacagtattaaaccatcttctcataatgggccatctcatgatatatttgaaaagctccaaacagtttctgctggaaatgtacaaaacgaagagtatcctataagaccctccacacttaattctaggcagtcttctcttgccccgcagtcccaaccacacgattttgttttttcaccccataattcaggaagaccaatggaacttcagatacctactcccccactgccatcttactgttccacaaacgtttgcaggtgttgtcagcatcatagtcatattcaatatagtccgctaaattcttggcaaggagcaaacacagttggatccattcaagatgtccagtctgaagcccttcaaaagcattcattatttcacccaagtggatgtccagccctgtactgtaatgcattctgttcttcaagtagtcctatagccttgagacctcagggagatatgggcagttgttctccccacagcaatattgaaccatcgcctgtggcaagaccgccttcacatatggacttatgtaacccacagccttgcacagtgtgcatgcacacacccaagactgagtcagataatggaatgatgggactatctccagatgcatatcggttcctcacagaacaagacagacagctaagactacttcaggcacagattcagcgtttgttggaagcacagtctctgatgccctgttcccctaagacaactgctgttgaagacacagtgcaagctggaagacaaatggagttggtttctgtggaagcacagtcttcccctggcttgcacatgagaaaaggtgtaagcattgctgtgagcacaggtgctagcttgttttggaatgcagcaggtgaggatcaagagcctgactctcaaatgaagcaagatgataccaaaatttccagtgaggacatgaatttttctgtcgatattaataatgaagtcacaagtcttccaggtagtgcatcttcattaaaagcagttgatattcccagttttgaagagagcaacattgctgtggaagaagaatttaaccagccactttctgtatccaactcttctctagttgtgagaaaagaacctgatgtacctgtgttctttccaagtggccagctggcagaaagtgtaagcatgtgtttacagactggaccaacagggggtgccagtaacaattctgaaacatcagaggaaccaaaaattgagcatgtaatgcaacccttgcttcatcaaccatcagataaccagaaaatttaccaggatttattgggtcaagtaaaccacctattaaatagttcctccaaggaaactgagcagccgtctaccaaagcagtaattatcagtcatgaatgcaccagaacccaaaacgtttaccatacaaagaaaaaaacacatcattcaagactggtggacaaagattgtgtccttaatgcaactcttaagcaactaagaagccttggagtaaaaattgattctcccactaaagtgaagaaaaatgcacataacgtggatcacgccagtgtgttggcatgcatcagcccagaagcagtgatctctggattaaactgcatgtcatttgctaatgttggcatgagcggcttaagccccaatggtgtggatttgagcatggaggcaaatgctatagctctgaaatatttaaatgaaaatcagctgtcacaactgtctgtcactcgatcgaaccaaaataattgtgacccattcagccttctccatattaatacagacagaagcacagtggggcttagtttaatttcaccaaacaacatgtcatttgcaaccaaaaaatatatgaagagatatggactcctacaaagcagtgacaatagtgaagatgaagaggaacctcccgacaatgcagatagcaagagtgaatatttattgaatcagaaccttaggtccatacccgaacagcttggtggtcagaaagagccttctaagaatgaccatgaaataattaattgttctaactgtgaatctgtggggaccaacgcagatacgccagtattgagaaatattacaaatgaagttttgcagacaaaagcaaaacagcagttgactgaaaagccagctttcttagtaaagaaccttaaaccaagtcctgcagtgaaccttcgaaccgggaaagcagagttcactcaacatcctgagaaagaaaatgaaggggacattacaatttttcctgaaagtttgcaaccttctgaaacgctaaagcagatgaatagcatgaattcagtaggcaccttcttagatgtaaaacgtctcagacagttaccaaaattattttaaccttttaactccctgcccttttaatacagggacagggtgtctcctgaagatacttagggaaaacaggagcctaccacaaggctcctgatcattctggagtcactgtttcttggtagcagccaattgggaagagtgacttctgtgagatggctggctggtgataggactaagttctcattgttcaaatagagctgttcaacatcactgaaacctttaagaaaagccctgagatcagttattcctacaagtttaagtagtagacagatactatccagctctaagtctcaactgctcttttatactgtacttttttttttgagacggagttttgctcttgtagcccaggctggagtgcaatggcaggatctcagatcactgcaacctctgcctcctgggttcaagcgattttcctgcttcatcttcccaggtagctgggattacaggcatgtgccacaacgcctggctaattttgtatttttagtagagactggtttctccatgttggtcaggctggtctcaaactcccgacctcaggtgatccgcccgcctcggcctcctaaagtgctgggattacaggcgtgagccactgcgcccagctatactgtatattttaagaagttccagcatgttgcatctctgcatttatcctatatcattaaaagaacataagttatcatggtgttgggtaaattagcgaaatcaacccttcctaagtttaagggaaaagttatttttaaaaacaacttaataaaaacttacactcttttatacaagagtgtatttccccttaattaggatgcatgttgattaaactcgagatacagctttttgcagtatggtgggttggttttggtgtaacatcttcaacatgtcacactggctatcaaagaataagaaaattattgagtatgagtgtgttttataaactttctgagtttttcagatgtcttaatattttttaatagaacttaataaaatgtctagattgactatt

SEQ ID NO: 322408 - DNA, 4553 bp, Homo sapiens
cccgtctctactaaaaatacaaaaagtagccgggtgtggtggtgcactcctgtaatctcagctactcaggaagctcaggcaggggaattgcttgaacccaggaggcagaggttgcagtgagctgagatcacgccactgcactccagcctgggtgatggagtgagactttgtctcaaaaaaaatatatatatataaactctttgaaaattacaaaagtagtctgaaaataccatcaccttaaagatagttagttgtttcctaccaaatgtctaccaagtttgctattccttgtgctttaattttacattgttttttcaaaaggtttccttcaagcaggatggtacctttccactttcctccatcaaaatgtgcactttggaacccaacgccaactggagatttcatctacttacatctcagttactacagaaatccaaagcttgtggtgactgagaagaccatccgacttgcttatcgtcatgctaagcagaataaaaaaaattcgtcatgctttttacttggttctctgacagcagacgaagatgaagaaggtgtaacattgacagtagatcgctttgatcctggtcgagaagtacctgaatgcctagaaataacccctactgcttctcttcctggggactttttgattccatgcaaagttcatactcaagaactttgttcaagagaaatgatagttcacagtgtagatgacttcagttcagctttaaaggctctacagtgccatatatgtagcaaagattccttggactgtggtaagctgctttccctaagagttcatatcacttccagggagagtttggacagtgtggaatttgacttgcattgggcagcagtaactctagcaaataactttaaatgcacacctgtgaagcccatccccattattccaacagctctggcaagaaacttgagcagtaatctgaatatttctcaagttcaagggacttataaatatggatatcttaccatggatgaaacacgcaaattgttacttttgttggaatctgatcccaaggtttattctctaccattggtgggaatttggctgtctggaattacacatatctatagtcctcaggtatgggcttgctgtttgcgatacatattcaattcttctgttcaagaaagggttttttcagaatctggaaatttcatcatagttctctattctatgacacataaggaacctgagttttatgaatgcttcccttgtgatggcaagatacctgactttcggtttcagttgctaaccagtaaggaaacattacatcttttcaaaaatgttgaacctcctgacaaaaatccaatccgttgtgaactgagcgctgaaagccaaaatgcagaaacagagtttttcagtaaggcttccaagaatttttcaattaagaggtcttcccaaaagttatcttctgggaagatgccaatacatgatcacgactctggtgttgaagatgaagatttttctccaagaccaattcctagtcctcatccagtgagtcagaagatttctaagatccaaccatcagttcctgaactttcacttgtgttggatggcaatttcatagaatcaaaccctctgcctactccattggaaatggtgaataatgaaaatcctcctttgattaaccacttggaacacttgaagccattgcaaccccagctttatgatgagaaacacagtccagaagttgaagctggagagccttccttgagaggaataccaaatcagttaaaccaggataaaccagctcttttgagacactgcaaaccttgcacagtgtgcatgcacacacccaagactgagtcagataatggaatgatgggactatctccagatgcatatcggttcctcacagaacaagacagacagctaagactacttcaggcacagattcagcgtttgttggaagcacagtctctgatgccctgttcccctaagacaactgctgttgaagacacagtgcaagctggaagacaaatggagttggtttctgtggaagcacagtcttcccctggcttgcacatgagaaaaggtgtaagcattgctgtgagcacaggtgctagcttgttttggaatgcagcaggtgaggatcaagagcctgactctcaaatgaagcaagatgataccaaaatttccagtgaggacatgaatttttctgtcgatattaataatgaagtcacaagtcttccaggtagtgcatcttcattaaaagcagttgatattcccagttttgaagagagcaacattgctgtggaagaagaatttaaccagccactttctgtatccaactcttctctagttgtgagaaaagaacctgatgtacctgtgttctttccaagtggccagctggcagaaagtgtaagcatgtgtttacagactggaccaacagggggtgccagtaacaattctgaaacatcagaggaaccaaaaattgagcatgtaatgcaacccttgcttcatcaaccatcagataaccagaaaatttaccaggatttattgggtcaagtaaaccacctattaaatagttcctccaaggaaactgagcagccgtctaccaaagcagtaattatcagtcatgaatgcaccagaacccaaaacgtttaccatacaaagaaaaaaacacatcattcaagactggtggacaaagattgtgtccttaatgcaactcttaagcaactaagaagccttggagtaaaaattgattctcccactaaagtgaagaaaaatgcacataacgtggatcacgccagtgtgttggcatgcatcagcccagaagcagtgatctctggattaaactgcatgtcatttgctaatgttggcatgagcggcttaagccccaatggtgtggatttgagcatggaggcaaatgctatagctctgaaatatttaaatgaaaatcagctgtcacaactgtctgtcactcgatcgaaccaaaataattgtgacccattcagccttctccatattaatacagacagaagcacagtggggcttagtttaatttcaccaaacaacatgtcatttgcaaccaaaaaatatatgaagagatatggactcctacaaagcagtgacaatagtgaagatgaagaggaacctcccgacaatgcagatagcaagagtgaatatttattgaatcagaaccttaggtccatacccgaacagcttggtggtcagaaagagccttctaagaatgaccatgaaataattaattgttctaactgtgaatctgtggggaccaacgcagatacgccagtattgagaaatattacaaatgaagttttgcagacaaaagcaaaacagcagttgactgaaaagccagctttcttagtaaagaaccttaaaccaagtcctgcagtgaaccttcgaaccgggaaagcagagttcactcaacatcctgagaaagaaaatgaaggggacattacaatttttcctgaaagtttgcaaccttctgaaacgctaaagcagatgaatagcatgaattcagtaggcaccttcttagatgtaaaacgtctcagacagttaccaaaattattttaaccttttaactccctgcccttttaatacagggacagggtgtctcctgaagatacttagggaaaacaggagcctaccacaaggctcctgatcattctggagtcactgtttcttggtagcagccaattgggaagagtgacttctgtgagatggctggctggtgataggactaagttctcattgttcaaatagagctgttcaacatcactgaaacctttaagaaaagccctgagatcagttattcctacaagtttaagtagtagacagatactatccagctctaagtctcaactgctcttttatactgtacttttttttttgagacggagttttgctcttgtagcccaggctggagtgcaatggcaggatctcagatcactgcaacctctgcctcctgggttcaagcgattttcctgcttcatcttcccaggtagctgggattacaggcatgtgccacaacgcctggctaattttgtatttttagtagagactggtttctccatgttggtcaggctggtctcaaactcccgacctcaggtgatccgcccgcctcggcctcctaaagtgctgggattacaggcgtgagccactgcgcccagctatactgtatattttaagaagttccagcatgttgcatctctgcatttatcctatatcattaaaagaacataagttatcatggtgttgggtaaattagcgaaatcaacccttcctaagtttaagggaaaagttatttttaaaaacaacttaataaaaacttacactcttttatacaagagtgtatttccccttaattaggatgcatgttgattaaactcgagatacagctttttgcagtatggtgggttggttttggtgtaacatcttcaacatgtcacactggctatcaaagaataagaaaattattgagtatgagtgtgttttataaactttctgagtttttcagatgtcttaatattttttaatagaacttaataaaatgtctagattgactatt

SEQ ID NO: 322409 - DNA, 5084 bp, Homo sapiens
cccgtctctactaaaaatacaaaaagtagccgggtgtggtggtgcactcctgtaatctcagctactcaggaagctcaggcaggggaattgcttgaacccaggaggcagaggttgcagtgagctgagatcacgccactgcactccagcctgggtgatggagtgagactttgtctcaaaaaaaatatatatatataaactctttgaaaattacaaaagtagtctgaaaataccatcaccttaaagatagttagttgtttcctaccaaatgtctaccaagtttgctattccttgtgctttaattttacattgttttttcaaaaggtttccttcaagcaggatggtacctttccactttcctccatcaaaatgtgcactttggaacccaacgccaactggagatttcatctacttacatctcagttactacagaaatccaaagcttgtggtgactgagaagaccatccgacttgcttatcgtcatgctaagcagaataaaaaaaattcgtcatgctttttacttggttctctgacagcagacgaagatgaagaaggtgtaacattgacagtagatcgctttgatcctggtcgagaagtacctgaatgcctagaaataacccctactgcttctcttcctggggactttttgattccatgcaaagttcatactcaagaactttgttcaagagaaatgatagttcacagtgtagatgacttcagttcagctttaaaggctctacagtgccatatatgtagcaaagattccttggactgtggtaagctgctttccctaagagttcatatcacttccagggagagtttggacagtgtggaatttgacttgcattgggcagcagtaactctagcaaataactttaaatgcacacctgtgaagcccatccccattattccaacagctctggcaagaaacttgagcagtaatctgaatatttctcaagttcaagggacttataaatatggatatcttaccatggatgaaacacgcaaattgttacttttgttggaatctgatcccaaggtttattctctaccattggtgggaatttggctgtctggaattacacatatctatagtcctcaggtatgggcttgctgtttgcgatacatattcaattcttctgttcaagaaagggttttttcagaatctggaaatttcatcatagttctctattctatgacacataaggaacctgagttttatgaatgcttcccttgtgatggcaagatacctgactttcggtttcagttgctaaccagtaaggaaacattacatcttttcaaaaatgttgaacctcctgacaaaaatccaatccgttgtgaactgagcgctgaaagccaaaatgcagaaacagagtttttcagtaaggcttccaagaatttttcaattaagaggtcttcccaaaagttatcttctgggaagatgccaatacatgatcacgactctggtgttgaagatgaagatttttctccaagaccaattcctagtcctcatccagtgagtcagaagatttctaagatccaaccatcagttcctgaactttcacttgtgttggatggcaatttcatagaatcaaaccctctgcctactccattggaaatggtgaataatgaaaatcctcctttgattaaccacttggaacacttgaagccattgcaaccccagctttatgatgagaaacacagtccagaagttgaagctggagagccttccttgagaggaataccaaatcagttaaaccaggataaaccagctcttttgagacactgcaaagtaagacagccacctgcctataagaaagggaacccccataccaggaacagtattaaaccatcttctcataatgggccatctcatgatatatttgaaaagctccaaacagtttctgctggaaatgtacaaaacgaagagtatcctataagaccctccacacttaattctaggcagtcttctcttgccccgcagtcccaaccacacgattttgttttttcaccccataattcaggaagaccaatggaacttcagatacctactcccccactgccatcttactgttccacaaacgtttgcaggtgttgtcagcatcatagtcatattcaatatagtccgctaaattcttggcaaggagcaaacacagttggatccattcaagatgtccagtctgaagcccttcaaaagcattcattatttcacccaagtggatgtccagccctgtactgtaatgcattctgttcttcaagtagtcctatagccttgagacctcagggagatatgggcagttgttctccccacagcaatattgaaccatcgcctgtggcaagaccgccttcacatatggacttatgtaacccacagccttgcacagtgtgcatgcacacacccaagactgagtcagataatggaatgatgggactatctccagatgcatatcggttcctcacagaacaagacagacagctaagactacttcaggcacagattcagcgtttgttggaagcacagtctctgatgccctgttcccctaagacaactgctgttgaagacacagtgcaagctggaagacaaatggagttggtttctgtggaagcacagtcttcccctggcttgcacatgagaaaaggtgtaagcattgctgtgagcacaggtgctagcttgttttggaatgcagcaggtgaggatcaagagcctgactctcaaatgaagcaagatgataccaaaatttccagtgaggacatgaatttttctgtcgatattaataatgaagtcacaagtcttccaggtagtgcatcttcattaaaagcagttgatattcccagttttgaagagagcaacattgctgtggaagaagaatttaaccagccactttctgtatccaatggccagctggcagaaagtgtaagcatgtgtttacagactggaccaacagggggtgccagtaacaattctgaaacatcagaggaaccaaaaattgagcatgtaatgcaacccttgcttcatcaaccatcagataaccagaaaatttaccaggatttattgggtcaagtaaaccacctattaaatagttcctccaaggaaactgagcagccgtctaccaaagcagtaattatcagtcatgaatgcaccagaacccaaaacgtttaccatacaaagaaaaaaacacatcattcaagactggtggacaaagattgtgtccttaatgcaactcttaagcaactaagaagccttggagtaaaaattgattctcccactaaagtgaagaaaaatgcacataacgtggatcacgccagtgtgttggcatgcatcagcccagaagcagtgatctctggattaaactgcatgtcatttgctaatgttggcatgagcggcttaagccccaatggtgtggatttgagcatggaggcaaatgctatagctctgaaatatttaaatgaaaatcagctgtcacaactgtctgtcactcgatcgaaccaaaataattgtgacccattcagccttctccatattaatacagacagaagcacagtggggcttagtttaatttcaccaaacaacatgtcatttgcaaccaaaaaatatatgaagagatatggactcctacaaagcagtgacaatagtgaagatgaagaggaacctcccgacaatgcagatagcaagagtgaatatttattgaatcagaaccttaggtccatacccgaacagcttggtggtcagaaagagccttctaagaatgaccatgaaataattaattgttctaactgtgaatctgtggggaccaacgcagatacgccagtattgagaaatattacaaatgaagttttgcagacaaaagcaaaacagcagttgactgaaaagccagctttcttagtaaagaaccttaaaccaagtcctgcagtgaaccttcgaaccgggaaagcagagttcactcaacatcctgagaaagaaaatgaaggggacattacaatttttcctgaaagtttgcaaccttctgaaacgctaaagcagatgaatagcatgaattcagtaggcaccttcttagatgtaaaacgtctcagacagttaccaaaattattttaaccttttaactccctgcccttttaatacagggacagggtgtctcctgaagatacttagggaaaacaggagcctaccacaaggctcctgatcattctggagtcactgtttcttggtagcagccaattgggaagagtgacttctgtgagatggctggctggtgataggactaagttctcattgttcaaatagagctgttcaacatcactgaaacctttaagaaaagccctgagatcagttattcctacaagtttaagtagtagacagatactatccagctctaagtctcaactgctcttttatactgtacttttttttttgagacggagttttgctcttgtagcccaggctggagtgcaatggcaggatctcagatcactgcaacctctgcctcctgggttcaagcgattttcctgcttcatcttcccaggtagctgggattacaggcatgtgccacaacgcctggctaattttgtatttttagtagagactggtttctccatgttggtcaggctggtctcaaactcccgacctcaggtgatccgcccgcctcggcctcctaaagtgctgggattacaggcgtgagccactgcgcccagctatactgtatattttaagaagttccagcatgttgcatctctgcatttatcctatatcattaaaagaacataagttatcatggtgttgggtaaattagcgaaatcaacccttcctaagtttaagggaaaagttatttttaaaaacaacttaataaaaacttacactcttttatacaagagtgtatttccccttaattaggatgcatgttgattaaactcgagatacagctttttgcagtatggtgggttggttttggtgtaacatcttcaacatgtcacactggctatcaaagaataagaaaattattgagtatgagtgtgttttataaactttctgagtttttcagatgtcttaatattttttaatagaacttaataaaatgtctagattgactatt

SEQ ID NO: 322410 - DNA, 3078 bp, Homo sapiens
cccgtctctactaaaaatacaaaaagtagccgggtgtggtggtgcactcctgtaatctcagctactcaggaagctcaggcaggggaattgcttgaacccaggaggcagaggttgcagtgagctgagatcacgccactgcactccagcctgggtgatggagtgagactttgtctcaaaaaaaatatatatatataaactctttgaaaattacaaaagtagtctgaaaataccatcaccttaaagatagttagttgtttcctaccaaatgtctaccaagtttgctattccttgtgctttaattttacattgttttttcaaaaggtttccttcaagcaggatggtacctttccactttcctccatcaaaatgtgcactttggaacccaacgccaactggagatttcatctacttacatctcagttactacagaaatccaaagcttgtggtgactgagaagaccatccgacttgcttatcgtcatgctaagcagaataaaaaaaattcgtcatgctttttacttggttctctgacagcagacgaagatgaagaaggtgtaacattgacagtagatcgctttgatcctggtcgagaagtacctgaatgcctagaaataacccctactgcttctcttcctggggactttttgattccatgcaaagttcatactcaagaactttgttcaagagaaatgatagttcacagtgtagatgacttcagttcagctttaaaggctctacagtgccatatatgtagcaaagattccttggactgtggtaagctgctttccctaagagttcatatcacttccagggagagtttggacagtgtggaatttgacttgcattgggcagcagtaactctagcaaataactttaaatgcacacctgtgaagcccatccccattattccaacagctctggcaagaaacttgagcagtaatctgaatatttctcaagttcaagggacttataaatatggatatcttaccatggatgaaacacgcaaattgttacttttgttggaatctgatcccaaggtttattctctaccattggtgggaatttggctgtctggaattacacatatctatagtcctcaggtatgggcttgctgtttgcgatacatattcaattcttctgttcaagaaagggttttttcagaatctggaaatttcatcatagttctctattctatgacacataaggaacctgagttttatgaatgcttcccttgtgatggcaagatacctgactttcggtttcagttgctaaccagtaaggaaacattacatcttttcaaaaatgttgaacctcctgacaaaaatccaatccgttgtgaactgagcgctgaaagccaaaatgcagaaacagagtttttcagtaaggcttccaagaatttttcaattaagaggtcttcccaaaagttatcttctgggaagatgccaatacatgatcacgactctggtgttgaagatgaagatttttctccaagaccaattcctagtcctcatccagtgagtcagaagatttctaagatccaaccatcagttcctgaactttcacttgtgttggatggcaatttcatagaatcaaaccctctgcctactccattggaaatggtgaataatgaaaatcctcctttgattaaccacttggaacacttgaagccattgcaaccccagctttatgatgagaaacacagtccagaagttgaagctggagagccttccttgagaggaataccaaatcagttaaaccaggataaaccagctcttttgagacactgcaaagtaagacagccacctgcctataagaaagggaacccccataccaggaacagtattaaaccatcttctcataatgggccatctcatgatatatttgaaaagctccaaacagtttctgctggaaatgtacaaaacgaagagtatcctataagaccctccacacttaattctaggcagtcttctcttgccccgcagtcccaaccacacgattttgttttttcaccccataattcaggaagaccaatggaacttcagatacctactcccccactgccatcttactgttccacaaacgtttgcaggtgttgtcagcatcatagtcatattcaatatagtccgctaaattcttggcaaggagcaaacacagttggatccattcaagatgtccagtctgaagcccttcaaaagcattcattatttcacccaagtggatgtccagccctgtactgtaatgcattctgttcttcaagtagtcctatagccttgagacctcagggagatatgggcagttgttctccccacagcaatattgaaccatcgcctgtggcaagaccgccttcacatatggacttatgtaacccacagccttgcacagtgtgcatgcacacacccaagactgagtcagataatggaatgatgggactatctccagatgcatatcggttcctcacagaacaagacagacagctaagactacttcaggcacagattcagcgtttgttggaagcacagtctctgatgccctgttcccctaagacaactgctgttgaagacacagtgcaagctggaagacaaatggagttggtttctgtggaagcacagtcttcccctggcttgcacatgagaaaaggtgtaagcattgctgtgagcacaggcgtgagccactgcgcccagctatactgtatattttaagaagttccagcatgttgcatctctgcatttatcctatatcattaaaagaacataagttatcatggtgttgggtaaattagcgaaatcaacccttcctaagtttaagggaaaagttatttttaaaaacaacttaataaaaacttacactcttttatacaagagtgtatttccccttaattaggatgcatgttgattaaactcgagatacagctttttgcagtatggtgggttggttttggtgtaacatcttcaacatgtcacactggctatcaaagaataagaaaattattgagtatgagtgtgttttataaactttctgagtttttcagatgtcttaatattttttaatagaacttaataaaatgtctagattgactatt

SEQ ID NO: 322411 - DNA, 442 bp, Homo sapiens
accctgcaaacagacctcagctccgcggaagttgcggtaagtggagctttgtgctcctggtttccccttgagaggcggcagcggggccctgggaaggttggtgggtaacattcaaagccctgtagtgggttccgccctccaggagcctggagcagatgacgagaaggggagctagtgggagaaattaagcagtccatgaaatccttgggtatcatctgagctaaggtatgtgaaagaggtttgcagtcgataacgtgccatttaaagttgtttttacggtgggaatttcttgaggactgaaaccttgaatgctcgctcttgcattcctcacaatttctggctcacactctgctacgtagtaagggatcagttaatgtttgaagttcatggactactggaagtaaagtgtaaacagcaaagtgcgagaatgctatgcgtgtga

SEQ ID NO: 322412 - DNA, 249 bp, Homo sapiens
aagcgtgagccaccgcccctgacatgagccattgacttttaaagcaggagaataatttggatcagatttatatggaaacactcttctagcagcattatggggacttttccataagtctggtgagttgatgaagttagcaactaaggtggtgggtatggaaagataatttatatggaagaaggggtgaggatgatttgaacgtttctattgtacacgataatgactttacctgagaatatgttttgctag

SEQ ID NO: 322413 - DNA, 5221 bp, Homo sapiens
ttcccgcgaccccaacgtcccagaggcggggccggagtcggcggtggcgctccttggagccggctcccgctcctaccctgcaaacagacctcagctccgcggaagttgcgagacggggtttcaccatgttggtcgggctggtctggaaatcctgacttcaggtgatccacccgcctcggcctcccaaaatgctgggattacaagcgtgagccaccgcccctgacatgagccattgacttttaaagcaggagaataatttggatcagatttatatggaaacactcttctagcagcattatggggacttttccataagtctggatactgaggatttggaattaaagaaatcattcaccagacatcatggagcctatatatccttttgcacggccccagatgaataccaggtttccttcaagcaggatggtacctttccactttcctccatcaaaatgtgcactttggaacccaacgccaactggagatttcatctacttacatctcagttactacagaaatccaaagcttgtggtgactgagaagaccatccgacttgcttatcgtcatgctaagcagaataaaaaaaattcgtcatgctttttacttggttctctgacagcagacgaagatgaagaaggtgtaacattgacagtagatcgctttgatcctggtcgagaagtacctgaatgcctagaaataacccctactgcttctcttcctggggactttttgattccatgcaaagttcatactcaagaactttgttcaagagaaatgatagttcacagtgtagatgacttcagttcagctttaaaggctctacagtgccatatatgtagcaaagattccttggactgtggtaagctgctttccctaagagttcatatcacttccagggagagtttggacagtgtggaatttgacttgcattgggcagcagtaactctagcaaataactttaaatgcacacctgtgaagcccatccccattattccaacagctctggcaagaaacttgagcagtaatctgaatatttctcaagttcaagggacttataaatatggatatcttaccatggatgaaacacgcaaattgttacttttgttggaatctgatcccaaggtttattctctaccattggtgggaatttggctgtctggaattacacatatctatagtcctcaggtatgggcttgctgtttgcgatacatattcaattcttctgttcaagaaagggttttttcagaatctggaaatttcatcatagttctctattctatgacacataaggaacctgagttttatgaatgcttcccttgtgatggcaagatacctgactttcggtttcagttgctaaccagtaaggaaacattacatcttttcaaaaatgttgaacctcctgacaaaaatccaatccgttgtgaactgagcgctgaaagccaaaatgcagaaacagagtttttcagtaaggcttccaagaatttttcaattaagaggtcttcccaaaagttatcttctgggaagatgccaatacatgatcacgactctggtgttgaagatgaagatttttctccaagaccaattcctagtcctcatccagtgagtcagaagatttctaagatccaaccatcagttcctgaactttcacttgtgttggatggcaatttcatagaatcaaaccctctgcctactccattggaaatggtgaataatgaaaatcctcctttgattaaccacttggaacacttgaagccattgcaaccccagctttatgatgagaaacacagtccagaagttgaagctggagagccttccttgagaggaataccaaatcagttaaaccaggataaaccagctcttttgagacactgcaaagtaagacagccacctgcctataagaaagggaacccccataccaggaacagtattaaaccatcttctcataatgggccatctcatgatatatttgaaaagctccaaacagtttctgctggaaatgtacaaaacgaagagtatcctataagaccctccacacttaattctaggcagtcttctcttgccccgcagtcccaaccacacgattttgttttttcaccccataattcaggaagaccaatggaacttcagatacctactcccccactgccatcttactgttccacaaacgtttgcaggtgttgtcagcatcatagtcatattcaatatagtccgctaaattcttggcaaggagcaaacacagttggatccattcaagatgtccagtctgaagcccttcaaaagcattcattatttcacccaagtggatgtccagccctgtactgtaatgcattctgttcttcaagtagtcctatagccttgagacctcagggagatatgggcagttgttctccccacagcaatattgaaccatcgcctgtggcaagaccgccttcacatatggacttatgtaacccacagccttgcacagtgtgcatgcacacacccaagactgagtcagataatggaatgatgggactatctccagatgcatatcggttcctcacagaacaagacagacagctaagactacttcaggcacagattcagcgtttgttggaagcacagtctctgatgccctgttcccctaagacaactgctgttgaagacacagtgcaagctggaagacaaatggagttggtttctgtggaagcacagtcttcccctggcttgcacatgagaaaaggtgtaagcattgctgtgagcacaggtgctagcttgttttggaatgcagcaggtgaggatcaagagcctgactctcaaatgaagcaagatgataccaaaatttccagtgaggacatgaatttttctgtcgatattaataatgaagtcacaagtcttccaggtagtgcatcttcattaaaagcagttgatattcccagttttgaagagagcaacattgctgtggaagaagaatttaaccagccactttctgtatccaactcttctctagttgtgagaaaagaacctgatgtacctgtgttctttccaagtggccagctggcagaaagtgtaagcatgtgtttacagactggaccaacagggggtgccagtaacaattctgaaacatcagaggaaccaaaaattgagcatgtaatgcaacccttgcttcatcaaccatcagataaccagaaaatttaccaggatttattgggtcaagtaaaccacctattaaatagttcctccaaggaaactgagcagccgtctaccaaagcagtaattatcagtcatgaatgcaccagaacccaaaacgtttaccatacaaagaaaaaaacacatcattcaagactggtggacaaagattgtgtccttaatgcaactcttaagcaactaagaagccttggagtaaaaattgattctcccactaaagtgaagaaaaatgcacataacgtggatcacgccagtgtgttggcatgcatcagcccagaagcagtgatctctggattaaactgcatgtcatttgctaatgttggcatgagcggcttaagccccaatggtgtggatttgagcatggaggcaaatgctatagctctgaaatatttaaatgaaaatcagctgtcacaactgtctgtcactcgatcgaaccaaaataattgtgacccattcagccttctccatattaatacagacagaagcacagtggggcttagtttaatttcaccaaacaacatgtcatttgcaaccaaaaaatatatgaagagatatggactcctacaaagcagtgacaatagtgaagatgaagaggaacctcccgacaatgcagatagcaagagtgaatatttattgaatcagaaccttaggtccatacccgaacagcttggtggtcagaaagagccttctaagaatgaccatgaaataattaattgttctaactgtgaatctgtggggaccaacgcagatacgccagtattgagaaatattacaaatgaagttttgcagacaaaagcaaaacagcagttgactgaaaagccagctttcttagtaaagaaccttaaaccaagtcctgcagtgaaccttcgaaccgggaaagcagagttcactcaacatcctgagaaagaaaatgaaggggacattacaatttttcctgaaagtttgcaaccttctgaaacgctaaagcagatgaatagcatgaattcagtaggcaccttcttagatgtaaaacgtctcagacagttaccaaaattattttaaccttttaactccctgcccttttaatacagggacagggtgtctcctgaagatacttagggaaaacaggagcctaccacaaggctcctgatcattctggagtcactgtttcttggtagcagccaattgggaagagtgacttctgtgagatggctggctggtgataggactaagttctcattgttcaaatagagctgttcaacatcactgaaacctttaagaaaagccctgagatcagttattcctacaagtttaagtagtagacagatactatccagctctaagtctcaactgctcttttatactgtacttttttttttgagacggagttttgctcttgtagcccaggctggagtgcaatggcaggatctcagatcactgcaacctctgcctcctgggttcaagcgattttcctgcttcatcttcccaggtagctgggattacaggcatgtgccacaacgcctggctaattttgtatttttagtagagactggtttctccatgttggtcaggctggtctcaaactcccgacctcaggtgatccgcccgcctcggcctcctaaagtgctgggattacaggcgtgagccactgcgcccagctatactgtatattttaagaagttccagcatgttgcatctctgcatttatcctatatcattaaaagaacataagttatcatggtgttgggtaaattagcgaaatcaacccttcctaagtttaagggaaaagttatttttaaaaacaacttaataaaaacttacactcttttatacaagagtgtatttccccttaattaggatgcatgttgattaaactcgagatacagctttttgcagtatggtgggttggttttggtgtaacatcttcaacatgtcacactggctatcaaagaataagaaaattattgagtatgagtgtgttttataaactttctgagtttttcagatgtcttaatattttttaatagaacttaataaaatgtctagattgactatt

SEQ ID NO: 322414 - DNA, 1106 bp, Homo sapiens
cccgtctctactaaaaatacaaaaagtagccgggtgtggtggtgcactcctgtaatctcagctactcaggaagctcaggcaggggaattgcttgaacccaggaggcagaggttgcagtgagctgagatcacgccactgcactccagcctgggtgatggagtgagactttgtctcaaaaaaaatatatatatataaactctttgaaaattacaaaagtagtctgaaaataccatcaccttaaagatagttagttgtttcctaccaaatgtctaccaagtttgctattccttgtgctttaattttacattgttttttcaaaaggtttccttcaagcaggatggtacctttccactttcctccatcaaaatgtgcactttggaacccaacgccaactggagatttcatctacttacatctcagttactacagaaatccaaagcttgtggtgactgagaagaccatccgacttgcttatcgtcatgctaagcagaataaaaaaaattcgtcatgctttttacttggttctctgacagcagacgaagatgaagaaggtgtaacattgacagtagatcgctttgatcctggtcgagaagtacctgaatgcctagaaataacccctactgcttctcttcctggggactttttgattccatgcaaagttcatactcaagaactttgttcaagagaaatgatagttcacagtgtagatgacttcagttcagctttaaaggctctacagtgccatatatgtagcaaagattccttggactgtggtaagctgctttccctaagagttcatatcacttccagggagagtttggacagtgtggaatttgacttgcattgggcagcagtaactctagcaaataactttaaatgcacacctgtgaagcccatccccattattccaacagctctggcaagaaacttgagcagtaatctgaatatttctcaagttcaagggacttataaatatgggtaagtaaaagatacattaatctaaatgttagttgcattagtatattttcagaatgtccatgtaatgtgaaagaattgtccagtcaatttatatgccagagatatggtggcttggttaataaccaggg

SEQ ID NO: 322415 - DNA, 274 bp, Homo sapiens
accctgcagcccatagtagccttcatggtgcctatgcccgcagccagtcacccatggctcccaacattctcttcaccctttgcccttcgcccaggccacctgtactaatctccacacctgcctcagacctgcttttactgctgtctccactaccatcccccagcagggtgtgagactggtgcaaaggggacctacctcaggtggcctggccagcgtagctacaaagcacctagagcacctgaggctgctgcacatctacctccctagtccggaa

SEQ ID NO: 322416 - DNA, 1342 bp, Homo sapiens
  misc_feature (7)..(7): n is a, c, g, or t
  misc_feature (151)..(151): n is a, c, g, or t
  misc_feature (176)..(176): n is a, c, g, or t
  misc_feature (185)..(185): n is a, c, g, or t
  misc_feature (192)..(192): n is a, c, g, or t
  misc_feature (215)..(215): n is a, c, g, or t
  misc_feature (234)..(234): n is a, c, g, or t
  misc_feature (282)..(283): n is a, c, g, or t
  misc_feature (291)..(291): n is a, c, g, or t
  misc_feature (298)..(301): n is a, c, g, or t
  misc_feature (361)..(362): n is a, c, g, or t
  misc_feature (364)..(365): n is a, c, g, or t
gtgattncaaccattttgaccttgcaggggatcccctgaatgatgtcctaaatgttggaacatgtacctttgttcccctgatgcattgatgaaaatgattgtcctctatgagattgtgattatgctttgttgtccatggtccgcaaccttnctttgggtccttattgcctaccctncgcattgancgtgcanatgaagcatttgcttgcatgctnccattgagccttgagctancttgtgtgctgctccctttaaagagcctttgcctgctgcgattgtgcnngcatgcantttgtannnnagcatgcttggcatcacatcacattacagctgaaagctgcgatgcagtttactgcctttnngnnggcgcgaggtatcatttatcactgtgatcttaccaaagaggagctggagccaagagttttccgagaggtgaccgtaaaaggaattgatgcttctgattaccagacagtccagctccccaagggtactgagtcttccagaaactgaatcactggttgattgatgatgacgaagaatgtctctgttcctttgcaatgagaggtcaccaatagggcaccaggtgtttatcaaggcccctcccacctggagggctggaccacacaggccacagattaggaatcagaacattgtttgtgaaggaagatgagaataaagagcgctggatgttccccacaatgtttctgtgaaactagggcattattatagcttggtgaattacccttcaattgtctagaaatggtctagatgataggctacatctagatcatgaataaagctttgtttactaaaacaggtggtgggctggatttggtgtagagctatgatttatcagcccctgttctacatcagcagttggcaaactggcctcctgttttattggagaacacatgcccatttgtttacatattgcctgtggttgctttggcacttagagtggttgcaacagaaactctatgtcccagaaggcctgaaatatttaatatatggcctttaagaaaaagtttgcagaatcttcatctatgtaaatagcatttaaaagtacaacattcttgatagacatacagggccgagaagacatacagggtcaagaagctctgtcagacaggcctgaaatccacgtggggcaagtcatttaacctttctgccacagttttttcaactgtaaagtagagattgatagtatctgttttttaggattcctgtgggattattaagagataaggtatattcaagatctggcaatagaatataatgtatttttttcaatcaacgttagaaataaatgtaacagacttttagtttcctatttatttggctg

SEQ ID NO: 322417 - DNA, 2928 bp, Homo sapiens
cccggcctcgcagacagcggcttcctgctttctgcacgtcctcgccgccgcgccgccagtccgtttgtgctagctctggccgtgagccggccgcccgctgccgccggccgccccgcagctgcctgcgccccagccgcgcctcgcggccagcccggctagctcaggtccgctcccggagcccgcgcccctccacgctgccccctgcctgtccccggccatgctgtcccttcagtaccccgacgtgtaccgcgacgagaccgccgtacaggattatcatggtcataaaatttgtgacccttacgcctggcttgaagaccccgacagtgaacagactaaggcctttgtggaggcccagaataagattactgtgccatttcttgagcagtgtcccatcagaggtttatacaaagagagaatgactgaactatatgattatcccaagtatagttgccacttcaagaaaggaaaacggtatttttatttttacaatacaggtttgcagaaccagcgagtattatatgtacaggattccttagagggtgaggccagagtgttcctggaccccaacatactgtctgacgatggcacagtggcactccgaggttatgcgttcagcgaagatggtgaatattttgcctatggtctgagtgccagtggctcagactgggtgacaatcaagttcatgaaagttgatggtgccaaagagcttccagatgtgcttgaaagagtcaagttcagctgtatggcctggacccatgatgggaagggaatgttctacaactcataccctcaacaggatggaaaaagtgatggcacagagacatctaccaatctccaccaaaagctctactaccatgtcttgggaaccgatcagtcagaagatattttgtgtgctgagtttcctgatgaacctaaatggatgggtggagctgagttatctgatgatggccgctatgtcttgttatcaataagggaaggatgtgatccagtaaaccgactctggtactgtgacctacagcaggaatccagtggcatcgcgggaatcctgaagtgggtaaaactgattgacaactttgaaggggaatatgactacgtgaccaatgaggggacggtgttcacattcaagacgaatcgccagtctcccaactatcgcgtgatcaacattgacttcagggatcctgaagagtctaagtggaaagtacttgttcctgagcatgagaaagatgtcttagaatggatagcttgtgtcaggtccaacttcttggtcttatgctacctccatgacgtcaagaacattctgcagctccatgacctgactactggtgctctccttaagaccttcccgctcgatgtcggcagcattgtagggtacagcggtcagaagaaggacactgaaatcttctatcagtttacttcctttttatctccaggtatcatttatcactgtgatcttaccaaagaggagctggagccaagagttttccgagaggtgaccgtaaaaggaattgatgcttctgattaccagacagtccagattttctaccctagcaaggatggtacgaagattccaatgttcattgtgcataaaaaaggcataaaattggatggctctcatccagctttcttatatggctatggcggcttcaacatatccatcacacccaactacagtgtttccaggcttatttttgtgagacacatgggtggtatcctggcagtggccaacatcagaggaggtggcgaatatggagagacgtggcataaaggtggtatcttggccaacaaacaaaactgctttgatgactttcagtgtgctgctgagtatctgatcaaggaaggttacacatctcccaagaggctgactattaatggaggttcaaatggaggcctcttagtggctgcttgtgcaaatcagagacctgacctctttggttgtgttattgcccaagttggagtaatggacatgctgaagtttcataaatataccatcggccatgcttggaccactgattatgggtgctcggacagcaaacaacactttgaatggcttgtcaaatactctccattgcataatgtgaagttaccagaagcagatgacatccagtacccgtccatgctgctcctcactgctgaccatgatgaccgcgtggtcccgcttcactccctgaagttcattgccacccttcagtacatcgtgggccgcagcaggaagcaaagcaaccccctgcttatccacgtggacaccaaggcgggccacggggcggggaagcccacagccaaagtgatagaggaagtctcagacatgtttgcgttcatcgcgcggtgcctgaacgtcgactggattccataaacagttttcgtgcttcctcctgacagcgacagaaaacctcaagggctttcccacgttgacaccaagaaaccactgggcataatgcttccccacgggaacattattcctgcactcacaggctacagttgaacagaactgccgtgggaattttatcttttttaggcttctcctttttagcaaggccttggtgtttctttttccaccctgtctaggcacatgtggttttttggtgttttttttaagggcatgttgggataaatagctaaatggcaacaaacacattgtgaatattagattgctgaattaaggatcatagtcgggcatacttatctatatccataacctctatatctttaaataaatgtgagaactgttctcatggagaagacttctttgcaacaataataaatgttatttaagaatgacagggatttacttccggtttcttcatattgaggggcaactccagaagtggagttttctgtgagaataaagcatttcacctttctgcaacaagttagttttcaagcagttaagtcatagaatgtttgttagctgtgaaaataagttgttcatcc

SEQ ID NO: 322418 - DNA, 2826 bp, Homo sapiens
cccggcctcgcagacagcggcttcctgctttctgcacgtcctcgccgccgcgccgccagtccgtttgtgctagctctggccgtgagccggccgcccgctgccgccggccgccccgcagctgcctgcgccccagccgcgcctcgcggccagcccggctagctcaggtccgctcccggagcccgcgcccctccacgctgccccctgcctgtccccggccatgctgtcccttcagtaccccgacgtgtaccgcgacgagaccgccgtacaggattatcatggtcataaaatttgtgacccttacgcctggcttgaagaccccgacagtgaacagactaaggcctttgtggaggcccagaataagattactgtgccatttcttgagcagtgtcccatcagaggtttatacaaagagagaatgactgaactatatgattatcccaagtatagttgccacttcaagaaaggaaaacggtatttttatttttacaatacaggtttgcagaaccagcgagtattatatgtacaggattccttagagggtgaggccagagtgttcctggaccccaacatactgtctgacgatggcacagtggcactccgaggttatgcgttcagcgaagatggtgaatattttgcctatggtctgagtgccagtggctcagactgggtgacaatcaagttcatgaaagttgatggtgccaaagagcttccagatgtgcttgaaagagtcaagttcagctgtatggcctggacccatgatgggaagggaatgttctacaactcataccctcaacaggatggaaaaagtgatggcacagagacatctaccaatctccaccaaaagctctactaccatgtcttgggaaccgatcagtcagaagatattttgtgtgctgagtttcctgatgaacctaaatggatgggtggagctgagttatctgatgatggccgctatgtcttgttatcaataagggaaggatgtgatccagtaaaccgactctggtactgtgacctacagcaggaatccagtggcatcgcgggaatcctgaagtgggtaaaactgattgacaactttgaaggggaatatgactacgtgaccaatgaggggacggtgttcacattcaagacgaatcgccagtctcccaactatcgcgtgatcaacattgacttcagggatcctgaagagtctaagtggaaagtacttgttcctgagcatgagaaagatgtcttagaatggatagcttgtgtcaggtccaacttcttggtcttatgctacctccatgacgtcaagaacattctgcagctccatgacctgactactggtgctctccttaagaccttcccgctcgatgtcggcagcattgtagggtacagcggtcagaagaaggacactgaaatcttctatcagtttacttcctttttatctccaggtatcatttatcactgtgatcttaccaaagaggagctggagccaagagttttccgagaggtgaccgtaaaaggaattgatgcttctgattaccagacagtccagattttctaccctagcaaggatggtacgaagattccaatgttcattgtgcataaaaaaggcataaaattggatggctctcatccagctttcttatatggctatggcggcttcaacatatccatcacacccaactacagtgtttccaggcttatttttgtgagacacatgggtggtatcctggcagtggccaacatcagaggaggtggcgaatatggagagacgtggcataaaggtggtatcttggccaacaaacaaaactgctttgatgactttcagtgtgctgctgagtatctgatcaaggaaggttacacatctcccaagaggctgactattaatggaggttcaaatggaggcctcttagtggctgcttgtgcaaatcagagacctgacctctttggttgtgttattgcccaagttggagtaatggacatgctgaagtttcataaatataccatcggccatgcttggaccactgattatgggtgctcggacagcaaacaacactttgaatggcttgtcaaatactctccattgcataatgtgaagttaccagaagcagatgacatccagtacccgtccatgctgctcctcactgctgaccatgatgaccgcgtggtcccgcttcactccctgaagttcattgccacccttcagtacatcgtgggccgcagcaggaagcaaagcaaccccctgcttatccacgtggacaccaaggcgggccacggggcggggaagcccacagccaaagtgatagaggaagtctcagacatgtttgcgttcatcgcgcggtgcctgaacgtcgactggattccataaacagttttcgtgcttcctcctgacagcgacagaaaacctcaagggctttcccacgttgacaccaagaaaccactgggcataatgcttccccacgggaacattattcctgcactcacaggctacagttgaacagaactgccgtgggaattttatcttttttaggcttctcctttttagcaaggccttggtgtttctttttccaccctgtctaggcacatgtggttttttggtgttttttttaagggcatgttgggataaatagctaaatggcaacaaacacattgtgaatattagattgctgaattaaggatcatagtcgggcatacttatctatatccataacctctatatctttaaataaatgtgagaactgttctcatggagaagacttctttgcaacaataataaatgttatttaagaatgaaaaaaaaattcacataccattcctctcttcaatctcttaataaataaaaaa

SEQ ID NO: 322419 - DNA, 1659 bp, Homo sapiens
atctgtcccagtgtctctcaccctatttctgcctccctaataggtgatggtagacaattaataggattagcaggccatctagaaacacaactgtgatcattgtttagatttgctctgcctagagaaggcttggcagaaaagagttgggggtaatcttttcctgcttttcttaaacccccggggcaacattttagtttgccagcaaaactcaactgtttttggctttctgccatactgttttagaacaaaaggagaggagagacaataggagcttcgtgtgggctgtccacctgctacacagatttcttccctcccctcccctccacttgctttgcctggagttacactgatggtcgacgggtgatggattttctaccctagcaaggatggtacgaagattccaatgttcattgtgcataaaaaaggcataaaattggatggctctcatccagctttcttatatggctatggcggcttcaacatatccatcacacccaactacagtgtttccaggcttatttttgtgagacacatgggtggtatcctggcagtggccaacatcagaggaggtggcgaatatggagagacgtggcataaaggtggtatcttggccaacaaacaaaactgctttgatgactttcagtgtgctgctgagtatctgatcaaggaaggttacacatctcccaagaggctgactattaatggaggttcaaatggaggcctcttagtggctgcttgtgcaaatcagagacctgacctctttggttgtgttattgcccaagttggagtaatggacatgctgaagtttcataaatataccatcggccatgcttggaccactgattatgggtgctcggacagcaaacaacactttgaatggcttgtcaaatactctccattgcataatgtgaagttaccagaagcagatgacatccagtacccgtccatgctgctcctcactgctgaccatgatgaccgcgtggtcccgcttcactccctgaagttcattgccacccttcagtacatcgtgggccgcagcaggaagcaaagcaaccccctgcttatccacgtggacaccaaggcgggccacggggcggggaagcccacagccaaagtgatagaggaagtctcagacatgtttgcgttcatcgcgcggtgcctgaacgtcgactggattccataaacagttttcgtgcttcctcctgacagcgacagaaaacctcaagggctttcccacgttgacaccaagaaaccactgggcataatgcttccccacgggaacattattcctgcactcacaggctacagttgaacagaactgccgtgggaattttatcttttttaggcttctcctttttagcaaggccttggtgtttctttttccaccctgtctaggcacatgtggttttttggtgttttttttaagggcatgttgggataaatagctaaatggcaacaaacacattgtgaatattagattgctgaattaaggatcatagtcgggcatacttatctatatccataacctctatatctttaaataaatgtgagaactgttctcatggagaagacttctttgcaacaataataaatgttatttaagaatgaaaaaaaaattcacataccattcctctcttcaatctcttaataaataaaaaa

SEQ ID NO: 322420 - DNA, 653 bp, Homo sapiens
  misc_feature (482)..(482): n is a, c, g, or t
  misc_feature (486)..(486): n is a, c, g, or t
  misc_feature (490)..(490): n is a, c, g, or t
  misc_feature (560)..(560): n is a, c, g, or t
  misc_feature (605)..(605): n is a, c, g, or t
cccggcctcgcagacagcggcttcctgctttctgcacgtcctcgccgccgcgccgccagtccgtttgtgctagctctggccgtgagccggccgcccgctgccgccggccgccccgcagctgcctgcgccccagccgcgcctcgcggccagcccggctagctcaggtccgctcccggagcccgcgcccctccacgctgccccctgcctgtccccggccatgctgtcccttcagtaccccgacgtgtaccgcgacgagaccgccgtacaggattatcatggtcataaaatttgtgacccttacgcctggcttgaagaccccgacagtgaacagactaaggcctttgtggaggcccagaataagattactgtgccatttcttgagcagtgtcccatcagaggtttatacaaagagagaatgactgaactatatgattatcccaagtatagttgccacttcaagaaaggaaaacgggtgatttttntatntttntaacaaataacagggtgttggcaggaacacaggcggagtgatttataatggtaacaagggatttcctctnaggagggggtggaggggccaggaggtggtttccctggggacaccncaaacaataactggttctggagcggatggggcaacaggtggggcaact

SEQ ID NO: 322421 - DNA, 525 bp, Homo sapiens
aatttgtgacccttacgcctggcttgaagaccccgacagtgaacagactaaggtaatttggtttctaattaaagataaggcagccttagtagctagcaccaaactctaaatgtcagtaactatagcttttcctttctggtgttctcctgtgttttctgccatgggatggtgagtatacctgttgttaccactactttttgtcaaataatttatgggaaaaagacaaaagcatggcttagtcccagagaagatcacctaagtgtttcagataatgtttatggttcatagtgacactgatgagctattttaaatgaaaatatcagaaagaaaactgatttttgccaaaagaaaaaatgaaaacctagatagaaatgatgttaaaggaaaaaattgcctaaatatttttttccaaagaaaaggaaatcttgtatatgaaatgaatattaggtcatgaaaactgaacactgtccttaaattgcttattgatgtcaacacaacaacagtgaaacaaaagctaagtagtga

SEQ ID NO: 322422 - DNA, 514 bp, Homo sapiens
agaatatgaaactactcaccttaagagacagtaagcatgcctgtgatttgggttgtttcaacagacctgtgagcttccttcctacagtctttcaaagttggagccacataaatgacacagctccccagtttccaggagcccttgccagtcatggcctaaatggtaacgcataggcacagtccatggtggtcactcacgtactagttaactgcagtcctcactgctaattaactacctaggtccctgtgccataaaactctactgttgctctccagcctcacaaaggtgtttttgccttccagatactctccattgcataatgtgaagttaccagaagcagatgacatccagtacccgtccatgctgctcctcactgctgaccatgatgaccgcgtggtcccgcttcactccctgaagttcattgccacccttcagtacatcgtgggccgcagcaggaagcaaagcaaccccctgcttatccacgtggacaccaaggcgggccacggggcgggga

SEQ ID NO: 322423 - DNA, 515 bp, Homo sapiens
ggcggggaagcccacagccaaagtgatagaggaagtctcagacatgtttgcgttcatcgcgcggtgcctgaacgtcgactggattccataaacagttttcgtgcttcctcctgacagcgacagaaaacctcaagggctttcccacgttgacaccaagaaaccactgggcataatgcttccccacgggaacattattcctgcactcacaggctacagttgaacagaactgccgtgggaattttatcttttttaggcttctcctttttagcaaggccttggtgtttctttttccaccctgtctaggcacatgtggttttttggtgttttttttaagggcatgttgggataaatagctaaatggcaacaaacacattgtgaatattagattgctgaattaaggatcatagtcgggcatacttatctatatccataacctctatatctttaaataaatgtgagaactgttctcatggagaagacttctttgcaacaataataaatgttatttaagaatg

SEQ ID NO: 322424 - DNA, 2763 bp, Homo sapiens
cccggcctcgcagacagcggcttcctgctttctgcacgtcctcgccgccgcgccgccagtccgtttgtgctagctctggccgtgagccggccgcccgctgccgccggccgccccgcagctgcctgcgccccagccgcgcctcgcggccagcccggctagctcaggtccgctcccggagcccgcgcccctccacgctgccccctgcctgtccccggccatgctgtcccttcagtaccccgacgtgtaccgcgacgagaccgccgtacaggattatcatggtcataaaatttgtgacccttacgcctggcttgaagaccccgacagtgaacagactaaggcctttgtggaggcccagaataagattactgtgccatttcttgagcagtgtcccatcagaggtttatacaaagagagaatgactgaactatatgattatcccaagtatagttgccacttcaagaaaggaaaacggtatttttatttttacaatacaggtttgcagaaccagcgagtattatatgtacaggattccttagagggtgaggccagagtgttcctggaccccaacatactgtctgacgatggcacagtggcactccgaggttatgcgttcagcgaagatggtgaatattttgcctatggtctgagtgccagtggctcagactgggtgacaatcaagttcatgaaagttgatggtgccaaagagcttccagatgtgcttgaaagagtcaagttcagctgtatggcctggacccatgatgggaagggaatgttctacaactcataccctcaacaggatggaaaaagtgatggcacagagacatctaccaatctccaccaaaagctctactaccatgtcttgggaaccgatcagtcagaagatattttgtgtgctgagtttcctgatgaacctaaatggatgggtggagctgagttatctgatgatggccgctatgtcttgttatcaataagggaaggatgtgatccagtaaaccgactctggtactgtgacctacagcaggaatccagtggcatcgcgggaatcctgaagtgggtaaaactgattgacaactttgaaggggaatatgactacgtgaccaatgaggggacggtgttcacattcaagacgaatcgccagtctcccaactatcgcgtgatcaacattgacttcagggatcctgaagagtctaagtggaaagtacttgttcctgagcatgagaaagatgtcttagaatggatagcttgtgtcaggtccaacttcttggtcttatgctacctccatgacgtcaagaacattctgcagctccatgacctgactactggtgctctccttaagaccttcccgctcgatgtcggcagcattgtagggtacagcggtcagaagaaggacactgaaatcttctatcagtttacttcctttttatctccaggtatcatttatcactgtgatcttaccaaagaggagctggagccaagagttttccgagaggtgaccgtaaaaggaattgatgcttctgattaccagacagtccagattttctaccctagcaaggatggtacgaagattccaatgttcattgtgcataaaaaaggcataaaattggatggctctcatccagctttcttatatggctatggcggcttcaacatatccatcacacccaactacagtgtttccaggcttatttttgtgagacacatgggtggtatcctggcagtggccaacatcagaggaggtggcgaatatggagagacgtggcataaaggtggtatcttggccaacaaacaaaactgctttgatgactttcagtgtgctgctgagtatctgatcaaggaaggttacacatctcccaagaggctgactattaatggaggttcaaatggaggcctcttagtggctgcttgtgcaaatcagagacctgacctctttggttgtgttattgcccaagttggagtaatggacatgctgaagtttcataaatataccatcggccatgcttggaccactgattatgggtgctcggacagcaaacaacactttgaatggcttgtcaaatactctccattgcataatgtgaagttaccagaagcagatgacatccagtacccgtccatgctgctcctcactgctgaccatgatgaccgcgtggtcccgcttcactccctgaagttcattgccacccttcagtacatcgtgggccgcagcaggaagcaaagcaaccccctgcttatccacgtggacaccaaggcgggccacggggcggggaagcccacagccaaagtgatagaggaagtctcagacatgtttgcgttcatcgcgcggtgcctgaacgtcgactggattccataaacagttttcgtgcttcctcctgacagcgacagaaaacctcaagggctttcccacgttgacaccaagaaaccactgggcataatgcttccccacgggaacattattcctgcactcacaggctacagttgaacagaactgccgtgggaattttatcttttttaggcttctcctttttagcaaggccttggtgtttctttttccaccctgtctaggcacatgtggttttttggtgttttttttaagggcatgttgggataaatagctaaatggcaacaaacacattgtgaatattagattgctgaattaaggatcatagtcgggcatacttatctatatccataacctctatatctttaaataatgttgtagcgaccaaccgcctcttaatcaataatataccttaaacaactaca

SEQ ID NO: 322425 - DNA, 2399 bp, Homo sapiens
cccggcctcgcagacagcggcttcctgctttctgcacgtcctcgccgccgcgccgccagtccgtttgtgctagctctggccgtgagccggccgcccgctgccgccggccgccccgcagctgcctgcgccccagccgcgcctcgcggccagcccggctagctcaggtccgctcccggagcccgcgcccctccacgctgccccctgcctgtccccggccatgctgtcccttcagtaccccgacgtgtaccgcgacgagaccgccgtacaggattatcatggtcataaaatttgtgacccttacgcctggcttgaagaccccgacagtgaacagactaaggcctttgtggaggcccagaataagattactgtgccatttcttgagcagtgtcccatcagaggtttatacaaagagagaatgactgaactatatgattatcccaagtatagttgccacttcaagaaaggaaaacggtatttttatttttacaatacaggtttgcagaaccagcgagtattatatgtacaggattccttagagggtgaggccagagtgttcctggaccccaacatactgtctgacgatggcacagtggcactccgaggttatgcgttcagcgaagatggtgaatattttgcctatggtctgagtgccagtggctcagactgggtgacaatcaagttcatgaaagttgatggtgccaaagagcttccagatgtgcttgaaagagtcaagttcagctgtatggcctggacccatgatgggaagggaatgttctacaactcataccctcaacaggatggaaaaagtgatggcacagagacatctaccaatctccaccaaaagctctactaccatgtcttgggaaccgatcagtcagaagatattttgtgtgctgagtttcctgatgaacctaaatggatgggtggagctgagttatctgatgatggccgctatgtcttgttatcaataagggaaggatgtgatccagtaaaccgactctggtactgtgacctacagcaggaatccagtggcatcgcgggaatcctgaagtgggtaaaactgattgacaactttgaaggggaatatgactacgtgaccaatgaggggacggtgttcacattcaagacgaatcgccagtctcccaactatcgcgtgatcaacattgacttcagggatcctgaagagtctaagtggaaagtacttgttcctgagcatgagaaagatgtcttagaatggatagcttgtgtcaggtccaacttcttggtcttatgctacctccatgacgtcaagaacattctgcagctccatgacctgactactggtgctctccttaagaccttcccgctcgatgtcggcagcattgtagggtacagcggtcagaagaaggacactgaaatcttctatcagtttacttcctttttatctccaggtatcatttatcactgtgatcttaccaaagaggagctggagccaagagttttccgagaggtgaccgtaaaaggaattgatgcttctgattaccagacagtccagctccccaagggtactgagtcttccagaaactgaatcactggttgattgatgatgacgaagaatgtctctgttcctttgcaatgagaggtcaccaatagggcaccaggtgtttatcaaggcccctcccacctggagggctggaccacacaggccacagattaggaatcagaacattgtttgtgaaggaagatgagaataaagagcgctggatgttccccacaatgtttctgtgaaactagggcattattatagcttggtgaattacccttcaattgtctagaaatggtctagatgataggctacatctagatcatgaataaagctttgtttactaaaacaggtggtgggctggatttggtgtagagctatgatttatcagcccctgttctacatcagcagttggcaaactggcctcctgttttattggagaacacatgcccatttgtttacatattgcctgtggttgctttggcacttagagtggttgcaacagaaactctatgtcccagaaggcctgaaatatttaatatatggcctttaagaaaaagtttgcagaatcttcatctatgtaaatagcatttaaaagtacaacattcttgatagacatacagggccgagaagacatacagggtcaagaagctctgtcagacaggcctgaaatccacgtggggcaagtcatttaacctttctgccacagttttttcaactgtaaagtagagattgatagtatctgttttttaggattcctgtgggattattaagagataaggtatattcaagatctggcaatagaatataatgtatttttttcaatcaacgttagaaataaatgtaacagacttttagtttcctatttatttggctg

SEQ ID NO: 322426 - DNA, 281 bp, Homo sapiens
tggaggaagggaggtgggtagagaagggagctgcagtgatttgcactcaagcagaccagtgtgcctgtgccggctccagatgacagagggtgctacgtggccgccgtctgcacagcaagggtgagagggcttgggagaggccagcagagaagggacagtggggtgggggagtgcatcaaactggagagaggaaggggtgagtagggctggggcaggaaggccagtgtgtggtgctgggtggcttacactcaccctcccagtcctgcggagcgagagacttt

SEQ ID NO: 322427 - DNA, 605 bp, Homo sapiens
tcactcaaatccttttaaaaataaaagcctccaggtccctatataagtctttccagctaccacccactgcttccctcctcatttgagactcttggtgttccagcctctctgcatctctaattccagacgcctcctttccttgagcccaggcccaaaaccactgttctactgcacctgctctcccaaagcccaccactttcttggagctgccacatccactagatacatttcagcctgtgtcttagtggatgcctctgctgcatctggcatcattgacctgtcctccccacaactattagatgctatttgcttttctggttcttctggagctctctcacctttcctgctcactctcctttcttcatttttttctgcccactccttcaatgctgctgtccctaatggttctatcttttgttacagtctttgtctttcactctgccttctcactcctctgtctccaattctcgtccactcccacaaccctccagcccccgttctcatactctccatgctctccttggagcagaaagttgtatctccttccacggttctaactcttacctttcactaagggatccaaagtcttctctccagctatagat

SEQ ID NO: 322428 - DNA, 457 bp, Homo sapiens
gtgccctttccccagcaccagccagtctaaccctatccccaggagcccgagtgagtgatttgatacagatcactttttttctgtcctgcagagttgaggcctagatagcttttagttcccagcctgtcctatttgcccactaatgagacaaattgtaggctccataaaaaattaaatagcagctgcttcattttcttcctattgaactttgaaatgatgacactctcatttgcatggctgctcaaggtatgaatatctgggcctgcaggatccaagagtccttaaatttaaccagaatcatatgttttttcagattggctggtgtaaaatattttgagaaccattcatgaaccgaaccattagctgtgcaaatggagcacgtgatttctgctcaccctgttggctgctaattaataatatcttcctggtggaggtactacctgcaggcttctcactg

SEQ ID NO: 322429 - DNA, 1475 bp, Homo sapiens
tcctggagaacttcagtgttgctactgaagaaagtgcagagcctctgagtgaggatgactttgagatgttctatgaggtttgggagaagtttgatcccgatgcaactcagttcatggaatttgaaaaattatctcagtttgcagctgcgcttgaaccgcctctcaatctgccacaaccaaacaaactccagctcattgccatggatttgcccatggtgagtggtgaccggatccactgtcttgatatcttatttgcttttacaaagcgggttctaggagagagtggagagatggatgctctacgaatacagatggaagagcgattcatggcttccaatccttccaaggtctcctatcagccaatcactactactttaaaacgaaaacaagaggaagtatctgctgtcattattcagcgtgcttacagacgccaccttttaaagcgaactgtaaaacaagcttcctttacgtacaataaaaacaaaatcaaaggtggggctaatcttcttataaaagaagacatgataattgacagaataaatgaaaactctattacagaaaaaactgatctgaccatgtccactgcagcttgtccaccttcctatgaccgggtgacaaagccaattgtggaaaaacatgagcaagaaggcaaagatgaaaaagccaaagggaaataaatgaaaataaataaaaataattgggtgacaaattgtttacagcctgtgaaggtgatgtatttttatcaacaggactcctttaggaggtcaatgccaaactgactgtttttacacaaatctccttaaggtcagtgcctacaataagacagtgaccccttgtcagcaaactgtgactctgtgtaaaggggagatgaccttgacaggaggttactgttctcactaccagctgacactgctgaagataagatgcacaatggctagtcagactgtagggaccagtttcaaggggtgcaaacctgtgattttggggttgtttaacatgaaacactttagtgtagtaattgtatccactgtttgcatttcaactgccacatttgtcacatttttatggaatctgttagtggattcatctttttgttaatccatgtgtttattatatgtgactatttttgtaaacgaagtttctgttgagaaataggctaaggacctctataacaggtatgccacctggggggtatggcaaccacatggccctcccagctacacaaagtcgtggtttgcatgagggcatgctgcacttagagatcatgcatgagaaaaagtcacaagaaaaacaaattcttaaatttcaccatatttctgggaggggtaattggggtgataagtggaggtgctttgttgatcttgttttgcggaaatccagcccctaggaccaagtagattgtttgtggggtaggccagtaaatcttagcaggtgcaaacttcattcaaatgtttggagtcataaatgttatgttt

SEQ ID NO: 322430 - DNA, 456 bp, Homo sapiens
tgctcaggagtttgcaaagctctttttgggctgttcgcttatctgagccacacagcaacccctaaggtgggattatcatcatggtgccccattaaggaaaccgaggttaaaggacttgattaaggtcacacagttaaagagctgtggagccaaagcacaaactcaaggcatctgttttcaaattccatgtctgcacaggacagaattctgtccagacacacaatctggggggagagttggcatgaaccacttagcggcaaggggtgaggggcagtgcaagttgtctctagggctggcatgccacacactcatctcagtgccctcactgtctagaaaatgctgcattttgcagtccagcttttttttttttgttgaaggttatccttggaaaggatctctgatcagtggaaacgatttgtttttgagctgattagcttgttgaggaaaaccatcatt

SEQ ID NO: 322431 - DNA, 340 bp, Homo sapiens
cctggccagcatggcaaaaccccaactctaataaaaaatacaaaaaattagctgggagtggaggcaggcacctgtaatcccagctacttggaaggttgagctaggagaattgcttgaatctgggaggcagaggttgcaatgagccgagatcacaccactgcactccaccttgagcaacagactgagactctgtctcaaaaaaaaaaaaattatgcaaagtgtcttttccaacaaaagtgtaatgaagctagaagtcaataacaggaaaacctggagaatttgcaagtaagtgaaagttaaacaacattcttaaccagtggctcaaagaagaaatgactag

SEQ ID NO: 322432 - DNA, 392 bp, Homo sapiens
accaacaccacaatcaaggtagcaaagaaagggagctgaaattaaagcaagggaggcagataacatttgaaaatgtgtgtaatcaaccatattacaaggccagaaatgaaaagccttataatcatcccagtacatgcaggaaaagcatgtgacaaaatcagacatctattcctgataaaacctctcagcaaactaggagtagaagaggcatttcttcactgtccttttccgctgtatagatgtgcagatttgcctcatcctaaagtgtcctgtgtcacagtggagcagggaggcaggtgtgtgctggctgcatggggtagcaggttaggttagtaacgaatctgtggccagctggcaccctggcttcttggatgggaaagtggcttaatacc

SEQ ID NO: 322433 - DNA, 85 bp, Homo sapiens
atgtgagtacaataccttttagaatgtaacaatgttggtttgatactgtaaattttactaattaaagaggagaagacttgaggcc

SEQ ID NO: 322434 - DNA, 3911 bp, Homo sapiens
ggctccgaaggtccccggcttcgtggctagccggggtcctagcgctggaaaggtggccgtagcggccgcctgacccctacaaaagtctgggacaggggcagcgacaaaggccttgggaggacgcccatggtcggagggatctcgccccgggagaaaagttgggacaggagcgcgggatcgaagggtggactccgagccggcctgtcagcgaagagcgttgcaggtgcggtggcggaagtgcagggacggaggccgaagcggagcggtctagggagccgcggccgcgggtcacccggcgggtagcagttgctgagtgtcagctagacagcagcgactagggctcgggcgccggcgagatgcctttgttcaccgccaaccccttcgagcaagacgtggaaaaagccacgaatgagtacaacactacagaagattggagtcttattatggacatatgtgacaaagttggaagtactcctaatggagcgaaagattgcctaaaagccataatgaaaagggtaaatcataaggttccacatgttgctctgcaagcactaactcttcttggggcttgtgtggcaaactgtggaaagatatttcatttagaagtatgttcccgtgattttgcaacagaagtacgtgctgtgattaaaaataaggcacatcctaaagtatgtgaaaaactgaaatctttaatggtggagtggtcagaagaatttcagaaggaccctcagtttagtctgatatctgcaactattaaatctatgaaagaagaaggaattacttttcctccagcaggttctcagactgtctcagctgctgccaagaatggtacgtcatcgaacaaaaacaaagaggatgaagacatagctaaagctattgaattatcgctgcaagaacagaaacagcaacacacagaaacaaaatccttatatccatcttcagaaattcagttaaataataaggttgcacggaaagtgagagctttatatgattttgaagctgttgaggacaatgaactcacctttaaacatggtgaaataattattgttttggatgacagtgatgccaattggtggaaaggagaaaatcacagaggaataggacttttcccatccaattttgtaacaactaatttaaacatagagactgaggcagcggctgtggacaaattgaatgtaattgatgatgatgtggaggaaattaagaaatcagagcctgagcctgtttatatagatgaggataagatggatagagccctgcaggtacttcagagtatagatccaacagattcaaaaccagactcccaagaccttttggatttagaagatatctgccaacagatgggtccaatgatagatgaaaaacttgaagaaattgataggaagcattcagaattgtctgaattgaatgttaaagtcctggaagctctggaactatataacaaattggtgaatgaagcaccagtgtactcagtctattcaaagctccaccctccagcacattacccacctgcatcatctggggttccaatgcagacatatccagttcaatcacatggtggaaactatatgggtcagagcattcaccaagtaactgttgcccaaagctatagcctaggacccgatcaaattggtccactgagatctctgcctccaaatgtgaattcctcagtgacagcacagcctgctcaaacttcatatttaagcactggacaagacactgtttccaatcctacttatatgaaccagaactctaacctacagtcagctactggtacaactgcttacacacagcaaatggggatgtctgtggatatgtcatcttatcagaacactacttccaatttgcctcaactggcaggctttccggtgacagttccagctcatccagttgcacagcagcacacaaattaccatcagcagcctctcctttagaaacaaatcaagcattttcttgaaagccttcataagtgtattattcagtccttgtgataccaacctgaaaatattaaaacttttttccctctcaactcaaaaggaccatgaataaataaagcacaaaaacctctcttattctacaaggccataaaaggttttttttttttttttttttcagtccagtttgtttgaagtcaatcttttcatcagaggcagcttaaagatgctttcagttagttttgtcttactttcagatttctctacataaatctagatactcattaagtagccttatgacaaacagtatgagatacttatgacaaactcgctctgtcacccaggctggagtgcagtagcatgatcgacagagtgagtttgtcaaaagtatctcatacttataaacagtatgagataggaggattaaaatattattttaaagaaaccactgtttccccctaaaatgtcataagagcactgaagaacttgaaatatttttttcagagtttctcacacactttaaaagtctaacttttttgtgtgtaagcatttagcttgccagcatatttctttttggctccttaaattgcggttgtgtttgcagtattgtcacttttgctctcactgttatgttgaataataattagcatataattgtctacagaagcaagagcaatctggaaggaacaaaaatgttttctgtgattaacagtgaagaccttgtaaatgcagatgtgtgataaagcatttagtcagtcccccaaacagtcatgccaactgtgaaggaatgtcccacaaaacatttccattccctgaggaaaaacattttctttcctacatgtatctctggtatttagaattgtcactaataaccttttcaagtgattttggctattctctaatgaagatatggtccatttgtttttcttcctgcaatgtggtgtgcagagatgctgcatatcctttttatgggattgcgtgtgaatttgaaccatgagacattcctaataatttgttgtgagatataccaagcatggatgataagtgtgtttttagtggtgtgttgtttttttaaagaggtgattcaagtaccgttgctaagctgtcaacataccaagctgttgaaaaaattgaccatttctttcagaagtaattctcagcctgtggaataatagcaggtgaagacttcatagaaggcgacagattgatagggaggctattgaagcagtttttctgaagcctgcattttgagttagtttatagtgctaatagattctatataactgtgagagtttggtagtaaaccagtagggattgttttctctcctaaaaatttgcacactacttcattgtctaccaactttttacatattggaaaatagaaattgcaaatacatacatgtatggaaacatattcagattgggaaaaacaatggacattagtttttaaaaagttacgtggaagcaagatttctatatttgtttttttaaaggaagcagtcattctttctactaaatccatttcaagctagttctctgaaaattttgccatttatctacagaaatttgattataaatatgttcctttttcaaagaaactttattctagaacaaaatagtctatatggtacttgatctacatttaagtggaaaaattagcagtatttgaaagctcagtttatgtcattgtcttaacttcagatacaaataactgaacagaaagttttaacctttaatatctcatgttctgttttttattcagtattttcctttatgttaattcaattatatacttctgaatggcaccttactttttggaaacaaatcttctgttatttacaaaataataatttttaaaaaacatttaaaaaaaatccaaagctgctctcgataatagtcaacatttgcatatatatggaatttcttactttttttctcccaaactctatttaataaacttattttaatgtttgtgta

SEQ ID NO: 322435 - DNA, 5731 bp, Homo sapiens
ggctccgaaggtccccggcttcgtggctagccggggtcctagcgctggaaaggtggccgtagcggccgcctgacccctacaaaagtctgggacaggggcagcgacaaaggccttgggaggacgcccatggtcggagggatctcgccccgggagaaaagttgggacaggagcgcgggatcgaagggtggactccgagccggcctgtcagcgaagagcgttgcaggtgcggtggcggaagtgcagggacggaggccgaagcggagcggtctagggagccgcggccgcgggtcacccggcgggtagcagttgctgagtgtcagctagacagcagcgactagggctcgggcgccggcgagatgcctttgttcaccgccaaccccttcgagcaagacgtggaaaaagccacgaatgagtacaacactacagaagattggagtcttattatggacatatgtgacaaagttggaagtactcctaatggagcgaaagattgcctaaaagccataatgaaaagggtaaatcataaggttccacatgttgctctgcaagcactaactcttcttggggcttgtgtggcaaactgtggaaagatatttcatttagaagtatgttcccgtgattttgcaacagaagtacgtgctgtgattaaaaataaggcacatcctaaagtatgtgaaaaactgaaatctttaatggtggagtggtcagaagaatttcagaaggaccctcagtttagtctgatatctgcaactattaaatctatgaaagaagaaggaattacttttcctccagcaggttctcagactgtctcagctgctgccaagaatggtacgtcatcgaacaaaaacaaagaggatgaagacatagctaaagctattgaattatcgctgcaagaacagaaacagcaacacacagaaacaaaatccttatatccatcttcagaaattcagttaaataataaggttgcacggaaagtgagagctttatatgattttgaagctgttgaggacaatgaactcacctttaaacatggtgaaataattattgttttggatgacagtgatgccaattggtggaaaggagaaaatcacagaggaataggacttttcccatccaattttgtaacaactaatttaaacatagagactgaggcagcggctgtggacaaattgaatgtaattgatgatgatgtggaggaaattaagaaatcagagcctgagcctgtttatatagatgaggataagatggatagagccctgcaggtacttcagagtatagatccaacagattcaaaaccagactcccaagaccttttggatttagaagatatctgccaacagatgggtccaatgatagatgaaaaacttgaagaaattgataggaagcattcagaattgtctgaattgaatgttaaagtcctggaagctctggaactatataacaaattggtgaatgaagcaccagtgtactcagtctattcaaagctccaccctccagcacattacccacctgcatcatctggggttccaatgcagacatatccagttcaatcacatggtggaaactatatgggtcagagcattcaccaagtaactgttgcccaaagctatagcctaggacccgatcaaattggtccactgagatctctgcctccaaatgtgaattcctcagtgacagcacagcctgctcaaacttcatatttaagcactggacaagacactgtttccaatcctacttatatgaaccagaactctaacctacagtcagctactggtacaactgcttacacacagcaaatggggatgtctgtggatatgtcatcttatcagaacactacttccaatttgcctcaactggcaggctttccggtgacagttccagctcatccagttgcacagcagcacacaaattaccatcagcagcctctcctttagaaacaaatcaagcattttcttgaaagccttcataagtgtattattcagtccttgtgataccaacctgaaaatattaaaacttttttccctctcaactcaaaaggaccatgaataaataaagcacaaaaacctctcttattctacaaggccataaaaggttttttttttttttttttttcagtccagtttgtttgaagtcaatcttttcatcagaggcagcttaaagatgctttcagttagttttgtcttactttcagatttctctacataaatctagatactcattaagtagccttatgacaaacagtatgtcaaaagtatctcatacttataaacagtatgagataggaggattaaaatattattttaaagaaaccactgtttccccctaaaatgtcataagagcactgaagaacttgaaatatttttttcagagtttctcacacactttaaaagtctaacttttttgtgtgtaagcatttagcttgccagcatatttctttttggctccttaaattgcggttgtgtttgcagtattgtcacttttgctctcactgttatgttgaataataattagcatataattgtctacagaagcaagagcaatctggaaggaacaaaaatgttttctgtgattaacagtgaagaccttgtaaatgcagatgtgtgataaagcatttagtcagtcccccaaacagtcatgccaactgtgaaggaatgtcccacaaaacatttccattccctgaggaaaaacattttctttcctacatgtatctctggtatttagaattgtcactaataaccttttcaagtgattttggctattctctaatgaagatatggtccatttgtttttcttcctgcaatgtggtgtgcagagatgctgcatatcctttttatgggattgcgtgtgaatttgaaccatgagacattcctaataatttgttgtgagatataccaagcatggatgataagtgtgtttttagtggtgtgttgtttttttaaagaggtgattcaagtaccgttgctaagctgtcaacataccaagctgttgaaaaaattgaccatttctttcagaagtaattctcagcctgtggaataatagcaggtgaagacttcatagaaggcgacagattgatagggaggctattgaagcagtttttctgaagcctgcattttgagttagtttatagtgctaatagattctatataactgtgagagtttggtagtaaaccagtagggattgttttctctcctaaaaatttgcacactacttcattgtctaccaactttttacatattggaaaatagaaattgcaaatacatacatgtatggaaacatattcagattgggaaaaacaatggacattagtttttaaaaagttacgtggaagcaagatttctatatttgtttttttaaaggaagcagtcattctttctactaaatccatttcaagctagttctctgaaaattttgccatttatctacagaaatttgattataaatatgttcctttttcaaagaaactttattctagaacaaaatagtctatatggtacttgatctacatttaagtggaaaaattagcagtatttgaaagctcagtttatgtcattgtcttaacttcagatacaaataactgaacagaaagttttaacctttaatatctcatgttctgttttttattcagtattttcctttatgttaattcaattatatacttctgaatggcaccttactttttggaaacaaatcttctgttatttacaaaataataatttttaaaaaacatttaaaaaaaatccaaagctgctctcgataatagtcaacatttgcatatatatggaatttcttactttttttctcccaaactctatttaataaacttattttaatgtttgtgtatttcatgtataattgtgatctcaattataaaagtttaattcagcatgtctttgagccaatataattactgcacacccactaaattgggatcagccattataaataatgtagttttagaataataaaacatgacacatatatatatatataaatatatagtatatattggcacatcggtgaaagtttatatgtgcagaagtttttttctttctcaagttaaaaattattttttgccatatgtaattttgtgttgcaggctgtcgagagataaaaatgattttaaatctgtgtactgatgattctttcggtgttaagaaacacagggttgtgtacttccctttttatgggcttatggattctatttatattaagacctgtttataattgttttctgccaaagggaattgtctaacttcagatttctacattgggttcatacttactgttttatatcagaaataaaaaaatagcttctgctttttcatatgaaatcttggtacatcagaaagaattcctgaaaatttataatagaatgaattttattaatgcagaaaaataccccagggtgttaaaatatatgaagtgtgggatatattcttatagtttgtaaaatgtagtcaaccaatactgtcttctaatttggtaatttatttataaaattacttaaacattaggtaattatatttgttaggatttgaaattatttgtagttaaattgtcatgctgtttgaaataattgatacttgtctacgtaatacattttactgtatgttttgaagatggttataatttcactttcaaaatttaaaaaatcaattttaaatgttttaaaaacatatagcttagggattttttttaaaaaggttttcttagtaaaaacataaatttaaaagcccctgagttctaggagagggcttattgaattgctataagaaagctggagttactttgataagtaataaattataaatagcactgatctataatgctttatttctatcggaaggtactttttcttctttcatcatcagttttagccagttagtaaatgggaatactcagttttagggatttgatttttgtttggtttaattttctttcaaaaattcaaaagtatatttctaaaagttttccccagaggccagatacagtggctcatgcctataatcccagcactttgggagcctgagataggagtattgcttgaggctaggagtttgagaccaacctggcaacatggcaagaccctatctctacaaaaattttaaaacttagccaggtgtggtagtgcacctgtagtcccagctagtcagtaggctgaggtgggagtattgcttgaggctgcagtgaggtgtgatcacgccactgcactccggcctgacagaatgagatcctgtctcaaaaagaaaattccccagaagaagaattctaattttatcaagctgaattaaagtttgagagtcttttttttaaaatcttactgtgtcaaaagaggcattatgttgcttgtgtgatatagtgaatagtgtccctccaaatttcatgtacacctggaatgtcacaatgtgacttaacagtagccacccctcacccccgcccttatctgtggtggatacatttgcaagatccccagtggatgcctgaaaccgcagatagtactgaaccttatatatactgtttgttttcctatgcatacatatccctatgataaagtttatgaatttggcacttaacagcagaactaataagatgaaagagttgtaacaatatactctaataaaagttatttaaaatgtatgtattgttatctgtaattttgcatttaatatttttggaccatggtttaatctgggtaactgaaaacacagaaagtgaaatcatgggccgggc

SEQ ID NO: 322436 - DNA, 5032 bp, Homo sapiens
gtaatgtgattgtacttaatatagcttatttggcatttctagcattctaaattttcagatgaatggtatttactttaaaaatagcttaatttaaaactggattgatgatcattatggtatgatatgatattaaatgtatgcattgttttgatgctatatttagtagacaggtggtagaccctgtccttaaggagctgttgtcctgaaaataagtagggcacatataaatgtccaaagagacctaaaccatttttgctgtttcctgaggatacatgtcttttgcccataactcttctttacttttgtcctgtttgtcttaaaggtagagaataaggtagacattgccagggaagccctggcacccttataccatttctttttcagctttttctctcaagtttctttcttaggaaggagttggatgagtcatcctgggatgagggtaaagaaggttatcattcttatagtgactttaagtgatggtgggcttcccttcaagggagtgtatagttttctgtggctctacagcaagacatctttactgagtaataggcaacctggatagattgcaatccactacttaaaagtacaccacctgtctttctcccagctctctgtaaaaataaaagaacagccaaacaaatcaaatttccatagatttggcactgtgatttgacagctctccacttttagttctaagatggatagattggtagaatcagattgcttcccaaagaagtatagtttctttcctttaagtcttttaacattttaaatatattattaggcacatgtttgggagatgagtgaatcaactttttctttctgattaatagacatatccagttcaatcacatggtggaaactatatgggtcagagcattcaccaagtaactgttgcccaaagctatagcctaggacccgatcaaattggtccactgagatctctgcctccaaatgtgaattcctcagtgacagcacagcctgctcaaacttcatatttaagcactggacaagacactgtttccaatcctacttatatgaaccagaactctaacctacagtcagctactggtacaactgcttacacacagcaaatggggatgtctgtggatatgtcatcttatcagaacactacttccaatttgcctcaactggcaggctttccggtgacagttccagctcatccagttgcacagcagcacacaaattaccatcagcagcctctcctttagaaacaaatcaagcattttcttgaaagccttcataagtgtattattcagtccttgtgataccaacctgaaaatattaaaacttttttccctctcaactcaaaaggaccatgaataaataaagcacaaaaacctctcttattctacaaggccataaaaggttttttttttttttttttttcagtccagtttgtttgaagtcaatcttttcatcagaggcagcttaaagatgctttcagttagttttgtcttactttcagatttctctacataaatctagatactcattaagtagccttatgacaaacagtatgtcaaaagtatctcatacttataaacagtatgagataggaggattaaaatattattttaaagaaaccactgtttccccctaaaatgtcataagagcactgaagaacttgaaatatttttttcagagtttctcacacactttaaaagtctaacttttttgtgtgtaagcatttagcttgccagcatatttctttttggctccttaaattgcggttgtgtttgcagtattgtcacttttgctctcactgttatgttgaataataattagcatataattgtctacagaagcaagagcaatctggaaggaacaaaaatgttttctgtgattaacagtgaagaccttgtaaatgcagatgtgtgataaagcatttagtcagtcccccaaacagtcatgccaactgtgaaggaatgtcccacaaaacatttccattccctgaggaaaaacattttctttcctacatgtatctctggtatttagaattgtcactaataaccttttcaagtgattttggctattctctaatgaagatatggtccatttgtttttcttcctgcaatgtggtgtgcagagatgctgcatatcctttttatgggattgcgtgtgaatttgaaccatgagacattcctaataatttgttgtgagatataccaagcatggatgataagtgtgtttttagtggtgtgttgtttttttaaagaggtgattcaagtaccgttgctaagctgtcaacataccaagctgttgaaaaaattgaccatttctttcagaagtaattctcagcctgtggaataatagcaggtgaagacttcatagaaggcgacagattgatagggaggctattgaagcagtttttctgaagcctgcattttgagttagtttatagtgctaatagattctatataactgtgagagtttggtagtaaaccagtagggattgttttctctcctaaaaatttgcacactacttcattgtctaccaactttttacatattggaaaatagaaattgcaaatacatacatgtatggaaacatattcagattgggaaaaacaatggacattagtttttaaaaagttacgtggaagcaagatttctatatttgtttttttaaaggaagcagtcattctttctactaaatccatttcaagctagttctctgaaaattttgccatttatctacagaaatttgattataaatatgttcctttttcaaagaaactttattctagaacaaaatagtctatatggtacttgatctacatttaagtggaaaaattagcagtatttgaaagctcagtttatgtcattgtcttaacttcagatacaaataactgaacagaaagttttaacctttaatatctcatgttctgttttttattcagtattttcctttatgttaattcaattatatacttctgaatggcaccttactttttggaaacaaatcttctgttatttacaaaataataatttttaaaaaacatttaaaaaaaatccaaagctgctctcgataatagtcaacatttgcatatatatggaatttcttactttttttctcccaaactctatttaataaacttattttaatgtttgtgtatttcatgtataattgtgatctcaattataaaagtttaattcagcatgtctttgagccaatataattactgcacacccactaaattgggatcagccattataaataatgtagttttagaataataaaacatgacacatatatatatatataaatatatagtatatattggcacatcggtgaaagtttatatgtgcagaagtttttttctttctcaagttaaaaattattttttgccatatgtaattttgtgttgcaggctgtcgagagataaaaatgattttaaatctgtgtactgatgattctttcggtgttaagaaacacagggttgtgtacttccctttttatgggcttatggattctatttatattaagacctgtttataattgttttctgccaaagggaattgtctaacttcagatttctacattgggttcatacttactgttttatatcagaaataaaaaaatagcttctgctttttcatatgaaatcttggtacatcagaaagaattcctgaaaatttataatagaatgaattttattaatgcagaaaaataccccagggtgttaaaatatatgaagtgtgggatatattcttatagtttgtaaaatgtagtcaaccaatactgtcttctaatttggtaatttatttataaaattacttaaacattaggtaattatatttgttaggatttgaaattatttgtagttaaattgtcatgctgtttgaaataattgatacttgtctacgtaatacattttactgtatgttttgaagatggttataatttcactttcaaaatttaaaaaatcaattttaaatgttttaaaaacatatagcttagggattttttttaaaaaggttttcttagtaaaaacataaatttaaaagcccctgagttctaggagagggcttattgaattgctataagaaagctggagttactttgataagtaataaattataaatagcactgatctataatgctttatttctatcggaaggtactttttcttctttcatcatcagttttagccagttagtaaatgggaatactcagttttagggatttgatttttgtttggtttaattttctttcaaaaattcaaaagtatatttctaaaagttttccccagaggccagatacagtggctcatgcctataatcccagcactttgggagcctgagataggagtattgcttgaggctaggagtttgagaccaacctggcaacatggcaagaccctatctctacaaaaattttaaaacttagccaggtgtggtagtgcacctgtagtcccagctagtcagtaggctgaggtgggagtattgcttgaggctgcagtgaggtgtgatcacgccactgcactccggcctgacagaatgagatcctgtctcaaaaagaaaattccccagaagaagaattctaattttatcaagctgaattaaagtttgagagtcttttttttaaaatcttactgtgtcaaaagaggcattatgttgcttgtgtgatatagtgaatagtgtccctccaaatttcatgtacacctggaatgtcacaatgtgacttaacagtagccacccctcacccccgcccttatctgtggtggatacatttgcaagatccccagtggatgcctgaaaccgcagatagtactgaaccttatatatactgtttgttttcctatgcatacatatccctatgataaagtttatgaatttggcacttaacagcagaactaataagatgaaagagttgtaacaatatactctaataaaagttatttaaaatgtatgtattgttatctgtaattttgcatttaatatttttggaccatggtttaatctgggtaactgaaaacacagaaagtgaaatcatgggccgggc

SEQ ID NO: 322437 - DNA, 5795 bp, Homo sapiens
ggctccgaaggtccccggcttcgtggctagccggggtcctagcgctggaaaggtggccgtagcggccgcctgacccctacaaaagtctgggacaggggcagcgacaaaggccttgggaggacgcccatggtcggagggatctcgccccgggagaaaagttgggacaggagcgcgggatcgaagggtggactccgagccggcctgtcagcgaagagcgttgcaggtgcggtggcggaagtgcagggacggaggccgaagcggagcggtctagggagccgcggccgcgggtcacccggcgggtagcagttgctgagtgtcagctagacagcagcgactagggctcgggcgccggcgagatgcctttgttcaccgccaaccccttcgagcaagacgtggaaaaagccacgaatgagtacaacactacagaagattggagtcttattatggacatatgtgacaaagttggaagtactcctaatggagcgaaagattgcctaaaagccataatgaaaagggtaaatcataaggttccacatgttgctctgcaagcactaactcttcttggggcttgtgtggcaaactgtggaaagatatttcatttagaagtatgttcccgtgattttgcaacagaagtacgtgctgtgattaaaaataaggcacatcctaaagtatgtgaaaaactgaaatctttaatggtggagtggtcagaagaatttcagaaggaccctcagtttagtctgatatctgcaactattaaatctatgaaagaagaaggaattacttttcctccagcaggttctcagactgtctcagctgctgccaagaatggtacgtcatcgaacaaaaacaaagaggatgaagacatagctaaagctattgaattatcgctgcaagaacagaaacagcaacacacagaaacaaaatccttatatccatcttcagaaattcagttaaataataaggttgcacggaaagtgagagctttatatgattttgaagctgttgaggacaatgaactcacctttaaacatggtgaaataattattgttttggatgacagtgatgccaattggtggaaaggagaaaatcacagaggaataggacttttcccatccaattttgtaacaactaatttaaacatagagactgaggcagcggctgtggacaaattgaatgtaattgatgatgatgtggaggaaattaagaaatcagagcctgagcctgtttatatagatgaggataagatggatagagccctgcaggtacttcagagtatagatccaacagattcaaaaccagactcccaagaccttttggatttagaagatatctgccaacagatgggtccaatgatagatgaaaaacttgaagaaattgataggaagcattcagaattgtctgaattgaatgttaaagtcctggaagctctggaactatataacaaattggtgaatgaagcaccagtgtactcagtctattcaaagctccaccctccagcacattacccacctgcatcatctggggttccaatgcagacatatccagttcaatcacatggtggaaactatatgggtcagagcattcaccaagtaactgttgcccaaagctatagcctaggacccgatcaaattggtccactgagatctctgcctccaaatgtgaattcctcagtgacagcacagcctgctcaaacttcatatttaagcactggacaagacactgtttccaatcctacttatatgaaccagaactctaacctacagtcagctactggtacaactgcttacacacagcaaatggggatgtctgtggatatgtcatcttatcagaacactacttccaatttgcctcaactggcaggctttccggtgacagttccagctcatccagttgcacagcagcacacaaattaccatcagcagcctctcctttagaaacaaatcaagcattttcttgaaagccttcataagtgtattattcagtccttgtgataccaacctgaaaatattaaaacttttttccctctcaactcaaaaggaccatgaataaataaagcacaaaaacctctcttattctacaaggccataaaaggttttttttttttttttttttcagtccagtttgtttgaagtcaatcttttcatcagaggcagcttaaagatgctttcagttagttttgtcttactttcagatttctctacataaatctagatactcattaagtagccttatgacaaacagtatgtcaaaagtatctcatacttataaacagtatgagataggaggattaaaatattattttaaagaaaccactgtttccccctaaaatgtcataagagcactgaagaacttgaaatatttttttcagagtttctcacacactttaaaagtctaacttttttgtgtgtaagcatttagcttgccagcatatttctttttggctccttaaattgcggttgtgtttgcagtattgtcacttttgctctcactgttatgttgaataataattagcatataattgtctacagaagcaagagcaatctggaaggaacaaaaatgttttctgtgattaacagtgaagaccttgtaaatgcagatgtgtgataaagcatttagtcagtcccccaaacagtcatgccaactgtgaaggaatgtcccacaaaacatttccattccctgaggaaaaacattttctttcctacatgtatctctggtatttagaattgtcactaataaccttttcaagtgattttggctattctctaatgaagatatggtccatttgtttttcttcctgcaatgtggtgtgcagagatgctgcatatcctttttatgggattgcgtgtgaatttgaaccatgagacattcctaaaaacacacttatcatccatgcttggtatatctcacaacaaattattaggaatgtctcatggttctaatttgttgtgagatataccaagcatggatgataagtgtgtttttagtggtgtgttgtttttttaaagaggtgattcaagtaccgttgctaagctgtcaacataccaagctgttgaaaaaattgaccatttctttcagaagtaattctcagcctgtggaataatagcaggtgaagacttcatagaaggcgacagattgatagggaggctattgaagcagtttttctgaagcctgcattttgagttagtttatagtgctaatagattctatataactgtgagagtttggtagtaaaccagtagggattgttttctctcctaaaaatttgcacactacttcattgtctaccaactttttacatattggaaaatagaaattgcaaatacatacatgtatggaaacatattcagattgggaaaaacaatggacattagtttttaaaaagttacgtggaagcaagatttctatatttgtttttttaaaggaagcagtcattctttctactaaatccatttcaagctagttctctgaaaattttgccatttatctacagaaatttgattataaatatgttcctttttcaaagaaactttattctagaacaaaatagtctatatggtacttgatctacatttaagtggaaaaattagcagtatttgaaagctcagtttatgtcattgtcttaacttcagatacaaataactgaacagaaagttttaacctttaatatctcatgttctgttttttattcagtattttcctttatgttaattcaattatatacttctgaatggcaccttactttttggaaacaaatcttctgttatttacaaaataataatttttaaaaaacatttaaaaaaaatccaaagctgctctcgataatagtcaacatttgcatatatatggaatttcttactttttttctcccaaactctatttaataaacttattttaatgtttgtgtatttcatgtataattgtgatctcaattataaaagtttaattcagcatgtctttgagccaatataattactgcacacccactaaattgggatcagccattataaataatgtagttttagaataataaaacatgacacatatatatatatataaatatatagtatatattggcacatcggtgaaagtttatatgtgcagaagtttttttctttctcaagttaaaaattattttttgccatatgtaattttgtgttgcaggctgtcgagagataaaaatgattttaaatctgtgtactgatgattctttcggtgttaagaaacacagggttgtgtacttccctttttatgggcttatggattctatttatattaagacctgtttataattgttttctgccaaagggaattgtctaacttcagatttctacattgggttcatacttactgttttatatcagaaataaaaaaatagcttctgctttttcatatgaaatcttggtacatcagaaagaattcctgaaaatttataatagaatgaattttattaatgcagaaaaataccccagggtgttaaaatatatgaagtgtgggatatattcttatagtttgtaaaatgtagtcaaccaatactgtcttctaatttggtaatttatttataaaattacttaaacattaggtaattatatttgttaggatttgaaattatttgtagttaaattgtcatgctgtttgaaataattgatacttgtctacgtaatacattttactgtatgttttgaagatggttataatttcactttcaaaatttaaaaaatcaattttaaatgttttaaaaacatatagcttagggattttttttaaaaaggttttcttagtaaaaacataaatttaaaagcccctgagttctaggagagggcttattgaattgctataagaaagctggagttactttgataagtaataaattataaatagcactgatctataatgctttatttctatcggaaggtactttttcttctttcatcatcagttttagccagttagtaaatgggaatactcagttttagggatttgatttttgtttggtttaattttctttcaaaaattcaaaagtatatttctaaaagttttccccagaggccagatacagtggctcatgcctataatcccagcactttgggagcctgagataggagtattgcttgaggctaggagtttgagaccaacctggcaacatggcaagaccctatctctacaaaaattttaaaacttagccaggtgtggtagtgcacctgtagtcccagctagtcagtaggctgaggtgggagtattgcttgaggctgcagtgaggtgtgatcacgccactgcactccggcctgacagaatgagatcctgtctcaaaaagaaaattccccagaagaagaattctaattttatcaagctgaattaaagtttgagagtcttttttttaaaatcttactgtgtcaaaagaggcattatgttgcttgtgtgatatagtgaatagtgtccctccaaatttcatgtacacctggaatgtcacaatgtgacttaacagtagccacccctcacccccgcccttatctgtggtggatacatttgcaagatccccagtggatgcctgaaaccgcagatagtactgaaccttatatatactgtttgttttcctatgcatacatatccctatgataaagtttatgaatttggcacttaacagcagaactaataagatgaaagagttgtaacaatatactctaataaaagttatttaaaatgtatgtattgttatctgtaattttgcatttaatatttttggaccatggtttaatctgggtaactgaaaacacagaaagtgaaatcatgggccgggc

SEQ ID NO: 322438 - DNA, 5677 bp, Homo sapiens
ggctccgaaggtccccggcttcgtggctagccggggtcctagcgctggaaaggtggccgtagcggccgcctgacccctacaaaagtctgggacaggggcagcgacaaaggccttgggaggacgcccatggtcggagggatctcgccccgggagaaaagttgggacaggagcgcgggatcgaagggtggactccgagccggcctgtcagcgaagagcgttgcaggtgcggtggcggaagtgcagggacggaggccgaagcggagcggtctagggagccgcggccgcgggtcacccggcgggtagcagttgctgagtgtcagctagacagcagcgactagggctcgggcgccggcgagatgcctttgttcaccgccaaccccttcgagcaagacgtggaaaaagccacgaatgagtacaacactacagaagattggagtcttattatggacatatgtgacaaagttggaagtactcctaatggagcgaaagattgcctaaaagccataatgaaaagggtaaatcataaggttccacatgttgctctgcaagcactaactcttcttggggcttgtgtggcaaactgtggaaagatatttcatttagaagtatgttcccgtgattttgcaacagaagtacgtgctgtgattaaaaataaggcacatcctaaagtatgtgaaaaactgaaatctttaatggtggagtggtcagaagaatttcagaaggaccctcagtttagtctgatatctgcaactattaaatctatgaaagaagaaggaattacttttcctccagcaggttctcagactgtctcagctgctgccaagaatggtacgtcatcgaacaaaaacaaagaggatgaagacatagctaaagctattgaattatcgctgcaagaacagaaacagcaacacacagaaacaaaatccttatatccatcttcagaaattcagttaaataataaggttgcacggaaagtgagagctttatatgattttgaagctgttgaggacaatgaactcacctttaaacatggtgaaataattattgttttggatgacagtgatgccaattggtggaaaggagaaaatcacagaggaataggacttttcccatccaattttgtaacaactaatttaaacatagagactgaggcagcggctgtggacaaattgaatgtaattgatgatgatgtggaggaaattaagaaatcagagcctgagcctgtttatatagatgaggataagatggatagagccctgcaggtacttcagagtatagatccaacagattcaaaaccagactcccaagaccttttggatttagaagatatctgccaacagatgggtccaatgatagatgaaaaacttgaagaaattgataggaagcattcagaattgtctgaattgaatgttaaagtcctggaagctctggaactatataacaaattggtgaatgaagcaccagtgtactcagtctattcaaagctccaccctccagcacattacccacctgcatcatctggggttccaatgcagacatatccagttcaatcacatggtggaaactatatgggtcagagcattcaccaagtaactgttgcccaaagctatagcctaggacccgatcaaattggtccactgagatctctgcctccaaatgtgaattcctcagtgacagcacagcctgctcaaacttcatatttaagcactggacaagacactgtttccaatcctacttatatgaaccagaactctaacctacagtcagctactggtacaactgcttacacacagcaaatggggatgtctgtggatatgtcatcttatcagaacactacttccaatttgcctcaactggcaggctttccggtgacagttccagctcatccagttgcacagcagcacacaaattaccatcagcagcctctcctttagaaacaaatcaagcattttcttgaaagccttcataagtgtattattcagtccttgtgataccaacctgaaaatattaaaacttttttccctctcaactcaaaaggaccatgaataaataaagcacaaaaacctctcttattctacaaggccataaaaggttttttttttttttttttttcagtccagtttgtttgaagtcaatcttttcatcagaggcagcttaaagatgctttcagttagttttgtcttactttcagatttctctacataaatctagatactcattaagtagccttatgacaaacagtatgtcaaaagtatctcatacttataaacagtatgagataggaggattaaaatattattttaaagaaaccactgtttccccctaaaatgtcataagagcactgaagaacttgaaatatttttttcagagtttctcacacactttaaaagtctaacttttttgtgtgtaagcatttagcttgccagcatatttctttttggctccttaaattgcggttgtgtttgcagtattgtcacttttgctctcactgttatgttgaataataattagcatataattgtctacagaagcaagagcaatctggaaggaacaaaaatgttttctgtgattaacagtgaagaccttgtaaatgcagatgtgtgataaagcatttagtcagtcccccaaacagtcatgccaactgtgaaggaatgtcccacaaaacatttccattccctgaggacttttcaagtgattttggctattctctaatgaagatatggtccatttgtttttcttcctgcaatgtggtgtgcagagatgctgcatatcctttttatgggattgcgtgtgaatttgaaccatgagacattcctaataatttgttgtgagatataccaagcatggatgataagtgtgtttttagtggtgtgttgtttttttaaagaggtgattcaagtaccgttgctaagctgtcaacataccaagctgttgaaaaaattgaccatttctttcagaagtaattctcagcctgtggaataatagcaggtgaagacttcatagaaggcgacagattgatagggaggctattgaagcagtttttctgaagcctgcattttgagttagtttatagtgctaatagattctatataactgtgagagtttggtagtaaaccagtagggattgttttctctcctaaaaatttgcacactacttcattgtctaccaactttttacatattggaaaatagaaattgcaaatacatacatgtatggaaacatattcagattgggaaaaacaatggacattagtttttaaaaagttacgtggaagcaagatttctatatttgtttttttaaaggaagcagtcattctttctactaaatccatttcaagctagttctctgaaaattttgccatttatctacagaaatttgattataaatatgttcctttttcaaagaaactttattctagaacaaaatagtctatatggtacttgatctacatttaagtggaaaaattagcagtatttgaaagctcagtttatgtcattgtcttaacttcagatacaaataactgaacagaaagttttaacctttaatatctcatgttctgttttttattcagtattttcctttatgttaattcaattatatacttctgaatggcaccttactttttggaaacaaatcttctgttatttacaaaataataatttttaaaaaacatttaaaaaaaatccaaagctgctctcgataatagtcaacatttgcatatatatggaatttcttactttttttctcccaaactctatttaataaacttattttaatgtttgtgtatttcatgtataattgtgatctcaattataaaagtttaattcagcatgtctttgagccaatataattactgcacacccactaaattgggatcagccattataaataatgtagttttagaataataaaacatgacacatatatatatatataaatatatagtatatattggcacatcggtgaaagtttatatgtgcagaagtttttttctttctcaagttaaaaattattttttgccatatgtaattttgtgttgcaggctgtcgagagataaaaatgattttaaatctgtgtactgatgattctttcggtgttaagaaacacagggttgtgtacttccctttttatgggcttatggattctatttatattaagacctgtttataattgttttctgccaaagggaattgtctaacttcagatttctacattgggttcatacttactgttttatatcagaaataaaaaaatagcttctgctttttcatatgaaatcttggtacatcagaaagaattcctgaaaatttataatagaatgaattttattaatgcagaaaaataccccagggtgttaaaatatatgaagtgtgggatatattcttatagtttgtaaaatgtagtcaaccaatactgtcttctaatttggtaatttatttataaaattacttaaacattaggtaattatatttgttaggatttgaaattatttgtagttaaattgtcatgctgtttgaaataattgatacttgtctacgtaatacattttactgtatgttttgaagatggttataatttcactttcaaaatttaaaaaatcaattttaaatgttttaaaaacatatagcttagggattttttttaaaaaggttttcttagtaaaaacataaatttaaaagcccctgagttctaggagagggcttattgaattgctataagaaagctggagttactttgataagtaataaattataaatagcactgatctataatgctttatttctatcggaaggtactttttcttctttcatcatcagttttagccagttagtaaatgggaatactcagttttagggatttgatttttgtttggtttaattttctttcaaaaattcaaaagtatatttctaaaagttttccccagaggccagatacagtggctcatgcctataatcccagcactttgggagcctgagataggagtattgcttgaggctaggagtttgagaccaacctggcaacatggcaagaccctatctctacaaaaattttaaaacttagccaggtgtggtagtgcacctgtagtcccagctagtcagtaggctgaggtgggagtattgcttgaggctgcagtgaggtgtgatcacgccactgcactccggcctgacagaatgagatcctgtctcaaaaagaaaattccccagaagaagaattctaattttatcaagctgaattaaagtttgagagtcttttttttaaaatcttactgtgtcaaaagaggcattatgttgcttgtgtgatatagtgaatagtgtccctccaaatttcatgtacacctggaatgtcacaatgtgacttaacagtagccacccctcacccccgcccttatctgtggtggatacatttgcaagatccccagtggatgcctgaaaccgcagatagtactgaaccttatatatactgtttgttttcctatgcatacatatccctatgataaagtttatgaatttggcacttaacagcagaactaataagatgaaagagttgtaacaatatactctaataaaagttatttaaaatgtatgtattgttatctgtaattttgcatttaatatttttggaccatggtttaatctgggtaactgaaaacacagaaagtgaaatcatgggccgggc

SEQ ID NO: 322439 - DNA, 4401 bp, Homo sapiens
cagcctgctgaggtctcataaaaatgaaaaaaaatttgaagaaattgataggaagcattcagaattgtctgaattgaatgttaaagtcctggaagctctggaactatataacaaattggtgaatgaagcaccagtgtactcagtctattcaaagctccaccctccagcacattacccacctgcatcatctggggttccaatgcagacatatccagttcaatcacatggtggaaactatatgggtcagagcattcaccaagtaactgttgcccaaagctatagcctaggacccgatcaaattggtccactgagatctctgcctccaaatgtgaattcctcagtgacagcacagcctgctcaaacttcatatttaagcactggacaagacactgtttccaatcctacttatatgaaccagaactctaacctacagtcagctactggtacaactgcttacacacagcaaatggggatgtctgtggatatgtcatcttatcagaacactacttccaatttgcctcaactggcaggctttccggtgacagttccagctcatccagttgcacagcagcacacaaattaccatcagcagcctctcctttagaaacaaatcaagcattttcttgaaagccttcataagtgtattattcagtccttgtgataccaacctgaaaatattaaaacttttttccctctcaactcaaaaggaccatgaataaataaagcacaaaaacctctcttattctacaaggccataaaaggttttttttttttttttttttcagtccagtttgtttgaagtcaatcttttcatcagaggcagcttaaagatgctttcagttagttttgtcttactttcagatttctctacataaatctagatactcattaagtagccttatgacaaacagtatgtcaaaagtatctcatacttataaacagtatgagataggaggattaaaatattattttaaagaaaccactgtttccccctaaaatgtcataagagcactgaagaacttgaaatatttttttcagagtttctcacacactttaaaagtctaacttttttgtgtgtaagcatttagcttgccagcatatttctttttggctccttaaattgcggttgtgtttgcagtattgtcacttttgctctcactgttatgttgaataataattagcatataattgtctacagaagcaagagcaatctggaaggaacaaaaatgttttctgtgattaacagtgaagaccttgtaaatgcagatgtgtgataaagcatttagtcagtcccccaaacagtcatgccaactgtgaaggaatgtcccacaaaacatttccattccctgaggaaaaacattttctttcctacatgtatctctggtatttagaattgtcactaataaccttttcaagtgattttggctattctctaatgaagatatggtccatttgtttttcttcctgcaatgtggtgtgcagagatgctgcatatcctttttatgggattgcgtgtgaatttgaaccatgagacattcctaataatttgttgtgagatataccaagcatggatgataagtgtgtttttagtggtgtgttgtttttttaaagaggtgattcaagtaccgttgctaagctgtcaacataccaagctgttgaaaaaattgaccatttctttcagaagtaattctcagcctgtggaataatagcaggtgaagacttcatagaaggcgacagattgatagggaggctattgaagcagtttttctgaagcctgcattttgagttagtttatagtgctaatagattctatataactgtgagagtttggtagtaaaccagtagggattgttttctctcctaaaaatttgcacactacttcattgtctaccaactttttacatattggaaaatagaaattgcaaatacatacatgtatggaaacatattcagattgggaaaaacaatggacattagtttttaaaaagttacgtggaagcaagatttctatatttgtttttttaaaggaagcagtcattctttctactaaatccatttcaagctagttctctgaaaattttgccatttatctacagaaatttgattataaatatgttcctttttcaaagaaactttattctagaacaaaatagtctatatggtacttgatctacatttaagtggaaaaattagcagtatttgaaagctcagtttatgtcattgtcttaacttcagatacaaataactgaacagaaagttttaacctttaatatctcatgttctgttttttattcagtattttcctttatgttaattcaattatatacttctgaatggcaccttactttttggaaacaaatcttctgttatttacaaaataataatttttaaaaaacatttaaaaaaaatccaaagctgctctcgataatagtcaacatttgcatatatatggaatttcttactttttttctcccaaactctatttaataaacttattttaatgtttgtgtatttcatgtataattgtgatctcaattataaaagtttaattcagcatgtctttgagccaatataattactgcacacccactaaattgggatcagccattataaataatgtagttttagaataataaaacatgacacatatatatatatataaatatatagtatatattggcacatcggtgaaagtttatatgtgcagaagtttttttctttctcaagttaaaaattattttttgccatatgtaattttgtgttgcaggctgtcgagagataaaaatgattttaaatctgtgtactgatgattctttcggtgttaagaaacacagggttgtgtacttccctttttatgggcttatggattctatttatattaagacctgtttataattgttttctgccaaagggaattgtctaacttcagatttctacattgggttcatacttactgttttatatcagaaataaaaaaatagcttctgctttttcatatgaaatcttggtacatcagaaagaattcctgaaaatttataatagaatgaattttattaatgcagaaaaataccccagggtgttaaaatatatgaagtgtgggatatattcttatagtttgtaaaatgtagtcaaccaatactgtcttctaatttggtaatttatttataaaattacttaaacattaggtaattatatttgttaggatttgaaattatttgtagttaaattgtcatgctgtttgaaataattgatacttgtctacgtaatacattttactgtatgttttgaagatggttataatttcactttcaaaatttaaaaaatcaattttaaatgttttaaaaacatatagcttagggattttttttaaaaaggttttcttagtaaaaacataaatttaaaagcccctgagttctaggagagggcttattgaattgctataagaaagctggagttactttgataagtaataaattataaatagcactgatctataatgctttatttctatcggaaggtactttttcttctttcatcatcagttttagccagttagtaaatgggaatactcagttttagggatttgatttttgtttggtttaattttctttcaaaaattcaaaagtatatttctaaaagttttccccagaggccagatacagtggctcatgcctataatcccagcactttgggagcctgagataggagtattgcttgaggctaggagtttgagaccaacctggcaacatggcaagaccctatctctacaaaaattttaaaacttagccaggtgtggtagtgcacctgtagtcccagctagtcagtaggctgaggtgggagtattgcttgaggctgcagtgaggtgtgatcacgccactgcactccggcctgacagaatgagatcctgtctcaaaaagaaaattccccagaagaagaattctaattttatcaagctgaattaaagtttgagagtcttttttttaaaatcttactgtgtcaaaagaggcattatgttgcttgtgtgatatagtgaatagtgtccctccaaatttcatgtacacctggaatgtcacaatgtgacttaacagtagccacccctcacccccgcccttatctgtggtggatacatttgcaagatccccagtggatgcctgaaaccgcagatagtactgaaccttatatatactgtttgttttcctatgcatacatatccctatgataaagtttatgaatttggcacttaacagcagaactaataagatgaaagagttgtaacaatatactctaataaaagttatttaaaatgtatgtattgttatctgtaattttgcatttaatatttttggaccatggtttaatctgggtaactgaaaacacagaaagtgaaatcatgggccgggc

SEQ ID NO: 322440 - DNA, 4421 bp, Homo sapiens
gtttgagaccatcctgggcaacatagcaagacccagtctctacaacaaaaatttttttttaattagttgggactaatttaaattttttttaaatagtcccagctactcaggaggcttaaggcaggaggattgcttgagcccaggagtttgagaatgcagtgagctatgatctgcaccccagcctgggcaacagagcaagatcccatctcaaaaataagaagaagaaaatttgattaacagtattcaatggctggaatgattaaattgtaatcagaacagcagagctacgtaagcttaaaaagaagatggaaaaggcatttttgtcatgatgattgatctctaaccttatatattgcaaagtaaatatggttttctttttaaaattttgtttgtagcactggacaagacactgtttccaatcctacttatatgaaccagaactctaacctacagtcagctactggtacaactgcttacacacagcaaatggggatgtctgtggatatgtcatcttatcagaacactacttccaatttgcctcaactggcaggctttccggtgacagttccagctcatccagttgcacagcagcacacaaattaccatcagcagcctctcctttagaaacaaatcaagcattttcttgaaagccttcataagtgtattattcagtccttgtgataccaacctgaaaatattaaaacttttttccctctcaactcaaaaggaccatgaataaataaagcacaaaaacctctcttattctacaaggccataaaaggttttttttttttttttttttcagtccagtttgtttgaagtcaatcttttcatcagaggcagcttaaagatgctttcagttagttttgtcttactttcagatttctctacataaatctagatactcattaagtagccttatgacaaacagtatgtcaaaagtatctcatacttataaacagtatgagataggaggattaaaatattattttaaagaaaccactgtttccccctaaaatgtcataagagcactgaagaacttgaaatatttttttcagagtttctcacacactttaaaagtctaacttttttgtgtgtaagcatttagcttgccagcatatttctttttggctccttaaattgcggttgtgtttgcagtattgtcacttttgctctcactgttatgttgaataataattagcatataattgtctacagaagcaagagcaatctggaaggaacaaaaatgttttctgtgattaacagtgaagaccttgtaaatgcagatgtgtgataaagcatttagtcagtcccccaaacagtcatgccaactgtgaaggaatgtcccacaaaacatttccattccctgaggaaaaacattttctttcctacatgtatctctggtatttagaattgtcactaataaccttttcaagtgattttggctattctctaatgaagatatggtccatttgtttttcttcctgcaatgtggtgtgcagagatgctgcatatcctttttatgggattgcgtgtgaatttgaaccatgagacattcctaataatttgttgtgagatataccaagcatggatgataagtgtgtttttagtggtgtgttgtttttttaaagaggtgattcaagtaccgttgctaagctgtcaacataccaagctgttgaaaaaattgaccatttctttcagaagtaattctcagcctgtggaataatagcaggtgaagacttcatagaaggcgacagattgatagggaggctattgaagcagtttttctgaagcctgcattttgagttagtttatagtgctaatagattctatataactgtgagagtttggtagtaaaccagtagggattgttttctctcctaaaaatttgcacactacttcattgtctaccaactttttacatattggaaaatagaaattgcaaatacatacatgtatggaaacatattcagattgggaaaaacaatggacattagtttttaaaaagttacgtggaagcaagatttctatatttgtttttttaaaggaagcagtcattctttctactaaatccatttcaagctagttctctgaaaattttgccatttatctacagaaatttgattataaatatgttcctttttcaaagaaactttattctagaacaaaatagtctatatggtacttgatctacatttaagtggaaaaattagcagtatttgaaagctcagtttatgtcattgtcttaacttcagatacaaataactgaacagaaagttttaacctttaatatctcatgttctgttttttattcagtattttcctttatgttaattcaattatatacttctgaatggcaccttactttttggaaacaaatcttctgttatttacaaaataataatttttaaaaaacatttaaaaaaaatccaaagctgctctcgataatagtcaacatttgcatatatatggaatttcttactttttttctcccaaactctatttaataaacttattttaatgtttgtgtatttcatgtataattgtgatctcaattataaaagtttaattcagcatgtctttgagccaatataattactgcacacccactaaattgggatcagccattataaataatgtagttttagaataataaaacatgacacatatatatatatataaatatatagtatatattggcacatcggtgaaagtttatatgtgcagaagtttttttctttctcaagttaaaaattattttttgccatatgtaattttgtgttgcaggctgtcgagagataaaaatgattttaaatctgtgtactgatgattctttcggtgttaagaaacacagggttgtgtacttccctttttatgggcttatggattctatttatattaagacctgtttataattgttttctgccaaagggaattgtctaacttcagatttctacattgggttcatacttactgttttatatcagaaataaaaaaatagcttctgctttttcatatgaaatcttggtacatcagaaagaattcctgaaaatttataatagaatgaattttattaatgcagaaaaataccccagggtgttaaaatatatgaagtgtgggatatattcttatagtttgtaaaatgtagtcaaccaatactgtcttctaatttggtaatttatttataaaattacttaaacattaggtaattatatttgttaggatttgaaattatttgtagttaaattgtcatgctgtttgaaataattgatacttgtctacgtaatacattttactgtatgttttgaagatggttataatttcactttcaaaatttaaaaaatcaattttaaatgttttaaaaacatatagcttagggattttttttaaaaaggttttcttagtaaaaacataaatttaaaagcccctgagttctaggagagggcttattgaattgctataagaaagctggagttactttgataagtaataaattataaatagcactgatctataatgctttatttctatcggaaggtactttttcttctttcatcatcagttttagccagttagtaaatgggaatactcagttttagggatttgatttttgtttggtttaattttctttcaaaaattcaaaagtatatttctaaaagttttccccagaggccagatacagtggctcatgcctataatcccagcactttgggagcctgagataggagtattgcttgaggctaggagtttgagaccaacctggcaacatggcaagaccctatctctacaaaaattttaaaacttagccaggtgtggtagtgcacctgtagtcccagctagtcagtaggctgaggtgggagtattgcttgaggctgcagtgaggtgtgatcacgccactgcactccggcctgacagaatgagatcctgtctcaaaaagaaaattccccagaagaagaattctaattttatcaagctgaattaaagtttgagagtcttttttttaaaatcttactgtgtcaaaagaggcattatgttgcttgtgtgatatagtgaatagtgtccctccaaatttcatgtacacctggaatgtcacaatgtgacttaacagtagccacccctcacccccgcccttatctgtggtggatacatttgcaagatccccagtggatgcctgaaaccgcagatagtactgaaccttatatatactgtttgttttcctatgcatacatatccctatgataaagtttatgaatttggcacttaacagcagaactaataagatgaaagagttgtaacaatatactctaataaaagttatttaaaatgtatgtattgttatctgtaattttgcatttaatatttttggaccatggtttaatctgggtaactgaaaacacagaaagtgaaatcatgggccgggc

SEQ ID NO: 322441 - DNA, 4107 bp, Homo sapiens
ggctccgaaggtccccggcttcgtggctagccggggtcctagcgctggaaaggtggccgtagcggccgcctgacccctacaaaagtctgggacaggggcagcgacaaaggccttgggaggacgcccatggtcggagggatctcgccccgggagaaaagttgggacaggagcgcgggatcgaagggtggactccgagccggcctgtcagcgaagagcgttgcaggtgcggtggcggaagtgcagggacggaggccgaagcggagcggtctagggagccgcggccgcgggtcacccggcgggtagcagttgctgagtgtcagctagacagcagcgactagggctcgggcgccggcgagatgcctttgttcaccgccaaccccttcgagcaagacgtggaaaaagccacgaatgagtacaacactacagaagattggagtcttattatggacatatgtgacaaagttggaagtactcctaatggagcgaaagattgcctaaaagccataatgaaaagggtaaatcataaggttccacatgttgctctgcaagcactaactcttcttggggcttgtgtggcaaactgtggaaagatatttcatttagaagtatgttcccgtgatgtcaaaagtatctcatacttataaacagtatgagataggaggattaaaatattattttaaagaaaccactgtttccccctaaaatgtcataagagcactgaagaacttgaaatatttttttcagagtttctcacacactttaaaagtctaacttttttgtgtgtaagcatttagcttgccagcatatttctttttggctccttaaattgcggttgtgtttgcagtattgtcacttttgctctcactgttatgttgaataataattagcatataattgtctacagaagcaagagcaatctggaaggaacaaaaatgttttctgtgattaacagtgaagaccttgtaaatgcagatgtgtgataaagcatttagtcagtcccccaaacagtcatgccaactgtgaaggaatgtcccacaaaacatttccattccctgaggaaaaacattttctttcctacatgtatctctggtatttagaattgtcactaataaccttttcaagtgattttggctattctctaatgaagatatggtccatttgtttttcttcctgcaatgtggtgtgcagagatgctgcatatcctttttatgggattgcgtgtgaatttgaaccatgagacattcctaataatttgttgtgagatataccaagcatggatgataagtgtgtttttagtggtgtgttgtttttttaaagaggtgattcaagtaccgttgctaagctgtcaacataccaagctgttgaaaaaattgaccatttctttcagaagtaattctcagcctgtggaataatagcaggtgaagacttcatagaaggcgacagattgatagggaggctattgaagcagtttttctgaagcctgcattttgagttagtttatagtgctaatagattctatataactgtgagagtttggtagtaaaccagtagggattgttttctctcctaaaaatttgcacactacttcattgtctaccaactttttacatattggaaaatagaaattgcaaatacatacatgtatggaaacatattcagattgggaaaaacaatggacattagtttttaaaaagttacgtggaagcaagatttctatatttgtttttttaaaggaagcagtcattctttctactaaatccatttcaagctagttctctgaaaattttgccatttatctacagaaatttgattataaatatgttcctttttcaaagaaactttattctagaacaaaatagtctatatggtacttgatctacatttaagtggaaaaattagcagtatttgaaagctcagtttatgtcattgtcttaacttcagatacaaataactgaacagaaagttttaacctttaatatctcatgttctgttttttattcagtattttcctttatgttaattcaattatatacttctgaatggcaccttactttttggaaacaaatcttctgttatttacaaaataataatttttaaaaaacatttaaaaaaaatccaaagctgctctcgataatagtcaacatttgcatatatatggaatttcttactttttttctcccaaactctatttaataaacttattttaatgtttgtgtatttcatgtataattgtgatctcaattataaaagtttaattcagcatgtctttgagccaatataattactgcacacccactaaattgggatcagccattataaataatgtagttttagaataataaaacatgacacatatatatatatataaatatatagtatatattggcacatcggtgaaagtttatatgtgcagaagtttttttctttctcaagttaaaaattattttttgccatatgtaattttgtgttgcaggctgtcgagagataaaaatgattttaaatctgtgtactgatgattctttcggtgttaagaaacacagggttgtgtacttccctttttatgggcttatggattctatttatattaagacctgtttataattgttttctgccaaagggaattgtctaacttcagatttctacattgggttcatacttactgttttatatcagaaataaaaaaatagcttctgctttttcatatgaaatcttggtacatcagaaagaattcctgaaaatttataatagaatgaattttattaatgcagaaaaataccccagggtgttaaaatatatgaagtgtgggatatattcttatagtttgtaaaatgtagtcaaccaatactgtcttctaatttggtaatttatttataaaattacttaaacattaggtaattatatttgttaggatttgaaattatttgtagttaaattgtcatgctgtttgaaataattgatacttgtctacgtaatacattttactgtatgttttgaagatggttataatttcactttcaaaatttaaaaaatcaattttaaatgttttaaaaacatatagcttagggattttttttaaaaaggttttcttagtaaaaacataaatttaaaagcccctgagttctaggagagggcttattgaattgctataagaaagctggagttactttgataagtaataaattataaatagcactgatctataatgctttatttctatcggaaggtactttttcttctttcatcatcagttttagccagttagtaaatgggaatactcagttttagggatttgatttttgtttggtttaattttctttcaaaaattcaaaagtatatttctaaaagttttccccagaggccagatacagtggctcatgcctataatcccagcactttgggagcctgagataggagtattgcttgaggctaggagtttgagaccaacctggcaacatggcaagaccctatctctacaaaaattttaaaacttagccaggtgtggtagtgcacctgtagtcccagctagtcagtaggctgaggtgggagtattgcttgaggctgcagtgaggtgtgatcacgccactgcactccggcctgacagaatgagatcctgtctcaaaaagaaaattccccagaagaagaattctaattttatcaagctgaattaaagtttgagagtcttttttttaaaatcttactgtgtcaaaagaggcattatgttgcttgtgtgatatagtgaatagtgtccctccaaatttcatgtacacctggaatgtcacaatgtgacttaacagtagccacccctcacccccgcccttatctgtggtggatacatttgcaagatccccagtggatgcctgaaaccgcagatagtactgaaccttatatatactgtttgttttcctatgcatacatatccctatgataaagtttatgaatttggcacttaacagcagaactaataagatgaaagagttgtaacaatatactctaataaaagttatttaaaatgtatgtattgttatctgtaattttgcatttaatatttttggaccatggtttaatctgggtaactgaaaacacagaaagtgaaatcatgggccgggc

SEQ ID NO: 322442 - DNA, 826 bp, Homo sapiens
gcaggtgcggtggcggaagtgcagggacggaggccgaagcggagcggtctagggagccgcggccgcgggtcacccggcgggtagcagttgctgagtgtcagctagacagcagcgactagggctcgggcgccggcgagatgcctttgttcaccgccaaccccttcgagcaagacgtgggtgagtgctgtgcccggtcctggactgctgtgtgcctggccctggactgctgtttgtccggctagaaagtgggcggtagcgactccggggactaggaagcaaagcgaagggaggggaggggcggtgccgcccgctccttcgacgttgggatttttctggggcaacctcggcgcgtcgctagcggtctggggagtgcttcctgccgcctgagtttggggaccctcaaagggccgttctccttgccaagcgtaggatttgggaagagcctagggctcgctggagactggactgattaagtagttgtggagttggtgattaaaaacttcctgctcgttcgacagctggttacctccgtctttgccccatcgttttctgaagatgatgcagcagtggagaccctgctgtctagagaagcccaacactagacacttgacacctagacaaccgcattgaataggaagaacttacttccccattatttatattactcatgcattcaatccctgatagggtagctttaagatttattacaattgtaaaggtgttgctcttcatccccggattgcaaagattgcgcgggtgctaggagatgttcggttttagagtatgaaaaggaaatctccagtctcaaaacactccagaacaacaa

SEQ ID NO: 322443 - DNA, 1614 bp, Homo sapiens
ggctccgaaggtccccggcttcgtggctagccggggtcctagcgctggaaaggtggccgtagcggccgcctgacccctacaaaagtctgggacaggggcagcgacaaaggccttgggaggacgcccatggtcggagggatctcgccccgggagaaaagttgggacaggagcgcgggatcgaagggtggactccgagccggcctgtcagcgaagagcgttgcaggtgcggtggcggaagtgcagggacggaggccgaagcggagcggtctagggagccgcggccgcgggtcacccggcgggtagcagttgctgagtgtcagctagacagcagcgactagggctcgggcgccggcgagatgcctttgttcaccgccaaccccttcgagcaagacgtggaaaaagccacgaatgagtacaacactacagaagattggagtcttattatggacatatgtgacaaagttggaagtactcctaatggagcgaaagattgcctaaaagccataatgaaaagggtaaatcataaggttccacatgttgctctgcaagcactaactcttcttggggcttgtgtggcaaactgtggaaagatatttcatttagaagtatgttcccgtgattttgcaacagaagtacgtgctgtgattaaaaataaggcacatcctaaagtatgtgaaaaactgaaatctttaatggtggagtggtcagaagaatttcagaaggaccctcagtttagtctgatatctgcaactattaaatctatgaaagaagaaggaattacttttcctccagcaggttctcagactgtctcagctgctgccaagaatggtacgtcatcgaacaaaaacaaagaggatgaagacatagctaaagctattgaattatcgctgcaagaacagaaacagcaacacacagaaacaaaatccttatatccatcttcagaaattcagttaaataataaggttgcacggaaagtgagagctttatatgattttgaagctgttgaggacaatgaactcacctttaaacatggtgaaataattattgttttggatgacagtgatgccaattggtggaaaggagaaaatcacagaggaataggacttttcccatccaattttgtaacaactaatttaaacatagagactgaggcagcggctgtggacaaattgaatgtaattgatgatgatgtggaggaaattaagaaatcagagcctgagcctgtttatatagatgaggataagatggatagagccctgcaggtacttcagagtatagatccaacagattcaaaaccagactcccaagaccttttggatttagaagatatctgccaacagatgggtccaatgatagatgaaaaacttgaagaaattgataggtgagatttttcgtgcaaggaataaaaagtatagttttggggggttcacttgtgttttggcaaacagtaaagtagggaaagtttttgtggaactgtacaattcatggaaattgtttttcagtttcccaggcttttaacaaatttatagcaaggtggtgctttttatcttgtttttgtttttctaaaaaacaagctctgacaagttttattaaataaaaattttgcatggctta

SEQ ID NO: 322444 - DNA, 5710 bp, Homo sapiens
ggctccgaaggtccccggcttcgtggctagccggggtcctagcgctggaaaggtggccgtagcggccgcctgacccctacaaaagtctgggacaggggcagcgacaaaggccttgggaggacgcccatggtcggagggatctcgccccgggagaaaagttgggacaggagcgcgggatcgaagggtggactccgagccggcctgtcagcgaagagcgttgcaggtgcggtggcggaagtgcagggacggaggccgaagcggagcggtctagggagccgcggccgcgggtcacccggcgggtagcagttgctgagtgtcagctagacagcagcgactagggctcgggcgccggcgagatgcctttgttcaccgccaaccccttcgagcaagacgtggaaaaagccacgaatgagtacaacactacagaagattggagtcttattatggacatatgtgacaaagttggaagtactcctaatggagcgaaagattgcctaaaagccataatgaaaagggtaaatcataaggttccacatgttgctctgcaagcactaactcttcttggggcttgtgtggcaaactgtggaaagatatttcatttagaagtatgttcccgtgattttgcaacagaagtacgtgctgtgattaaaaataaggcacatcctaaagtatgtgaaaaactgaaatctttaatggtggagtggtcagaagaatttcagaaggaccctcagtttagtctgatatctgcaactattaaatctatgaaagaagaaggaattacttttcctccagcaggttctcagactgtctcagctgctgccaagaatggtacgtcatcgaacaaaaacaaagaggatgaagacatagctaaagctattgaattatcgctgcaagaacagaaacagcaacacacagaaacaaaatccttatatccatcttcagaaattcagttaaataataaggttgcacggaaagtgagagctttatatgattttgaagctgttgaggacaatgaactcacctttaaacatggtgaaataattattgttttggatgacagtgatgccaattggtggaaaggagaaaatcacagaggaataggacttttcccatccaattttgtaacaactaatttaaacatagagactgaggcagcggctgtggacaaattgaatgtaattgatgatgatgtggaggaaattaagaaatcagagcctgagcctgtttatatagatgaggataagatggatagagccctgcaggtacttcagagtatagatccaacagattcaaaaccagactcccaagaccttttggatttagaagatatctgccaacagatgggtccaatgatagatgaaaaacttgaagaaattgataggaagcattcagaattgtctgaattgaatgttaaagtcctggaagctctggaactatataacaaattggtgaatgaagcaccagtgtactcagtctattcaaagctccaccctccagcacattacccacctgcatcatctggggttccaatgcagacatatccagttcaatcacatggtggaaactatatgggtcagagcattcaccaagtaactgttgcccaaagctatagcctaggacccgatcaaattggtccactgagatctctgcctccaaatgtgaattcctcagtgacagcacagcctgctcaaacttcatatttaagcactggacaagacactgtttccaatcctacttatatgaaccagaactctaacctacagtcagctactggtacaactgcttacacacagcaaatggggatgtctgtggatatgtcatcttatcagaacactacttccaatttgcctcaactggcaggctttccggtgacagttccagctcatccagttgcacagcagcacacaaattaccatcagcagcctctcctttagaaacaaatcaagcattttcttgaaagccttcataagtgtattattcagtccttgtgataccaacctgaaaatattaaaacttttttccctctcaactcaaaaggaccatgaataaataaagcacaaaaacctctcttattctacaaggccataaaaggttttttttttttttttttttcagtccagtttgtttgaagtcaatcttttcatcagaggcagcttaaagatgctttcagttagttttgtcttactttcagatttctctacataaatctagatactcattaatgtcaaaagtatctcatacttataaacagtatgagataggaggattaaaatattattttaaagaaaccactgtttccccctaaaatgtcataagagcactgaagaacttgaaatatttttttcagagtttctcacacactttaaaagtctaacttttttgtgtgtaagcatttagcttgccagcatatttctttttggctccttaaattgcggttgtgtttgcagtattgtcacttttgctctcactgttatgttgaataataattagcatataattgtctacagaagcaagagcaatctggaaggaacaaaaatgttttctgtgattaacagtgaagaccttgtaaatgcagatgtgtgataaagcatttagtcagtcccccaaacagtcatgccaactgtgaaggaatgtcccacaaaacatttccattccctgaggaaaaacattttctttcctacatgtatctctggtatttagaattgtcactaataaccttttcaagtgattttggctattctctaatgaagatatggtccatttgtttttcttcctgcaatgtggtgtgcagagatgctgcatatcctttttatgggattgcgtgtgaatttgaaccatgagacattcctaataatttgttgtgagatataccaagcatggatgataagtgtgtttttagtggtgtgttgtttttttaaagaggtgattcaagtaccgttgctaagctgtcaacataccaagctgttgaaaaaattgaccatttctttcagaagtaattctcagcctgtggaataatagcaggtgaagacttcatagaaggcgacagattgatagggaggctattgaagcagtttttctgaagcctgcattttgagttagtttatagtgctaatagattctatataactgtgagagtttggtagtaaaccagtagggattgttttctctcctaaaaatttgcacactacttcattgtctaccaactttttacatattggaaaatagaaattgcaaatacatacatgtatggaaacatattcagattgggaaaaacaatggacattagtttttaaaaagttacgtggaagcaagatttctatatttgtttttttaaaggaagcagtcattctttctactaaatccatttcaagctagttctctgaaaattttgccatttatctacagaaatttgattataaatatgttcctttttcaaagaaactttattctagaacaaaatagtctatatggtacttgatctacatttaagtggaaaaattagcagtatttgaaagctcagtttatgtcattgtcttaacttcagatacaaataactgaacagaaagttttaacctttaatatctcatgttctgttttttattcagtattttcctttatgttaattcaattatatacttctgaatggcaccttactttttggaaacaaatcttctgttatttacaaaataataatttttaaaaaacatttaaaaaaaatccaaagctgctctcgataatagtcaacatttgcatatatatggaatttcttactttttttctcccaaactctatttaataaacttattttaatgtttgtgtatttcatgtataattgtgatctcaattataaaagtttaattcagcatgtctttgagccaatataattactgcacacccactaaattgggatcagccattataaataatgtagttttagaataataaaacatgacacatatatatatatataaatatatagtatatattggcacatcggtgaaagtttatatgtgcagaagtttttttctttctcaagttaaaaattattttttgccatatgtaattttgtgttgcaggctgtcgagagataaaaatgattttaaatctgtgtactgatgattctttcggtgttaagaaacacagggttgtgtacttccctttttatgggcttatggattctatttatattaagacctgtttataattgttttctgccaaagggaattgtctaacttcagatttctacattgggttcatacttactgttttatatcagaaataaaaaaatagcttctgctttttcatatgaaatcttggtacatcagaaagaattcctgaaaatttataatagaatgaattttattaatgcagaaaaataccccagggtgttaaaatatatgaagtgtgggatatattcttatagtttgtaaaatgtagtcaaccaatactgtcttctaatttggtaatttatttataaaattacttaaacattaggtaattatatttgttaggatttgaaattatttgtagttaaattgtcatgctgtttgaaataattgatacttgtctacgtaatacattttactgtatgttttgaagatggttataatttcactttcaaaatttaaaaaatcaattttaaatgttttaaaaacatatagcttagggattttttttaaaaaggttttcttagtaaaaacataaatttaaaagcccctgagttctaggagagggcttattgaattgctataagaaagctggagttactttgataagtaataaattataaatagcactgatctataatgctttatttctatcggaaggtactttttcttctttcatcatcagttttagccagttagtaaatgggaatactcagttttagggatttgatttttgtttggtttaattttctttcaaaaattcaaaagtatatttctaaaagttttccccagaggccagatacagtggctcatgcctataatcccagcactttgggagcctgagataggagtattgcttgaggctaggagtttgagaccaacctggcaacatggcaagaccctatctctacaaaaattttaaaacttagccaggtgtggtagtgcacctgtagtcccagctagtcagtaggctgaggtgggagtattgcttgaggctgcagtgaggtgtgatcacgccactgcactccggcctgacagaatgagatcctgtctcaaaaagaaaattccccagaagaagaattctaattttatcaagctgaattaaagtttgagagtcttttttttaaaatcttactgtgtcaaaagaggcattatgttgcttgtgtgatatagtgaatagtgtccctccaaatttcatgtacacctggaatgtcacaatgtgacttaacagtagccacccctcacccccgcccttatctgtggtggatacatttgcaagatccccagtggatgcctgaaaccgcagatagtactgaaccttatatatactgtttgttttcctatgcatacatatccctatgataaagtttatgaatttggcacttaacagcagaactaataagatgaaagagttgtaacaatatactctaataaaagttatttaaaatgtatgtattgttatctgtaattttgcatttaatatttttggaccatggtttaatctgggtaactgaaaacacagaaagtgaaatcatgggccgggc

SEQ ID NO: 322445 - DNA, 5760 bp, Homo sapiens
ggctccgaaggtccccggcttcgtggctagccggggtcctagcgctggaaaggtggccgtagcggccgcctgacccctacaaaagtctgggacaggggcagcgacaaaggccttgggaggacgcccatggtcggagggatctcgccccgggagaaaagttgggacaggagcgcgggatcgaagggtggactccgagccggcctgtcagcgaagagcgttgcaggtgcggtggcggaagtgcagggacggaggccgaagcggagcggtctagggagccgcggccgcgggtcacccggcgggtagcagttgctgagtgtcagctagacagcagcgactagggctcgggcgccggcgagatgcctttgttcaccgccaaccccttcgagcaagacgtggaaaaagccacgaatgagtacaacactacagaagattggagtcttattatggacatatgtgacaaagttggaagtactcctaatggagcgaaagattgcctaaaagccataatgaaaagggtaaatcataaggttccacatgttgctctgcaagcactaactcttcttggggcttgtgtggcaaactgtggaaagatatttcatttagaagtatgttcccgtgattttgcaacagaagtacgtgctgtgattaaaaataaggcacatcctaaagtatgtgaaaaactgaaatctttaatggtggagtggtcagaagaatttcagaaggaccctcagtttagtctgatatctgcaactattaaatctatgaaagaagaaggaattacttttcctccagcaggttctcagggctgggcgcggtggctcacgcctgtaatcccagcactttgggaggccgaagtgggcagatcatgaggtcaagagatcgagaccagcctgaccaacaagctattgaattatcgctgcaagaacagaaacagcaacacacagaaacaaaatccttatatccatcttcagaaattcagttaaataataaggttgcacggaaagtgagagctttatatgattttgaagctgttgaggacaatgaactcacctttaaacatggtgaaataattattgttttggatgacagtgatgccaattggtggaaaggagaaaatcacagaggaataggacttttcccatccaattttgtaacaactaatttaaacatagagactgaggcagcggctgtggacaaattgaatgtaattgatgatgatgtggaggaaattaagaaatcagagcctgagcctgtttatatagatgaggataagatggatagagccctgcaggtacttcagagtatagatccaacagattcaaaaccagactcccaagaccttttggatttagaagatatctgccaacagatgggtccaatgatagatgaaaaacttgaagaaattgataggaagcattcagaattgtctgaattgaatgttaaagtcctggaagctctggaactatataacaaattggtgaatgaagcaccagtgtactcagtctattcaaagctccaccctccagcacattacccacctgcatcatctggggttccaatgcagacatatccagttcaatcacatggtggaaactatatgggtcagagcattcaccaagtaactgttgcccaaagctatagcctaggacccgatcaaattggtccactgagatctctgcctccaaatgtgaattcctcagtgacagcacagcctgctcaaacttcatatttaagcactggacaagacactgtttccaatcctacttatatgaaccagaactctaacctacagtcagctactggtacaactgcttacacacagcaaatggggatgtctgtggatatgtcatcttatcagaacactacttccaatttgcctcaactggcaggctttccggtgacagttccagctcatccagttgcacagcagcacacaaattaccatcagcagcctctcctttagaaacaaatcaagcattttcttgaaagccttcataagtgtattattcagtccttgtgataccaacctgaaaatattaaaacttttttccctctcaactcaaaaggaccatgaataaataaagcacaaaaacctctcttattctacaaggccataaaaggttttttttttttttttttttcagtccagtttgtttgaagtcaatcttttcatcagaggcagcttaaagatgctttcagttagttttgtcttactttcagatttctctacataaatctagatactcattaagtagccttatgacaaacagtatgtcaaaagtatctcatacttataaacagtatgagataggaggattaaaatattattttaaagaaaccactgtttccccctaaaatgtcataagagcactgaagaacttgaaatatttttttcagagtttctcacacactttaaaagtctaacttttttgtgtgtaagcatttagcttgccagcatatttctttttggctccttaaattgcggttgtgtttgcagtattgtcacttttgctctcactgttatgttgaataataattagcatataattgtctacagaagcaagagcaatctggaaggaacaaaaatgttttctgtgattaacagtgaagaccttgtaaatgcagatgtgtgataaagcatttagtcagtcccccaaacagtcatgccaactgtgaaggaatgtcccacaaaacatttccattccctgaggaaaaacattttctttcctacatgtatctctggtatttagaattgtcactaataaccttttcaagtgattttggctattctctaatgaagatatggtccatttgtttttcttcctgcaatgtggtgtgcagagatgctgcatatcctttttatgggattgcgtgtgaatttgaaccatgagacattcctaataatttgttgtgagatataccaagcatggatgataagtgtgtttttagtggtgtgttgtttttttaaagaggtgattcaagtaccgttgctaagctgtcaacataccaagctgttgaaaaaattgaccatttctttcagaagtaattctcagcctgtggaataatagcaggtgaagacttcatagaaggcgacagattgatagggaggctattgaagcagtttttctgaagcctgcattttgagttagtttatagtgctaatagattctatataactgtgagagtttggtagtaaaccagtagggattgttttctctcctaaaaatttgcacactacttcattgtctaccaactttttacatattggaaaatagaaattgcaaatacatacatgtatggaaacatattcagattgggaaaaacaatggacattagtttttaaaaagttacgtggaagcaagatttctatatttgtttttttaaaggaagcagtcattctttctactaaatccatttcaagctagttctctgaaaattttgccatttatctacagaaatttgattataaatatgttcctttttcaaagaaactttattctagaacaaaatagtctatatggtacttgatctacatttaagtggaaaaattagcagtatttgaaagctcagtttatgtcattgtcttaacttcagatacaaataactgaacagaaagttttaacctttaatatctcatgttctgttttttattcagtattttcctttatgttaattcaattatatacttctgaatggcaccttactttttggaaacaaatcttctgttatttacaaaataataatttttaaaaaacatttaaaaaaaatccaaagctgctctcgataatagtcaacatttgcatatatatggaatttcttactttttttctcccaaactctatttaataaacttattttaatgtttgtgtatttcatgtataattgtgatctcaattataaaagtttaattcagcatgtctttgagccaatataattactgcacacccactaaattgggatcagccattataaataatgtagttttagaataataaaacatgacacatatatatatatataaatatatagtatatattggcacatcggtgaaagtttatatgtgcagaagtttttttctttctcaagttaaaaattattttttgccatatgtaattttgtgttgcaggctgtcgagagataaaaatgattttaaatctgtgtactgatgattctttcggtgttaagaaacacagggttgtgtacttccctttttatgggcttatggattctatttatattaagacctgtttataattgttttctgccaaagggaattgtctaacttcagatttctacattgggttcatacttactgttttatatcagaaataaaaaaatagcttctgctttttcatatgaaatcttggtacatcagaaagaattcctgaaaatttataatagaatgaattttattaatgcagaaaaataccccagggtgttaaaatatatgaagtgtgggatatattcttatagtttgtaaaatgtagtcaaccaatactgtcttctaatttggtaatttatttataaaattacttaaacattaggtaattatatttgttaggatttgaaattatttgtagttaaattgtcatgctgtttgaaataattgatacttgtctacgtaatacattttactgtatgttttgaagatggttataatttcactttcaaaatttaaaaaatcaattttaaatgttttaaaaacatatagcttagggattttttttaaaaaggttttcttagtaaaaacataaatttaaaagcccctgagttctaggagagggcttattgaattgctataagaaagctggagttactttgataagtaataaattataaatagcactgatctataatgctttatttctatcggaaggtactttttcttctttcatcatcagttttagccagttagtaaatgggaatactcagttttagggatttgatttttgtttggtttaattttctttcaaaaattcaaaagtatatttctaaaagttttccccagaggccagatacagtggctcatgcctataatcccagcactttgggagcctgagataggagtattgcttgaggctaggagtttgagaccaacctggcaacatggcaagaccctatctctacaaaaattttaaaacttagccaggtgtggtagtgcacctgtagtcccagctagtcagtaggctgaggtgggagtattgcttgaggctgcagtgaggtgtgatcacgccactgcactccggcctgacagaatgagatcctgtctcaaaaagaaaattccccagaagaagaattctaattttatcaagctgaattaaagtttgagagtcttttttttaaaatcttactgtgtcaaaagaggcattatgttgcttgtgtgatatagtgaatagtgtccctccaaatttcatgtacacctggaatgtcacaatgtgacttaacagtagccacccctcacccccgcccttatctgtggtggatacatttgcaagatccccagtggatgcctgaaaccgcagatagtactgaaccttatatatactgtttgttttcctatgcatacatatccctatgataaagtttatgaatttggcacttaacagcagaactaataagatgaaagagttgtaacaatatactctaataaaagttatttaaaatgtatgtattgttatctgtaattttgcatttaatatttttggaccatggtttaatctgggtaactgaaaacacagaaagtgaaatcatgggccgggc

SEQ ID NO: 322446 - DNA, 1213 bp, Homo sapiens
ggctccgaaggtccccggcttcgtggctagccggggtcctagcgctggaaaggtggccgtagcggccgcctgacccctacaaaagtctgggacaggggcagcgacaaaggccttgggaggacgcccatggtcggagggatctcgccccgggagaaaagttgggacaggagcgcgggatcgaagggtggactccgagccggcctgtcagcgaagagcgttgcaggtgcggtggcggaagtgcagggacggaggccgaagcggagcggtctagggagccgcggccgcgggtcacccggcgggtagcagttgctgagtgtcagctagacagcagcgactagggctcgggcgccggcgagatgcctttgttcaccgccaaccccttcgagcaagacgtggaaaaagccacgaatgagtacaacactacagaagattggagtcttattatggacatatgtgacaaagttggaagtactcctaatggagcgaaagattgcctaaaagccataatgaaaagggtaaatcataaggttccacatgttgctctgcaagcactaactcttcttggggcttgtgtggcaaactgtggaaagatatttcatttagaagtatgttcccgtgattttgcaacagaagtacgtgctgtgattaaaaataaggcacatcctaaagtatgtgaaaaactgaaatctttaatggtggagtggtcagaagaatttcagaaggaccctcagtttagtctgatatctgcaactattaaatctatgaaagaagaaggaattacttttcctccagcaggttctcagactgtctcagctgctgccaagaatggtacgtcatcgaacaaaaacaaagaggatgaagacatagctaaagctattgaattatcgctgcaagaacagaaacagcaacacacagaaacaaaatccttatatccatcttcagaaattcagttaaataataaggttgcacggaaagtgagagctttatatgattttgaagctgttgaggacaatgaactcacctttaaacatggtgaaataattattgttttggatgacaggtaagttttaaatctttatgggaaggtttaaagtgtaatgcccttaatttagaatccagagtattcagttctttgacttttagtgtatttaaatcataatagaaccatttcataccttgttttttctaaaataaaagttaggcatgtaatgtg

SEQ ID NO: 322447 - DNA, 4219 bp, Homo sapiens
gctactgccacctcgcgctcggaggcgtcacagaacgtgctcttctctcccctcccccctcccgctctccccctcctccccctcccgctccaagattcgccgccgccgccgccgcagccgcaggagtagccgccgccggagccgcgcgcagccatggccgagaaccccagcttggagaaccaccgcatcaagagcttcaagaacaagggccgcgatgtggaaacaatgcgaagacatagaaatgaagtgacagtggaactgcggaagaacaaaagagatgaacacttattgaaaaagagaaatgttccccaagaagaaagtctagaagattcagatgttgatgctgattttaaagcacaaaatgtaaccctagaagctatattgcagaatgccacaagtgataacccagtggtccaattgagtgctgtccaggcagcaagaaaactgttatccagtgacagaaatccaccgattgatgacttaataaaatctgggattttaccaattctagtcaaatgtctagaaagggatgataatccttcattacagtttgaagctgcttgggcattaactaacatagcatcaggaacttctgcacagactcaagctgttgtgcagtctaatgcagtacctctttttctgagacttcttcgttcaccacatcagaatgtttgtgaacaagcagtatgggctttgggaaacattataggtgatggtcctcaatgtagagattatgtcatatcactgggagttgtcaaacctcttctgtccttcatcagtccctccatccccatcaccttccttcggaacgtcacatgggtcattgtcaatctctgcaggaataaggatcccccaccgcctatggagacagttcaggagattttgccagctttatgtgtcctcatataccatacagatataaacattcttgtagacactgtttgggctctgtcatacttgacagatggaggtaatgaacagatacagatggttattgattcaggagttgtgccctttcttgtgccccttctgagccatcaggaagtcaaagttcaaacagcagccctcagagcagttggcaacatagtgactggcaccgacgagcagacccaggttgttctcaattgtgatgtcctgtcacacttcccaaatctcttatcacacccaaaagagaagataaataaggaagcagtgtggttcctttccaacataacagcaggcaaccagcaacaagttcaagctgtaatagatgctggattaattcctatgataattcatcagcttgctaagggggactttggaacacaaaaagaagctgcttgggcaatcagcaacttaacaataagtggcagaaaagatcaggttgagtaccttgtacagcagaatgtaataccaccgttctgtaatttactgtcagtgaaagattctcaagtggttcaggtggttctagatggtctaaaaaacattctgataatggccggtgatgaagcaagcacaatagctgaaataatagaggaatgtggaggtttggagaaaattgaagttttacagcaacatgaaaatgaagacatatataaattagcatttgaaatcatagatcagtatttctctggtgatgatattgatgaagatccctgcctcattcctgaagcaacacaaggaggtacctacaattttgatccaacagccaaccttcaaacaaaagaatttaatttttaaattcagttgagtgcagcatctttcccacattcaatatgaagcaccaccagatggctaccaaatgataagaacaacagcaacaaaaggctccaaaacacacatgcctctttgttttgatgcttctaaagcaagccatgtctcagtcactttgcagttgccaaaagtcactatcacatggactgtaaatgcatatgcatgatttcctaaactgttttagaactctccttaacaatctcaactaccctatttttccctgttccctggtgccacaggctgacaactgcagtctccagtttagaataaatattccatagtggtgacatgtcagctgcccactgatactcctttggaaaatggtgcgctgtggatcaagacactttggtatgatgcatatacaagttggaagactaaagaggtgcagtgtgatctgagcctccatcattgtcctccacaaacatattttcatattctttatgtggaagaatagattttaaagtacaagccaaatgattttcattggtggaactgacacaaaaaaagtaacttaaaaacaagaaacttggttattgaataaacagataagttttaaaaaaaaaaaaaactacttcatctaccagtaattgatgtgtttattatctgcctcagaagccagggttggaggaagaactttagatatggatattaatgcttttgccattatacctaatttttgagaacagcaagccctatttgaccactctcttcagcctgtgtgttcctgctgttttgaagtaatcaaatgctgtgcatggtattttacctgagctgcaacctgttatggacttgaacttctgtttaagttgaaagcaagagtccctgagtataaaggaaaaacagcaaaacaaaaagcaaacaaaaaaaaactgcaaaagtctaaaatacccattggtgatgttttttaaaaaaatcttgctttcagctttcaggagttaatattctttgttttaatttgataattggatatggttgatttatattgggtttaaactgtggagctttcatgtttactgtaatttagtcttaaaatattttttacttagtaaccagtgcttttgataatgtggttggcaacaaaccagcaactatttagaagtgtcataagagttcattctttgagtattgggaaagttaattcagatcctactcaaaaagcatcttcacatattaaaagattcagacagggatctgtgtagaggagtaatttgcagttatttaacataaacctgatttgcagtgatctctaagtaattctgcaaaatccggtattactatgtcaagttattgcttttggtaaattgtctgacccagttattaatgaaagaatatggatttaaaaatttttaaactaaataatttgtgctgtcacagaaatggtattgttgctcttgtttactgggtataatttcccaatgcattgatgtgaagggatagaaaatctaaactaatttagttatccattggggggtgtatttactgtgatgaagatgagacagatgccatcagagctttgtgaatcagctggggtgttttcactgataaacaacacatagcaggtgtgcattcattacaaatatatgtatctgccaaggtggagccactttaaagagtgagttttgtcttgtatctaaagtggatacaagcgtatgtttaaactgcaagatttttacttgctagagaatctgttttaatatagtggtttggcctctgattatttataggttttataaattttagaatcaatttctctttaaggtggctcagatttttcaactcttgtgcacataaaattgagttgaagttcattgtgcctttttttctttatccaaattttgagttaaagcttcatatggtaactgcatcctgttcggacactatagtctaaatttttgaaactgtgtggtgttcgctaaaagtaggaataacaacgtaaaagctaattaaggtcacaaacttcggtgaaacccttaaaagtccaaatcttcttgatattgtgaaccgtaccccttccagtttagtttcttctggactttccttacttaactgacagttaccttttaaaatttgcacacattatgattaaaattgggcctctactgtgatgattcctatttcctctcatgttttaaagtgcaaactaacatttaagtgaacattagcatcaagtagtgcagacacttgtatgcatttccttgattcaatttgtgaccttaccagttttgaattggaattgcaccatttcgtagataaaggaaactaagtatattgctgcacttttaagttttcaaaacagtgtttaaaaattgcattgttatttttttttaaactcagtttaaaaagactaaaacgttctttcaaaagaggcatctaaatgtgttcctaattttgtatatgggcttaggttttgtaaccaataaaaaaagctgctatcaaatatgataaaacattgaaaacttaaaaaaaa

SEQ ID NO: 322448 - DNA, 4186 bp, Homo sapiens
gctactgccacctcgcgctcggaggcgtcacagaacgtgctcttctctcccctcccccctcccgctctccccctcctccccctcccgctccaagattcgccgccgccgccgccgcagccgcaggagtagccgccgccggagccgcgcgcagccatggccgagaaccccagcttggagaaccaccgcatcaagagcttcaagaacaagggccgcgatgtggaaacaatgcgaagacatagaaatgaagtgacagtggaactgcggaagaacaaaagagatgaacacttattgaaaaagagaaatgttccccaagaagaaagtctagaagattcagatgttgatgctgattttaaagcacaaaatgtaaccctagaagctatattgcagaatgccacaagtgataacccagtggtccaattgagtgctgtccaggcagcaagaaaactgttatccagtgacagaaatccaccgattgatgacttaataaaatctgggattttaccaattctagtcaaatgtctagaaagggatgataatccttcattacagtttgaagctgcttgggcattaactaacatagcatcaggaacttctgcacagactcaagctgttgtgcagtctaatgcagtacctctttttctgagacttcttcgttcaccacatcagaatgtttgtgaacaagcagtatgggctttgggaaacattataggtgatggtcctcaatgtagagattatgtcatatcactgggagttgtcaaacctcttctgtccttcatcagtccctccatccccatcaccttccttcggaacgtcacatgggtcattgtcaatctctgcaggaataaggatcccccaccgcctatggagacagttcaggagattttgccagctttatgtgtcctcatataccatacagatataaacattcttgtagacactgtttgggctctgtcatacttgacagatggaggtaatgaacagatacagatggttattgattcaggagttgtgccctttcttgtgccccttctgagccatcaggaagtcaaagttcaaacagcagccctcagagcagttggcaacatagtgactggcaccgacgagcagacccaggttgttctcaattgtgatgtcctgtcacacttcccaaatctcttatcacacccaaaagagaagataaataaggaagcagtgtggttcctttccaacataacagcaggcaaccagcaacaagttcaagctgtaatagatgctggattaattcctatgataattcatcagcttgctaagggggactttggaacacaaaaagaagctgcttgggcaatcagcaacttaacaataagtggcagaaaagatcaggttgagtaccttgtacagcagaatgtaataccaccgttctgtaatttactgtcagtgaaagattctcaagtggttcaggtggttctagatggtctaaaaaacattctgataatggccggtgatgaagcaagcacaatagctgaaataatagaggaatgtggaggtttggagaaaattgaagttttacagcaacatgaaaatgaagacatatataaattagcatttgaaatcatagatcagtatttctctggtgatgatattgatgaagatccctgcctcattcctgaagcaacacaaggaggtacctacaattttgatccaacagccaaccttcaaacaaaagaatttaatttttaaattcagttgagtgcagcatctttcccacattcaatatgaagcaccaccagatggctaccaaatgataagaacaacagcaacaaaaggctccaaaacacacatgcctctttgttttgatgcttctaaagcaagccatgtctcagtcactttgcagttgccaaaagtcactatcacatggactgtaaatgcatatgcatgatttcctaaactgttttagaactctccttaacaatctcaactaccctatttttccctgttccctggtgccacaggctgacaactgcagtctccagtttagaataaatattccatagtggtgacatgtcagctgcccactgatactcctttggaaaatggtgcgctgtggatcaagacactttggtatgatgcatatacaagttggaagactaaagaggtgcagtgtgatctgagcctccatcattgtcctccacaaacatattttcatattctttatgtggaagaatagattttaaagtacaagccaaatgattttcattggtggaactgacacaaaaaaagtaacttaaaaacaagaaacttggttattgaataaacagataagttttaaaaaaaaaaaaaactacttcatctaccagtaattgatgtgtttattatctgcctcagaagccagggttggaggaagaactttagatatggatattaatgcttttgccattatacctaatttttgagaacagcaagccctatttgaccactctcttcagcctgtgtgttcctgctgttttgaagtaatcaaatgctgtgcatggtattttacctgagctgcaacctgttatggacttgaacttctgtttaagttgaaagcaagagtccctgagtataaaggaaaaacagcaaaacaaaaagcaaacaaaaaaaaactgcaaaagtctaaaatacccattggtgatgttttttaaaaaaatcttgctttcagctttcaggagttaatattctttgttttaatttgataattggatatggttgatttatattgggtttaaactgtggagctttcatgtttactgtaatttagtcttaaaatattttttacttagtaaccagtgcttttgataatgtggttggcaacaaaccagcaactatttagaagtgtcataagagttcattctttgagtattgggaaagttaattcagatcctactcaaaaagcatcttcacatattaaaagattcagacagggatctgtgtagaggagtaatttgcagttatttaacataaacctgatttgcagtgatctctaagtaattctgcaaaatccggtattactatgtcaagttattgcttttggtaaattgtctgacccagttattaatgaaagaatatggatttaaaaatttttaaactaaataatttgtgctgtcacagaaatggtattgttgctcttgtttactgggtataatttcccaatgcattgatgtgaagggatagaaaatctaaactaatttagttatccattggggggtgtatttactgtgatgaagatgagacagatgccatcagagctttgtgaatcagctggggtgttttcactgataaacaacacatagcaggtgtgcattcattacaaatatatgtatctgccaaggtggagccactttaaagagtgagttttgtcttgtatctaaagtggatacaagcgtatgtttaaactgcaagatttttacttgctagagaatctgttttaatatagtggtttggcctctgattatttataggttttataaattttagaatcaatttctctttaaggtggctcagatttttcaactcttgtgcacataaaattgagttgaagttcattgtgcctttttttctttatccaaattttgagttaaagcttcatatggtaactgcatcctgttcggacactatagtctaaatttttgaaactgtgtggtgttcgctaaaagtaggaataacaacgtaaaagctaattaaggtcacaaacttcggtgaaacccttaaaagtccaaatcttcttgatattgtgaaccgtaccccttccagtttagtttcttctggactttccttacttaactgacagttaccttttaaaatttgcacacattatgattaaaattgggcctctactgtgatgattcctatttcctctcatgttttaaagtgcaaactaacatttaagtgaacattagcatcaagtagtgcagacacttgtatgcatttccttgattcaatttgtgaccttaccagttttgaattggaattgcaccatttcgtagataaaggaaactaagtatattgctgcacttttaagttttcaaaacagtgtttaaaaattgcattgttatttttttttaaactcagtttaaaaagactaaaacgttctttcaaaagaggcatctaaatgtgttcctaattttgtatatgggcttaggttttgtaaccaataaaaaaagctgctatc

SEQ ID NO: 322449 - DNA, 4165 bp, Homo sapiens
gctactgccacctcgcgctcggaggcgtcacagaacgtgctcttctctcccctcccccctcccgctctccccctcctccccctcccgctccaagattcgccgccgccgccgccgcagccgcaggagtagccgccgccggagccgcgcgcagccatggccgagaaccccagcttggagaaccaccgcatcaagagcttcaagaacaagggccgcgatgtggaaacaatgcgaagacatagaaatgaagtgacagtggaactgcggaagaacaaaagagatgaacacttattgaaaaagagaaatgttccccaagaagaaagtctagaagattcagatgttgatgctgattttaaagcacaaaatgtaaccctagaagctatattgcagaatgccacaagtgataacccagtggtccaattgagtgctgtccaggcagcaagaaaactgttatccagtgacagaaatccaccgattgatgacttaataaaatctgggattttaccaattctagtcaaatgtctagaaagggatgataatccttcattacagtttgaagctgcttgggcattaactaacatagcatcaggaacttctgcacagactcaagctgttgtgcagtctaatgcagtacctctttttctgagacttcttcgttcaccacatcagaatgtttgtgaacaagcagtatgggctttgggaaacattataggtgatggtcctcaatgtagagattatgtcatatcactgggagttgtcaaacctcttctgtccttcatcagtccctccatccccatcaccttccttcggaacgtcacatgggtcattgtcaatctctgcaggaataaggatcccccaccgcctatggagacagttcaggagattttgccagctttatgtgtcctcatataccatacagatataaacattcttgtagacactgtttgggctctgtcatacttgacagatggaggtaatgaacagatacagatggttattgattcaggagttgtgccctttcttgtgccccttctgagccatcaggaagtcaaagttcaaacagcagccctcagagcagttggcaacatagtgactggcaccgacgagcagacccaggttgttctcaattgtgatgtcctgtcacacttcccaaatctcttatcacacccaaaagagaagataaataaggaagcagtgtggttcctttccaacataacagcaggcaaccagcaacaagttcaagctgtaatagatgctggattaattcctatgataattcatcagcttgctaagggggactttggaacacaaaaagaagctgcttgggcaatcagcaacttaacaataagtggcagaaaagatcaggttgagtaccttgtacagcagaatgtaataccaccgttctgtaatttactgtcagtgaaagattctcaagtggttcaggtggttctagatggtctaaaaaacattctgataatggccggtgatgaagcaagcacaatagctgaaataatagaggaatgtggaggtttggagaaaattgaagttttacagcaacatgaaaatgaagacatatataaattagcatttgaaatcatagatcagtatttctctggtgatgatattgatgaagatccctgcctcattcctgaagcaacacaaggaggtacctacaattttgatccaacagccaaccttcaaacaaaagaatttaatttttaaattcagttgagtgcagcatctttcccacattcaatatgaagcaccaccagatggctaccaaatgataagaacaacagcaacaaaaggctccaaaacacacatgcctctttgttttgatgcttctaaagcaagccatgtctcagtcactttgcagttgccaaaagtcactatcacatggactgtaaatgcatatgcatgatttcctaaactgttttagaactctccttaacaatctcaactaccctatttttccctgttccctggtgccacaggctgacaactgcagtctccagtttagaataaatattccatagtggtgacatgtcagctgcccactgatactcctttggaaaatggtgcgctgtggatcaagacactttggtatgatgcatatacaagttggaagactaaagaggtgcagtgtgatctgagcctccatcattgtcctccacaaacatattttcatattctttatgtggaagaatagattttaaagtacaagccaaatgattttcattggtggaactgacacaaaaaaagtaacttaaaaacaagaaacttggttattgaataaacagataagttttaaaaaaaaaaaaaactacttcatctaccagtaattgatgtgtttattatctgcctcagaagccagggttggaggaagaactttagatatggatattaatgcttttgccattatacctaatttttgagaacagcaagccctatttgaccactctcttcagcctgtgtgttcctgctgttttgaagtaatcaaatgctgtgcatggtattttacctgagctgcaacctgttatggacttgaacttctgtttaagttgaaagcaagagtccctgagtataaaggaaaaacagcaaaacaaaaagcaaacaaaaaaaaactgcaaaagtctaaaatacccattggtgatgttttttaaaaaaatcttgctttcagctttcaggagttaatattctttgttttaatttgataattggatatggttgatttatattgggtttaaactgtggagctttcatgtttactgtaatttagtcttaaaatattttttacttagtaaccagtgcttttgataatgtggttggcaacaaaccagcaactatttagaagtgtcataagagttcattctttgagtattgggaaagttaattcagatcctactcaaaaagcatcttcacatattaaaagattcagacagggatctgtgtagaggagtaatttgcagttatttaacataaacctgatttgcagtgatctctaagtaattctgcaaaatccggtattactatgtcaagttattgcttttggtaaattgtctgacccagttattaatgaaagaatatggatttaaaaatttttaaactaaataatttgtgctgtcacagaaatggtattgttgctcttgtttactgggtataatttcccaatgcattgatgtgaagggatagtgagacagatgccatcagagctttgtgaatcagctggggtgttttcactgataaacaacacatagcaggtgtgcattcattacaaatatatgtatctgccaaggtggagccactttaaagagtgagttttgtcttgtatctaaagtggatacaagcgtatgtttaaactgcaagatttttacttgctagagaatctgttttaatatagtggtttggcctctgattatttataggttttataaattttagaatcaatttctctttaaggtggctcagatttttcaactcttgtgcacataaaattgagttgaagttcattgtgcctttttttctttatccaaattttgagttaaagcttcatatggtaactgcatcctgttcggacactatagtctaaatttttgaaactgtgtggtgttcgctaaaagtaggaataacaacgtaaaagctaattaaggtcacaaacttcggtgaaacccttaaaagtccaaatcttcttgatattgtgaaccgtaccccttccagtttagtttcttctggactttccttacttaactgacagttaccttttaaaatttgcacacattatgattaaaattgggcctctactgtgatgattcctatttcctctcatgttttaaagtgcaaactaacatttaagtgaacattagcatcaagtagtgcagacacttgtatgcatttccttgattcaatttgtgaccttaccagttttgaattggaattgcaccatttcgtagataaaggaaactaagtatattgctgcacttttaagttttcaaaacagtgtttaaaaattgcattgttatttttttttaaactcagtttaaaaagactaaaacgttctttcaaaagaggcatctaaatgtgttcctaattttgtatatgggcttaggttttgtaaccaataaaaaaagctgctatcaaatatgataaaacattgaaaacttaaaaaaaa

SEQ ID NO: 322450 - DNA, 3899 bp, Homo sapiens
gctactgccacctcgcgctcggaggcgtcacagaacgtgctcttctctcccctcccccctcccgctctccccctcctccccctcccgctccaagattcgccgccgccgccgccgcagccgcaggagtagccgccgccggagccgcgcgcagccatggccgagaaccccagcttggagaaccaccgcatcaagagcttcaagaacaagggccgcgatgtggaaacaatgcgaagacatagaaatgaagtgacagtggaactgcggaagaacaaaagagatgaacacttattgaaaaagagaaatgttccccaagaagaaagtctagaagattcagatgttgatgctgattttaaagcacaaaatgtaaccctagaagctatattgcagaatgccacaagtgataacccagtggtccaattgagtgctgtccaggcagcaagaaaactgttatccagtgacagaaatccaccgattgatgacttaataaaatctgggattttaccaattctagtcaaatgtctagaaagggatgataatccttcattacagtttgaagctgcttgggcattaactaacatagcatcaggaacttctgcacagactcaagctgttgtgcagtctaatgcagtacctctttttctgagacttcttcgttcaccacatcagaatgtttgtgaacaagcagtatgggctttgggaaacattataggtgatggtcctcaatgtagagattatgtcatatcactgggagttgtcaaacctcttctgtccttcatcagtccctccatccccatcaccttccttcggaacgtcacatgggtcattgtcaatctctgcaggaataaggatcccccaccgcctatggagacagttcaggagattttgccagctttatgtgtcctcatataccatacagatataaacattcttgtagacactgtttgggctctgtcatacttgacagatggaggtaatgaacagatacagatggttattgattcaggagttgtgccctttcttgtgccccttctgagccatcaggaagtcaaagttcaaacagcagccctcagagcagttggcaacatagtgactggcaccgacgagcagacccaggttgttctcaattgtgatgtcctgtcacacttcccaaatctcttatcacacccaaaagagaagataaataaggaagcagtgtggttcctttccaacataacagcaggcaaccagcaacaagttcaagctgtaatagatgctggattaattcctatgataattcatcagcttgctaagggggactttggaacacaaaaagaagctgcttgggcaatcagcaacttaacaataagtggcagaaaagatcaggttgagtaccttgtacagcagaatgtaataccaccgttctgtaatttactgtcagtgaaagattctcaagtggttcaggtggttctagatggtctaaaaaacattctgataatggccggtgatgaagcaagcacaatagctgaaataatagaggaatgtggaggtttggagaaaattgaagttttacagcaacatgaaaatgaagacatatataaattagcatttgaaatcatagatcagtatttctctggtgatgatattgatgaagatccctgcctcattcctgaagcaacacaaggagtgccacaggctgacaactgcagtctccagtttagaataaatattccatagtggtgacatgtcagctgcccactgatactcctttggaaaatggtgcgctgtggatcaagacactttggtatgatgcatatacaagttggaagactaaagaggtgcagtgtgatctgagcctccatcattgtcctccacaaacatattttcatattctttatgtggaagaatagattttaaagtacaagccaaatgattttcattggtggaactgacacaaaaaaagtaacttaaaaacaagaaacttggttattgaataaacagataagttttaaaaaaaaaaaaaactacttcatctaccagtaattgatgtgtttattatctgcctcagaagccagggttggaggaagaactttagatatggatattaatgcttttgccattatacctaatttttgagaacagcaagccctatttgaccactctcttcagcctgtgtgttcctgctgttttgaagtaatcaaatgctgtgcatggtattttacctgagctgcaacctgttatggacttgaacttctgtttaagttgaaagcaagagtccctgagtataaaggaaaaacagcaaaacaaaaagcaaacaaaaaaaaactgcaaaagtctaaaatacccattggtgatgttttttaaaaaaatcttgctttcagctttcaggagttaatattctttgttttaatttgataattggatatggttgatttatattgggtttaaactgtggagctttcatgtttactgtaatttagtcttaaaatattttttacttagtaaccagtgcttttgataatgtggttggcaacaaaccagcaactatttagaagtgtcataagagttcattctttgagtattgggaaagttaattcagatcctactcaaaaagcatcttcacatattaaaagattcagacagggatctgtgtagaggagtaatttgcagttatttaacataaacctgatttgcagtgatctctaagtaattctgcaaaatccggtattactatgtcaagttattgcttttggtaaattgtctgacccagttattaatgaaagaatatggatttaaaaatttttaaactaaataatttgtgctgtcacagaaatggtattgttgctcttgtttactgggtataatttcccaatgcattgatgtgaagggatagaaaatctaaactaatttagttatccattggggggtgtatttactgtgatgaagatgagacagatgccatcagagctttgtgaatcagctggggtgttttcactgataaacaacacatagcaggtgtgcattcattacaaatatatgtatctgccaaggtggagccactttaaagagtgagttttgtcttgtatctaaagtggatacaagcgtatgtttaaactgcaagatttttacttgctagagaatctgttttaatatagtggtttggcctctgattatttataggttttataaattttagaatcaatttctctttaaggtggctcagatttttcaactcttgtgcacataaaattgagttgaagttcattgtgcctttttttctttatccaaattttgagttaaagcttcatatggtaactgcatcctgttcggacactatagtctaaatttttgaaactgtgtggtgttcgctaaaagtaggaataacaacgtaaaagctaattaaggtcacaaacttcggtgaaacccttaaaagtccaaatcttcttgatattgtgaaccgtaccccttccagtttagtttcttctggactttccttacttaactgacagttaccttttaaaatttgcacacattatgattaaaattgggcctctactgtgatgattcctatttcctctcatgttttaaagtgcaaactaacatttaagtgaacattagcatcaagtagtgcagacacttgtatgcatttccttgattcaatttgtgaccttaccagttttgaattggaattgcaccatttcgtagataaaggaaactaagtatattgctgcacttttaagttttcaaaacagtgtttaaaaattgcattgttatttttttttaaactcagtttaaaaagactaaaacgttctttcaaaagaggcatctaaatgtgttcctaattttgtatatgggcttaggttttgtaaccaataaaaaaagctgctatcaaatatgataaaacattgaaaacttaaaaaaaa

SEQ ID NO: 322451 - DNA, 2864 bp, Homo sapiens
  misc_feature (48)..(48): n is a, c, g, or t
acaatgttgggaacctgactctgaagcattgttaaaggtgtttctccntgctccattgcatcagggtcacatagccaactttgtacaggacgagtttgcttcaaaagagaaaggtatgcgtgaaaaacatctgcctttacattctcttcacgctctttaaatctggatattagtgcaggagagacggtcttgtagaattctggaagcatttcatgccttgtgctaactacagcatccaagcacttagcagctgtctggtgatgatattgatgaagatccctgcctcattcctgaagcaacacaaggaggtacctacaattttgatccaacagccaaccttcaaacaaaagaatttaatttttaaattcagttgagtgcagcatctttcccacattcaatatgaagcaccaccagatggctaccaaatgataagaacaacagcaacaaaaggctccaaaacacacatgcctctttgttttgatgcttctaaagcaagccatgtctcagtcactttgcagttgccaaaagtcactatcacatggactgtaaatgcatatgcatgatttcctaaactgttttagaactctccttaacaatctcaactaccctatttttccctgttccctggtgccacaggctgacaactgcagtctccagtttagaataaatattccatagtggtgacatgtcagctgcccactgatactcctttggaaaatggtgcgctgtggatcaagacactttggtatgatgcatatacaagttggaagactaaagaggtgcagtgtgatctgagcctccatcattgtcctccacaaacatattttcatattctttatgtggaagaatagattttaaagtacaagccaaatgattttcattggtggaactgacacaaaaaaagtaacttaaaaacaagaaacttggttattgaataaacagataagttttaaaaaaaaaaaaaactacttcatctaccagtaattgatgtgtttattatctgcctcagaagccagggttggaggaagaactttagatatggatattaatgcttttgccattatacctaatttttgagaacagcaagccctatttgaccactctcttcagcctgtgtgttcctgctgttttgaagtaatcaaatgctgtgcatggtattttacctgagctgcaacctgttatggacttgaacttctgtttaagttgaaagcaagagtccctgagtataaaggaaaaacagcaaaacaaaaagcaaacaaaaaaaaactgcaaaagtctaaaatacccattggtgatgttttttaaaaaaatcttgctttcagctttcaggagttaatattctttgttttaatttgataattggatatggttgatttatattgggtttaaactgtggagctttcatgtttactgtaatttagtcttaaaatattttttacttagtaaccagtgcttttgataatgtggttggcaacaaaccagcaactatttagaagtgtcataagagttcattctttgagtattgggaaagttaattcagatcctactcaaaaagcatcttcacatattaaaagattcagacagggatctgtgtagaggagtaatttgcagttatttaacataaacctgatttgcagtgatctctaagtaattctgcaaaatccggtattactatgtcaagttattgcttttggtaaattgtctgacccagttattaatgaaagaatatggatttaaaaatttttaaactaaataatttgtgctgtcacagaaatggtattgttgctcttgtttactgggtataatttcccaatgcattgatgtgaagggatagaaaatctaaactaatttagttatccattggggggtgtatttactgtgatgaagatgagacagatgccatcagagctttgtgaatcagctggggtgttttcactgataaacaacacatagcaggtgtgcattcattacaaatatatgtatctgccaaggtggagccactttaaagagtgagttttgtcttgtatctaaagtggatacaagcgtatgtttaaactgcaagatttttacttgctagagaatctgttttaatatagtggtttggcctctgattatttataggttttataaattttagaatcaatttctctttaaggtggctcagatttttcaactcttgtgcacataaaattgagttgaagttcattgtgcctttttttctttatccaaattttgagttaaagcttcatatggtaactgcatcctgttcggacactatagtctaaatttttgaaactgtgtggtgttcgctaaaagtaggaataacaacgtaaaagctaattaaggtcacaaacttcggtgaaacccttaaaagtccaaatcttcttgatattgtgaaccgtaccccttccagtttagtttcttctggactttccttacttaactgacagttaccttttaaaatttgcacacattatgattaaaattgggcctctactgtgatgattcctatttcctctcatgttttaaagtgcaaactaacatttaagtgaacattagcatcaagtagtgcagacacttgtatgcatttccttgattcaatttgtgaccttaccagttttgaattggaattgcaccatttcgtagataaaggaaactaagtatattgctgcacttttaagttttcaaaacagtgtttaaaaattgcattgttatttttttttaaactcagtttaaaaagactaaaacgttctttcaaaagaggcatctaaatgtgttcctaattttgtatatgggcttaggttttgtaaccaataaaaaaagctgctatcaaatatgataaaacattgaaaacttaaaaaaaa

SEQ ID NO: 322452 - DNA, 2039 bp, Homo sapiens
gctactgccacctcgcgctcggaggcgtcacagaacgtgctcttctctcccctcccccctcccgctctccccctcctccccctcccgctccaagattcgccgccgccgccgccgcagccgcaggagtagccgccgccggagccgcgcgcagccatggccgagaaccccagcttggagaaccaccgcatcaagagcttcaagaacaagggccgcgatgtggaaacaatgcgaagacatagaaatgaagtgacagtggaactgcggaagaacaaaagagatgaacacttattgaaaaagagaaatgttccccaagaagaaagtctagaagattcagatgttgatgctgattttaaagcacaaaatgtaaccctagaagctatattgcagaatgccacaagtgataacccagtggtccaattgagtgctgtccaggcagcaagaaaactgttatccagtgacagaaatccaccgattgatgacttaataaaatctgggattttaccaattctagtcaaatgtctagaaagggatgataatccttcattacagtttgaagctgcttgggcattaactaacatagcatcaggaacttctgcacagactcaagctgttgtgcagtctaatgcagtacctctttttctgagacttcttcgttcaccacatcagaatgtttgtgaacaagcagtatgggctttgggaaacattataggtgatggtcctcaatgtagagattatgtcatatcactgggagttgtcaaacctcttctgtccttcatcagtccctccatccccatcaccttccttcggaacgtcacatgggtcattgtcaatctctgcaggaataaggatcccccaccgcctatggagacagttcaggagattttgccagctttatgtgtcctcatataccatacagatataaacattcttgtagacactgtttgggctctgtcatacttgacagatggaggtaatgaacagatacagatggttattgattcaggagttgtgccctttcttgtgccccttctgagccatcaggaagtcaaagttcaaacagcagccctcagagcagttggcaacatagtgactggcaccgacgagcagacccaggttgttctcaattgtgatgtcctgtcacacttcccaaatctcttatcacacccaaaagagaagataaataaggaagcagtgtggttcctttccaacataacagcaggcaaccagcaacaagttcaagctgtaatagatgctggattaattcctatgataattcatcagcttgctaagggggactttggaacacaaaaagaagctgcttgggcaatcagcaacttaacaataagtggcagaaaagatcaggttgagtaccttgtacagcagaatgtaataccaccgttctgtaatttactgtcagtgaaagattctcaagtggttcaggtggttctagatggtctaaaaaacattctgataatggccggtgatgaagcaagcacaatagctgaaataatagaggaatgtggaggtttggagaaaattgaagttttacagcaacatgaaaatgaagacatatataaattagcatttgaaatcatagatcagtatttctctggtgatgatattgatgaagatccctgcctcattcctgaagcaacacaaggaggtacctacaattttgatccaacagccaaccttcaaacaaaagaatttaatttttaaattcagttgagtgcagcatctttcccacattcaatatgaagcaccaccagatggctaccaaatgataagaacaacagcaacaaaaggctccaaaacacacatgcctctttgttttgatgcttctaaagcaagccatgtctcagtcactttgcagttgccaaaagtcactatcacatggactgtaaatgcatatgcatgatttcctaaactgttttagaactctccttaacaatctcaactaccctatttttccctgttccctggtgccacaggctgacaactgcagtctccagtttagaataaatattccatagtggtga

SEQ ID NO: 322453 - DNA, 441 bp, Homo sapiens
gccctttcttgtgccccttctgagccatcaggaagtcaaagttcaagtaagtatttttaaatttttcttatttgtatacagttgtgtttgctataaccagttaacttgtacagctaggctttaattctatctgtaagtgcttatcttccacatttcttctgctagtccctgagcctgattttgttgatttccaaatctttatctcacccagtttctttgctgagttccacacttgtatagccaattgttcttgaccctttatacatatcatctaagaactccttcaagctttccgtggttaactagacagaaatgaaacgatcatctcccacaaacctgctcttcttccttgtctaccttcagtgaacagcatggcctaagctagaaattttgattcctccttgcaattcccattccattacaaaatcatttcaattcttc

SEQ ID NO: 322454 - DNA, 331 bp, Homo sapiens
ctaatttgtctagagagagaattatgtcattcctcagttgtgttacctggtagtctagaagttaatatgttgttatttcttttcacagtttgaaaattatagcaattaatttctcatatttattttcctagaaaactgttatccagtgacagaaatccaccgattgatgacttaataaaatctgggattttaccaattctagtcaaatgtctagaaagggatgataagtaagtatggattttactccctattcagtttttttcagttaacttaaaagtttggattattacttaaccagtgagttcagtttggttttgtacttatgatgttt

SEQ ID NO: 322455 - DNA, 2245 bp, Homo sapiens
aattcgtggttccagaatcgatagggctccaagattcgccgccgccgccgccgcagccgcaggagtagccgccgccggagccgcgcgcagccatggccgagaaccccagcttggagaaccaccgcatcaagagcttcaagaacaagggccgcgatgtggaaacaatgcgaagacatagaaatgaagtgacagtggaactgcggaagaacaaaagagatgaacacttattgaaaaagagaaatgttccccaagaagaaagtctagaagattcagatgttgatgctgattttaaagcacaaaatgtaaccctagaagctatattgcagaatgccacaagtgataacccagtggtccaattgagtgctgtccaggcagcaagaaaactgttatccagtgacagaaatccaccgattgatgacttaataaaatctgggattttaccaattctagtcaaatgtctagaaagggatgataatccttcattacagtttgaagctgcttgggcattaactaacatagcatcaggaacttctgcacagactcaagctgttgtgcagtctaatgcagtacctctttttctgagacttcttcgttcaccacatcagaatgtttgtgaacaagcagtatgggctttgggaaacattataggtgatggtcctcaatgtagagattatgtcatatcactgggagttgtcaaacctcttctgtccttcatcagtccctccatccccatcaccttccttcggaacgtcacatgggtcattgtcaatctctgcaggaataaggatcccccaccgcctatggagacagttcaggagattttgccagctttatgtgtcctcatataccatacagatataaacattcttgtagacactgtttgggctctgtcatacttgacagatggaggtaatgaacagatacagatggttattgattcaggagttgtgccctttcttgtgccccttctgagccatcaggaagtcaaagttcaaacagcagccctcagagcagttggcaacatagtgactggcaccgacgagcagacccaggttgttctcaattgtgatgtcctgtcacacttcccaaatctcttatcacacccaaaagagaagataaataaggaagcagtgtggttcctttccaacataacagcaggcaaccagcaacaagttcaagctgtaatagatgctggattaattcctatgataattcatcagcttgctaagggggactttggaacacaaaaagaagctgcttgggcaatcagcaacttaacaataagtggcagaaaagatcaggttgagtaccttgtacagcagaatgtaataccaccgttctgtaatttactgtcagtgaaagattctcaagtggttcaggtggttctagatggtctaaaaaacattctgataatggccggtgatgaagcaagcacaatagctgaaataatagaggaatgtggaggtttggagaaaattgaagttttacagcaacatgaaaatgaagacatatataaattagcatttgaaatcatagatcagtatttctctggtgatgatattgatgaagatccctgcctcattcctgaagcaacacaaggaggtacctacaattttgatccaacagccaaccttcaaacaaaagaatttaatttttaaattcagttgagtgcagcatctttcccacattcaatatgaagcaccaccagatggctaccaaatgataagaacaacagcaacaaaaggctccaaaacacacatgcctctttgttttgatgcttctaaagcaagccatgtctcagtcactttgcagttgccaaaagtcactatcacatggactgtaaatgcatatgcatgatttcctaaactgttttagaactctccttaacaatctcaactaccctatttttccctgttccctggtgccacaggctgacaactgcagtctccagtttagaataaatattccatagtggtgacatgtcagctgcccactgatactcctttggaaaatggtgcgctgtggatcaagacactttggtatgatgcatatacaagttggaagactaaagaggtgcagtgtgatctgagcctccatcattgtcctccacaaacatattttcatattctttatgtggaagaatagattttaaagtacaagccaaatgattttcattggtggaactgacacaaaaaaagtaacttaaaaacaagaaacttggttattgaataaacagataagtttt

SEQ ID NO: 322456 - DNA, 553 bp, Homo sapiens
gtctcattaaggtgacattagcaggtactatttgcaaactcggcttattgaggcagcgctagaggtctctctgcagctactgaaaacaacaatgcgaagacatagaaatgaagtgacagtggaactgcggaagaacaaaagagatgaacacttattgaaaaagagaaatgttccccaagaagaaagtctagaagattcagatgttgatgctgattttaaagcacaaaatgtaaccctagaagctatattgcagaatgccacaagtgataacccagtggtccaattgagtgctgtccaggcagcaagaaaactgttatccagtgacagaaatccaccgattgatgacttaataaaatctgggattttaccaattctagtcaaatgtctagaaagggatgataatccttcattacagtttgaagctgcttgggcattaactaacatagcatcaggaaaatggcgtgaacccgggaggcggagcttgcagtgagccgagatcacgccactgcactccaacctgggcgacagagcaagactccgtctcaaaaaaaaa

SEQ ID NO: 322457 - DNA, 4443 bp, Homo sapiens
ggattacaggtgtgagccactgcacccagccaatattaaatgacttctaactcaaatacctgagtttttttttttcttcttcttcttttttttgagatgcagtctcgctctgtcgcccaggcctggagtgcactggcgccacctcggcttgctgcatccccccgcctcccgggttcaagcagttctcctgcctcagtctcccatgtagctgagattacaggtgcctgccaccaagcccggctaattttttttgtatttttagtagagactaggtttcgccatgttggccaagctggttttgaactcctgacctcaagtgatctgcccgcctcggcctcccaaagtgctaggattataggcatgagccactgcacccagctgagatctttatatactagcagtgtccgtattttgatacatctgtaatctttgtttttcttttctagacaatgcgaagacatagaaatgaagtgacagtggaactgcggaagaacaaaagagatgaacacttattgaaaaagagaaatgttccccaagaagaaagtctagaagattcagatgttgatgctgattttaaagcacaaaatgtaaccctagaagctatattgcagaatgccacaagtgataacccagtggtccaattgagtgctgtccaggcagcaagaaaactgttatccagtgacagaaatccaccgattgatgacttaataaaatctgggattttaccaattctagtcaaatgtctagaaagggatgataatccttcattacagtttgaagctgcttgggcattaactaacatagcatcaggaacttctgcacagactcaagctgttgtgcagtctaatgcagtacctctttttctgagacttcttcgttcaccacatcagaatgtttgtgaacaagcagtatgggctttgggaaacattataggtgatggtcctcaatgtagagattatgtcatatcactgggagttgtcaaacctcttctgtccttcatcagtccctccatccccatcaccttccttcggaacgtcacatgggtcattgtcaatctctgcaggaataaggatcccccaccgcctatggagacagttcaggagattttgccagctttatgtgtcctcatataccatacagatataaacattcttgtagacactgtttgggctctgtcatacttgacagatggaggtaatgaacagatacagatggttattgattcaggagttgtgccctttcttgtgccccttctgagccatcaggaagtcaaagttcaaacagcagccctcagagcagttggcaacatagtgactggcaccgacgagcagacccaggttgttctcaattgtgatgtcctgtcacacttcccaaatctcttatcacacccaaaagagaagataaataaggaagcagtgtggttcctttccaacataacagcaggcaaccagcaacaagttcaagctgtaatagatgctggattaattcctatgataattcatcagcttgctaagggggactttggaacacaaaaagaagctgcttgggcaatcagcaacttaacaataagtggcagaaaagatcaggttgagtaccttgtacagcagaatgtaataccaccgttctgtaatttactgtcagtgaaagattctcaagtggttcaggtggttctagatggtctaaaaaacattctgataatggccggtgatgaagcaagcacaatagctgaaataatagaggaatgtggaggtttggagaaaattgaagttttacagcaacatgaaaatgaagacatatataaattagcatttgaaatcatagatcagtatttctctggtgatgatattgatgaagatccctgcctcattcctgaagcaacacaaggaggtacctacaattttgatccaacagccaaccttcaaacaaaagaatttaatttttaaattcagttgagtgcagcatctttcccacattcaatatgaagcaccaccagatggctaccaaatgataagaacaacagcaacaaaaggctccaaaacacacatgcctctttgttttgatgcttctaaagcaagccatgtctcagtcactttgcagttgccaaaagtcactatcacatggactgtaaatgcatatgcatgatttcctaaactgttttagaactctccttaacaatctcaactaccctatttttccctgttccctggtgccacaggctgacaactgcagtctccagtttagaataaatattccatagtggtgacatgtcagctgcccactgatactcctttggaaaatggtgcgctgtggatcaagacactttggtatgatgcatatacaagttggaagactaaagaggtgcagtgtgatctgagcctccatcattgtcctccacaaacatattttcatattctttatgtggaagaatagattttaaagtacaagccaaatgattttcattggtggaactgacacaaaaaaagtaacttaaaaacaagaaacttggttattgaataaacagataagttttaaaaaaaaaaaaaactacttcatctaccagtaattgatgtgtttattatctgcctcagaagccagggttggaggaagaactttagatatggatattaatgcttttgccattatacctaatttttgagaacagcaagccctatttgaccactctcttcagcctgtgtgttcctgctgttttgaagtaatcaaatgctgtgcatggtattttacctgagctgcaacctgttatggacttgaacttctgtttaagttgaaagcaagagtccctgagtataaaggaaaaacagcaaaacaaaaagcaaacaaaaaaaaactgcaaaagtctaaaatacccattggtgatgttttttaaaaaaatcttgctttcagctttcaggagttaatattctttgttttaatttgataattggatatggttgatttatattgggtttaaactgtggagctttcatgtttactgtaatttagtcttaaaatattttttacttagtaaccagtgcttttgataatgtggttggcaacaaaccagcaactatttagaagtgtcataagagttcattctttgagtattgggaaagttaattcagatcctactcaaaaagcatcttcacatattaaaagattcagacagggatctgtgtagaggagtaatttgcagttatttaacataaacctgatttgcagtgatctctaagtaattctgcaaaatccggtattactatgtcaagttattgcttttggtaaattgtctgacccagttattaatgaaagaatatggatttaaaaatttttaaactaaataatttgtgctgtcacagaaatggtattgttgctcttgtttactgggtataatttcccaatgcattgatgtgaagggatagaaaatctaaactaatttagttatccattggggggtgtatttactgtgatgaagatgagacagatgccatcagagctttgtgaatcagctggggtgttttcactgataaacaacacatagcaggtgtgcattcattacaaatatatgtatctgccaaggtggagccactttaaagagtgagttttgtcttgtatctaaagtggatacaagcgtatgtttaaactgcaagatttttacttgctagagaatctgttttaatatagtggtttggcctctgattatttataggttttataaattttagaatcaatttctctttaaggtggctcagatttttcaactcttgtgcacataaaattgagttgaagttcattgtgcctttttttctttatccaaattttgagttaaagcttcatatggtaactgcatcctgttcggacactatagtctaaatttttgaaactgtgtggtgttcgctaaaagtaggaataacaacgtaaaagctaattaaggtcacaaacttcggtgaaacccttaaaagtccaaatcttcttgatattgtgaaccgtaccccttccagtttagtttcttctggactttccttacttaactgacagttaccttttaaaatttgcacacattatgattaaaattgggcctctactgtgatgattcctatttcctctcatgttttaaagtgcaaactaacatttaagtgaacattagcatcaagtagtgcagacacttgtatgcatttccttgattcaatttgtgaccttaccagttttgaattggaattgcaccatttcgtagataaaggaaactaagtatattgctgcacttttaagttttcaaaacagtgtttaaaaattgcattgttatttttttttaaactcagtttaaaaagactaaaacgttctttcaaaagaggcatctaaatgtgttcctaattttgtatatgggcttaggttttgtaaccaataaaaaaagctgctatcaaatatgataaaacattgaaaacttaaaaaaaa

SEQ ID NO: 322458 - DNA, 3346 bp, Homo sapiens
gtgtctacaagaatgtttatatctgtatggtatatgaggacacatataaacattcttgtagacactgtttgggctctgtcatacttgacagatggaggtaatgaacagatacagatggttattgattcaggagttgtgccctttcttgtgccccttctgagccatcaggaagtcaaagttcaaacagcagccctcagagcagttggcaacatagtgactggcaccgacgagcagacccaggttgttctcaattgtgatgtcctgtcacacttcccaaatctcttatcacacccaaaagagaagataaataaggaagcagtgtggttcctttccaacataacagcaggcaaccagcaacaagttcaagctgtaatagatgctggattaattcctatgataattcatcagcttgctaagggggactttggaacacaaaaagaagctgcttgggcaatcagcaacttaacaataagtggcagaaaagatcaggttgagtaccttgtacagcagaatgtaataccaccgttctgtaatttactgtcagtgaaagattctcaagtggttcaggtggttctagatggtctaaaaaacattctgataatggccggtgatgaagcaagcacaatagctgaaataatagaggaatgtggaggtttggagaaaattgaagttttacagcaacatgaaaatgaagacatatataaattagcatttgaaatcatagatcagtatttctctggtgatgatattgatgaagatccctgcctcattcctgaagcaacacaaggaggtacctacaattttgatccaacagccaaccttcaaacaaaagaatttaatttttaaattcagttgagtgcagcatctttcccacattcaatatgaagcaccaccagatggctaccaaatgataagaacaacagcaacaaaaggctccaaaacacacatgcctctttgttttgatgcttctaaagcaagccatgtctcagtcactttgcagttgccaaaagtcactatcacatggactgtaaatgcatatgcatgatttcctaaactgttttagaactctccttaacaatctcaactaccctatttttccctgttccctggtgccacaggctgacaactgcagtctccagtttagaataaatattccatagtggtgacatgtcagctgcccactgatactcctttggaaaatggtgcgctgtggatcaagacactttggtatgatgcatatacaagttggaagactaaagaggtgcagtgtgatctgagcctccatcattgtcctccacaaacatattttcatattctttatgtggaagaatagattttaaagtacaagccaaatgattttcattggtggaactgacacaaaaaaagtaacttaaaaacaagaaacttggttattgaataaacagataagttttaaaaaaaaaaaaaactacttcatctaccagtaattgatgtgtttattatctgcctcagaagccagggttggaggaagaactttagatatggatattaatgcttttgccattatacctaatttttgagaacagcaagccctatttgaccactctcttcagcctgtgtgttcctgctgttttgaagtaatcaaatgctgtgcatggtattttacctgagctgcaacctgttatggacttgaacttctgtttaagttgaaagcaagagtccctgagtataaaggaaaaacagcaaaacaaaaagcaaacaaaaaaaaactgcaaaagtctaaaatacccattggtgatgttttttaaaaaaatcttgctttcagctttcaggagttaatattctttgttttaatttgataattggatatggttgatttatattgggtttaaactgtggagctttcatgtttactgtaatttagtcttaaaatattttttacttagtaaccagtgcttttgataatgtggttggcaacaaaccagcaactatttagaagtgtcataagagttcattctttgagtattgggaaagttaattcagatcctactcaaaaagcatcttcacatattaaaagattcagacagggatctgtgtagaggagtaatttgcagttatttaacataaacctgatttgcagtgatctctaagtaattctgcaaaatccggtattactatgtcaagttattgcttttggtaaattgtctgacccagttattaatgaaagaatatggatttaaaaatttttaaactaaataatttgtgctgtcacagaaatggtattgttgctcttgtttactgggtataatttcccaatgcattgatgtgaagggatagaaaatctaaactaatttagttatccattggggggtgtatttactgtgatgaagatgagacagatgccatcagagctttgtgaatcagctggggtgttttcactgataaacaacacatagcaggtgtgcattcattacaaatatatgtatctgccaaggtggagccactttaaagagtgagttttgtcttgtatctaaagtggatacaagcgtatgtttaaactgcaagatttttacttgctagagaatctgttttaatatagtggtttggcctctgattatttataggttttataaattttagaatcaatttctctttaaggtggctcagatttttcaactcttgtgcacataaaattgagttgaagttcattgtgcctttttttctttatccaaattttgagttaaagcttcatatggtaactgcatcctgttcggacactatagtctaaatttttgaaactgtgtggtgttcgctaaaagtaggaataacaacgtaaaagctaattaaggtcacaaacttcggtgaaacccttaaaagtccaaatcttcttgatattgtgaaccgtaccccttccagtttagtttcttctggactttccttacttaactgacagttaccttttaaaatttgcacacattatgattaaaattgggcctctactgtgatgattcctatttcctctcatgttttaaagtgcaaactaacatttaagtgaacattagcatcaagtagtgcagacacttgtatgcatttccttgattcaatttgtgaccttaccagttttgaattggaattgcaccatttcgtagataaaggaaactaagtatattgctgcacttttaagttttcaaaacagtgtttaaaaattgcattgttatttttttttaaactcagtttaaaaagactaaaacgttctttcaaaagaggcatctaaatgtgttcctaattttgtatatgggcttaggttttgtaaccaataaaaaaagctgctatcaaatatgataaaacattgaaaacttaaaaaaaa

SEQ ID NO: 322459 - DNA, 957 bp, Homo sapiens
  misc_feature (886)..(886): n is a, c, g, or t
  misc_feature (917)..(917): n is a, c, g, or t
  misc_feature (948)..(948): n is a, c, g, or t
gctactgccacctcgcgctcggaggcgtcacagaacgtgctcttctctcccctcccccctcccgctctccccctcctccccctcccgctccaagattcgccgccgccgccgccgcagccgcaggagtagccgccgccggagccgcgcgcagccatggccgagaaccccagcttggagaaccaccgcatcaagagcttcaagaacaagggccgcgatgtggaaacaatgcgaagacatagaaatgaagtgacagtggaactgcggaagaacaaaagagatgaacacttattgaaaaagagaaatgttccccaagaagaaagtctagaagattcagatgttgatgctgattttaaagcacaaaatgtaaccctagaagctatattgcagaatgccacaagtgataacccagtggtccaattgagtgctgtccaggcagcaagaaaactgttatccagtgacagaaatccaccgattgatgacttaataaaatctgggattttaccaattctagtcaaatgtctagaaagggatgataatccttcattacagtttgaagctgcttgggcattaactaacatagcatcaggaacttctgcacagactcaagctgttgtgcagtctaatgcagtacctctttttctgagacttcttcgttcaccacatcagaatgtttgtgaacaagcagtatgggctttgggaaacattataggtgatggtcctcaatgtagagattatgtcatatcactgggagttgtcaaacctcttctgtccttcatcagtccctccatccccatcaccttccttcggaacgtcacatgggtcattgtcaatctctgcaggaataaggatcccccaccgcctatggagacagttcaggagattttgnccgctttatggggtcctcattttcccttccngattttaaccatctttggagaccactggttngggcttttg

SEQ ID NO: 322460 - DNA, 2466 bp, Homo sapiens
agcggatcggccgccgttgcgcggcgcagagcggcagcaagatggcggcgcaacagcgggactgcgggggtgctgcgcagctggcggggccggcggcggaggctgaccccctaggacgcttcacgtgtcccgtgtgcttagaggtgtacgagaagccggtacaggtgccctgcggacacgtcttttgctctgcatgcctgcaggaatgtctgaagccgaagaagcctgtctgtggggtgtgtcgcagcgctctggcacctggcgtccgagccgtggagctcgagcggcagatcgagagcacagagacttcttgccatggctgccgtaagaatttcttcctgtccaagatccggtcccacgtggctacttgttccaaataccagaattacatcatggaaggtgtgaaggccaccattaaggatgcatctcttcagccaaggaatgttccaaaccgttacacctttccttgtccttactgtcctgagaagaactttgatcaggaaggacttgtggaacactgcaaattattccatagcacggataccaaatctgtggtttgtccgatatgtgcctcgatgccctggggagaccccaactaccgcagcgccaacttcagagagcacatccagcgccggcaccggttttcttatgacacttttgtggattatgatgttgatgaagaggacatgatgaatcaggtgttgcagcgctccatcatcgaccagtgagcagagtccgtgcttgctatctgtctcatgttacagagcttccattacatattaaacgtgaaatctatgactcctgtaccttacctgttcaacagacctgaaaatgagccatggcattgggacagggtcacttctgacaggggaagtgggtccccaggtcagcccttctcttccctttgggctcttgccaaagctgtcttcccctactgttaaccttgtttgtcacacggtcgagttcgtattggttctcggctacttcctggagcttctgccgcctcctgtggaagataatctagcttctccacctcttgtttcacactcattcctcccatccagtgtttgtctctcgggtccttcaagccagccaggaccttttctgggtcatgaatagcacaatgaagcaagtgtctcctttccttgtccccaaggtgtgcagactttggcagccgtgcacctgaccagagctgaagctcccgctgggctgtggggttgccagaagctggggttgccatcccggggtacatgtcaccagtcctcttggggttttgtaccatctgatgctggaagttttgattagtgatattttctactactacatatttagagttcactggttcagtcttaaatgcctgcatggtgcctttttaggataaggtataaccatacatttttggtggaagtgtttctgggttagggaagttaaagtctgtttatccgtaagtggggaggagggtcagctaagagaagtgggagggccagagctttttggttctgatttacaaattaatgaagtagtttcaaacaacgcggtcatgtttacctctccatttgggagcctgcctacattcttgttctagaagcacaaaaaatcctcagatgaattagaagaaagaggtttggggactcagcggatactagttcttttaccttctgcttggtaacttagattaaactgagcattgtttttctgtcacaaatgttttccttatgacactggtttcgacatgtaaaatgtgtttgaaaacctgctttgtagatgcagagagaagctataggaaacccagtaccacccctggtctgttctgacgagacatcgttcataaggcacagcacatcgcaagatgaacagttgttaataaaagctgttgctggaaacttgctttaggaacagctcaagaaccttggagttcatatttcacaaatattaataaatataagtccaagagctgtcagcctaatctgtaggagcagaacctctgattgaccaaaaggcatatgggtttaggttggttttttgatgtcatatgtctctgatggggctgcaagtgctacctcgcgcttgtacactgctgctgtggggctccgcgcctgccggtgaagagctgcagatgccgagaagccagcaaacacagggcccactggaaaaaaatagttttttcattagtatttctcgggaggacccaaaagttaaggtcagcttgttcactgtaatttctggaagaagttcactcagaccttcctgaattcagatcatctcagaagtctggagggaaatctggcgaaaccttcgtttgagggactgatgtgagtgtatgtccacctcactggtggcaccgagaaacttacttccttgtattaagtgcacttcttgtatttctaataagatgactttccagaaagtgagatttgttatgttctggcttttaaaaggtaaaatataaataaatttcataactta

SEQ ID NO: 322461 - DNA, 817 bp, Homo sapiens
agcggatcggccgccgttgcgcggcgcagagcggcagcaagatggcggcgcaacagcgggactgcgggggtgctgcgcagctggcggggccggcggcggaggctgaccccctaggacgcttcacgtgtcccgtgtgcttagaggtgtacgagaagccggtacaggtgccctgcggacacgtcttttgctctgcatgcctgcaggaatgtctgaagccgaagaagcctgtctgtggggtgtgtcgcagcgctctggcacctggcgtccgagccgtggagctcgagcggcagatcgagagcacagagacttcttgccatggctgccgtaagaatttcttcctgtccaagatccggtcccacgtggctacttgttccaaataccagaattacatcatggaaggtgtgaaggccaccattaaggatgcatctcttcagccaaggaatgttccaaaccgttacacctttccttgtccttactgtcctgagaagaactttgatcaggaaggacttgtggaacactgcaaattattccatagcacggataccaaatctgtggtttgtccgatatgtgcctcgatgccctggggagaccccaactaccgcagcgccaacttcagagagcacatccagcgccggcaccggttttcttatgacacttttgtggattatgatgttgatgaagaggacatgatgaatcaggtgttgcagcgctccatcatcgaccagtgagcagagtccgtgcttgctatctgtctcatgttacagagcttccattacatattaaacgtgaaatcttcttaaaaaaaaaaggggggggg

SEQ ID NO: 322462 - DNA, 959 bp, Homo sapiens
agattttaaagattatttctcagaggctggtgatagatactttaaccagggttagtggcttttatatgttttacctaaaggatcacttttctctgctgcacataacagaatgtggtttttggcttgctgtaaggagactagtttaaatgctagtatagaaaacttttaaaaacatcctagatttggagcttgtctgtgagcagacagcctatcatgaataggagcaaacctctaggagagttattttagagtggaagtggatatcctgatttagtcgaataaaatagcagccttggtattaatgggaaatctgcaataatcagggtttcagccccatcagcgtagtcaggagtttggtgagattatttgccagggtggtgtaggtctagttttctttgtgcccttgtttgggactatattttgcctgttgcaaggtcctcactaacttatgggctctgattcttcctatttgagttcttcctgtccaagatccggtcccacgtggctacttgttccaaataccagaattacatcatggaaggtgtgaaggccaccattaaggatgcatctcttcagccaaggaatgttccaaaccgttacacctttccttgtccttactgtcctgagaagaactttgatcaggaaggacttgtggaacactgcaaattattccatagcacggataccaaatctgtggtttgtccgatatgtgcctcgatgccctggggagaccccaactaccgcagcgccaacttcagagagcacatccagcgccggcaccggttttcttatgacacttttgtggattatgatgttgatgaagaggacatgatgaatcaggtgttgcagcgctccatcatcgaccagtgagcagagtccgtgcttgctatctgtctcatgttacagagcttccattacatattaaacgtgaaatcttcttaaaaaaaaaaggggggggg

SEQ ID NO: 322463 - DNA, 2602 bp, Homo sapiens
  misc_feature (29)..(29): n is a, c, g, or t
  misc_feature (46)..(46): n is a, c, g, or t
  misc_feature (51)..(51): n is a, c, g, or t
  misc_feature (56)..(56): n is a, c, g, or t
  misc_feature (68)..(70): n is a, c, g, or t
  misc_feature (75)..(75): n is a, c, g, or t
  misc_feature (79)..(79): n is a, c, g, or t
  misc_feature (83)..(84): n is a, c, g, or t
  misc_feature (105)..(105): n is a, c, g, or t
  misc_feature (115)..(115): n is a, c, g, or t
  misc_feature (120)..(120): n is a, c, g, or t
  misc_feature (130)..(130): n is a, c, g, or t
  misc_feature (158)..(158): n is a, c, g, or t
  misc_feature (163)..(163): n is a, c, g, or t
  misc_feature (165)..(165): n is a, c, g, or t
  misc_feature (172)..(172): n is a, c, g, or t
aggtattatattgagatggagtcttgctntttgacccaggctggantgcantgatntgatctcagctnnntgcancctncacnnctcgggttcaagcgattctcntgcctcagcnccttnagtaactggnactacaggcatgtgctaccacgcttggntaatntntgtattnttagtagagcggcgcaacagcgggactgcgggggtgctgcgcagctggcggggccggcggcggaggctgaccccctaggacgcttcacgtgtcccgtgtgcttagaggtgtacgagaagccggtacaggtgccctgcggacacgtcttttgctctgcatgcctgcaggaatgtctgaagccgaagaagcctgtctgtggggtgtgtcgcagcgctctggcacctggcgtccgagccgtggagctcgagcggcagatcgagagcacagagacttcttgccatggctgccgtaagaatttcttcctgtccaagatccggtcccacgtggctacttgttccaaataccagaattacatcatggaaggtgtgaaggccaccattaaggatgcatctcttcagccaaggaatgttccaaaccgttacacctttccttgtccttactgtcctgagaagaactttgatcaggaaggacttgtggaacactgcaaattattccatagcacggataccaaatctgtggtttgtccgatatgtgcctcgatgccctggggagaccccaactaccgcagcgccaacttcagagagcacatccagcgccggcaccggttttcttatgacacttttgtggattatgatgttgatgaagaggacatgatgaatcaggtgttgcagcgctccatcatcgaccagtgagcagagtccgtgcttgctatctgtctcatgttacagagcttccattacatattaaacgtgaaatctatgactcctgtaccttacctgttcaacagacctgaaaatgagccatggcattgggacagggtcacttctgacaggggaagtgggtccccaggtcagcccttctcttccctttgggctcttgccaaagctgtcttcccctactgttaaccttgtttgtcacacggtcgagttcgtattggttctcggctacttcctggagcttctgccgcctcctgtggaagataatctagcttctccacctcttgtttcacactcattcctcccatccagtgtttgtctctcgggtccttcaagccagccaggaccttttctgggtcatgaatagcacaatgaagcaagtgtctcctttccttgtccccaaggtgtgcagactttggcagccgtgcacctgaccagagctgaagctcccgctgggctgtggggttgccagaagctggggttgccatcccggggtacatgtcaccagtcctcttggggttttgtaccatctgatgctggaagttttgattagtgatattttctactactacatatttagagttcactggttcagtcttaaatgcctgcatggtgcctttttaggataaggtataaccatacatttttggtggaagtgtttctgggttagggaagttaaagtctgtttatccgtaagtggggaggagggtcagctaagagaagtgggagggccagagctttttggttctgatttacaaattaatgaagtagtttcaaacaacgcggtcatgtttacctctccatttgggagcctgcctacattcttgttctagaagcacaaaaaatcctcagatgaattagaagaaagaggtttggggactcagcggatactagttcttttaccttctgcttggtaacttagattaaactgagcattgtttttctgtcacaaatgttttccttatgacactggtttcgacatgtaaaatgtgtttgaaaacctgctttgtagatgcagagagaagctataggaaacccagtaccacccctggtctgttctgacgagacatcgttcataaggcacagcacatcgcaagatgaacagttgttaataaaagctgttgctggaaacttgctttaggaacagctcaagaaccttggagttcatatttcacaaatattaataaatataagtccaagagctgtcagcctaatctgtaggagcagaacctctgattgaccaaaaggcatatgggtttaggttggttttttgatgtcatatgtctctgatggggctgcaagtgctacctcgcgcttgtacactgctgctgtggggctccgcgcctgccggtgaagagctgcagatgccgagaagccagcaaacacagggcccactggaaaaaaatagttttttcattagtatttctcgggaggacccaaaagttaaggtcagcttgttcactgtaatttctggaagaagttcactcagaccttcctgaattcagatcatctcagaagtctggagggaaatctggcgaaaccttcgtttgagggactgatgtgagtgtatgtccacctcactggtggcaccgagaaacttacttccttgtattaagtgcacttcttgtatttctaataagatgactttccagaaagtgagatttgttatgttctggcttttaaaaggtaaaatataaataaatttcataactta

SEQ ID NO: 322464 - DNA, 2546 bp, Homo sapiens
agcggatcggccgccgttgcgcggcgcagagcggcagcaagatggcggcgcaacagcgggactgcgggggtgctgcgcagctggcggggccggcggcggaggctgaccccctaggacgcttcacgtgtcccgtgtgcttagaggtgtacgagaagccggtacaggtgccctgcggacacgtcttttgctctgcatgcctgcaggaatgtctgaagccgaagaagcctgtctgtggggtgtgtcgcagcgctctggcacctggcgtccgagccgtggagctcgagcggcagatcgagagcacagagacttcttgccatggctgccgtaagaatttcttcctgtccaagatccggtcccacgtggctacttgttccaaataccagaattacatcatggaaggtgtgaaggccaccattaaggatgcatctcttcagccaaggaatgttccaaaccgttacacctttccttgtccttactgtcctgagaagaactttgatcaggaaggacttgtggaacactgcaaattattccatagcacggataccaaatctgtggtttgtccgatatgtgcctcgatgccctggggagaccccaactaccgcagcgccaacttcagagagcacatccagcgccggcaccggttttcttatgacacttttgtggattatgatgttgatgaagaggacatgatgaatcaggtgttgcagcgctccatcatcgaccagtgagcagagtccgtgcttgctatctgtctcatgttacagagcttccattacatattaaacgtgaaatctatgactcctgtaccttacctgttcaacagacctgaaaatgagccatggcattgggacagggtcacttctgacaggggaagtgggtccccaggtcagcccttctcttccctttgggctcttgccaaagctgtcttcccctactgttaaccttgtttgtcacacggtcgagttcgtattggttctcggctacttcctggagcttctgccgcctcctgtggaagataatctagcttctccacctcttgtttcacactcattcctcccatccagtgtttgtctctcgggtccttcaagccagccaggaccttttctgggtcatgaatagcacaatgaagcaagtgtctcctttccttgtccccaaggtgtgcagactttggcagccgtgcacctgaccagagctgaagctcccgctgggctgtggggttgccagaagctggggttgccatcccggggtacatgtcaccagtcctcttggggttttgtaccatctgatgctggaagttttgattagtgatattttctactactacatatttagagttcactggttcagtcttaaatgcctgcatggtgcctttttaggataaggtataaccatacatttttggtggaagtgtttctgggttagggaagttaaagtctgtttatccgtaagtggggaggagggtcagctaagagaagtgggagggccagagctttttggttctgatttacaaattaatgaagtagtttcaaacaacgcggtcatgtttacctctccatttgggagcctgcctacattcttgttctagaagcacaaaaaatcctcagatgaattagaagaaagaggtttggggactcagcggatactagttcttttaccttctgcttggtaacttagattaaactgagcattgtttttctgtcacaaatgttttccttatgacactggtttcgacatgtaaaatgtgtttgaaaacctgctttgtagatgcagagagaagctataggaaacccagtaccacccctggtctgttctgacgagacatcgttcataaggcacagcacatcgcaagatgaacagttgttaataaaagctgttgctggaaacttgctttaggaacagctcaagaaccttggagttcatatttcacaaatattaataaatataagtccaagagctgtcagcctaatctgtaggagcagaacctctgattgaccaaaaggcatatgggtttaggttggttttttgatgtcatatgtctctgatggggctgcaagtgctacctcgcgcttgtacactgctgctgtggggctccgcgcctgccggtgaagagctgcagatgccgagaagccagcaaacacagggcccactggaaaaaaatagttttttcattagtatttctcgggaggacccaaaagttaaggtcagcttgttcactgtaatttctggaagaagttcactcagaccttcctgaattcagatcatctcagaagtctggagggaaatctggcgaaaccttcgtttgagggactgatgtgagtgtatgtccacctcactggtggcaccgagaaacttacttccttgtattaagtgcacttcttgtatttctaataagatgactttccagaaagtgagatttgttatgttctggcttttaaaaggtaaaatataaataaatttcataacttaatctaagtggtaagctatggttcttgttttcattcaacacatttgccatagcatgggcttggggagtctccagaagatgg

SEQ ID NO: 322465 - DNA, 2608 bp, Homo sapiens
agattttaaagattatttctcagaggctggtgatagatactttaaccagggttagtggcttttatatgttttacctaaaggatcacttttctctgctgcacataacagaatgtggtttttggcttgctgtaaggagactagtttaaatgctagtatagaaaacttttaaaaacatcctagatttggagcttgtctgtgagcagacagcctatcatgaataggagcaaacctctaggagagttattttagagtggaagtggatatcctgatttagtcgaataaaatagcagccttggtattaatgggaaatctgcaataatcagggtttcagccccatcagcgtagtcaggagtttggtgagattatttgccagggtggtgtaggtctagttttctttgtgcccttgtttgggactatattttgcctgttgcaaggtcctcactaacttatgggctctgattcttcctatttgagttcttcctgtccaagatccggtcccacgtggctacttgttccaaataccagaattacatcatggaaggtgtgaaggccaccattaaggatgcatctcttcagccaaggaatgttccaaaccgttacacctttccttgtccttactgtcctgagaagaactttgatcaggaaggacttgtggaacactgcaaattattccatagcacggataccaaatctgtggtttgtccgatatgtgcctcgatgccctggggagaccccaactaccgcagcgccaacttcagagagcacatccagcgccggcaccggttttcttatgacacttttgtggattatgatgttgatgaagaggacatgatgaatcaggtgttgcagcgctccatcatcgaccagtgagcagagtccgtgcttgctatctgtctcatgttacagagcttccattacatattaaacgtgaaatctatgactcctgtaccttacctgttcaacagacctgaaaatgagccatggcattgggacagggtcacttctgacaggggaagtgggtccccaggtcagcccttctcttccctttgggctcttgccaaagctgtcttcccctactgttaaccttgtttgtcacacggtcgagttcgtattggttctcggctacttcctggagcttctgccgcctcctgtggaagataatctagcttctccacctcttgtttcacactcattcctcccatccagtgtttgtctctcgggtccttcaagccagccaggaccttttctgggtcatgaatagcacaatgaagcaagtgtctcctttccttgtccccaaggtgtgcagactttggcagccgtgcacctgaccagagctgaagctcccgctgggctgtggggttgccagaagctggggttgccatcccggggtacatgtcaccagtcctcttggggttttgtaccatctgatgctggaagttttgattagtgatattttctactactacatatttagagttcactggttcagtcttaaatgcctgcatggtgcctttttaggataaggtataaccatacatttttggtggaagtgtttctgggttagggaagttaaagtctgtttatccgtaagtggggaggagggtcagctaagagaagtgggagggccagagctttttggttctgatttacaaattaatgaagtagtttcaaacaacgcggtcatgtttacctctccatttgggagcctgcctacattcttgttctagaagcacaaaaaatcctcagatgaattagaagaaagaggtttggggactcagcggatactagttcttttaccttctgcttggtaacttagattaaactgagcattgtttttctgtcacaaatgttttccttatgacactggtttcgacatgtaaaatgtgtttgaaaacctgctttgtagatgcagagagaagctataggaaacccagtaccacccctggtctgttctgacgagacatcgttcataaggcacagcacatcgcaagatgaacagttgttaataaaagctgttgctggaaacttgctttaggaacagctcaagaaccttggagttcatatttcacaaatattaataaatataagtccaagagctgtcagcctaatctgtaggagcagaacctctgattgaccaaaaggcatatgggtttaggttggttttttgatgtcatatgtctctgatggggctgcaagtgctacctcgcgcttgtacactgctgctgtggggctccgcgcctgccggtgaagagctgcagatgccgagaagccagcaaacacagggcccactggaaaaaaatagttttttcattagtatttctcgggaggacccaaaagttaaggtcagcttgttcactgtaatttctggaagaagttcactcagaccttcctgaattcagatcatctcagaagtctggagggaaatctggcgaaaccttcgtttgagggactgatgtgagtgtatgtccacctcactggtggcaccgagaaacttacttccttgtattaagtgcacttcttgtatttctaataagatgactttccagaaagtgagatttgttatgttctggcttttaaaaggtaaaatataaataaatttcataactta

SEQ ID NO: 322466 - DNA, 1653 bp, Homo sapiens
  misc_feature (1627)..(1627): n is a, c, g, or t
agcggatcggccgccgttgcgcggcgcagagcggcagcaagatggcggcgcaacagcgggactgcgggggtgctgcgcagctggcggggccggcggcggaggctgaccccctaggacgcttcacgtgtcccgtgtgcttagaggtgtacgagaagccggtacaggtgccctgcggacacgtcttttgctctgcatgcctgcaggaatgtctgaagccgaagaagcctgtctgtggggtgtgtcgcagcgctctggcacctggcgtccgagccgtggagctcgagcggcagatcgagagcacagagacttcttgccatggctgccgtaagaatttcttcctgtccaagatccggtcccacgtggctacttgttccaaataccagaattacatcatggaaggtgtgaaggccaccattaaggatgcatctcttcagccaaggaatgttccaaaccgttacacctttccttgtccttactgtcctgagaagaactttgatcaggaaggacttgtggaacactgcaaattattccatagcacggataccaaatctgtggtttgtccgatatgtgcctcgatgccctggggagaccccaactaccgcagcgccaacttcagagagcacatccagcgccggcaccggttttcttatgacacttttgtggattatgatgttgatgaagaggacatgatgaatcaggtgttgcagcgctccatcatcgaccagtgagcagagtccgtgcttgctatctgtctcatgttacagagcttccattacatattaaacgtgaaatctatgactcctgtaccttacctgttcaacagacctgaaaatgagccatggcattgggacagggtcacttctgacaggggaagtgggtccccaggtcagcccttctcttccctttgggctcttgccaaagctgtcttcccctactgttaaccttgtttgtcacacggtcgagttcgtattggttctcggctacttcctggagcttctgccgcctcctgtggaagataatctagcttctccacctcttgtttcacactcattcctcccatccagtgtttgtctctcgggtccttcaagccagccaggaccttttctgggtcatgaatagcacaatgaagcaagtgtctcctttccttgtccccaaggtgtgcagactttggcagccgtgcacctgaccagagctgaagctcccgctgggctgtggggttgccagaagctggggttgccatcccggggtacatgtcaccagtcctcttggggttttgtaccatctgatgctggaagttttgattagtgatattttctactactacatatttagagttcactggttcagtcttaaatgcctgcatggtgcctttttaggataaggtataaccatacatttttggtggaagtgtttctgggttagggaagttaaagtctgtttatccgtaagtggggaggagggtcagctaagagaagtgggagggccagagctttttggttctgatttacaaattaatgaagtagtttcaaacaacgcggtcatgtttacctctccatttgggagcctgcctacattcttgttctagaagcacaaaaaatcctcagatgaattagaagaaagaggctangaccttggggcttaagggacccttgg

SEQ ID NO: 322467 - DNA, 2012 bp, Homo sapiens
  misc_feature (29)..(29): n is a, c, g, or t
  misc_feature (46)..(46): n is a, c, g, or t
  misc_feature (51)..(51): n is a, c, g, or t
  misc_feature (56)..(56): n is a, c, g, or t
  misc_feature (68)..(70): n is a, c, g, or t
  misc_feature (75)..(75): n is a, c, g, or t
  misc_feature (79)..(79): n is a, c, g, or t
  misc_feature (83)..(84): n is a, c, g, or t
  misc_feature (105)..(105): n is a, c, g, or t
  misc_feature (115)..(115): n is a, c, g, or t
  misc_feature (120)..(120): n is a, c, g, or t
  misc_feature (130)..(130): n is a, c, g, or t
  misc_feature (158)..(158): n is a, c, g, or t
  misc_feature (163)..(163): n is a, c, g, or t
  misc_feature (165)..(165): n is a, c, g, or t
  misc_feature (172)..(172): n is a, c, g, or t
aggtattatattgagatggagtcttgctntttgacccaggctggantgcantgatntgatctcagctnnntgcancctncacnnctcgggttcaagcgattctcntgcctcagcnccttnagtaactggnactacaggcatgtgctaccacgcttggntaatntntgtattnttagtagagcggcgcaacagcgggactgcgggggtgctgcgcagctggcggggccggcggcggaggctgaccccctaggacgcttcacgtgtcccgtgtgcttagaggtgtacgagaagccggtacaggtgccctgcggacacgtcttttgctctgcatgcctgcaggaatgtctgaagccgaagaagcctgtctgtggggtgtgtcgcagcgctctggcacctggcgtccgagccgtggagctcgagcggcagatcgagagcacagagacttcttgccatggctgccgtaagaattgtcttcccctactgttaaccttgtttgtcacacggtcgagttcgtattggttctcggctacttcctggagcttctgccgcctcctgtggaagataatctagcttctccacctcttgtttcacactcattcctcccatccagtgtttgtctctcgggtccttcaagccagccaggaccttttctgggtcatgaatagcacaatgaagcaagtgtctcctttccttgtccccaaggtgtgcagactttggcagccgtgcacctgaccagagctgaagctcccgctgggctgtggggttgccagaagctggggttgccatcccggggtacatgtcaccagtcctcttggggttttgtaccatctgatgctggaagttttgattagtgatattttctactactacatatttagagttcactggttcagtcttaaatgcctgcatggtgcctttttaggataaggtataaccatacatttttggtggaagtgtttctgggttagggaagttaaagtctgtttatccgtaagtggggaggagggtcagctaagagaagtgggagggccagagctttttggttctgatttacaaattaatgaagtagtttcaaacaacgcggtcatgtttacctctccatttgggagcctgcctacattcttgttctagaagcacaaaaaatcctcagatgaattagaagaaagaggtttggggactcagcggatactagttcttttaccttctgcttggtaacttagattaaactgagcattgtttttctgtcacaaatgttttccttatgacactggtttcgacatgtaaaatgtgtttgaaaacctgctttgtagatgcagagagaagctataggaaacccagtaccacccctggtctgttctgacgagacatcgttcataaggcacagcacatcgcaagatgaacagttgttaataaaagctgttgctggaaacttgctttaggaacagctcaagaaccttggagttcatatttcacaaatattaataaatataagtccaagagctgtcagcctaatctgtaggagcagaacctctgattgaccaaaaggcatatgggtttaggttggttttttgatgtcatatgtctctgatggggctgcaagtgctacctcgcgcttgtacactgctgctgtggggctccgcgcctgccggtgaagagctgcagatgccgagaagccagcaaacacagggcccactggaaaaaaatagttttttcattagtatttctcgggaggacccaaaagttaaggtcagcttgttcactgtaatttctggaagaagttcactcagaccttcctgaattcagatcatctcagaagtctggagggaaatctggcgaaaccttcgtttgagggactgatgtgagtgtatgtccacctcactggtggcaccgagaaacttacttccttgtattaagtgcacttcttgtatttctaataagatgactttccagaaagtgagatttgttatgttctggcttttaaaaggtaaaatataaataaatttcataactta

SEQ ID NO: 322468 - DNA, 1413 bp, Homo sapiens
tttaagacggccccccttttgttttgttttttttggttacggcagcacttttattgtttccgtacacaatgacgtgttgctggggcctaatgttctcacataacagtagaaaaccaaatttgttgtcatctcttcaaagaatcgagaattgcgtacaaaaaaaaccttacataaattaagaatgaatacatttacaggcgtaaatgcaaccgcttccaactcaaagcaagtaacagcccacggtgttctggccaaagacatcagctaagaaaggaaactgggtcctacggcttggactttccaaccctgacagacccgcaagacaaaacaactggttcttgccagcctctagagaaatcccagaacactcagccctgacacgttaataccctgcacagatcagaggctgctggccacacagactcaccaagccacagacttgtcttccacaagcacgttcttaccttagccacgaagtgaccaagccacacgtactaaaggttgaactcaaagacctacattcttgttctagaagcacaaaaaatcctcagatgaattagaagaaagaggtttggggactcagcggatactagttcttttaccttctgcttggtaacttagattaaactgagcattgtttttctgtcacaaatgttttccttatgacactggtttcgacatgtaaaatgtgtttgaaaacctgctttgtagatgcagagagaagctataggaaacccagtaccacccctggtctgttctgacgagacatcgttcataaggcacagcacatcgcaagatgaacagttgttaataaaagctgttgctggaaacttgctttaggaacagctcaagaaccttggagttcatatttcacaaatattaataaatataagtccaagagctgtcagcctaatctgtaggagcagaacctctgattgaccaaaaggcatatgggtttaggttggttttttgatgtcatatgtctctgatggggctgcaagtgctacctcgcgcttgtacactgctgctgtggggctccgcgcctgccggtgaagagctgcagatgccgagaagccagcaaacacagggcccactggaaaaaaatagttttttcattagtatttctcgggaggacccaaaagttaaggtcagcttgttcactgtaatttctggaagaagttcactcagaccttcctgaattcagatcatctcagaagtctggagggaaatctggcgaaaccttcgtttgagggactgatgtgagtgtatgtccacctcactggtggcaccgagaaacttacttccttgtattaagtgcacttcttgtatttctaataagatgactttccagaaagtgagatttgttatgttctggcttttaaaaggtaaaatataaataaatttcataactta

SEQ ID NO: 322469 - DNA, 441 bp, Homo sapiens
  misc_feature (9)..(9): n is a, c, g, or t
  misc_feature (24)..(24): n is a, c, g, or t
  misc_feature (30)..(30): n is a, c, g, or t
  misc_feature (45)..(45): n is a, c, g, or t
  misc_feature (76)..(76): n is a, c, g, or t
  misc_feature (81)..(81): n is a, c, g, or t
  misc_feature (83)..(83): n is a, c, g, or t
  misc_feature (86)..(86): n is a, c, g, or t
  misc_feature (100)..(100): n is a, c, g, or t
  misc_feature (113)..(113): n is a, c, g, or t
caaggtgcntagccctcagcagcnttggancacatgcatgcctgntgggcccccgccgccctgcccgcgtgaacgncgccncnggntgcccgggacgccngcgcaaacaccangcggcccactggaaaaaaatagttttttcattagtatttctcgggaggacccaaaagttaaggtcagcttgttcactgtaatttctggaagaagttcactcagaccttcctgaattcagatcatctcagaagtctggagggaaatctggcgaaaccttcgtttgagggactgatgtgagtgtatgtccacctcactggtggcaccgagaaacttacttccttgtattaagtgcacttcttgtatttctaataagatgactttccagaaagtgagatttgttatgttctggcttttaaaaggtaaaatataaataaatttcataactta

SEQ ID NO: 322470 - DNA, 2410 bp, Homo sapiens
tcgaatcgtaaccgttcgtacgagaatcgctgtcctctccttgcggccgccagtctaggacgcttcacgtgtcccgtgtgcttagaggtgtacgagaagccggtacaggtgccctgcggacacgtcttttgctctgcatgcctgcaggaatgtctgaagccgaagaagcctgtctgtggggtgtgtcgcagcgctctggcacctggcgtccgagccgtggagctcgagcggcagatcgagagcacagagacttcttgccatggctgccgtaagaatttcttcctgtccaagatccggtcccacgtggctacttgttccaaataccagaattacatcatggaaggtgtgaaggccaccattaaggatgcatctcttcagccaaggaatgttccaaaccgttacacctttccttgtccttactgtcctgagaagaactttgatcaggaaggacttgtggaacactgcaaattattccatagcacggataccaaatctgtggtttgtccgatatgtgcctcgatgccctggggagaccccaactaccgcagcgccaacttcagagagcacatccagcgccggcaccggttttcttatgacacttttgtggattatgatgttgatgaagaggacatgatgaatcaggtgttgcagcgctccatcatcgaccagtgagcagagtccgtgcttgctatctgtctcatgttacagagcttccattacatattaaacgtgaaatctatgactcctgtaccttacctgttcaacagacctgaaaatgagccatggcattgggacagggtcacttctgacaggggaagtgggtccccaggtcagcccttctcttccctttgggctcttgccaaagctgtcttcccctactgttaaccttgtttgtcacacggtcgagttcgtattggttctcggctacttcctggagcttctgccgcctcctgtggaagataatctagcttctccacctcttgtttcacactcattcctcccatccagtgtttgtctctcgggtccttcaagccagccaggaccttttctgggtcatgaatagcacaatgaagcaagtgtctcctttccttgtccccaaggtgtgcagactttggcagccgtgcacctgaccagagctgaagctcccgctgggctgtggggttgccagaagctggggttgccatcccggggtacatgtcaccagtcctcttggggttttgtaccatctgatgctggaagttttgattagtgatattttctactactacatatttagagttcactggttcagtcttaaatgcctgcatggtgcctttttaggataaggtataaccatacatttttggtggaagtgtttctgggttagggaagttaaagtctgtttatccgtaagtggggaggagggtcagctaagagaagtgggagggccagagctttttggttctgatttacaaattaatgaagtagtttcaaacaacgcggtcatgtttacctctccatttgggagcctgcctacattcttgttctagaagcacaaaaaatcctcagatgaattagaagaaagaggtttggggactcagcggatactagttcttttaccttctgcttggtaacttagattaaactgagcattgtttttctgtcacaaatgttttccttatgacactggtttcgacatgtaaaatgtgtttgaaaacctgctttgtagatgcagagagaagctataggaaacccagtaccacccctggtctgttctgacgagacatcgttcataaggcacagcacatcgcaagatgaacagttgttaataaaagctgttgctggaaacttgctttaggaacagctcaagaaccttggagttcatatttcacaaatattaataaatataagtccaagagctgtcagcctaatctgtaggagcagaacctctgattgaccaaaaggcatatgggtttaggttggttttttgatgtcatatgtctctgatggggctgcaagtgctacctcgcgcttgtacactgctgctgtggggctccgcgcctgccggtgaagagctgcagatgccgagaagccagcaaacacagggcccactggaaaaaaatagttttttcattagtatttctcgggaggacccaaaagttaaggtcagcttgttcactgtaatttctggaagaagttcactcagaccttcctgaattcagatcatctcagaagtctggagggaaatctggcgaaaccttcgtttgagggactgatgtgagtgtatgtccacctcactggtggcaccgagaaacttacttccttgtattaagtgcacttcttgtatttctaataagatgactttccagaaagtgagatttgttatgttctggcttttaaaaggtaaaatataaataaatttcataactta

SEQ ID NO: 322471 - DNA, 3821 bp, Homo sapiens
agggagtgttcccgggggagatactccagtcgtagcaagagtctcgaccactgaatggaagaaaaggacttttaaccaccattttgtgacttacagaaaggaatttgaataaagaaaactatgatacttcaggcccatcttcactccctgtgtcttcttatgctttatttggcaactggatatggccaagaggggaagtttagtggacccctgaaacccatgacattttctatttatgaaggccaagaaccgagtcaaattatattccagtttaaggccaatcctcctgctgtgacttttgaactaactggggagacagacaacatatttgtgatagaacgggagggacttctgtattacaacagagccttggacagggaaacaagatctactcacaatctccaggttgcagccctggacgctaatggaattatagtggagggtccagtccctatcaccatagaagtgaaggacatcaacgacaatcgacccacgtttctccagtcaaagtacgaaggctcagtaaggcagaactctcgcccaggaaagcccttcttgtatgtcaatgccacagacctggatgatccggccactcccaatggccagctttattaccagattgtcatccagcttcccatgatcaacaatgtcatgtactttcagatcaacaacaaaacgggagccatctctcttacccgagagggatctcaggaattgaatcctgctaagaatccttcctataatctggtgatctcagtgaaggacatgggaggccagagtgagaattccttcagtgataccacatctgtggatatcatagtgacagagaatatttggaaagcaccaaaacctgtggagatggtggaaaactcaactgatcctcaccccatcaaaatcactcaggtgcggtggaatgatcccggtgcacaatattccttagttgacaaagagaagctgccaagattcccattttcaattgaccaggaaggagatatttacgtgactcagcccttggaccgagaagaaaaggatgcatatgttttttatgcagttgcaaaggatgagtacggaaaaccactttcatatccgctggaaattcatgtaaaagttaaagatattaatgataatccacctacatgtccgtcaccagtaaccgtatttgaggtccaggagaatgaacgactgggtaacagtatcgggacccttactgcacatgacagggatgaagaaaatactgccaacagttttctaaactacaggattgtggagcaaactcccaaacttcccatggatggactcttcctaatccaaacctatgctggaatgttacagttagctaaacagtccttgaagaagcaagatactcctcagtacaacttaacgatagaggtgtctgacaaagatttcaagaccctttgttttgtgcaaatcaacgttattgatatcaatgatcagatccccatctttgaaaaatcagattatggaaacctgactcttgctgaagacacaaacattgggtccaccatcttaaccatccaggccactgatgctgatgagccatttactgggagttctaaaattctgtatcatatcataaagggagacagtgagggacgcctgggggttgacacagatccccataccaacaccggatatgtcataattaaaaagcctcttgattttgaaacagcagctgtttccaacattgtgttcaaagcagaaaatcctgagcctctagtgtttggtgtgaagtacaatgcaagttcttttgccaagttcacgcttattgtgacagatgtgaatgaagcacctcaattttcccaacacgtattccaagcgaaagtcagtgaggatgtagctataggcactaaagtgggcaatgtgactgccaaggatccagaaggtctggacataagctattcactgaggggagacacaagaggttggcttaaaattgaccacgtgactggtgagatctttagtgtggctccattggacagagaagccggaagtccatatcgggtacaagtggtggccacagaagtaggggggtcttccttgagctctgtgtcagagttccacctgatccttatggatgtgaatgacaaccctcccaggctagccaaggactacacgggcttgttcttctgccatcccctcagtgcacctggaagtctcattttcgaggctactgatgatgatcagcacttatttcggggtccccattttacattttccctcggcagtggaagcttacaaaacgactgggaagtttccaaaatcaatggtactcatgcccgactgtctaccaggcacacagactttgaggagagggagtatgtcgtcttgatccgcatcaatgatgggggtcggccacccttggaaggcattgtttctttaccagttacattctgcagttgtgtggaaggaagttgtttccggccagcaggtcaccagactgggatacccactgtgggcatggcagttggtatactgctgaccacccttctggtgattggtataattttagcagttgtgtttatccgcataaagaaggataaaggcaaagataatgttgaaagtgctcaagcatctgaagtcaaacctctgagaagctgaatttgaaaaggaatgtttgaatttatatagcaagtgctatttcagcaacaaccatctcatcctattacttttcatctaacgtgcattataattttttaaacagatattccctcttgtcctttaatatttgctaaatatttcttttttgaggtggagtcttgctctgtcgcccaggctggagtacagtggtgtgatcccagctcactgcaacctccgcctcctgggttcacatgattctcctgcctcagcttcctaagtagctgggtttacaggcacccaccaccatgcccagctaatttttgtatttttaatagagacggggtttcgccatttggccaggctggtcttgaactcctgacgtcaagtgatctgcctgccttggtctcccaatacaggcatgaaccactgcacccacctacttagatatttcatgtgctatagacattagagagatttttcatttttccatgacatttttcctctctgcaaatggcttagctacttgtgtttttcccttttggggcaagacagactcattaaatattctgtacattttttctttatcaaggagatatatcagtgttgtctcatagaactgcctggattccatttatgttttttctgattccatcctgtgtccccttcatccttgactcctttggtatttcactgaatttcaaacatttgtcagagaagaaaaaagtgaggactcaggaaaaataaataaataaaagaacagccttttcccttagtattaacagaaatgtttctgtgtcattaaccatctttaatcaatgtgacatgttgctctttggctgaaattcttcaacttggaaatgacacagacccacagaaggtgttcaaacacaacctactctgcaaaccttggtaaaggaaccagtcagctggccagatttcctcactacctgccatgcatacatgctgcgcatgttttcttcattcgtatgttagtaaagttttggttattatatatttaacatgtggaagaaaacaagacatgaaaagagtggtgacaaatcaagaataaacactggttgtagtcagttttgtttggtgatccgctctgcctctgtttttatttgtggaggggaaggacagaataacaattgttattttttgtgtataaaaattgcctccccagcagccctagtcaggggcttatagataaaactcccatctcc

SEQ ID NO: 322472 - DNA, 3215 bp, Homo sapiens
catgtttgaagccagtgaggatgtagctataggcactaaagtgggcaatgtgactgccaaggatccagaaggtctggacataagctattcactgaggggagacacaagaggttggcttaaaattgaccacgtgactggtgagatctttagtgtggctccattggacagagaagccggaattccttcagtgataccacatctgtggatatcatagtgacagagaatatttggaaagcaccaaaacctgtggagatggtggaaaactcaactgatcctcaccccatcaaaatcactcaggtgcggtggaatgatcccggtgcacaatattccttagttgacaaagagaagctgccaagattcccattttcaattgaccaggaaggagatatttacgtgactcagcccttggaccgagaagaaaaggatgcatatgttttttatgcagttgcaaaggatgagtacggaaaaccactttcatatccgctggaaattcatgtaaaagttaaagatattaatgataatccacctacatgtccgtcaccagtaaccgtatttgaggtccaggagaatgaacgactgggtaacagtatcgggacccttactgcacatgacagggatgaagaaaatactgccaacagttttctaaactacaggattgtggagcaaactcccaaacttcccatggatggactcttcctaatccaaacctatgctggaatgttacagttagctaaacagtccttgaagaagcaagatactcctcagtacaacttaacgatagaggtgtctgacaaagatttcaagaccctttgttttgtgcaaatcaacgttattgatatcaatgatcagatccccatctttgaaaaatcagattatggaaacctgactcttgctgaagacacaaacattgggtccaccatcttaaccatccaggccactgatgctgatgagccatttactgggagttctaaaattctgtatcatatcataaagggagacagtgagggacgcctgggggttgacacagatccccataccaacaccggatatgtcataattaaaaagcctcttgattttgaaacagcagctgtttccaacattgtgttcaaagcagaaaatcctgagcctctagtgtttggtgtgaagtacaatgcaagttcttttgccaagttcacgcttattgtgacagatgtgaatgaagcacctcaattttcccaacacgtattccaagcgaaagtcagtgaggatgtagctataggcactaaagtgggcaatgtgactgccaaggatccagaaggtctggacataagctattcactgaggggagacacaagaggttggcttaaaattgaccacgtgactggtgagatctttagtgtggctccattggacagagaagccggaagtccatatcgggtacaagtggtggccacagaagtaggggggtcttccttgagctctgtgtcagagttccacctgatccttatggatgtgaatgacaaccctcccaggctagccaaggactacacgggcttgttcttctgccatcccctcagtgcacctggaagtctcattttcgaggctactgatgatgatcagcacttatttcggggtccccattttacattttccctcggcagtggaagcttacaaaacgactgggaagtttccaaaatcaatggtactcatgcccgactgtctaccaggcacacagactttgaggagagggagtatgtcgtcttgatccgcatcaatgatgggggtcggccacccttggaaggcattgtttctttaccagttacattctgcagttgtgtggaaggaagttgtttccggccagcaggtcaccagactgggatacccactgtgggcatggcagttggtatactgctgaccacccttctggtgattggtataattttagcagttgtgtttatccgcataaagaaggataaaggcaaagataatgttgaaagtgctcaagcatctgaagtcaaacctctgagaagctgaatttgaaaaggaatgtttgaatttatatagcaagtgctatttcagcaacaaccatctcatcctattacttttcatctaacgtgcattataattttttaaacagatattccctcttgtcctttaatatttgctaaatatttcttttttgaggtggagtcttgctctgtcgcccaggctggagtacagtggtgtgatcccagctcactgcaacctccgcctcctgggttcacatgattctcctgcctcagcttcctaagtagctgggtttacaggcacccaccaccatgcccagctaatttttgtatttttaatagagacggggtttcgccatttggccaggctggtcttgaactcctgacgtcaagtgatctgcctgccttggtctcccaatacaggcatgaaccactgcacccacctacttagatatttcatgtgctatagacattagagagatttttcatttttccatgacatttttcctctctgcaaatggcttagctacttgtgtttttcccttttggggcaagacagactcattaaatattctgtacattttttctttatcaaggagatatatcagtgttgtctcatagaactgcctggattccatttatgttttttctgattccatcctgtgtccccttcatccttgactcctttggtatttcactgaatttcaaacatttgtcagagaagaaaaaagtgaggactcaggaaaaataaataaataaaagaacagccttttcccttagtattaacagaaatgtttctgtgtcattaaccatctttaatcaatgtgacatgttgctctttggctgaaattcttcaacttggaaatgacacagacccacagaaggtgttcaaacacaacctactctgcaaaccttggtaaaggaaccagtcagctggccagatttcctcactacctgccatgcatacatgctgcgcatgttttcttcattcgtatgttagtaaagttttggttattatatatttaacatgtggaagaaaacaagacatgaaaagagtggtgacaaatcaagaataaacactggttgtagtcagttttgtttggtgatccgctctgcctctgtttttatttgtggaggggaaggacagaataacaattgttattttttgtgtataaaaattgcctccccagcagccctagtcaggggcttatagataaaactcccatctcc

SEQ ID NO: 322473 - DNA, 1411 bp, Homo sapiens
agggagtgttcccgggggagatactccagtcgtagcaagagtctcgaccactgaatggaagaaaaggacttttaaccaccattttgtgacttacagaaaggaatttgaataaagaaaactatgatacttcaggcccatcttcactccctgtgtcttcttatgctttatttggcaactggatatggccaagaggggaagtttagtggacccctgaaacccatgacattttctatttatgaaggccaagaaccgagtcaaattatattccagtttaaggccaatcctcctgctgtgacttttgaactaactggggagacagacaacatatttgtgatagaacgggagggacttctgtattacaacagagccttggacagggaaacaagatctactcacaatctccaggttgcagccctggacgctaatggaattatagtggagggtccagtccctatcaccatagaagtgaaggacatcaacgacaatcgacccacgtttctccagtcaaagtacgaaggctcagtaaggcagaactctcgcccaggaaagcccttcttgtatgtcaatgccacagacctggatgatccggccactcccaatggccagctttattaccagattgtcatccagcttcccatgatcaacaatgtcatgtactttcagatcaacaacaaaacgggagccatctctcttacccgagagggatctcaggaattgaatcctgctaagaatccttcctataatctggtgatctcagtgaaggacatgggaggccagagtgagaattccttcagtgataccacatctgtggatatcatagtgacagagaatatttggaaagcaccaaaacctgtggagatggtggaaaactcaactgatcctcaccccatcaaaatcactcaggtgcggtggaatgatcccggtgcacaatattccttagttgacaaagagaagctgccaagattcccattttcaattgaccaggaaggagatatttacgtgactcagcccttggaccgagaagaaaaggatgcatatgttttttatgcagttgcaaaggatgagtacggaaaaccactttcatatccgctggaaattcatgtaaaagttaaagatattaatgataatccacctacatgtccgtcaccagtaaccgtatttgaggtccaggagaatgaacgactgggtaacagtatcgggacccttactgcacatgacagggatgaagaaaatactgccaacagttttctaaactacaggattgtggagcaaactcccaaaccattgtacttcacaccaaacactagaggctcaggataattctgctcttgaacacaatagttggaaacagctgctgtttcaaaatcagaggctttttaattatgacagtactcccggtattggtatgggg

SEQ ID NO: 322474 - DNA, 2324 bp, Homo sapiens
agggagtgttcccgggggagatactccagtcgtagcaagagtctcgaccactgaatggaagaaaaggacttttaaccaccattttgtgacttacagaaaggaatttgaataaagaaaactatgatacttcaggcccatcttcactccctgtgtcttcttatgctttatttggcaactggatatggccaagaggggaagtttagtggacccctgaaacccatgacattttctatttatgaaggccaagaaccgagtcaaattatattccagtttaaggccaatcctcctgctgtgacttttgaactaactggggagacagacaacatatttgtgatagaacgggagggacttctgtattacaacagagccttggacagggaaacaagatctactcacaatctccaggttgcagccctggacgctaatggaattatagtggagggtccagtccctatcaccatagaagtgaaggacatcaacgacaatcgacccacgtttctccagtcaaagtacgaaggctcagtaaggcagaactctcgcccaggaaagcccttcttgtatgtcaatgccacagacctggatgatccggccactcccaatggccagctttattaccagattgtcatccagcttcccatgatcaacaatgtcatgtactttcagatcaacaacaaaacgggagccatctctcttacccgagagggatctcaggaattgaatcctgctaagaatccttcctataatctggtgatctcagtgaaggacatgggaggccagagtgagaattccttcagtgataccacatctgtggatatcatagtgacagagaatatttggaaagcaccaaaacctgtggagatggtggaaaactcaactgatcctcaccccatcaaaatcactcaggtgcggtggaatgatcccggtgcacaatattccttagttgacaaagagaagctgccaagattcccattttcaattgaccaggaaggagatatttacgtgactcagcccttggaccgagaagaaaaggatgcatatgttttttatgcagttgcaaaggatgagtacggaaaaccactttcatatccgctggaaattcatgtaaaagttaaagatattaatgataatccacctacatgtccgtcaccagtaaccgtatttgaggtccaggagaatgaacgactgggtaacagtatcgggacccttactgcacatgacagggatgaagaaaatactgccaacagttttctaaactacaggattgtggagcaaactcccaaacttcccatggatggactcttcctaatccaaacctatgctggaatgttacagttagctaaacagtccttgaagaagcaagatactcctcagtacaacttaacgatagaggtgtctgacaaagatttcaagaccctttgttttgtgcaaatcaacgttattgatatcaatgatcagatccccatctttgaaaaatcagattatggaaacctgactcttgctgaagacacaaacattgggtccaccatcttaaccatccaggccactgatgctgatgagccatttactgggagttctaaaattctgtatcatatcataaagggagacagtgagggacgcctgggggttgacacagatccccataccaacaccggatatgtcataattaaaaagcctcttgattttgaaacagcagctgtttccaacattgtgttcaaagcagaaaatcctgagcctctagtgtttggtgtgaagtacaatgcaagttcttttgccaagttcacgcttattgtgacagatgtgaatgaagcacctcaattttcccaacacgtattccaagcgaaagtcagtgaggatgtagctataggcactaaagtgggcaatgtgactgccaaggatccagaaggtctggacataagctattcactgaggggagacacaagaggttggcttaaaattgaccacgtgactggtgagatctttagtgtggctccattggacagagaagccggaagtccatatcgggtacaagtggtggccacagaagtaggggggtcttccttgagctctgtgtcagagttccacctgatccttatggatgtgaatgacaaccctcccaggctagccaaggactgtggtcaattttaagccaacctcttgtgtctcccctcagtgaatagcttatgtccagacttctggatcattggcagtcacattgcccactttagtgcctatagctacatcctcactgactttcgctcggaatacgtgttgggaaaatgaggtgcttcattcacatctgtcacaataagcatgacgtgcataaa

SEQ ID NO: 322475 - DNA, 1600 bp, Homo sapiens
agggagtgttcccgggggagatactccagtcgtagcaagagtctcgaccactgaatggaagaaaaggacttttaaccaccattttgtgacttacagaaaggaatttgaataaagaaaactatgatacttcaggcccatcttcactccctgtgtcttcttatgctttatttggcaactggatatggccaagaggggaagtttagtggacccctgaaacccatgacattttctatttatgaaggccaagaaccgagtcaaattatattccagtttaaggccaatcctcctgctgtgacttttgaactaactggggagacagacaacatatttgtgatagaacgggagggacttctgtattacaacagagccttggacagggaaacaagatctactcacaatctccaggttgcagccctggacgctaatggaattatagtggagggtccagtccctatcaccatagaagtgaaggacatcaacgacaatcgacccacgtttctccagtcaaagtacgaaggctcagtaaggcagaactctcgcccaggaaagcccttcttgtatgtcaatgccacagacctggatgatccggccactcccaatggccagctttattaccagattgtcatccagcttcccatgatcaacaatgtcatgtactttcagatcaacaacaaaacgggagccatctctcttacccgagagggatctcaggaattgaatcctgctaagaatccttcctataatctggtgatctcagtgaaggacatgggaggccagagtgagaattccttcagtgataccacatctgtggatatcatagtgacagagaatatttggaaagcaccaaaacctgtggagatggtggaaaactcaactgatcctcaccccatcaaaatcactcaggtgcggtggaatgatcccggtgcacaatattccttagttgacaaagagaagctgccaagattcccattttcaattgaccaggaaggagatatttacgtgactcagcccttggaccgagaagaaaaggatgcatatgttttttatgcagttgcaaaggatgagtacggaaaaccactttcatatccgctggaaattcatgtaaaagttaaagatattaatgataatccacctacatgtccgtcaccagtaaccgtatttgaggtccaggagaatgaacgactgggtaacagtatcgggacccttactgcacatgacagggatgaagaaaatactgccaacagttttctaaactacaggattgtggagcaaactcccaaacttcccatggatggactcttcctaatccaaacctatgctggaatgttacagttagctaaacagtccttgaagaagcaagatactcctcagtacaacttaacgatagaggtgtctgacaaagatttcaagaccctttgttttgtgcaaatcaacgttattgatatcaatgatcagatccccatctttgaaaaatcagattatggaaaactcaactgatcctcaccccatcaaaatcactcaggtgcggtggaatgatcccggtgcacaatattccttagttgacaaagagaagctgccaagattcccattttcaattgac

SEQ ID NO: 322476 - DNA, 4383 bp, Homo sapiens
acccggttcttccgggaaaatggcgactcccgctcgtgccccggagtcaccgccgtccgcggatccggcgctagtagcggggcctgccgaggaagccgagtgcccgccgccgcgccagcctcagcccgcgcagaatgtgctcgctgccccgcggcttcgagccccaagctcccgaggacttggcgcagcggagtttggtggagctgcgggaaatgttgaagcgccaggagagacttttgcgcaacgagtaagctggggtcccgcggagtctccgccaggctccttcagctcgagctccctgggcgctcccctcccctcccgcactctgttcccttccctggaaggtgactttgactcagtcacattcgcttcagtcctacgggcgagtggacggagggcttgctgcggcagagccgtgcctcttcctggccaggcacgtatgcctgcgaggatagctcggattgaacggctacctggcgttgcagggagttagtagcccctgaaaattcatttgcaaattgcccgacaaaggtaaaaagatctttgactcttttgccaaactgaaagctgctattgcagaatgtgaagaagttagaagaaaaagtgaactgtttaaccctgttagtttagactgtaagctaaggcaaaaagcaattgcagaagttgatgtgggtacagataaggcccagaattctgacccgatacttgatacttcatcactagttcctggatgttcctctgtagataacatcaagtcatctcaaacctcacaaaaccagggacttggacgtcctactcttgaaggtgatgaagagacttcagaggttgagtacacagtgaataagggcccagcttccagcaatagagacagggtaccaccttcatctgaagctagtgagcatcacccgcggcatcgtgtttcaagtcaagcggaagatacttccagcagctttgacaacctgtttattgacaggttacagaggatcaccattgcggaccaaggtgaacaacagtcagaagaaaacgcaagtactaagaacttgacaggcctttccagtgggactgagaagaaacctcattacatggaagtgctagaaatgcgagccaaaaacccagtgccccagctgcgtaaatttaaaaccaatgtgttaccttttcgacaaaatgattcatctagtcattgccagaagagtgggtctcctatttcctcagaagagcggcggcgcagggataagcagcatcttgatgacatcacagcagctcggcttctaccacttcaccatatgcccacgcagctgctctccatagaagaatccttggcacttcagaaacagcagaaacagaattatgaggagatgcaagcaaagctcgcagcgcaaaaattagctgaaagactgaatattaaaatgcggagttataatccagaaggggagtcttcagggagataccgagaagtaagggatgaagatgacgattggtcctctgatgaattctgaagataatctcctaaatcactgacgttgagatgtcatcatcttacatcagactttctaactagtatcaagatcagtgtcagatattgttgagggaagtaattttataaagttacacaaaggtagttataaaaaaagcccagtttgtctttcagaaggtgactttcatgtgcttgaaaagtttaatatttgaatattgtgtttaaccacatggtattaaaattttgcaatatattgtgtattggtctgatattttagtatatagtagaacatactttttttttctttaagccaaatgaaaagaggtaactttgcttttttcctttttcttacctatcaaatagcatttattacatgtctttcagtgaaatacttagttgttccaggcacctaaaatcaattaggaagacatagttcccttcttttttgggtaatgaagggagcagtctaaagaattgtatgcatgtttgcatggggttattgagacattggatgtgaaatacctaggaagacatgtatggagaatgcttaacaaatgctcttctcctttttctgtcttcccttaggaagaacgttatctctcttctgattaggaaggacttcccttttgagtagatgctggaaagtggaggttttttttgttggtttgtttgttggttttgtgtttttttttgagatggggtcttgctctgtcgcccaggctggagtgcagtggcaggatctcggctcactgcaatctaggtggaggtctttttaaataacctcatgttacttcaggcaaatctggtacaggagaagcccaagctaactgagctgggtgaaggcttgtgcatcacctggcttgagttccttgctgtcacagatgataggttcatgtacacaacattaatgtttgataaggaaagcattttttttttgttaaaattgaattgtcagtactttacttttttccccccaaataggtatatatagactgcagaagcttcagtcccatatataaacgttcatgtcattttagaggattatatggttgtctccagagaaattaacttacattatcaaaaaattctttgtctaatatattggagtctttaaaagtgttgaagaataaaatattaattagaacaacttcaaatgctaaggtgatgttttaccgggacttaattaaatacaactttttcctttcgaaaaagactgttcacatttgcttccaggtgtaattattgctttcattccttacccccctcaagcaaatgtgaaaagtatactgacctaagattctcattagttttagttcttaaaacgaatagtaaatgatttcacagcgtaaaatttgatgttatttctggaagctggatgatatggaagagttcatgtgcctggacacacagttccctgtaatcctgccatctagggagataaactctgttaacattttgatgttgtgtttttgcttatttttctatgcatagttatgcatttatattctcaaaaatgaaatcataatgtacattgctttgtagtctgctctatatattgtcaatatgttcccatattaaatattttgctttttagacagctgtaggatattttatttcatgggtataccataactttaagatttatttcctattcagcaatttgattatgtattataatgtaatctgtaaatagtgatatgattaacatcttaatcacatccatagaaaatgacttatttccagaagataccgctctaaaaatgaaattgttaggtgaaagtgtttttgagaatttttatatatattactcactgcagagatcatgttcatttacattcccattagcaatatatccaatgctcagaattgaaaattactacttaaaatctttgcaaattgaataattacagaaaagggctacatttaaaatttgtatttgtttttcttacttagtgaaggttgtgttttttttcatattcattggccatgctatattcattcttttgagaattgctcattcatattttttctgttgcttgcttggagaatttgctctttttttggcatataagttcttaagaatgtccgtcctttgtcatatattgtaactttttttagccttatttgtcatttaacatagtttgtggtatttcagtatagaagttgttttctttaggagtctacctttgtgtatgtgcttgaaagtatttttgtaatccaagaatggataaatgtccttattttcttctagtattttcttatttcacttttacacctatctttaaaaggaatttaaattttgtttatatacattaactaaatcagtacaagtttggggtgaaaaggaaatttttaatccatctcaaatgtatttggttatattatataaggtagggatttgattttatttcgaagaatttaccaattggttcagtatgtgaaaccaccatttcccctctgattagtaatgctatttttatagaatattaaattcttatgtgtcttttgtgtcttaggccaatttctgggccttctgggttttttctacactgtcaataattatcgctttaattggtgttaatatttggtagtacacaggttctcccttgttcttttaaattttgtgaaatataacttacaaataagtacttaaaacagagcttaatgggtaaagcaacagctgtgtaatcacaaactagatgcagaggaggtcttgccagcactccaaaatctctgtgtgtcccctcttgacactcactgtttcccccagagctaactatcctgacgtatggtaattctccctctgtccttttaagaattattttaccagttatgtgtataacaatatggtttacattttgctcacttttgacttatataaaaatagaataatactaaaaaaaagtgtt

SEQ ID NO: 322477 - DNA, 4075 bp, Homo sapiens
acccggttcttccgggaaaatggcgactcccgctcgtgccccggagtcaccgccgtccgcggatccggcgctagtagcggggcctgccgaggaagccgagtgcccgccgccgcgccagcctcagcccgcgcagaatgtgctcgctgccccgcggcttcgagccccaagctcccgaggacttggcgcagcggagtttggtggagctgcgggaaatgttgaagcgccaggagagacttttgcgcaacgaaaaattcatttgcaaattgcccgacaaaggtaaaaagatctttgactcttttgccaaactgaaagctgctattgcagaatgtgaagaagttagaagaaaaagtgaactgtttaaccctgttagtttagactgtaagctaaggcaaaaagcaattgcagaagttgatgtgggtacagataaggcccagaattctgacccgatacttgatacttcatcactagttcctggatgttcctctgtagataacatcaagtcatctcaaacctcacaaaaccagggacttggacgtcctactcttgaaggtgatgaagagacttcagaggttgagtacacagtgaataagggcccagcttccagcaatagagacagggtaccaccttcatctgaagctagtgagcatcacccgcggcatcgtgtttcaagtcaagcggaagatacttccagcagctttgacaacctgtttattgacaggttacagaggatcaccattgcggaccaaggtgaacaacagtcagaagaaaacgcaagtactaagaacttgacaggcctttccagtgggactgagaagaaacctcattacatggaagtgctagaaatgcgagccaaaaacccagtgccccagctgcgtaaatttaaaaccaatgtgttaccttttcgacaaaatgattcatctagtcattgccagaagagtgggtctcctatttcctcagaagagcggcggcgcagggataagcagcatcttgatgacatcacagcagctcggcttctaccacttcaccatatgcccacgcagctgctctccatagaagaatccttggcacttcagaaacagcagaaacagaattatgaggagatgcaagcaaagctcgcagcgcaaaaattagctgaaagactgaatattaaaatgcggagttataatccagaaggggagtcttcagggagataccgagaagtaagggatgaagatgacgattggtcctctgatgaattctgaagataatctcctaaatcactgacgttgagatgtcatcatcttacatcagactttctaactagtatcaagatcagtgtcagatattgttgagggaagtaattttataaagttacacaaaggtagttataaaaaaagcccagtttgtctttcagaaggtgactttcatgtgcttgaaaagtttaatatttgaatattgtgtttaaccacatggtattaaaattttgcaatatattgtgtattggtctgatattttagtatatagtagaacatactttttttttctttaagccaaatgaaaagaggtaactttgcttttttcctttttcttacctatcaaatagcatttattacatgtctttcagtgaaatacttagttgttccaggcacctaaaatcaattaggaagacatagttcccttcttttttgggtaatgaagggagcagtctaaagaattgtatgcatgtttgcatggggttattgagacattggatgtgaaatacctaggaagacatgtatggagaatgcttaacaaatgctcttctcctttttctgtcttcccttaggaagaacgttatctctcttctgattaggaaggacttcccttttgagtagatgctggaaagtggaggttttttttgttggtttgtttgttggttttgtgtttttttttgagatggggtcttgctctgtcgcccaggctggagtgcagtggcaggatctcggctcactgcaatctaggtggaggtctttttaaataacctcatgttacttcaggcaaatctggtacaggagaagcccaagctaactgagctgggtgaaggcttgtgcatcacctggcttgagttccttgctgtcacagatgataggttcatgtacacaacattaatgtttgataaggaaagcattttttttttgttaaaattgaattgtcagtactttacttttttccccccaaataggtatatatagactgcagaagcttcagtcccatatataaacgttcatgtcattttagaggattatatggttgtctccagagaaattaacttacattatcaaaaaattctttgtctaatatattggagtctttaaaagtgttgaagaataaaatattaattagaacaacttcaaatgctaaggtgatgttttaccgggacttaattaaatacaactttttcctttcgaaaaagactgttcacatttgcttccaggtgtaattattgctttcattccttacccccctcaagcaaatgtgaaaagtatactgacctaagattctcattagttttagttcttaaaacgaatagtaaatgatttcacagcgtaaaatttgatgttatttctggaagctggatgatatggaagagttcatgtgcctggacacacagttccctgtaatcctgccatctagggagataaactctgttaacattttgatgttgtgtttttgcttatttttctatgcatagttatgcatttatattctcaaaaatgaaatcataatgtacattgctttgtagtctgctctatatattgtcaatatgttcccatattaaatattttgctttttagacagctgtaggatattttatttcatgggtataccataactttaagatttatttcctattcagcaatttgattatgtattataatgtaatctgtaaatagtgatatgattaacatcttaatcacatccatagaaaatgacttatttccagaagataccgctctaaaaatgaaattgttaggtgaaagtgtttttgagaatttttatatatattactcactgcagagatcatgttcatttacattcccattagcaatatatccaatgctcagaattgaaaattactacttaaaatctttgcaaattgaataattacagaaaagggctacatttaaaatttgtatttgtttttcttacttagtgaaggttgtgttttttttcatattcattggccatgctatattcattcttttgagaattgctcattcatattttttctgttgcttgcttggagaatttgctctttttttggcatataagttcttaagaatgtccgtcctttgtcatatattgtaactttttttagccttatttgtcatttaacatagtttgtggtatttcagtatagaagttgttttctttaggagtctacctttgtgtatgtgcttgaaagtatttttgtaatccaagaatggataaatgtccttattttcttctagtattttcttatttcacttttacacctatctttaaaaggaatttaaattttgtttatatacattaactaaatcagtacaagtttggggtagggatttgattttatttcgaagaatttaccaattggttcagtatgtgaaaccaccatttcccctctgattagtaatgctatttttatagaatattaaattcttatgtgtcttttgtgtcttaggccaatttctgggccttctgggttttttctacactgtcaataattatcgctttaattggtgttaatatttggtagtacacaggttctcccttgttcttttaaattttgtgaaatataacttacaaataagtacttaaaacagagcttaatgggtaaagcaacagctgtgtaatcacaaactagatgcagaggaggtcttgccagcactccaaaatctctgtgtgtcccctcttgacactcactgtttcccccagagctaactatcctgacgtatggtaattctccctctgtccttttaagaattattttaccagttatgtgtataacaatatggtttacattttgctcacttttgacttatataaaaatagaataatactaaaaaaaagtgtt

SEQ ID NO: 322478 - DNA, 3657 bp, Homo sapiens
acccggttcttccgggaaaatggcgactcccgctcgtgccccggagtcaccgccgtccgcggatccggcgctagtagcggggcctgccgaggaagccgagtgcccgccgccgcgccagcctcagcccgcgcagaatgtgctcgctgccccgcggcttcgagccccaagctcccgaggacttggcgcagcggagtttggtggagctgcgggaaatgttgaagcgccaggagagacttttgcgcaacgagttacagaggatcaccattgcggaccaaggtgaacaacagtcagaagaaaacgcaagtactaagaacttgacaggcctttccagtgggactgagaagaaacctcattacatggaagtgctagaaatgcgagccaaaaacccagtgccccagctgcgtaaatttaaaaccaatgtgttaccttttcgacaaaatgattcatctagtcattgccagaagagtgggtctcctatttcctcagaagagcggcggcgcagggataagcagcatcttgatgacatcacagcagctcggcttctaccacttcaccatatgcccacgcagctgctctccatagaagaatccttggcacttcagaaacagcagaaacagaattatgaggagatgcaagcaaagctcgcagcgcaaaaattagctgaaagactgaatattaaaatgcggagttataatccagaaggggagtcttcagggagataccgagaagtaagggatgaagatgacgattggtcctctgatgaattctgaagataatctcctaaatcactgacgttgagatgtcatcatcttacatcagactttctaactagtatcaagatcagtgtcagatattgttgagggaagtaattttataaagttacacaaaggtagttataaaaaaagcccagtttgtctttcagaaggtgactttcatgtgcttgaaaagtttaatatttgaatattgtgtttaaccacatggtattaaaattttgcaatatattgtgtattggtctgatattttagtatatagtagaacatactttttttttctttaagccaaatgaaaagaggtaactttgcttttttcctttttcttacctatcaaatagcatttattacatgtctttcagtgaaatacttagttgttccaggcacctaaaatcaattaggaagacatagttcccttcttttttgggtaatgaagggagcagtctaaagaattgtatgcatgtttgcatggggttattgagacattggatgtgaaatacctaggaagacatgtatggagaatgcttaacaaatgctcttctcctttttctgtcttcccttaggaagaacgttatctctcttctgattaggaaggacttcccttttgagtagatgctggaaagtggaggttttttttgttggtttgtttgttggttttgtgtttttttttgagatggggtcttgctctgtcgcccaggctggagtgcagtggcaggatctcggctcactgcaatctaggtggaggtctttttaaataacctcatgttacttcaggcaaatctggtacaggagaagcccaagctaactgagctgggtgaaggcttgtgcatcacctggcttgagttccttgctgtcacagatgataggttcatgtacacaacattaatgtttgataaggaaagcattttttttttgttaaaattgaattgtcagtactttacttttttccccccaaataggtatatatagactgcagaagcttcagtcccatatataaacgttcatgtcattttagaggattatatggttgtctccagagaaattaacttacattatcaaaaaattctttgtctaatatattggagtctttaaaagtgttgaagaataaaatattaattagaacaacttcaaatgctaaggtgatgttttaccgggacttaattaaatacaactttttcctttcgaaaaagactgttcacatttgcttccaggtgtaattattgctttcattccttacccccctcaagcaaatgtgaaaagtatactgacctaagattctcattagttttagttcttaaaacgaatagtaaatgatttcacagcgtaaaatttgatgttatttctggaagctggatgatatggaagagttcatgtgcctggacacacagttccctgtaatcctgccatctagggagataaactctgttaacattttgatgttgtgtttttgcttatttttctatgcatagttatgcatttatattctcaaaaatgaaatcataatgtacattgctttgtagtctgctctatatattgtcaatatgttcccatattaaatattttgctttttagacagctgtaggatattttatttcatgggtataccataactttaagatttatttcctattcagcaatttgattatgtattataatgtaatctgtaaatagtgatatgattaacatcttaatcacatccatagaaaatgacttatttccagaagataccgctctaaaaatgaaattgttaggtgaaagtgtttttgagaatttttatatatattactcactgcagagatcatgttcatttacattcccattagcaatatatccaatgctcagaattgaaaattactacttaaaatctttgcaaattgaataattacagaaaagggctacatttaaaatttgtatttgtttttcttacttagtgaaggttgtgttttttttcatattcattggccatgctatattcattcttttgagaattgctcattcatattttttctgttgcttgcttggagaatttgctctttttttggcatataagttcttaagaatgtccgtcctttgtcatatattgtaactttttttagccttatttgtcatttaacatagtttgtggtatttcagtatagaagttgttttctttaggagtctacctttgtgtatgtgcttgaaagtatttttgtaatccaagaatggataaatgtccttattttcttctagtattttcttatttcacttttacacctatctttaaaaggaatttaaattttgtttatatacattaactaaatcagtacaagtttggggtgaaaaggaaatttttaatccatctcaaatgtatttggttatattatataaggtagggatttgattttatttcgaagaatttaccaattggttcagtatgtgaaaccaccatttcccctctgattagtaatgctatttttatagaatattaaattcttatgtgtcttttgtgtcttaggccaatttctgggccttctgggttttttctacactgtcaataattatcgctttaattggtgttaatatttggtagtacacaggttctcccttgttcttttaaattttgtgaaatataacttacaaataagtacttaaaacagagcttaatgggtaaagcaacagctgtgtaatcacaaactagatgcagaggaggtcttgccagcactccaaaatctctgtgtgtcccctcttgacactcactgtttcccccagagctaactatcctgacgtatggtaattctccctctgtccttttaagaattattttaccagttatgtgtataacaatatggtttacattttgctcacttttgacttatataaaaatagaataatactaaaaaaaagtgtt

SEQ ID NO: 322479 - DNA, 4128 bp, Homo sapiens
acccggttcttccgggaaaatggcgactcccgctcgtgccccggagtcaccgccgtccgcggatccggcgctagtagcggggcctgccgaggaagccgagtgcccgccgccgcgccagcctcagcccgcgcagaatgtgctcgctgccccgcggcttcgagccccaagctcccgaggacttggcgcagcggagtttggtggagctgcgggaaatgttgaagcgccaggagagacttttgcgcaacgaaaaattcatttgcaaattgcccgacaaaggtaaaaagatctttgactcttttgccaaactgaaagctgctattgcagaatgtgaagaagttagaagaaaaagtgaactgtttaaccctgttagtttagactgtaagctaaggcaaaaagcaattgcagaagttgatgtgggtacagataaggcccagaattctgacccgatacttgatacttcatcactagttcctggatgttcctctgtagataacatcaagtcatctcaaacctcacaaaaccagggacttggacgtcctactcttgaaggtgatgaagagacttcagaggttgagtacacagtgaataagggcccagcttccagcaatagagacagggtaccaccttcatctgaagctagtgagcatcacccgcggcatcgtgtttcaagtcaagcggaagatacttccagcagctttgacaacctgtttattgacaggttacagaggatcaccattgcggaccaaggtgaacaacagtcagaagaaaacgcaagtactaagaacttgacaggcctttccagtgggactgagaagaaacctcattacatggaagtgctagaaatgcgagccaaaaacccagtgccccagctgcgtaaatttaaaaccaatgtgttaccttttcgacaaaatgattcatctagtcattgccagaagagtgggtctcctatttcctcagaagagcggcggcgcagggataagcagcatcttgatgacatcacagcagctcggcttctaccacttcaccatatgcccacgcagctgctctccatagaagaatccttggcacttcagaaacagcagaaacagaattatgaggagatgcaagcaaagctcgcagcgcaaaaattagctgaaagactgaatattaaaatgcggagttataatccagaaggggagtcttcagggagataccgagaagtaagggatgaagatgacgattggtcctctgatgaattctgaagataatctcctaaatcactgacgttgagatgtcatcatcttacatcagactttctaactagtatcaagatcagtgtcagatattgttgagggaagtaattttataaagttacacaaaggtagttataaaaaaagcccagtttgtctttcagaaggtgactttcatgtgcttgaaaagtttaatatttgaatattgtgtttaaccacatggtattaaaattttgcaatatattgtgtattggtctgatattttagtatatagtagaacatactttttttttctttaagccaaatgaaaagaggtaactttgcttttttcctttttcttacctatcaaatagcatttattacatgtctttcagtgaaatacttagttgttccaggcacctaaaatcaattaggaagacatagttcccttcttttttgggtaatgaagggagcagtctaaagaattgtatgcatgtttgcatggggttattgagacattggatgtgaaatacctaggaagacatgtatggagaatgcttaacaaatgctcttctcctttttctgtcttcccttaggaagaacgttatctctcttctgattaggaaggacttcccttttgagtagatgctggaaagtggaggttttttttgttggtttgtttgttggttttgtgtttttttttgagatggggtcttgctctgtcgcccaggctggagtgcagtggcaggatctcggctcactgcaatctaggtggaggtctttttaaataacctcatgttacttcaggcaaatctggtacaggagaagcccaagctaactgagctgggtgaaggcttgtgcatcacctggcttgagttccttgctgtcacagatgataggttcatgtacacaacattaatgtttgataaggaaagcattttttttttgttaaaattgaattgtcagtactttacttttttccccccaaataggtatatatagactgcagaagcttcagtcccatatataaacgttcatgtcattttagaggattatatggttgtctccagagaaattaacttacattatcaaaaaattctttgtctaatatattggagtctttaaaagtgttgaagaataaaatattaattagaacaacttcaaatgctaaggtgatgttttaccgggacttaattaaatacaactttttcctttcgaaaaagactgttcacatttgcttccaggtgtaattattgctttcattccttacccccctcaagcaaatgtgaaaagtatactgacctaagattctcattagttttagttcttaaaacgaatagtaaatgatttcacagcgtaaaatttgatgttatttctggaagctggatgatatggaagagttcatgtgcctggacacacagttccctgtaatcctgccatctagggagataaactctgttaacattttgatgttgtgtttttgcttatttttctatgcatagttatgcatttatattctcaaaaatgaaatcataatgtacattgctttgtagtctgctctatatattgtcaatatgttcccatattaaatattttgctttttagacagctgtaggatattttatttcatgggtataccataactttaagatttatttcctattcagcaatttgattatgtattataatgtaatctgtaaatagtgatatgattaacatcttaatcacatccatagaaaatgacttatttccagaagataccgctctaaaaatgaaattgttaggtgaaagtgtttttgagaatttttatatatattactcactgcagagatcatgttcatttacattcccattagcaatatatccaatgctcagaattgaaaattactacttaaaatctttgcaaattgaataattacagaaaagggctacatttaaaatttgtatttgtttttcttacttagtgaaggttgtgttttttttcatattcattggccatgctatattcattcttttgagaattgctcattcatattttttctgttgcttgcttggagaatttgctctttttttggcatataagttcttaagaatgtccgtcctttgtcatatattgtaactttttttagccttatttgtcatttaacatagtttgtggtatttcagtatagaagttgttttctttaggagtctacctttgtgtatgtgcttgaaagtatttttgtaatccaagaatggataaatgtccttattttcttctagtattttcttatttcacttttacacctatctttaaaaggaatttaaattttgtttatatacattaactaaatcagtacaagtttggggtgaaaaggaaatttttaatccatctcaaatgtatttggttatattatataaggtagggatttgattttatttcgaagaatttaccaattggttcagtatgtgaaaccaccatttcccctctgattagtaatgctatttttatagaatattaaattcttatgtgtcttttgtgtcttaggccaatttctgggccttctgggttttttctacactgtcaataattatcgctttaattggtgttaatatttggtagtacacaggttctcccttgttcttttaaattttgtgaaatataacttacaaataagtacttaaaacagagcttaatgggtaaagcaacagctgtgtaatcacaaactagatgcagaggaggtcttgccagcactccaaaatctctgtgtgtcccctcttgacactcactgtttcccccagagctaactatcctgacgtatggtaattctccctctgtccttttaagaattattttaccagttatgtgtataacaatatggtttacattttgctcacttttgacttatataaaaatagaataatactaaaaaaaagtgtt

SEQ ID NO: 322480 - DNA, 4314 bp, Homo sapiens
acccggttcttccgggaaaatggcgactcccgctcgtgccccggagtcaccgccgtccgcggatccggcgctagtagcggggcctgccgaggaagccgagtgcccgccgccgcgccagcctcagcccgcgcagaatgtgctcgctgccccgcggcttcgagccccaagctcccgaggacttggcgcagcggagtttggtggagctgcgggaaatgttgaagcgccaggagagacttttgcgcaacgagtaagctggggtcccgcggagtctccgccaggctccttcagctcgagctccctgggcgctcccctcccctcccgcactctgttcccttccctggaaggtgactttgactcagtcacattcgcttcagtcctacgggcgagtggacggagggcttgctgcggcagagccgtgcctcttcctggccagaaaattcatttgcaaattgcccgacaaaggtaaaaagatctttgactcttttgccaaactgaaagctgctattgcagaatgtgaagaagttagaagaaaaagtgaactgtttaaccctgttagtttagactgtaagctaaggcaaaaagcaattgcagaagttgatgtgggtacagataaggcccagaattctgacccgatacttgatacttcatcactagttcctggatgttcctctgtagataacatcaagtcatctcaaacctcacaaaaccagggacttggacgtcctactcttgaaggtgatgaagagacttcagaggttgagtacacagtgaataagggcccagcttccagcaatagagacagggtaccaccttcatctgaagctagtgagcatcacccgcggcatcgtgtttcaagtcaagcggaagatacttccagcagctttgacaacctgtttattgacaggttacagaggatcaccattgcggaccaaggtgaacaacagtcagaagaaaacgcaagtactaagaacttgacaggcctttccagtgggactgagaagaaacctcattacatggaagtgctagaaatgcgagccaaaaacccagtgccccagctgcgtaaatttaaaaccaatgtgttaccttttcgacaaaatgattcatctagtcattgccagaagagtgggtctcctatttcctcagaagagcggcggcgcagggataagcagcatcttgatgacatcacagcagctcggcttctaccacttcaccatatgcccacgcagctgctctccatagaagaatccttggcacttcagaaacagcagaaacagaattatgaggagatgcaagcaaagctcgcagcgcaaaaattagctgaaagactgaatattaaaatgcggagttataatccagaaggggagtcttcagggagataccgagaagtaagggatgaagatgacgattggtcctctgatgaattctgaagataatctcctaaatcactgacgttgagatgtcatcatcttacatcagactttctaactagtatcaagatcagtgtcagatattgttgagggaagtaattttataaagttacacaaaggtagttataaaaaaagcccagtttgtctttcagaaggtgactttcatgtgcttgaaaagtttaatatttgaatattgtgtttaaccacatggtattaaaattttgcaatatattgtgtattggtctgatattttagtatatagtagaacatactttttttttctttaagccaaatgaaaagaggtaactttgcttttttcctttttcttacctatcaaatagcatttattacatgtctttcagtgaaatacttagttgttccaggcacctaaaatcaattaggaagacatagttcccttcttttttgggtaatgaagggagcagtctaaagaattgtatgcatgtttgcatggggttattgagacattggatgtgaaatacctaggaagacatgtatggagaatgcttaacaaatgctcttctcctttttctgtcttcccttaggaagaacgttatctctcttctgattaggaaggacttcccttttgagtagatgctggaaagtggaggttttttttgttggtttgtttgttggttttgtgtttttttttgagatggggtcttgctctgtcgcccaggctggagtgcagtggcaggatctcggctcactgcaatctaggtggaggtctttttaaataacctcatgttacttcaggcaaatctggtacaggagaagcccaagctaactgagctgggtgaaggcttgtgcatcacctggcttgagttccttgctgtcacagatgataggttcatgtacacaacattaatgtttgataaggaaagcattttttttttgttaaaattgaattgtcagtactttacttttttccccccaaataggtatatatagactgcagaagcttcagtcccatatataaacgttcatgtcattttagaggattatatggttgtctccagagaaattaacttacattatcaaaaaattctttgtctaatatattggagtctttaaaagtgttgaagaataaaatattaattagaacaacttcaaatgctaaggtgatgttttaccgggacttaattaaatacaactttttcctttcgaaaaagactgttcacatttgcttccaggtgtaattattgctttcattccttacccccctcaagcaaatgtgaaaagtatactgacctaagattctcattagttttagttcttaaaacgaatagtaaatgatttcacagcgtaaaatttgatgttatttctggaagctggatgatatggaagagttcatgtgcctggacacacagttccctgtaatcctgccatctagggagataaactctgttaacattttgatgttgtgtttttgcttatttttctatgcatagttatgcatttatattctcaaaaatgaaatcataatgtacattgctttgtagtctgctctatatattgtcaatatgttcccatattaaatattttgctttttagacagctgtaggatattttatttcatgggtataccataactttaagatttatttcctattcagcaatttgattatgtattataatgtaatctgtaaatagtgatatgattaacatcttaatcacatccatagaaaatgacttatttccagaagataccgctctaaaaatgaaattgttaggtgaaagtgtttttgagaatttttatatatattactcactgcagagatcatgttcatttacattcccattagcaatatatccaatgctcagaattgaaaattactacttaaaatctttgcaaattgaataattacagaaaagggctacatttaaaatttgtatttgtttttcttacttagtgaaggttgtgttttttttcatattcattggccatgctatattcattcttttgagaattgctcattcatattttttctgttgcttgcttggagaatttgctctttttttggcatataagttcttaagaatgtccgtcctttgtcatatattgtaactttttttagccttatttgtcatttaacatagtttgtggtatttcagtatagaagttgttttctttaggagtctacctttgtgtatgtgcttgaaagtatttttgtaatccaagaatggataaatgtccttattttcttctagtattttcttatttcacttttacacctatctttaaaaggaatttaaattttgtttatatacattaactaaatcagtacaagtttggggtgaaaaggaaatttttaatccatctcaaatgtatttggttatattatataaggtagggatttgattttatttcgaagaatttaccaattggttcagtatgtgaaaccaccatttcccctctgattagtaatgctatttttatagaatattaaattcttatgtgtcttttgtgtcttaggccaatttctgggccttctgggttttttctacactgtcaataattatcgctttaattggtgttaatatttggtagtacacaggttctcccttgttcttttaaattttgtgaaatataacttacaaataagtacttaaaacagagcttaatgggtaaagcaacagctgtgtaatcacaaactagatgcagaggaggtcttgccagcactccaaaatctctgtgtgtcccctcttgacactcactgtttcccccagagctaactatcctgacgtatggtaattctccctctgtccttttaagaattattttaccagttatgtgtataacaatatggtttacattttgctcacttttgacttatataaaaatagaataatactaaaaaaaagtgtt

SEQ ID NO: 322481 - DNA, 4073 bp, Homo sapiens
acccggttcttccgggaaaatggcgactcccgctcgtgccccggagtcaccgccgtccgcggatccggcgctagtagcggggcctgccgaggaagccgagtgcccgccgccgcgccagcctcagcccgcgcagaatgtgctcgctgccccgcggcttcgagccccaagctcccgaggacttggcgcagcggagtttggtggagctgcgggaaatgttgaagcgccaggagagacttttgcgcaacgaaaaattcatttgcaaattgcccgacaaaggtaaaaagatctttgactcttttgccaaactgaaagctgctattgcagaatgtgaagaagttagaagaaaaagtgaactgtttaaccctgttagtttagactgtaagctaaggcaaaaagcaattgcagaagttgatgtgggtacagataaggcccagaattctgacccgatacttgatacttcatcactagttcctggatgttcctctgtagataacatcaagtcatctcaaacctcacaaaaccagggacttggacgtcctactcttgaaggtgatgaagagacttcagaggttgagtacacagtgaataagggcccagcttccagcaatagagacagggtaccaccttcatctgaagctagtgagcatcacccgcggcatcgtgtttcaagtcaagcggaagatacttccagcagctttgacaacctgtttattgacaggttacagaggatcaccattgcggaccaaggtgaacaacagtcagaagaaaacgcaagtactaagaacttgacaggcctttccagtgggactgagaagaaacctcattacatggaagtgctagaaatgcgagccaaaaacccagtgccccagctgcgtaaatttaaaaccaatgtgttaccttttcgacaaaatgattcatctagtcattgccagaagagtgggtctcctatttcctcagaagagcggcggcgcagggataagcagcatcttgatgacatcacagcagctcggcttctaccacttcaccatatgcccacgcagctgctctccatagaagaatccttggcacttcagaaacagcagaaacagaattatgaggagatgcaagcaaagctcgcagcgcaaaaattagctgaaagactgaatattaaaatgcggagttataatccagaaggggagtcttcagggagataccgagaagtaagggatgaagatgacgattggtcctctgatgaattctgaagataatctcctaaatcactgacgttgagatgtcatcatcttacatcagactttctaactagtatcaagatcagtgtcagatattgttgagggaagtaattttataaagttacacaaaggtagttataaaaaaagcccagtttgtctttcagaaggtgactttcatgtgcttgaaaagtttaatatttgaatattgtgtttaaccacatggtattaaaattttgcaatatattgtgtattggtctgatattttagtatatagtagaacatactttttttttctttaagccaaatgaaaagaggtaactttgcttttttcctttttcttacctatcaaatagcatttattacatgtctttcagtgaaatacttagttgttccaggcacctaaaatcaattaggaagacatagttcccttcttttttgggtaatgaagggagcagtctaaagaattgtatgcatgtttgcatggggttattgagacattggatgtgaaatacctaggaagacatgtatggagaatgcttaacaaatgctcttctcctttttctgtcttcccttaggaagaacgttatctctcttctgattaggaaggacttcccttttgagtagatgctggaaagtggaggttttttttgttggtttgtttgttggttttgtgtttttttttgagatggggtcttgctctgtcgcccaggctggagtgcagtggcaggatctcggctcactgcaatctaggtggaggtctttttaaataacctcatgttacttcaggcaaatctggtacaggagaagcccaagctaactgagctgggtgaaggcttgtgcatcacctggcttgagttccttgctgtcacagatgataggttcatgtacacaacattaatgtttgataaggaaagcattttttttttgttaaaattgaattgtcagtactttacttttttccccccaaataggtatatatagactgcagaagcttcagtcccatatataaacgttcatgtcattttagaggattatatggttgtctccagagaaattaacttacattatcaaaaaattctttgtctaatatattggagtctttaaaagtgttgaagaataaaatattaattagaacaacttcaaatgctaaggtgatgttttaccgggacttaattaaatacaactttttcctttcgaaaaagactgttcacatttgcttccaggtgtaattattgctttcattccttacccccctcaagcaaatgtgaaaagtatactgacctaagattctcattagttttagttcttaaaacgaatagtaaatgatttcacagcgtaaaatttgatgttatttctggaagctggatgatatggaagagttcatgtgcctggacacacagttccctgtaatcctgccatctagggagataaactctgttaacattttgatgttgtgtttttgcttatttttctatgcatagttatgcatttatattctcaaaaatgaaatcataatgtacattgctttgtagtctgctctatatattgtcaatatgttcccatattaaatattttgctttttagacagctgtaggatattttatttcatgggtataccataactttaagatttatttcctattcagcaatttgattatgtattataatgtaatctgtaaatagtgatatgattaacatcttaatcacatccatagaaaatgacttatttccagaagataccgctctaaaaatgaaattgttaggtgaaagtgtttttgagaatttttatatatattactcactgcagagatcatgttcatttacattcccattagcaatatatccaatgctcagaattgaaaattactacttaaaatctttgcaaattgaataattacagaaaagggctacatttaaaatttgtatttgtttttcttacttagtgaaggttgtgttttttttcatattcattggccatgctatattcattcttttgagaattgctcattcatattttttctgttgcttgcttggagaatttgctctttttttggcatataagttcttaagaatgtccgtcctttgtcatatattgtaactttttttagccttatttgtcatttaacatagtttgtggtatttcagtatagaagttgttttctttaggagtctacctttgtgtatgtgcttgaaagtatttttgtaatccaagaatggataaatgtccttattttcttctagtattttcttatttcacttttacacctatctttaaaaggaatttaaattttgtttatatacattaactaaatcagtacaagtttggggtgaaaaggaaatttttaatccatctcaaatgtatttggttatattatataaggtagggatttgattttatttcgatgctatttttatagaatattaaattcttatgtgtcttttgtgtcttaggccaatttctgggccttctgggttttttctacactgtcaataattatcgctttaattggtgttaatatttggtagtacacaggttctcccttgttcttttaaattttgtgaaatataacttacaaataagtacttaaaacagagcttaatgggtaaagcaacagctgtgtaatcacaaactagatgcagaggaggtcttgccagcactccaaaatctctgtgtgtcccctcttgacactcactgtttcccccagagctaactatcctgacgtatggtaattctccctctgtccttttaagaattattttaccagttatgtgtataacaatatggtttacattttgctcacttttgacttatataaaaatagaataatactaaaaaaaagtgtt

SEQ ID NO: 322482 - DNA, 1475 bp, Homo sapiens
acccggttcttccgggaaaatggcgactcccgctcgtgccccggagtcaccgccgtccgcggatccggcgctagtagcggggcctgccgaggaagccgagtgcccgccgccgcgccagcctcagcccgcgcagaatgtgctcgctgccccgcggcttcgagccccaagctcccgaggacttggcgcagcggagtttggtggagctgcgggaaatgttgaagcgccaggagagacttttgcgcaacgaaaaattcatttgcaaattgcccgacaaaggtaaaaagatctttgactcttttgccaaactgaaagctgctattgcagaatgtgaagaagttagaagaaaaagtgaactgtttaaccctgttagtttagactgtaagctaaggcaaaaagcaattgcagaagttgatgtgggtacagataaggcccagaattctgacccgatacttgatacttcatcactagttcctggatgttcctctgtagataacatcaagtcatctcaaacctcacaaaaccagggacttggacgtcctactcttgaaggtgatgaagagacttcagaggttgagtacacagtgaataagggcccagcttccagcaatagagacagggtaccaccttcatctgaagctagtgagcatcacccgcggcatcgtgtttcaagtcaagcggaagatacttccagcagctttgacaacctgtttattgacaggttacagaggatcaccattgcggaccaaggtgaacaacagtcagaagaaaacgcaagtactaagaacttgacaggcctttccagtgggactgagaagaaacctcattacatggaagtgctagaaatgcgagccaaaaacccagtgccccagctgcgtaaatttaaaaccaatgtgttaccttttcgacaaaatgattcatctagtcattgccagaagagtgggtctcctatttcctcagaagagcggcggcgcagggataagcagcatcttgatgacatcacagcagctcggcttctaccacttcaccatatgcccacgcagctgctctccatagaagaatccttggcacttcagaaacagcagaaacagaattatgaggagatgcaagcaaagctcgcagcgcaaaaattagctgaaagactgaatattaaaatgcggagttataatccagaaggggagtcttcagggagataccgagaagtaagggatgaagatgacgattggtcctctgatgaattctgaagataatctcctaaatcactgacgttgagatgtcatcatcttacatcagactttctaactagtatcaagatcagtgtcagatattgttgagggaagtaattttataaagttacacaaaggtagttataaaaaaagcccagtttgtctttcagaaggtgactttcatgtgcttgaaaagtttaatatttgaatattgtgtttaaccacatggtattaaaattttgcaatatattg

SEQ ID NO: 322483 - DNA, 1941 bp, Homo sapiens
acccggttcttccgggaaaatggcgactcccgctcgtgccccggagtcaccgccgtccgcggatccggcgctagtagcggggcctgccgaggaagccgagtgcccgccgccgcgccagcctcagcccgcgcagaatgtgctcgctgccccgcggcttcgagccccaagctcccgaggacttggcgcagcggagtttggtggagctgcgggaaatgttgaagcgccaggagagacttttgcgcaacgaaaaattcatttgcaaattgcccgacaaaggtaaaaagatctttgactcttttgccaaactgaaagctgctattgcagaatgtgaagaagttagaagaaaaagtgaactgtttaaccctgttagtttagactgtaagctaaggcaaaaagcaattgcagaagttgatgtgggtacagataaggcccagaattctgacccgatacttgatacttcatcactagttcctggatgttcctctgtagataacatcaagtcatctcaaacctcacaaaaccagggacttggacgtcctactcttgaaggtgatgaagagacttcagaggttgagtacacagtgaataagggcccagcttccagcaatagagacagggtaccaccttcatctgaagctagtgagcatcacccgcggcatcgtgtttcaagtcaagcggaagatacttccagcagctttgacaacctgtttattgacaggttacagaggatcaccattgcggaccaaggtgaacaacagtcagaagaaaacgcaagtactaagaacttgacaggcctttccagtgggactgagaagaaacctcattacatggaagtgctagaaatgcgagccaaaaacccagtgccccagctgcgtaaatttaaaaccaatgtgttaccttttcgacaaaatgattcatctagtcattgccagaagagtgggtctcctatttcctcagaagagcggcggcgcagggataagcagcatcttgatgacatcacagcagctcggcttctaccacttcaccatatgcccacgcagctgctctccatagaagaatccttggcacttcagaaacagcagaaacagaattatgaggagatgcaagcaaagctcgcagcgcaaaaattagctgaaagactgaatattaaaatgcggagttataatccagaaggggagtcttcagggagataccgagaagtaagggatgaagatgacgattggtcctctgatgaattctgaagataatctcctaaatcactgacgttgagatgtcatcatcttacatcagactttctaactagtatcaagatcagtgtcagatattgttgagggaagtaattttataaagttacacaaaggtagttataaaaaaagcccagtttgtctttcagaaggtgactttcatgtgcttgaaaagtttaatatttgaatattgtgtttaaccacatggtattaaaattttgcaatatattgtgtattggtctgatattttagtatatagtagaacatactttttttttctttaagccaaatgaaaagaggtaactttgcttttttcctttttcttacctatcaaatagcatttattacatgtctttcagtgaaatacttagttgttccaggcacctaaaatcaattaggaagacatagttcccttcttttttgggtaatgaagggagcagtctaaagaattgtatgcatgtttgcatggggttattgagacattggatgtgaaatacctaggaagacatgtatggagaatgcttaacaaatgctcttctcctttttctgtcttcccttaggaagaacgttatctctcttctgattaggaaggacttcccttttgagtagatgctggggtagtctacctgggttaggtctacctgggttaggtctacctgggttaggtctacctgggttaggtctacctgggttaggt

SEQ ID NO: 322484 - DNA, 93 bp, Homo sapiens
ggagaggaactattgccaagcaccccaaaagttcaagaggtgactgttgatcccagagtagcaaggaaagggacagacaggctataagaagtg

SEQ ID NO: 322485 - DNA, 320 bp, Homo sapiens
tcctggttctaacactttctggctgagtaattttggggaagttacctaacctctctcagcttgtttctgtgaaactgtataactccaataaaatatggtgattgtgaaaataaaacaagaaaatacatgtaaaacaactggcaagttctaggcacacagtaaatactcaataaataataatatttatggagctgggcgcagtggctcacgcctgtaatcccagcactttgggaggccgaggcaggcggatcacgaggtcaggagatcgataccatcctggctaacacagtgaaaccccgtctctactaaaaatacaaaaa

SEQ ID NO: 322486 - DNA, 845 bp, Homo sapiens
gaggcgccgcggggcctcgtgcgccaacggtccctggtacgcggcggatgggcgccggcaggagcgggcagggcgaggcgaaggccggggagggatcgagaacggtgtgggagagctaggctcggggggcgaggccccggcccggcggggcgatggaggcgctgctctccacccccatcaaccccaacaacttccccgccaagctgtggcgcctggtgaacagcccgcgctaccgctccatccgctgggacggccgcggcgaggggctgcttatcgatcagccgctcttcgaggccgagctgctcagcccgcccgggccggggggcggtggcgggactgcgggggccggggccgagcccgagctcttcaaaaccaccagcttcaccagcttcatccgccagctcaacctctacggcttccgcaaggtggtgctgggcgggccggggggcggcaaaccggcaggcaatgggccgctccatcacttccacaacccgcacttccgccgcgaccagccacagctgctcgtgcacctcaagcgcctcaccagcgccaacaaggccaagctggcggccggcctggaggtgccctgccgcccgaccaaacggttccagcggctgctcatcacctcggcctccgccgccaccgcgccactgcagcaccagcagccgccgccgcccgcggggccccggcccgagccgcacggaccagtggctgtaggacaatttcaccggtcatttcgtcgagatagtttgtctccttactcctgtgtatcaactccatcccacgaccacagtacttaccctctgaaaggtttagatcggaccccagttcctcatagaatatgg

SEQ ID NO: 322487 - DNA, 557 bp, Homo sapiens
cctaaatatgatcagatccagggagcattgtgactgagttttcaggttagcctctgtgcaacctgacttcccatgggcagggtggagtgctgggagcattgattcaattcttcccttgagcactcttcacccccatctctctccagaaatgtaccgagagtctaactgctctatactctgggaggaacacgaacatgattccacctcagttccaagctttctgagaaccatcctgggaaccagcaagcatgacaactctccaccttctgcatcagtcacttgcaaggaggccagtgggcacagttcatgctactgagtgagatggcgcccagaggccaaggccaagggcagggctgcattttctggttcttttatatttgtagcaagatactcttagtggaagagcccaatatctgggcttgcctaaaagtctccttagctagatcattcaatttatgagctttccatcttgttgcagtgttgcttaatttctgcctctccataacaagaatcacctttcttccagtctctaatgcattgttctcactttcctataa

SEQ ID NO: 322488 - DNA, 844 bp, Homo sapiens
caatgaaagtagcctccacttacaaactaattactctttcttgaaaatattacactttttttcttctatatctctactcctagctctcaacacctttcttaagcccacatcataacctgtcttgcataactttgtgagtgcccaacgtttcactgtacaagattgtagagctgcatgcttcttaagaataaatccacactttaggtaccagtaaatccatgcaatgcctcagacgttataaccaaataatgcctggaaaatcgacatgaatttatgtgaagcataagcctttaatttttttaaagaaaagtagattgctgtttttccacatcatttcagagccgttctctagttttgcatgccctttactgcagaaccatacagattttgttctccatttcatacatcatttgttgaaatgccctttaaaatgtaacggaatatagagctttatgggaaaaaatgctgtagaaaataaattatcttctctctttgtattgggaaccaaaaggtctcaccttattaatgaccacagagactctcctaaagcaattctggaagtcaaaacagctggagtctagtttaatgggaaccctcattaattagacaagaacaccaaggctatgaccacagcagctggtagcagcagccctgcagtgaagtagactctcagaggacacaaggaaagagtgtattgataagaaatctacagcaaaggtgtagcacatcatcatttgatcttgatacacttgactgtgggcaaagtacctgttatgtaaaacatgctttgttagttagggccatgataagctgcttaagctgatgaatgaacaccaaatctcag

SEQ ID NO: 322489 - DNA, 331 bp, Homo sapiens
tggggaggctgatttgagtaataataaacctccatcctcctgtttggcagacttggagtcattaaaatctttctttactacaaaccaccatttcaatacatttgtgtgtgtgtgtgtgtgtgtgtgtgtgtgtgtgtgtgtgtgtgtgtgcaggaggccagaagaacttgtctggcaattataagagtggatggagaaactgcctatccctgtcccatggtcttgtccacaggtcagcctcacaaagggaaagagccctggatgggaatacagtggaaactcattctcttagtgacctggggacattggctctagaggaagcctggcagga

SEQ ID NO: 322490 - DNA, 830 bp, Homo sapiens
  misc_feature (91)..(91): n is a, c, g, or t
gcctgccggttaccgtccggatttcccgggtcgactactcctattaaattcgcggccgcgtcgaccccgaggcagggggatcacttgagcncaggagttcaaggccgggcaacatagtaagacccaccgtgctcagccaatgattcactttttaaagaaaacagcgttactgagatataattcacataccatacacatcacccgtttaaagtgtacagttaagtggttttgagtatattcaaagaattgttcagccatcaccacaatctaatcttagaacatttttatcacttgagaaagaaactccatacacatgagaagccatgtctgtttccaacctgcacacttccagctgtatgtaatcactaatctgctttctgactcaatagatttgcctattctgaagatttcatataaatgcaatcatacaatgtggtcttttgtgactggcttctttcacttagcatgttttcaaggttcatctatatggtagcatgtttccatactttattactgttacttgccaaataatactccactttgttatatatacattttgtttcattaattaatttcattaattgatggacatttcagtcatttccatttttggttactatgaaaatactgctgtgaacattcatatacaggtttatttttgtattcactcttgttttcctttcttttgattatgtagctaagtgtttaacatcattaggaactatcgaactgtttccaaagtacctgcaccattttatgttcccaccagcaatggataatggttcaaatttttccacatcctcaataacactttttgttgtgtcttttgt

SEQ ID NO: 322491 - DNA, 372 bp, Homo sapiens
cggggtcttactatgttgcccggccttgaactcctgggctcaagtgatccccctgcctcgggctctcaaaatgctgggattacaggcgtgacccaccgtgctcagccaatgattcactttttaaagaaaacagcgttactgagatataattcacataccatacacatcacccgtttaaagtgtacagttaagtggttttgagtatattcaaagaattgttcagccatcaccacaatctaatcttagaacatttttatcacttgagaaagaaactccatacacatgagaagccatgtctgtttccaacctgcacacttccagctgtatgtaatcactaatctgctttctgactcaatagatttgcctattctg

SEQ ID NO: 322492 - DNA, 369 bp, Homo sapiens
tcagtcggtacctcttgatgcaagtgtcacacaagagaaaatatttgctgttatgcatgcgttgccagtccattttgaacatggcgatgtttcgttgtaaaaaagacatagcaataaagtattctcgtactcttaataaacacttcgagagttcttccaaagtcgcccaggcaccttctccatgcattgcaagaagcacaggcacaccatcccctctttccccaatgccttctcctgccagctccgtagggtcccagtcaagtgctggcagtgtggggagcagtggggtggctgccactatcagcaccccagtcaccatccagaatatgacatcttcctatgtcaccatcacatcccatgttcttaccg

SEQ ID NO: 322493 - DNA, 417 bp, Homo sapiens
gtgctttcataaggctttgagagcatggtcttaatacgggatcattttctttttcctaatgaatttttgctaaaatagttttcagcaggtcatagctgacaggctttggttatcatttttagttcattcatcctcacacttctccctggccataattaaactaagacagtggaggaaagtcacactaaagaatgtgggtgagaaactaaatcaaggtttgtcttcagcctaacaatgaccatgttcttctcctgcagacggacagggttggaaaggcttttaagtacctggaagccgtcttgtccttcattgagtgcggaattgccacagagtctgaaagccagtcatccaagtcagcttactctgtctactcagaaactgtagatctcattaagtaagtgccgagtcattgtgctt

SEQ ID NO: 322494 - DNA, 1537 bp, Homo sapiens
ccttgtgcgaaatgagcccgggccgcagcaagcaacgaacccaagccagcagtgcccccctccagtgagaagaagaagcacaatgagctccctccctgccccctctaagtgctctctcagtgcccagaacccgcgaagggcaatgtggaggacaggacccctgagcactttgctcttgttcccctgactgagagccagtggcccaccccacagtggcagcggcagcaggactagtggctgcctgccaagcctgtggtggtccaggaggacagccgcaaagacagactcccattgcctttgagagacaccaagctgctctcaccgctcagggacactcctcccccacaaagcttgatggtgaagatcaccctagacctgctctctcggataccccagcctcccgggaaggggagccgccagaggaaagcagaagataaacagccgcccgcagggaagaagcacagctctgagaagaggagctcagacagctcaagcaagttggccaaaaagagaaagggtgaagcagaaagagactgtgataacaagaaaatcagactggagaaggaaatcaaatcacagtcatcttcatcttcatcctcccacaaagaatcttctaaaacaaagccctccaggccctcctcacagtcctcaaagaaggaaatgctccccccgccacccgtgtcctcgtcctcccagaagccagccaagcctgcacttaagaggtcaaggcgggaagcagacacctgtggccaggaccctcccaaaagtgccagcagtaccaagagcaaccacaaagactcttccattcccaagcagagaagagtagaggggaagggctccagaagctcctcggagcacaagggttcttccggagatactgcaaatccttttccagtgccttctttgccaaatggtaactctaaaccagggaagcctcaagtgaagtttgacaaacaacaagcagaccttcacatgagggaggcaaaaaagatgaagcagaaagcagagttaatgacggacagggttggaaaggcttttaagtacctggaagccgtcttgtccttcattgagtgcggaattgccacagagtctgaaagccagtcatccaagtcagcttactctgtctactcagaaactgtagatctcattaaattcataatgtcattaaaatccttctcagatgccacagcgccaacacaagagaaaatatttgctgttttatgcatgcgttgccagtccattttgaacatggcgatgtttcgttgtaaaaaagacatagcaataaagtattctcgtactcttaataaacacttcgagagttcttccaaagtcgcccaggcaccttctccatgcattgcaagaagcacaggcacaccatcccctctttccccaatgccttctcctgccagctccgtagggtcccagtcaagtgctggcagtgtggggagcagtggggtggctgccactatcagcaccccagtcaccatccagaatatgacatcttcctatgtcaccatcacatcccatgttcttaccg

SEQ ID NO: 322495 - DNA, 338 bp, Homo sapiens
ctaaactagggtagtagcagtgggcattaaaagaaagaaccactgcagaagtaaaaattacagggcctagtaataactggatgtgacagagaaaggagatggaagagtcaaaggttatactatagttcctatcctaaatagtaacatttagtgataacatttagaagaaatctttatctagtactttatcaaaacttcacaccaactaccaaatggttctcagagcattggaacaagacaacaagttttccacttggaaatactttttaaaataacatgtgtgtgtataattttttttttttttttttttttgaggcagggtctcgctgtcgcccagg

SEQ ID NO: 322496 - DNA, 631 bp, Homo sapiens
ccggctgcgggccagggtctgggaagggggtggtgggtcgccgtttcatcagaagccggaggacgggcgccagggggcaacttcctacaggagggcgtcccgttagaatgacagggcttttgcaaaagtctgacacccgtggcacagagcgccccagatatggagggtttcacagacagggtcgcagccgggcagaggtgctcctcacatcccagacggggcggcggggcagaggcgctccccacatctcagacgatgggcggcagggcagagactctcctcacttcctagatgtgatggcggccgggaagaggctcatgtgtggcttcttcagtcctctcttcattcactcatgtattcatttattcaacgacatattactaaggaacctccttaagccgggatgctgaacgtggaaaaatagttgactcttgaacaatgtgggggcttggggcaccaaccccctgtgcagttgaaaatcgacatataactttgactcgccaaaaacttcactacaatagcctgctgccaacctgaagtcttaccaataacatcaacagtcaattaaacatattacgtatgttatatgtattctatgctgtagttttacaataaagtaagctggagaaaa

SEQ ID NO: 322497 - DNA, 561 bp, Homo sapiens
ccggctgcgggccagggtctgggaagggggtggtgggtcgccgtttcatcagaagccggaggacgggcgccagggggcaacttcctacaggagggcgtcccgttagaatgacagggcttttgcaaaagtctgacacccgtggcacagagcgccccagatatggagggtttcacaggctcatgtgtggcttcttcagtcctctcttcattcactcatgtattcatttattcaacgacatattactaaggaacctccttaagccgggatgctgaacgtggaaaaatagatataattttacccctgagaagctcataggctaaaaaaaatattgatttgggataaatgtatgttaagttgactcttgaacaatgtgggggcttggggcaccaaccccctgtgcagttgaaaatcgacatataactttgactcgccaaaaacttcactacaatagcctgctgccaacctgaagtcttaccaataacatcaacagtcaattaaacatattacgtatgttatatgtattctatgctgtagttttacaataaagtaagctggagaaaa

SEQ ID NO: 322498 - DNA, 526 bp, Homo sapiens
ccggctgcgggccagggtctgggaagggggtggtgggtcgccgtttcatcagaagccggaggacgggcgccagggggcaacttcctacaggagggcgtcccgttagaatgacagggcttttgcaaaagtctgacacccgtggcacagagcgccccagatatggagggtttcacaggctcatgtgtggcttcttcagtcctctcttcattcactcatgtattcatttattcaacgacatattactaaggaacatataattttacccctgagaagctcataggctaaaaaaaatattgatttgggataaatgtatgttaagttgactcttgaacaatgtgggggcttggggcaccaaccccctgtgcagttgaaaatcgacatataactttgactcgccaaaaacttcactacaatagcctgctgccaacctgaagtcttaccaataacatcaacagtcaattaaacatattacgtatgttatatgtattctatgctgtagttttacaataaagtaagctggagaaaa

SEQ ID NO: 322499 - DNA, 493 bp, Homo sapiens
ccggctgcgggccagggtctgggaagggggtggtgggtcgccgtttcatcagaagccggaggacgggcgccagggggcaacttcctacaggagggcgtcccgttagaatgacagggcttttgcaaaagtctgacacccgtggcacagagcgccccagatatggagggtttcacaggctcatgtgtggcttcttcagtcctctcttcattcactcatgtattcatttattcaacgacatattactaaggaacctccttaagccgggatgctgaacgtggaaaaatagttgactcttgaacaatgtgggggcttggggcaccaaccccctgtgcagttgaaaatcgacatataactttgactcgccaaaaacttcactacaatagcctgctgccaacctgaagtcttaccaataacatcaacagtcaattaaacatattacgtatgttatatgtattctatgctgtagttttacaataaagtaagctggagaaaa

SEQ ID NO: 322500 - DNA, 773 bp, Homo sapiens
ccggctgcgggccagggtctgggaagggggtggtgggtcgccgtttcatcagaagccggaggacgggcgccagggggcaacttcctacaggagggcgtcccgttagaatgacagggcttttgcaaaagtctgacacccgtggcacagagcgccccagatatggagggtttcacaggctcatgtgtggcttcttcagtcctctcttcattcactcatgtattcatttattcaacgacatattactaaggaacctccttaagccgggatgctgaacgtggaaaaatagatataattttacccctgagaagctcataggctaaaaaaaatattgatttgggataaatgtatgttaagttgactcttgaacaatgtgggggcttggggcaccaaccccctgtgcagttgaaaatcgacatataactttgactcgccaaaaacttcactacaatagcctgctgccaacctgaagtcttaccaataacatcaacagtcaattaaacatattaccaggacaggcagaaggatgccttcttccacgcaagcactgaaccaaaccacagtagaagaaacagaatcaaatgagagagattcaactgaccagtttaaggcttatcagaaaggaacaaagacataccaaaatagaccatccttgcacaaacacagacacacagggacaaggcacaagtgcatcacttacaccagcacaggtgctagcaagaaacccattcatatgaacactttatgcggattttaaagggaaaactcttctttta

SEQ ID NO: 322501 - DNA, 237 bp, Homo sapiens
gcaacacagtaggaaggaatcacaggaggaaggaattacagcctaggtttcaaatcactcctccacctctaaaaagctacagtcaagttttataacctctctaaactttgttggtgacagcacagttcctaacacacactaggcctatgacatacatttgctgaatacaagaataatatttgtatgtagacctcacactctaagaggaagacaagtcattctttttttttttttttt

SEQ ID NO: 322502 - DNA, 467 bp, Homo sapiens
gggaatgaccctgagtcagggcagggccccctgacatctgcgtggaggtgatggcctgctccacccatgtggttggccctgcaggccacggccactgctccatgggtcacaggaccctctgtcccaccctctccaagtcatgctgcaggtgccagtgcagtcactgtccccaaacattgctgccctctgctcctggttccagagccctcaggggcttggtctgcctaccacatgggctggtacccagggctgaggctggccctgccctggcctgctggcttctacagcctcagaacaggtgtgggaagatgggggtggccccagtgcccaccagggcagcctgcccggtacctggtggtaatggagtatggtgtctgcattcacatccttccctggagatatgttgagccacaatttccgcatgaagtacacctggtaggggagcgtcacgggggcccctgggcgag

SEQ ID NO: 322503 - DNA, 768 bp, Homo sapiens
cgccctcctgaccgcagcggctagaggttccattgcagacccggaggccgtggctgtggttcgcggcggtgctgtcgcgggcgccctggcgcagcccacgcaggggctcctgaggggagacataagacatcagtcagtacatgtgaggtgtgcattggattgatccagaaagtcaggacgactccaagtggaaaggcctccagagacaggagacagtaaaagaaatggcctctctcctctgtcagagtggagtcccgagctcccagaaatgccacatgatggacaaacgcttgggggaaaaaaaaaaaaagggagacctcagtcgggacacaaaagcgggagctttaaaagaaaaaataagagataagttgaacttcaccaaaaaataagcgtttctggtcttggaaagacacttaaaatggaaagggcaagccatcgatgggggaaaatactcagaatagtgggatctgacagagggctgtatctagaatatatgaagatatttaaaatccagtaattggacataaagatggtacgccagcctgacacacaaaggaaccccaatggccaatgggacaggaagggaacccgtatggccgatggacagaaagggaagtgaacgtgaacatctcattggggatgccgttatcaccactggaatagtcaaaaacatggacaccaagtattggtgggtgagtggaatggcgggaacccacatacacggtcgatgggagctgcaccctttggaaatcatttcacagtttgtgc

SEQ ID NO: 322504 - DNA, 1371 bp, Homo sapiens
cctcaggatcagaaaaagagctggaaagggaaggggagtctacagaatatgaatttccccacaagacaccgctttgcggggccatttcaaaatttgtcaaagagatatattttggggtaaaatacattgatactttgagggcctgttgtcacgtgatgctataccagcgtcagattggaacttggtgtcttgctgctatggagtctgctgtcagtctggtcagctgcacctgaactccaaagggaggtgggtataatgagccatgtccaatccccgtcccttcctggcctgagctcatttttcaggttcttcagaatccccctggtggagatgagggatccattcagtgggttggggaagcttagagttttatttttgatttacactatgtgaagcagaaattaaaatactgtaaccctgatagggttattttaaagctgcaggaatcaaggcaggttgccgtcgggtaagaggatagacaggcaggtcatgtagcaggacgagctgcggacaaaacccctcagacaccaggttaaggaaggatttggctttattcggccgggagcttcggcagactcgcgtctcaagaaccgagctccccgaaaacagagttcctggcccttttaagggcttacacctctaaggggtccacgtgaaagggtcgtgatagattgagatcacatgtggttagagtgggagggggggtaatcttttaacctcaggcctggtcatcggtggcaccggctggtcttgctgctgacttcattcctgttgtttttcaacttttacttcatccttctcttcagagacaggagacagtaaaagaaatggcctctctcctctgtcagagtggagtcccgagctcccagaaatgccacatgatggacaaacgcttgggggaaaaaaaaaaaaagggagacctcagtcgggacacaaaagcgggagctttaaaagaaaaaataagagataagttgaacttcaccaaaaaataagcgtttctggtcttggaaagacacttaaaatggaaagggcaagccatcgatgggggaaaatactcagaatagtgggatctgacagagggctgtatctagaatatatgaagatatttaaaatccagtaattggacataaagatggtacgccagcctgacacacaaaggaaccccaatggccaatgggacaggaagggaacccgtatggccgatggacagaaagggaagtgaacgtgaacatctcattggggatgccgttatcaccactggaatagtcaaaaacatggacaccaagtattggtgggtgagtggaatggcgggaacccacatacacggtcgatgggagctgcaccctttggaaatcatttcacagtttgtgc

SEQ ID NO: 322505 - DNA, 937 bp, Homo sapiens
cacttccctgctcgatgtatgggccagcattgccttgatagcaaagtcagacatcaccagacagtagaaccacagaccaatgtctttcatgaaccaagacacagcatttaaaaaaattagcaaatggaatttatatctgcctattgtttacaaaaaaagccaaactttgtaaaatacttgaagagatttattctgagccaaatatgacccatgacacagcctcaggacgtcctgagaacttggcccaaggcggttgttttactgcttggttttattcatttcagggagacataagacatcagtcagtacatgtgaggtgtgcattggattgatccagaaagtcaggacgactccaagtggaaaggcctccagagacaggagacagtaaaagaaatggcctctctcctctgtcagagtggagtcccgagctcccagaaatgccacatgatggacaaacgcttgggggaaaaaaaaaaaaagggagacctcagtcgggacacaaaagcgggagctttaaaagaaaaaataagagataagttgaacttcaccaaaaaataagcgtttctggtcttggaaagacacttaaaatggaaagggcaagccatcgatgggggaaaatactcagaatagtgggatctgacagagggctgtatctagaatatatgaagatatttaaaatccagtaattggacataaagatggtacgccagcctgacacacaaaggaaccccaatggccaatgggacaggaagggaacccgtatggccgatggacagaaagggaagtgaacgtgaacatctcattggggatgccgttatcaccactggaatagtcaaaaacatggacaccaagtattggtgggtgagtggaatggcgggaacccacatacacggtcgatgggagctgcaccctttggaaatcatttcacagtttgtgc

SEQ ID NO: 322506 - DNA, 851 bp, Homo sapiens
cgccctcctgaccgcagcggctagaggttccattgcagacccggaggccgtggctgtggttcgcggcggtgctgtcgcgggcgccctggcgcagcccacgcaggggctcctgagggtcctgcgaggccgggaggtcctgggggtctgggaggtccctggggtcgggaagtcggtggaccctgcaggccagtggggaggggagacataagacatcagtcagtacatgtgaggtgtgcattggattgatccagaaagtcaggacgactccaagtggaaaggcctccagagacaggagacagtaaaagaaatggcctctctcctctgtcagagtggagtcccgagctcccagaaatgccacatgatggacaaacgcttgggggaaaaaaaaaaaaagggagacctcagtcgggacacaaaagcgggagctttaaaagaaaaaataagagataagttgaacttcaccaaaaaataagcgtttctggtcttggaaagacacttaaaatggaaagggcaagccatcgatgggggaaaatactcagaatagtgggatctgacagagggctgtatctagaatatatgaagatatttaaaatccagtaattggacataaagatggtacgccagcctgacacacaaaggaaccccaatggccaatgggacaggaagggaacccgtatggccgatggacagaaagggaagtgaacgtgaacatctcattggggatgccgttatcaccactggaatagtcaaaaacatggacaccaagtattggtgggtgagtggaatggcgggaacccacatacacggtcgatgggagctgcaccctttggaaatcatttcacagtttgtgc

SEQ ID NO: 322507 - DNA, 1411 bp, Homo sapiens
gagctggggacgtcccctggggcaccccagggcatgggtggcattgctttggcggctccgcagcctggcagatccaagggggcatagttgacagcaggcatcagcgtaggcgccgctgggtggctggtcagaggggacactgggagaagaacctctcataccctcggtgctccagtccccagctcactcagccacatacaccatgtgtgaagaggagaccaccgcgctcgtgtgtgacaatggctctggcctgtgcaaggcaggcttcgcaggagatgatgccccccgggctgtcttcccctccattgtgggccgccctcgccaccagggtgtgatggtgggaatgggccagaaagacagctatgtgggggatgaggctcagagcaagcgagggatcctaactctcaaataccccattgaacacggcatcatcaccaactgggatgacatggagaagatctggcaccactccttctacaatgagctgcgtgtagcacctgaagagcaccccaccctgctcacagaggctcccctaaatcccaaggccaacagggagaagatgacccagatcatgtttgaaaccttcaatgtccctgccatgtacgtcgccattcaagctgtgctctccctctatgcctctggccgcacgacaggcatcgtcctggattcaggtgatggcgtcacccacaatgtccccatctatgaaggctatgccctgccccatgccatcatgcgcctggacttggctggccgtgacctcacggactacctcatgaagatcctcacagagagaggctattcctttgtgaccacagctgagagagaaattgtgcgagacatcaaggagaagctgtgctatgtggccctggattttgagaatgagatggccacagcagcttcctcttcctccctggagaagagctatgagctgccagatgggcaggttatcaccattggcaatgagcgcttccgctgccctgagaccctcttccagccttcctttattggcatggagtccgctggaattcatgagacaacctacaattccatcatgaagtgtgacattgacatccgtaaggacttatatgccaacaatgtcctctctgggggcaccaccatgtaccctggcattgctgacaggatgcagaaggagatcacagccctggcccccagcaccatgaagatcaagattattgctcccccagagcggaagtactcagtctggatcgggggctctatcctggcctctctctccaccttccagcagatgtggatcagcaagcctgagtatgatgaggcagggccctccattgtccacaggaagtgcttctaaagtcagaacaggttctccaaggatcccctcgagactactctgttaccagtcatgaaacattaaaacctacaagcctta

SEQ ID NO: 322508 - DNA, 404 bp, Homo sapiens
atggaaggaataagggaagaggggggaagtgaaggttttgagcaataatctaatctatcacaatgtttctcctgttcttttctgaccatggggctccccttttctgggataagtagatttttggaccaccttgcttattcccttggggactgatcatgattcaccacatttgttctttgcagattattgctcccccagagcggaagtactcagtctggatcgggggctctatcctggcctctctctccaccttccagcagatgtggatcagcaagcctgagtatgatgaggcagggccctccattgtccacaggaagtgcttctaaagtcagaacaggttctccaaggatcccctcgagactactctgttaccagtcatgaaacattaaaacctacaagcctta

SEQ ID NO: 322509 - DNA, 273 bp, Homo sapiens
attcgcggccgcgtcgacaggtcttacaaatggaaccccgtttgtaagttgttagttgagctcaactaacaacttctaccaaggacccctggatcgacccactggccctttggtggcctaaagaattcccctctggaggaaactacaactgcagggccccttctttgcccctatccagccaggaagtgcttctaaagtcagaacaggttctccaaggatcccctcgagactactctgttaccagtcatgaaacattaaaacctacaagcctta

SEQ ID NO: 322510 - DNA, 1718 bp, Homo sapiens
  misc_feature (1717)..(1717): n is a, c, g, or t
cgcctctggggttttatattgctctggtattcatgccaaagacacaccagccctcagtcactgggagaagaacctctcataccctcggtgctccagtccccagctcactcagccacatacaccatgtgtgaagaggagaccaccgcgctcgtgtgtgacaatggctctggcctgtgcaaggcaggcttcgcaggagatgatgccccccgggctgtcttcccctccattgtgggccgccctcgccaccagggtgtgatggtgggaatgggccagaaagacagctatgtgggggatgaggctcagagcaagcgagggatcctaactctcaaataccccattgaacacggcatcatcaccaactgggatgacatggagaagatctggcaccactccttctacaatgagctgcgtgtagcacctgaagagcaccccaccctgctcacagaggctcccctaaatcccaaggccaacagggagaagatgacccagatcatgtttgaaaccttcaatgtccctgccatgtacgtcgccattcaagctgtgctctccctctatgcctctggccgcacgacaggcatcgtcctggattcaggtgatggcgtcacccacaatgtccccatctatgaaggctatgccctgccccatgccatcatgcgcctggacttggctggccgtgacctcacggactacctcatgaagatcctcacagagagaggctattcctttgtgaccacagctgagagagaaattgtgcgagacatcaaggagaagctgtgctatgtggccctggattttgagaatgagatggccacagcagcttcctcttcctccctggagaagagctatgagctgccagatgggcaggttatcaccattggcaatgagcgcttccgctgccctgagaccctcttccagccttcctttattggcatggagtccgctggaattcatgagacaacctacaattccatcatgaagtgtgacattgacatccgtaaggacttatatgccaacaatgtcctctctgggggcaccaccatgtaccctggcattgctgacaggatgcagaaggagatcacagccctggcccccagcaccatgaagatcaagattattgctcccccagagcggaagtactcagtctggatcgggggctctatcctggcctctctctccaccttccagcagatgtggatcagcaagcctgagtatgatgaggcagggccctccattgtccacaggaagtgcttctaaagtcagaacaggttctccaaggatcccctcgagactactctgttaccagtcatgaaacattaaaacctacaagccttaaaaaaaaaaaaaaaaaaaaaaacaaaaaaaactggggggcgcgcgcgccttgggcccgtggaaaaggttttaaagaaccattccggtagggcgcgcgcgggggccccaggggggaagagggagacactggggacaaagagggtggtcccagaggggaaacccggggcacaaggaacaaagggcggggggaattctccacacacaatatataaaaaagagcgccgggggggcacaaccaggagagaggttctggtgaaacaaaatctatccagagagaggggagctccgagagaggacaaatagaggggacctcttatatacaaagaggagagcccaacagggaagaccacaagttatcaaattaaaggccccgccgcgggggagnc

SEQ ID NO: 322511 - DNA, 1548 bp, Homo sapiens
caaagggatgtcgaggcacccaagagccagcaacagagggagctctcacacccctaaacatgaaggggtcaggtgacgagggcagtgtcattggagcttagtgagagcttgagctctgaaagaggggctgcccaacaggaactgtgctcatggagggccacgccattgtcaggaaatagaccctgacttcttttgccctcctactttccagcctcttgcaggaatcttctatcagccaaatatagccagaagccagaaagcaatgaacacttgagtgatacaatgtgccttgcatcactcagtgcacaaaggcaggggagagactgtaggagagtgaagaggagggaaggtcaaatggaaataatgaacacatagaaaatactggttccaggtctgagtcctacctggggccctgttgagaaggagtataccctttaaatgtcaatcagaaatttccagggctgaccattctcctctccagatccatcccatcctgtgtaacatggtgccacactctcccagcatgagaatgtcaatgagaattttccagccattgggagtctgccaggctcatatggcttttgtctccaccagatctggcaccactccttctacaatgagctgcgtgtagcacctgaagagcaccccaccctgctcacagaggctcccctaaatcccaaggccaacagggagaagatgacccagatcatgtttgaaaccttcaatgtccctgccatgtacgtcgccattcaagctgtgctctccctctatgcctctggccgcacgacaggcatcgtcctggattcaggtgatggcgtcacccacaatgtccccatctatgaaggctatgccctgccccatgccatcatgcgcctggacttggctggccgtgacctcacggactacctcatgaagatcctcacagagagaggctattcctttgtgaccacagctgagagagaaattgtgcgagacatcaaggagaagctgtgctatgtggccctggattttgagaatgagatggccacagcagcttcctcttcctccctggagaagagctatgagctgccagatgggcaggttatcaccattggcaatgagcgcttccgctgccctgagaccctcttccagccttcctttattggcatggagtccgctggaattcatgagacaacctacaattccatcatgaagtgtgacattgacatccgtaaggacttatatgccaacaatgtcctctctgggggcaccaccatgtaccctggcattgctgacaggatgcagaaggagatcacagccctggcccccagcaccatgaagatcaagattattgctcccccagagcggaagtactcagtctggatcgggggctctatcctggcctctctctccaccttccagcagatgtggatcagcaagcctgagtatgatgaggcagggccctccattgtccacaggaagtgcttctaaagtcagaacaggttctccaaggatcccctcgagactactctgttaccagtcatgaaacattaaaacctacaagcctta

SEQ ID NO: 322512 - DNA, 1673 bp, Homo sapiens
cgcctctggggttttatattgctctggtattcatgccaaagacacaccagccctcagtcactgggagaagaacctctcataccctcggtgctccagtccccagctcactcagccacatacaccatgtgtgaagaggagaccaccgcgctcgtgtgtgacaatggctctggcctgtgcaaggcaggcttcgcaggagatgatgccccccgggctgtcttcccctccattgtgggccgccctcgccaccagggtgtgatggtgggaatgggccagaaagacagctatgtgggggatgaggctcagagcaagcgagggatcctaactctcaaataccccattgaacacggcatcatcaccaactgggatgacatggagaagatctggcaccactccttctacaatgagctgcgtgtagcacctgaagagcaccccaccctgctcacagaggctcccctaaatcccaaggccaacagggagaagatgacccagatcatgtttgaaaccttcaatgtccctgccatgtacgtcgccattcaagctgtgctctccctctatgcctctggccgcacgacaggcatcgtcctggattcaggtgatggcgtcacccacaatgtccccatctatgaaggctatgccctgccccatgccatcatgcgcctggacttggctggccgtgacctcacggactacctcatgaagatcctcacagagagaggctattcctttgtgaccacagctgagagagaaattgtgcgagacatcaaggagaagctgtgctatgtggccctggattttgagaatgagatggccacagcagcttcctcttcctccctggagaagagctatgagctgccagatgggcaggttatcaccattggcaatgagcgcttccgctgccctgagaccctcttccagccttcctttattggcatggagtccgctggaattcatgagacaacctacaattccatcatgaagtgtgacattgacatccgtaaggacttatatgccaacaatgtcctctctgggggcaccaccatgtaccctggcattgctgacaggatgcagaaggagatcacagccctggcccccagcaccatgaagatcaagattattgctcccccagagcggaagtactcagtctggatcgggggctctatcctggcctctctctccaccttccagcagatgtggatcagcaagcctgagtatgatgaggcagggccctccattgtccacaggaagtgcttctaaagtcagaacaggttctccaaggatcccctcgagactactctgttaccagtcatgaaacattaaaacctacaagccttaaaaaaaagaagaaaaaaaaaagaaaacaaaaacattgtgttggcgggcgccctgggcccaggggaaaagggtttctaagcccccccttggggtggggcgccggcgggccgccaataggtatatggtgcacacacatgtggccaactaagcgctgtgctcccaaagagaaaactccggcgacatagacaaagggtgtgtggatttttccaccacaaattaaaaaacgccccggggggacacaccggcgtgttctggtgaacacaccccgaatgggagttccggagggcaccgggggtcacacacagggggcccaaaaaacccgaataaaattcgcacggtgt

SEQ ID NO: 322513 - DNA, 1320 bp, Homo sapiens
cgcctctggggttttatattgctctggtattcatgccaaagacacaccagccctcagtcactgggagaagaacctctcataccctcggtgctccagtccccagctcactcagccacatacaccatgtgtgaagaggagaccaccgcgctcgtgtgtgacaatggctctggcctgtgcaaggcaggcttcgcaggagatgatgccccccgggctgtcttcccctccattgtgggccgccctcgccaccagggtgtgatggtgggaatgggccagaaagacagctatgtgggggatgaggctcagagcaagcgagggatcctaactctcaaataccccattgaacacggcatcatcaccaactgggatgacatggagaagatctggcaccactccttctacaatgagctgcgtgtagcacctgaagagcaccccaccctgctcacagaggctcccctaaatcccaaggccaacagggagaagatgacccagatcatgtttgaaaccttcaatgtccctgccatgtacgtcgccattcaagctgtgctctccctctatgcctctggccgcacgacaggcatcgtcctggattcaggtgatggcgtcacccacaatgtccccatctatgaaggctatgccctgccccatgccatcatgcgcctggacttggctggccgtgacctcacggactacctcatgaagatcctcacagagagaggctattcctttgtgaccacagctgagagagaaattgtgcgagacatcaaggagaagctgtgctatgtggccctggattttgagaatgagatggccacagcagcttcctcttcctccctggagaagagctatgagctgccagatgggcaggttatcaccattggcaatgagcgcttccgctgccctgagaccctcttccagccttcctttattggcatggagtccgctggaattcatgagacaacctacaattccatcatgaagtgtgacattgacatccgtaaggacttatatgccaacaatgtcctctctgggggcaccaccatgtaccctggcattgctgacaggatgcagaaggagatcacagccctggcccccagcaccatgaagatcaagattattgctcccccagagcggaagtactcagtctggatcgggggctctatcctggcctctctctccaccttccagcagatgtggatcagcaagcctgagtatgatgaggcagggccctccattgtccacaggaagtgcttctaaagtcagaacagagtagtctcgaggggatcttggagaacctgttctgactttagaagcactgtcgac

SEQ ID NO: 322514 - DNA, 1339 bp, Homo sapiens
cgcctctggggttttatattgctctggtattcatgccaaagacacaccagccctcagtcactgggagaagaacctctcataccctcggtgctccagtccccagctcactcagccacatacaccatgtgtgaagaggagaccaccgcgctcgtgtgtgacaatggctctggcctgtgcaaggcaggcttcgcaggagatgatgccccccgggctgtcttcccctccattgtgggccgccctcgccaccagggtgtgatggtgggaatgggccagaaagacagctatgtgggggatgaggctcagagcaagcgagggatcctaactctcaaataccccattgaacacggcatcatcaccaactgggatgacatggagaagatctggcaccactccttctacaatgagctgcgtgtagcacctgaagagcaccccaccctgctcacagaggctcccctaaatcccaaggccaacagggagaagatgacccagatcatgtttgaaaccttcaatgtccctgccatgtacgtcgccattcaagctgtgctctccctctatgcctctggccgcacgacaggcatcgtcctggattcaggtgatggcgtcacccacaatgtccccatctatgaaggctatgccctgccccatgccatcatgcgcctggacttggctggccgtgacctcacggactacctcatgaagatcctcacagagagaggctattcctttgtgaccacagctgagagagaaattgtgcgagacatcaaggagaagctgtgctatgtggccctggattttgagaatgagatggccacagcagcttcctcttcctccctggagaagagctatgagctgccagatgggcaggttatcaccattggcaatgagcgcttccgctgccctgagaccctcttccagccttcctttattggcatggagtccgctggaattcatgagacaacctacaattccatcatgaagtgtgacattgacatccgtaaggacttatatgccaacaatgtcctctctgggggcaccaccatgtaccctggcattgctgacaggatgcagaaggagatcacagccctggcccccagcaccatgaagatcaagattattgctcccccagagcggaagtactcagtctggatcgggggctctatcctggcctctctctccaccttccagcagatgtggatcagcaagcctgagtatgatgaggcagggccctccattgtccagggtgacagccatcacctgaatccaggacgatgcctgtcgtgcggccagaggcatagagggagagcacagcttgaatggcgacgtacatggcagggacatt

SEQ ID NO: 322515 - DNA, 968 bp, Homo sapiens
  misc_feature (967)..(967): n is a, c, g, or t
ctactactactaattcgcggcgctcgactggccatctcattctcaaaatccagggccacatagcaagcttcctcttcctccctggagaagagctatgagctgccagatgggcaggttatcaccattggcaatgagcgcttccgctgccctgagaccctcttccagccttcctttattggcatggagtccgctggaattcatgagacaacctacaattccatcatgaagtgtgacattgacatccgtaaggacttatatgccaacaatgtcctctctgggggcaccaccatgtaccctggcattgctgacaggatgcagaaggagatcacagccctggcccccagcaccatgaagatcaagattattgctcccccagagcggaagtactcagtctggatcgggggctctatcctggcctctctctccaccttccagcagatgtggatcagcaagcctgagtatgatgaggcagggccctccattgtccacaggaagtgcttctaaagtcagaacaggttctccaaggatcccctcgagactactctgttaccagtcatgaaacattaaaacctacaagccttaaaaaaaaaaaaaaaaaaaaaaacaaaaaaaactggggggcgcgcgcgccttgggcccgtggaaaaggttttaaagaaccattccggtagggcgcgcgcgggggccccaggggggaagagggagacactggggacaaagagggtggtcccagaggggaaacccggggcacaaggaacaaagggcggggggaattctccacacacaatatataaaaaagagcgccgggggggcacaaccaggagagaggttctggtgaaacaaaatctatccagagagaggggagctccgagagaggacaaatagaggggacctcttatatacaaagaggagagcccaacagggaagaccacaagttatcaaattaaaggccccgccgcgggggagnc

SEQ ID NO: 322516 - DNA, 1108 bp, Homo sapiens
  misc_feature (1107)..(1107): n is a, c, g, or t
cgcctctggggttttatattgctctggtattcatgccaaagacacaccagccctcagtcactgggagaagaacctctcataccctcggtgctccagtccccagctcactcagccacatacaccatgtgtgaagaggagaccaccgcgctcgtgtgtgacaatggctctggcctgtgcaaggcaggcttcgcaggagatgatgccccccgggctgtcttcccctccattgtgggccgccctcgccaccagggtgtgatggtgggaatgggccagaaagacagctatgtgggggatgaggctcagagcaagcgagggatcctaactctcaaataccccattgaacacggcatcatcaccaactgggatgacatggagaagatctggcaccactccttctacaatgagctgcgtgtagcacctgaagagcaccccaccctgctcacagaggctcccctaaatcccaaggccaacagggagaagatgacccagatcatgtttgaaaccttcaatgtccctgccatgtacgtcgccattcaagctgtgctctccctctatgcctctggccgcacgacaggcatcgtcctggattcaggtgatggcgtcacccacaatgtccccatctatgaagcaggaagtgcttctaaagtcagaacaggttctccaaggatcccctcgagactactctgttaccagtcatgaaacattaaaacctacaagccttaaaaaaaaaaaaaaaaaaaaaaacaaaaaaaactggggggcgcgcgcgccttgggcccgtggaaaaggttttaaagaaccattccggtagggcgcgcgcgggggccccaggggggaagagggagacactggggacaaagagggtggtcccagaggggaaacccggggcacaaggaacaaagggcggggggaattctccacacacaatatataaaaaagagcgccgggggggcacaaccaggagagaggttctggtgaaacaaaatctatccagagagaggggagctccgagagaggacaaatagaggggacctcttatatacaaagaggagagcccaacagggaagaccacaagttatcaaattaaaggccccgccgcgggggagnc

SEQ ID NO: 322517 - DNA, 722 bp, Homo sapiens
cgcctctggggttttatattgctctggtattcatgccaaagacacaccagccctcagtcactgggagaagaacctctcataccctcggtgctccagtccccagctcactcagccacatacaccatgtgtgaagaggagaccaccgcgctcgtgtgtgacaatggctctggcctgtgcaaggcaggcttcgcaggagatgatgccccccgggctgtcttcccctccattgtgggccgccctcgccaccagggtgtgatggtgggaatgggccagaaagacagctatgtgggggatgaggctcagagcaagcgagggatcctaactctcaaataccccattgaacacggcatcatcaccaactgggatgacatggagaagatctggcaccactccttctacaatgagctgcgtgtagcacctgaagagcaccccaccctgctcacagaggctcccctaaatcccaaggccaacagggagaagatgacccagatcatgtttgaaaccttcaatgtccctgccatgtacgtcgccattcaagctgtgctctccctctatgcctctggccgcacgacaggcatcgtcctggattcaggtgatggcgtcacccacaatgtccccatctatgaagcaggaagtgcttctaaagtcagaacaggttctccaaggatcccctcgagactactctgttaccagtcatgaaacattaaaacctacaagcctta

SEQ ID NO: 322518 - DNA, 518 bp, Homo sapiens
  misc_feature (15)..(15): n is a, c, g, or t
  misc_feature (24)..(24): n is a, c, g, or t
  misc_feature (72)..(72): n is a, c, g, or t
gataaccttgcccantctggcaantgagcgcttccgctggaagagggtctcagggcagcggaacgtcatcanaatgggttgataacctgcccatctggcagccttcctttattggcatggagtccgctggaattcatgagacaacctacaattccatcatgaagtgtgacattgacatccgtaaggacttatatgccaacaatgtcctctctgggggcaccaccatgtaccctggcattgctgacaggatgcagaaggagatcacagccctggcccccagcaccatgaagatcaagattattgctcccccagagcggaagtactcagtctggatcgggggctctatcctggcctctctctccaccttccagcagatgtggatcagcaagcctgagtatgatgaggcagggccctccattgtccacaggaagtgcttctaaagtcagaacaggttctccaaggatcccctcgagactactctgttaccagtcatgaaacattaaaacctacaagcctta

SEQ ID NO: 322519 - DNA, 1317 bp, Homo sapiens
cgcctctggggttttatattgctctggtattcatgccaaagacacaccagccctcagtcactgggagaagaacctctcataccctcggtgctccagtccccagctcactcagccacatacaccatgtgtgaagaggagaccaccgcgctcgtgtgtgacaatggctctggcctgtgcaaggcaggcttcgcaggagatgatgccccccgggctgtcttcccctccattgtgggccgccctcgccaccagggtgtgatggtgggaatgggccagaaagacagctatgtgggggatgaggctcagagcaagcgagggatcctaactctcaaataccccattgaacacggcatcatcaccaactgggatgacatggagaaggtatctgtagacttccccttaatgagcctgctttaatgatcacccatcgtcatgaccctcgtattcataggccactgtgctctgtcaactctccctgtaaaatgcttctcacttctgtctttcctttcttttcagccccacgaccatttctccaacctaggctgccaacatctctccctggactattgcaatggcttcctggctgatttcttggtctcttgccctcatcctaccagaattaattctctacactgctgcaaaactgatctttctaaacacagatcagctcatgtcactcacctcctcagaaatcttcagtagctcttcattaaccaacagggggttcctaactccccgtcttggcattggaggacctttccctgcctgatccccgcgatcatcttttcctgaaatatttactcaggccagtgctcaccccttctttaaaatgctggtgctggctcaagagaggcaaacagccatctctctcattcttatcttccctgtcaagacttcacataggtggactgatgctagactatgatgatgagtctccagtgaaagtttctaagtagaactctctcagggtttctagaagcatttttgtttaagaaaatattgtggggagagcgggatttttaaatggtggagctcatggtaaacaaaattatgtgtgcaaaatgttaatagagcctttctaatattcttgtgattaactctggtgacagttggctgagtgttcttgtttctgcaacgcctgtctttggaaatgtgatagggggcttattgagcagactgcaactggaaatgaggaatgttgacttgaagtctgtaattcacttatacttttctctaaatcctagactgagtcactcaatgtgagataagtactgcacataaaatgcaatggatttcacgttatacagtggagtgggtaag

SEQ ID NO: 322520 - DNA, 661 bp, Homo sapiens
cgcctctggggttttatattgctctggtattcatgccaaagacacaccagccctcagtcactgggagaagaacctctcataccctcggtgctccagtccccagctcactcagccacatacaccatgtgtgaagaggagaccaccgcgctcgtgtgtgacaatggctctggcctgtgcaaggcaggcttcgcaggagatgatgccccccgggctgtcttcccctccattgtgggccgccctcgccaccagggtgtgatggtgggaatgggccagaaagacagctatgtgggggatgaggctcagagcaagcgagggatcctaactctcaaataccccattgaacacggcatcatcaccaactgggatgacatggagaagatctggcaccactccttctacaatgagctgcgtagttacggccaaacccttggacaaggaaggcaaccacccagccctagctcacaggaggctcccctaaatcccaaggcccaaagcaagggggggcaacacagcaattgaacccagaatcactgttctgaaaccttcaatgtccctgaccaatgggtaacgatcagcccattcaaagctgatgctctccacttcctaattgccttctgggccagcacgacagggcatacgtccatgggggactattaccaag

SEQ ID NO: 322521 - DNA, 558 bp, Homo sapiens
cgcctctggggttttatattgctctggtattcatgccaaagacacaccagccctcagtcactgggagaagaacctctcataccctcggtgctccagtccccagctcactcagccacatacaccatgtgtgaagaggagaccaccgcgctcgtgtgtgacaatggctctggcctgtgcaaggcaggcttcgcaggagatgatgccccccgggctgtcttcccctccattgtgggccgccctcgccaccagggtgtgatggtgggaatgggccagaaagacagctatgtgggggatgaggctcagagcaagcgagggatcctaactctcaaataccccattgaacacggcatcatcaccaactgggatgacatggagaagcaggaagtgcttctaaagtcagaacaggttctccaaggatcccctcgagactactctgttaccagtcatgaaacattaaaacctacaagccttatctacagtcagaacaggtccccccagcatcccctcgagactactctgtcaccactcatgaaacactacaacctacaagccttacac

SEQ ID NO: 322522 - DNA, 411 bp, Homo sapiens
aggaagacttgaacactggcataagaatgcaacatggatgcttggccagatactttctccccttcaaacatcagtgcaacagaactctctgaggacctgctatgtctgtggtccatgccaggccctgggggagtgggtgtggaataatgaactatcaaactggcatagttcctgcccttaatgagattacaaaccattctacaggccaagaagtgctgtgatttttgccaaataatcttttattcttcattgtcctttaagatcatgtttgaaaccttcaatgtccctgccatgtacgtcgccattcaagctgtgctctccctctatgcctctggccgcacgacaggtgagtaatcctgtaatccattccttttctgacttcaggggaggtagggaaaagctggggtctgg

SEQ ID NO: 322523 - DNA, 1332 bp, Homo sapiens
cgcctctggggttttatattgctctggtattcatgccaaagacacaccagccctcagtcactgggagaagaacctctcataccctcggtgctccagtccccagctcactcagccacatacaccatgtgtgaagaggagaccaccgcgctcgtgtgtgacaatggctctggcctgtgcaaggcaggcttcgcaggagatgatgccccccgggctgtcttcccctccattgtgggccgccctcgccaccagggtgtgatggtgggaatgggccagaaagacagctatgtgggggatgaggctcagagcaagcgagggatcctaactctcaaataccccattgaacacggcatcatcaccaactgggatgacatggagaagatctggcaccactccttctacaatgagctgcgtgtagcacctgaagagcaccccaccctgctcacagaggctcccctaaatcccaaggccaacagggagaagatgacccagatcatgtttgaaaccttcaatgtccctgccatgtacgtcgccattcaagctgtgctctccctctatgcctctggccgcacgacaggcatcgtcctggattcaggtgatggcgtcacccacaatgtccccatctatgaaggctatgccctgccccatgccatcatgcgcctggacttggctggccgtgacctcacggactacctcatgaagatcctcacagagagaggctattcctttgtgaccacagctgagagagaaattgtgcgagacatcaaggagaagctgtgctatgtggccctggattttgagaatgagatggccacagcagcttcctcttcctccctggagaagagctatgagctgccagatgggcaggttatcaccattggcaatgagcgcttccgctgccctgagaccctcttccagccttcctttattggcatggagtccgctggaattcatgagacaacctacaattccatcatgaagtgtgacattgacatccgtaaggacttatatgccaacaatgtcctctctgggggcaccaccatgtaccctggcattgctgacaggatgcagaaggagatcacagccctggcccccagcaccatgaagatcaagattattgctcccccagagcggaagtactcagtctggatcgggggctctatcctggcctctctctccaccttccagcagatgtggatcagcaagcctgagtatgatgaggcagggccctccattgtccacaggaagtgcttctaaagtcagaacaggttctccaaggatcccctcgagactactctgttaccagtcatgaaacattaaaacctacaagcctta

SEQ ID NO: 322524 - DNA, 1238 bp, Homo sapiens
  misc_feature (19)..(19): n is a, c, g, or t
gtttagtacttagaggatncgatcagtgcatgtgtgaagaggagaccaccgcgctcgtgtgtgacaatggctctggcctgtgcaaggcaggcttcgcaggagatgatgccccccgggctgtcttcccctccattgtgggccgccctcgccaccagggtgtgatggtgggaatgggccagaaagacagctatgtgggggatgaggctcagagcaagcgagggatcctaactctcaaataccccattgaacacggcatcatcaccaactgggatgacatggagaagatctggcaccactccttctacaatgagctgcgtgtagcacctgaagagcaccccaccctgctcacagaggctcccctaaatcccaaggccaacagggagaagatgacccagatcatgtttgaaaccttcaatgtccctgccatgtacgtcgccattcaagctgtgctctccctctatgcctctggccgcacgacaggcatcgtcctggattcaggtgatggcgtcacccacaatgtccccatctatgaaggctatgccctgccccatgccatcatgcgcctggacttggctggccgtgacctcacggactacctcatgaagatcctcacagagagaggctattcctttgtgaccacagctgagagagaaattgtgcgagacatcaaggagaagctgtgctatgtggccctggattttgagaatgagatggccacagcagcttcctcttcctccctggagaagagctatgagctgccagatgggcaggttatcaccattggcaatgagcgcttccgctgccctgagaccctcttccagccttcctttattggcatggagtccgctggaattcatgagacaacctacaattccatcatgaagtgtgacattgacatccgtaaggacttatatgccaacaatgtcctctctgggggcaccaccatgtaccctggcattgctgacaggatgcagaaggagatcacagccctggcccccagcaccatgaagatcaagattattgctcccccagagcggaagtactcagtctggatcgggggctctatcctggcctctctctccaccttccagcagatgtggatcagcaagcctgagtatgatgaggcagggccctccattgtccacaggaagtgcttctaaagtcagaacaggttctccaaggatcccctcgagactactctgttaccagtcatgaaacattaaaacctacaagcctta

SEQ ID NO: 322525 - DNA, 1332 bp, Homo sapiens
aaacgatcagtacacaatcagtgggagacgaggctctcataccctcggtggctcataggtcctcaagtggcatctcattgagcgagatcattgcatgtttaatagatggatagcatcgtgctcgtgtgtgaaagtcgcggtcgggactgtagccgtgctgaggctacgtcacgaattgattgcccccgcacggtgattgatcttccactctcactattgtggacgctgccactcgcacgatcaagatgtgatgatgcgcgcactgcgcgtgagaaagacagctatgtgggggatgaggctcagagcaagcgagggatcctaactctcaaataccccattgaacacggcatcatcaccaactgggatgacatggagaagatctggcaccactccttctacaatgagctgcgtgtagcacctgaagagcaccccaccctgctcacagaggctcccctaaatcccaaggccaacagggagaagatgacccagatcatgtttgaaaccttcaatgtccctgccatgtacgtcgccattcaagctgtgctctccctctatgcctctggccgcacgacaggcatcgtcctggattcaggtgatggcgtcacccacaatgtccccatctatgaaggctatgccctgccccatgccatcatgcgcctggacttggctggccgtgacctcacggactacctcatgaagatcctcacagagagaggctattcctttgtgaccacagctgagagagaaattgtgcgagacatcaaggagaagctgtgctatgtggccctggattttgagaatgagatggccacagcagcttcctcttcctccctggagaagagctatgagctgccagatgggcaggttatcaccattggcaatgagcgcttccgctgccctgagaccctcttccagccttcctttattggcatggagtccgctggaattcatgagacaacctacaattccatcatgaagtgtgacattgacatccgtaaggacttatatgccaacaatgtcctctctgggggcaccaccatgtaccctggcattgctgacaggatgcagaaggagatcacagccctggcccccagcaccatgaagatcaagattattgctcccccagagcggaagtactcagtctggatcgggggctctatcctggcctctctctccaccttccagcagatgtggatcagcaagcctgagtatgatgaggcagggccctccattgtccacaggaagtgcttctaaagtcagaacaggttctccaaggatcccctcgagactactctgttaccagtcatgaaacattaaaacctacaagcctta

SEQ ID NO: 322526 - DNA, 1041 bp, Homo sapiens
cgcctctggggttttatattgctctggtattcatgccaaagacacaccagccctcagtcactgggagaagaacctctcataccctcgatctggcaccactccttctacaatgagctgcgtgtagcacctgaagagcaccccaccctgctcacagaggctcccctaaatcccaaggccaacagggagaagatgacccagatcatgtttgaaaccttcaatgtccctgccatgtacgtcgccattcaagctgtgctctccctctatgcctctggccgcacgacaggcatcgtcctggattcaggtgatggcgtcacccacaatgtccccatctatgaaggctatgccctgccccatgccatcatgcgcctggacttggctggccgtgacctcacggactacctcatgaagatcctcacagagagaggctattcctttgtgaccacagctgagagagaaattgtgcgagacatcaaggagaagctgtgctatgtggccctggattttgagaatgagatggccacagcagcttcctcttcctccctggagaagagctatgagctgccagatgggcaggttatcaccattggcaatgagcgcttccgctgccctgagaccctcttccagccttcctttattggcatggagtccgctggaattcatgagacaacctacaattccatcatgaagtgtgacattgacatccgtaaggacttatatgccaacaatgtcctctctgggggcaccaccatgtaccctggcattgctgacaggatgcagaaggagatcacagccctggcccccagcaccatgaagatcaagattattgctcccccagagcggaagtactcagtctggatcgggggctctatcctggcctctctctccaccttccagcagatgtggatcagcaagcctgagtatgatgaggcagggccctccattgtccacaggaagtgcttctaaagtcagaacaggttctccaaggatcccctcgagactactctgttaccagtcatgaaacattaaaacctacaagcctta

SEQ ID NO: 322527 - DNA, 1542 bp, Homo sapiens
cgcctctggggttttatattgctctggtattcatgccaaagacacaccagccctcagtcactgggagaagaacctctcataccctcggtgctccagtccccagctcactcagccacatacaccatgtgtgaagaggagaccaccgcgctcgtgtgtgacaatggctctggcctgtgcaaggcaggcttcgcaggagatgatgccccccgggctgtcttcccctccattgtgggccgccctcgccaccagggtgtgatggtgggaatgggccagaaagacagctatgtgggggatgaggctcagagcaagcgagggatcctaactctcaaataccccattgaacacggcatcatcaccaactgggatgacatggagaagatctggcaccactccttctacaatgagctgcgtgtagcacctgaagagcaccccaccctgctcacagaggctcccctaaatcccaaggccaacagggagaagatgacccagatcatgtttgaaaccttcaatgtccctgccatgtacgtcgccattcaagctgtgctctccctctatgcctctggccgcacgacaggcatcgtcctggattcaggtgatggcgtcacccacaatgtccccatctatgaaggctatgccctgccccatgccatcatgcgcctggacttggctggccgtgacctcacggactacctcatgaagatcctcacagagagaggctattcctttgtgaccacagctgagagagaaattgtgcgagacatcaaggagaagctgtgctatgtggccctggattttgagaatgagatggccacagcagcttcctcttcctccctggagaagagctatgagctgccagatgggcaggttatcaccattggcaatgagcgcttccgctgccctgagaccctcttccagccttcctttattggcatggagtccgctggaattcatgagacaacctacaattccatcatgaagtgtgacattgacatccgtaaggacttatatgccaacaatgtcctctctgggggcaccaccatgtaccctggcattgctgacaggatgcagaaggagatcacagccctggcccccagcaccatgaagatcaagattattgctcccccagagcggaagtactcagtctggatcgggggctctatcctggcctctctctccaccttccagcagatgtggatcagcaagcctgagtatgatgaggcagggccctccattgtccacaggaagtgcttctaaagtcagaacaggttctccaaggatcccctcgagactactctgttaccagtcatgaaacattaaaacctacaagccttaacttctctgtgtggggctcttttttcctgggctatgtctcatacacagtgctaaggacttttcacacattacttttaatccatgcaataatgctgtaaggtaggtgctatcattatacccatattacagatgaggaaattgaggctcagagaagtcaaggacttgcgaagatcacacagattccagattaaaattcaagtatctgactgc

SEQ ID NO: 322528 - DNA, 1261 bp, Homo sapiens
  misc_feature (1257)..(1257): n is a, c, g, or t
cgcctctggggttttatattgctctggtattcatgccaaagacacaccagccctcagtcactgggagaagaacctctcataccctcggtgctccagtccccagctcactcagccacatacaccatgtgtgaagaggagaccaccgcgctcgtgtgtgacaatggctctggcctgtgcaaggcaggcttcgcaggagatgatgccccccgggctgtcttcccctccattgtgggccgccctcgccaccagggtgtgatggtgggaatgggccagaaagacagctatgtgggggatgaggctcagagcaagcgagggatcctaactctcaaataccccattgaacacggcatcatcaccaactgggatgacatggagaagatctggcaccactccttctacaatgagctgcgtgtagcacctgaagagcaccccaccctgctcacagaggctcccctaaatcccaaggccaacagggagaagatgacccagatcatgtttgaaaccttcaatgtccctgccatgtacgtcgccattcaagctgtgctctccctctatgcctctggccgcacgacaggcatcgtcctggattcaggtgatggcgtcacccacaatgtccccatctatgaaggctatgccctgccccatgccatcatgcgcctggacttggctggccgtgacctcacggactacctcatgaagatcctcacagagagaggctattcctttgtgaccacagctgagagagaaattgtgcgagacatcaaggagaagctgtgctatgtggccctggattttgagaatgagatggccacagcagcttcctcttcctccctggagaagagctatgagctgccagatgggcaggttatcaccattggcaatgagcgcttccgctgccctgagaccctcttccagccttcctttattggcatggagtccgctggaattcatgagacaacctacaattccatcatgaagtgtgacattgacatccgtaaggacttatatgccaacaatgtcctctctgggggcaccaccaactgggatgacatggagaagatctggcaccactccttctacaatgagctgcgtgtagacctgaagagcaccccaccctgctcacagaggctcccctaaatcccaaggccaacagggagaagatgacccagatcatgtttgaaacctttcaatgtcccttgccattgtacggtcgccatttcaagcttgtgctcttccctcttatggccttttgggcgnaaaa

SEQ ID NO: 322529 - DNA, 526 bp, Homo sapiens
gatccccggttggctactagtccacggttggctactagtccacggttggctactagtccacggttggctactagtccgcggttggctactagtccgcggttggctactagtccacggttggcgcatggagtccgctggaattcatgagacaacctacaattccatcatgaagtgtgacattgacatccgtaaggacttatatgccaacaatgtcctctctgggggcaccaccatgtaccctggcattgctgacaggatgcagaaggagatcacagccctggcccccagcaccatgaagatcaagattattgctcccccagagcggaagtactcagtctggatcgggggctctatcctggcctctctctccaccttccagcagatgtggatcagcaagcctgagtatgatgaggcagggccctccattgtccacaggaagtgcttctaaagtcagaacaggttctccaaggatcccctcgagactactctgttaccagtcatgaaacattaaaacctacaagcctta

SEQ ID NO: 322530 - DNA, 636 bp, Homo sapiens
cgcctctggggttttatattgctctggtattcatgccaaagacacaccagccctcagtcactgggagaagaacctctcataccctcggtgctccagtccccagctcactcagccacatacaccatgtgtgaagaggagaccaccgcgctcgtgtgtgacaatggctctggcctgtgcaaggcaggcttcgcaggagatgatgccccccgggctgtcttcccctccattgtgggccgccctcgccaccagggtgtgatggtgggaatgggccagaaagacagctatgtgggggatgaggctcagagcaagcgagggatcctaactctcaaataccccattgaacacggcatcatcaccaactgggatgacatggagaagatctggcaccactccttctacaatgagctgcgtgtagcacctgaagagcaccccaccctgctcacagaggctcccctaaatcccaaggccaacagggagaagatgacccagatcatgtttgaaaccttcaatgtccctgccatgtacgtcgccattcaagctgtgctctccctctatgcctctggccgcacgacaggcatcgtcctggacttcaggtgatggggtcacccacaatggcacgtggatcgggtaccgagc

SEQ ID NO: 322531 - DNA, 1182 bp, Homo sapiens
cgcctctggggttttatattgctctggtattcatgccaaagacacaccagccctcagtcactgggagaagaacctctcataccctcggtgctccagtccccagctcactcagccacatacaccatgtgtgaagaggagaccaccgcgctcgtgtgtgacaatggctctggcctgtgcaaggcaggcttcgcaggagatgatgccccccgggctgtcttcccctccattgtgggccgccctcgccaccagggtgtgatggtgggaatgggccagaaagacagctatgtgggggatgaggctcagagcaagcgagggatcctaactctcaaataccccattgaacacggcatcatcaccaactgggatgacatggagaagccccacgaccatttctccaacctaggctgccaacatctctccctggactattgcaatggcttcctggctgatttcttggtctcttgccctcatcctaccagaattaattctctacactgctgcaaaactgatctttctaaacacagatcagctcatgtcactcacctcctcagaaatcttcagtagctcttcattaaccaacagggggttcctaactccccgtcttggcattggaggacctttccctgcctgatccccgcgatcatcttttcctgaaatatttactcaggccagtgctcaccccttctttaaaatgctggtgctggctcaagagaggcaaacagccatctctctcattcttatcttccctgtcaagacttcacataggtggactgatgctagactatgatgatgagtctccagtgaaagtttctaagtagaactctctcagggtttctagaagcatttttgtttaagaaaatattgtggggagagcgggatttttaaatggtggagctcatggtaaacaaaattatgtgtgcaaaatgttaatagagcctttctaatattcttgtgattaactctggtgacagttggctgagtgttcttgtttctgcaacgcctgtctttggaaatgtgatagggggcttattgagcagactgcaactggaaatgaggaatgttgacttgaagtctgtaattcacttatacttttctctaaatcctagactgagtcactcaatgtgagataagtactgcacataaaatgcaatggatttcacgttatacagtggagtgggtaag

SEQ ID NO: 322532 - DNA, 770 bp, Homo sapiens
tagaggatccgtagtgctttgggacggcgtcgctgggcggctacccggttcttctgcttcttcagctgcctttgttgctccttggggtctgtctgggtcagcagcccattgcccccacagaggtgcatggttaggcgggggagcagagtggtccctcagcagctgtgacttcccagtgccagccctcagtcactgggagaagaacctctcataccctcggtgctccagtccccagctcactcagccacatacaccatgtgtgaagaggagaccaccgcgctcgtgtgtgacaatggctctggcctgtgcaaggcaggcttcgcaggagatgatgccccccgggctgtcttcccctccattgtgggccgccctcgccaccagggtgtgatggtgggaatgggccagaaagacagctatgtgggggatgaggctcagagcaagcgagggatcctaactctcaaatacccaggaagtgcttctaaagtcagaacaggttctccaaggatcccctcgagactactctgttaccagtcatgaaacattaaaacctacaagccttaacttctctgtgtggggctcttttttcctgggctatgtctcatacacagtgctaaggacttttcacacattacttttaatccatgcaataatgctgtaaggtaggtgctatcattatacccatattacagatgaggaaattgaggctcagagaagtcaaggacttgcgaagatcacacagattccagattaaaattcaagtatctgactgc

SEQ ID NO: 322533 - DNA, 414 bp, Homo sapiens
cgaagctcgttcttccgccagcttccctcctcttcctttctccgccatcgtggtgtgttcttgactccgctgctcgccatgtcttctcacaagactttcaggattaagcgattcctggccaagaaacaaaagcaaaatcgtcccattccccagtggattcggatgaaaactggaaataaaatcaggtacaactccaaaaggagacattggagaagaaccaagctgggtctataaggaattgcacatgagatggcacacatatttatgctgtctgaaggtcacgatcatgttaccatatcaagctgaaaatgtcaccactatctggagatttcgacgtgttttcctctctgaatctgttatgaacacgttggttggctggattcagtaataaatatgtaaggcctttctttttaa

SEQ ID NO: 322534 - DNA, 381 bp, Homo sapiens
ggatcccccgggctgcaggctcgtgccttgactccgctgctcgccatgtcttctcacaagactttcaggattaagcgattcctggccaagaaacaaaagcaaaatcgtcccattccccagtggattcggatgaaaactggaaataaaatcaggtacaactccaaaaggagacattggagaagaaccaagctgggtctataaggaattgcacatgagatggcacacatatttatgctgtctgaaggtcacgatcatgttaccatatcaagctgaaaatgtcaccactatctggagatttcgacgtgttttcctctctgaatctgttatgaacacgttggttggctggattcagtaataaatatgtaaggcctttctttttaa

SEQ ID NO: 322535 - DNA, 406 bp, Homo sapiens
  misc_feature (33)..(33): n is a, c, g, or t
ttggatccgaattcggatccaacgttggatccnccgccatcgtggtgtgttcttgactccgctgctcgccatgtcttctcacaagactttcaggattaagcgattcctggccaagaaacaaaagcaaaatcgtcccattccccagtggattcggatgaaaactggaaataaaatcaggtacaactccaaaaggagacattggagaagaaccaagctgggtctataaggaattgcacatgagatggcacacatatttatgctgtctgaaggtcacgatcatgttaccatatcaagctgaaaatgtcaccactatctggagatttcgacgtgttttcctctctgaatctgttatgaacacgttggttggctggattcagtaataaatatgtaaggcctttctttttaa

SEQ ID NO: 322536 - DNA, 423 bp, Homo sapiens
  misc_feature (4)..(4): n is a, c, g, or t
  misc_feature (67)..(67): n is a, c, g, or t
tgtnattgttccataataaacttctggtgtgatactttcaaaaaaaaaaaaaaaaaaaaaaaaaaanctcggactccgctgctcgccatgtcttctcacaagactttcaggattaagcgattcctggccaagaaacaaaagcaaaatcgtcccattccccagtggattcggatgaaaactggaaataaaatcaggtacaactccaaaaggagacattggagaagaaccaagctgggtctataaggaattgcacatgagatggcacacatatttatgctgtctgaaggtcacgatcatgttaccatatcaagctgaaaatgtcaccactatctggagatttcgacgtgttttcctctctgaatctgttatgaacacgttggttggctggattcagtaataaatatgtaaggcctttctttttaa

SEQ ID NO: 322537 - DNA, 480 bp, Homo sapiens
  misc_feature (454)..(454): n is a, c, g, or t
cgaagctcgttcttccgccagcttccctcctcttcctttctccgccatcgtggtgtgttcttgactccgctgctcgccatgtcttctcacaagactttcaggattaagcgattcctggccaagaaacaaaagcaaaatcgtcccattccccagtggattcggatgaaaactggaaataaaatcaggtacaactccaaaaggagacattggagaagaaccaagctgggtctataaggaattgcacatgagatggcacacatatttatgctgtctgaaggtcacgatcatgttaccatatcaagctgaaaatgtcaccactatctggagatttcgacgtgttttcctctctgaatctgttatgaacacgttggttggctggattcagtaataaatatgtaaggcctttctttttaaaaaaaaaaacaaaaaaacaaaaaaaacaacaacacccccncccccaaaccacaccacaacaaaaaa

SEQ ID NO: 322538 - DNA, 654 bp, Homo sapiens
  misc_feature (29)..(29): n is a, c, g, or t
  misc_feature (40)..(40): n is a, c, g, or t
  misc_feature (244)..(244): n is a, c, g, or t
  misc_feature (258)..(258): n is a, c, g, or t
cagagaagcggtgtcttgacttaagtctntctgttctgtnggcaagtaaatgcagtactgttctgatccggctgctattagaatgcattgtgaaacgactggagtatgattaaaagttgtgttccccaatgcttggagtagtgattgtgaaggaaaaaatccagctgagtgataaaggctgagtgttgaggaaatttctgcagttttaagcagtcgtatttgtgattgaagctgagtacatttngctggtgtattttnaggtaaaatgctttttgttcatttctggtggtgggaggggactgaagcctttagtcttttccagatgcaaccttaaaatcagtgacaagaaacattccaaacaagcaacagtcttcaagaaattaaactggcaagtggattcggatgaaaactggaaataaaatcaggtacaactccaaaaggagacattggagaagaaccaagctgggtctataaggaattgcacatgagatggcacacatatttatgctgtctgaaggtcacgatcatgttaccatatcaagctgaaaatgtcaccactatctggagatttcgacgtgttttcctctctgaatctgttatgaacacgttggttggctggattcagtaataaatatgtaaggcctttctttttaa

SEQ ID NO: 322539 - DNA, 854 bp, Homo sapiens
gggctgcaggaattcggcacgagctccgctgctcgccatgtcttctcacaagactttcaggattaagcgattcctggccaagaaacaaaagcaaaatcgtcccattccccagtggattcggatgaaaactggaaataaaatcaggtacaactccaaaaggagacattggagaagaaccaagctgggtctataaggaattgcacatgagatggcacacatatttatgctgtctgaaggtcacgatcatgttaccatatcaagctgaaaatgtcaccactatctggagatttcgacgtgttttcctctctgaatctgttatgaacacgttggttggctggattcagtaataaatatgtaaggcctttctttttaaaaaaaaaaaaaaaaaaaaaaaaaaaaaaaaaaaaaaaaaaatttggccggaaaggggggaaaatggtgccccgggcggcatcggggtaatctggaaacaagaagaagcgccgaactgaagaactctagggaaccgcggcgttaacattgcgcgtggaaggggcgcaaacaaaagccctcacagggatgaccccctaaaaggggggggggccctgaagaccagccgtgggtgggaaggggggagcccaactatatctgccgtgagaaattgcgggaaaccctctgcctgtaggcaaaacgacattcgagaaaaatcaccatcagtggggcccaggacaccaggtggctcacaccctggtaaatcccgcgccaattgtggggagagggcccagggacaaaaaggattggtctgtgcccccaggggaagttttgaaaaaccagtccgggggccacttgggggagacccctattcctggggaaga

SEQ ID NO: 322540 - DNA, 453 bp, Homo sapiens
agcggccgcctactactactaaattcgcggccgcgtcgaccttgactccgctgctcgccatgtcttctcacaagactttcaggattaagcgattcctggccaagaaacaaaagcaaaatcgtcccattccccagtggattcggatgaaaactggaaataaaatcaggtacaactccaaaaggagacattggagaagaaccaagctgggtctataaggaattgcacatgagatggcacacatatttatgctgtctgaaggtcacgatcatgttaccatatcaagctgaaaatgtcaccactatctggagatttcgacgtgttttcctctctgaatctgttatgaacacgttggttggctggattcagtaataaatatgtaaggcctttctttttaaaaaagaaagaagatgaggaaaaaaggtcgacgcggccgagttgtattaaaggtttcga

SEQ ID NO: 322541 - DNA, 388 bp, Homo sapiens
gcgtcgacgtttcttggccaggaatcgcttaatcctgaaagtcttgtgagaagacatggcgagcagcggagtcaagaacacaccacgatggcggagaaaggaaaagcaaaatcgtcccattccccagtggattcggatgaaaactggaaataaaatcaggtacaactccaaaaggagacattggagaagaaccaagctgggtctataaggaattgcacatgagatggcacacatatttatgctgtctgaaggtcacgatcatgttaccatatcaagctgaaaatgtcaccactatctggagatttcgacgtgttttcctctctgaatctgttatgaacacgttggttggctggattcagtaataaatatgtaaggcctttctttttaa

SEQ ID NO: 322542 - DNA, 971 bp, Homo sapiens
  misc_feature (4)..(4): n is a, c, g, or t
  misc_feature (67)..(67): n is a, c, g, or t
tgtnattgttccataataaacttctggtgtgatactttcaaaaaaaaaaaaaaaaaaaaaaaaaaanctcggactccgctgctcgccatgtcttctcacaagactttcaggattaagcgattcctggccaagaaacaaaagcaaaatcgtcccattccccagtggattcggatgaaaactggaaataaaatcaggtacaactccaaaaggagacattggagaagaaccaagctgggtctataaggaattgcacatgagatggcacacatatttatgctgtctgaaggtcacgatcatgttaccatatcaagctgaaaatgtcaccactatctggagatttcgacgtgttttcctctctgaatctgttatgaacacgttggttggctggattcagtaataaatatgtaaggcctttctttttaagaaatttacaggtattaaacatgagtggcaagtaaatggcttggatgatattaaggaccgttcgacacttggagagaaattgggaggcaatgtagtagtttcacttgaaggaaaaccattataaaatgacagtcaagtgccatctggatcttaaggagcttccatttctccagctcagtccattggaatagtattaggttcggtttgtgtatttccccctttcactggggcccttccaaacacaatgaatgaaggaaatatcattttttaagcaggctatcagtgatggcattagactgtgataccgttctttatatagaaccaggatggctcggcaattttagcaaaaatggttatgctcctggggagactaacagtttgtcgcacgtgatagctaaatggacaggaagcaggagccgaggattaccggcaagggccccgcaaaaaggccggggggtggggataccccgggggatgggggggaccacacctcgacacaggcagggataaccacctccatatcctgttgcctaaaacatatttatcca

SEQ ID NO: 322543 - DNA, 630 bp, Homo sapiens
ctctaatattgtctaaattgattgcattttcttcccagtcttctcacaagactttcaggattaagcgattcctggccaagaaacaaaagcaaaatcgtcccattccccagtggattcggatgaaaactggaaataaaatcaggtacaactccaaaaggagacattggagaagaaccaagctgggtctataaggaattgcacatgagatggcacacatatttatgctgtctgaaggtcacgatcatgttaccatatcaagctgaaaatgtcaccactatctggagatttcgacgtgttttcctctctgaatctgttatgaacacgttggttggctggattcagtaataaatatgtaaggcctttctttttaaaaaaaaaaaaaaaaaaaaaaaaaaaaaaacccggggcaccaatgcgggggtcgggacaaaaaatacggtattcatttaacatctggggcccactgtcgggcataatagccactgttatccctgagcacccaacgacattgccgtggtcaccacaacggtgtgatcaaaatacacggcgaggtaactcccctattcaggagagacgccaatctaattatcgcaaataacaccccaggttttaacccggcaattaagaacc

SEQ ID NO: 322544 - DNA, 269 bp, Homo sapiens
agcggccgcctactactactaaattcgcggccgcgtcgacgtacaactccaaaaggagacattggagaagaaccaagctgggtctataaggaattgcacatgagatggcacacatatttatgctgtctgaaggtcacgatcatgttaccatatcaagctgaaaatgtcaccactatctggagatttcgacgtgttttcctctctgaatctgttatgaacacgttggttggctggattcagtaataaatatgtaaggcctttctttttaa

SEQ ID NO: 322545 - DNA, 279 bp, Homo sapiens
  misc_feature (13)..(13): n is a, c, g, or t
  misc_feature (15)..(16): n is a, c, g, or t
  misc_feature (18)..(19): n is a, c, g, or t
  misc_feature (50)..(50): n is a, c, g, or t
gcggcggctactncnncnnctactactactaaattcgcggccgctcgacngtacaactccaaaaggagacattggagaagaaccaagctgggtctataaggaattgcacatgagatggcacacatatttatgctgtctgaaggtcacgatcatgttaccatatcaagctgaaaatgtcaccactatctggagatttcgacgtgttttcctctctgaatctgttatgaacacgttggttggctggattcagtaataaatatgtaaggcctttctttttaa

SEQ ID NO: 322546 - DNA, 241 bp, Homo sapiens
  misc_feature (13)..(13): n is a, c, g, or t
  misc_feature (15)..(16): n is a, c, g, or t
  misc_feature (18)..(19): n is a, c, g, or t
  misc_feature (50)..(50): n is a, c, g, or t
gcggcggctactncnncnnctactactactaaattcgcggccgctcgacntgggtctataaggaattgcacatgagatggcacacatatttatgctgtctgaaggtcacgatcatgttaccatatcaagctgaaaatgtcaccactatctggagatttcgacgtgttttcctctctgaatctgttatgaacacgttggttggctggattcagtaataaatatgtaaggcctttctttttaa

SEQ ID NO: 322547 - DNA, 188 bp, Homo sapiens
gcggccgcctactactactactactgctcgaattcaagcttctaacgatgtacggggatcatgttaccatatcaagctgaaaatgtcaccactatctggagatttcgacgtgttttcctctctgaatctgttatgaacacgttggttggctggattcagtaataaatatgtaaggcctttctttttaa

SEQ ID NO: 322548 - DNA, 475 bp, Homo sapiens
cggcgaccacgacagcccccacaatcccggggatcacgcctggggcgtcggcctcttccccttctttcctgtggctgcctccaccatcacctcttcctttctccgccatcgtggtgtgttcttgactccgctgctcgccatgtcttctcacaagactttcaggattaagcgattcctggccaagaaacaaaagcaaaatcgtcccattccccagtggattcggatgaaaactggaaataaaatcaggtacaactccaaaaggagacattggagaagaaccaagctgggtctataaggaattgcacatgagatggcacacatatttatgctgtctgaaggtcacgatcatgttaccatatcaagctgaaaatgtcaccactatctggagatttcgacgtgttttcctctctgaatctgttatgaacacgttggttggctggattcagtaataaatatgtaaggcctttctttttaa

SEQ ID NO: 322549 - DNA, 650 bp, Homo sapiens
agcggccgcctactactactaaattcgcggccgcgtcgacgcgagaagacgacagaaggggcctcttcctttctccgccatcgtggtgtgttcttgactccgctgctcgccatgtcttctcacaagactttcaggattaagcgattcctggccaagaaacaaaagcaaaatcgtcccattccccagtggattcggatgaaaactggaaataaaatcaggtacaactccaaaaggagacattggagaagaaccaagctgggtctataaggaattgcacatgagatggcacacatatttatgctgtctgaaggtcacgatcatgttaccatatcaagctgaaaatgtcaccactatctggagatttcgacgtgttttcctctctgaatctgttatgaacacgttggttggctggattcagtaataaatatgtaaggcctttctttttaaaaaaaaaaaaaaaaaaaaaaaaaaaaaaaaaaaaaaaaaaaaaaaaaaaaaaaaaaaaaaaaaaaaaaaaaccgggcgggcgcgcgcgcgcaagagactccagacaagcgcggggtgaccggaggccaaaaaaaagagaacacaaagcaaagaagaggagggacccaaaaaaaacacgagagaagaacaggggggggatccac

SEQ ID NO: 322550 - DNA, 371 bp, Homo sapiens
ctctaatattgtctaaattgattgcattttcttcccagtcttctcacaagactttcaggattaagcgattcctggccaagaaacaaaagcaaaatcgtcccattccccagtggattcggatgaaaactggaaataaaatcaggtacaactccaaaaggagacattggagaagaaccaagctgggtctataaggaattgcacatgagatggcacacatatttatgctgtctgaaggtcacgatcatgttaccatatcaagctgaaaatgtcaccactatctggagatttcgacgtgttttcctctctgaatctgttatgaacacgttggttggctggattcagtaataaatatgtaaggcctttctttttaa

SEQ ID NO: 322551 - DNA, 373 bp, Homo sapiens
gggctgcaggaattcggcacgagctccgctgctcgccatgtcttctcacaagactttcaggattaagcgattcctggccaagaaacaaaagcaaaatcgtcccattccccagtggattcggatgaaaactggaaataaaatcaggtacaactccaaaaggagacattggagaagaaccaagctgggtctataaggaattgcacatgagatggcacacatatttatgctgtctgaaggtcacgatcatgttaccatatcaagctgaaaatgtcaccactatctggagatttcgacgtgttttcctctctgaatctgttatgaacacgttggttggctggattcagtaataaatatgtaaggcctttctttttaa

SEQ ID NO: 322552 - DNA, 851 bp, Homo sapiens
  misc_feature (494)..(494): n is a, c, g, or t
agcggccgcctactactactaaattcgcggccgcgtcgacgcgagaagacgacagaaggggcctcttcctttctccgccatcgtggtgtgttcttgactccgctgctcgccatgtcttctcacaagactttcaggattaagcgattcctggccaagaaacaaaagcaaaatcgtcccattccccagtggattcggatgaaaactggaaataaaatcaggtacaactccaaaaggagacattggagaagaaccaagctgggtctataaggaattgcacatgagatggcacacatatttatgctgtctgaaggtcacgatcatgttaccatatcaagctgaaaatgtcaccactatctggagatttcgacgtgttttcctctctgaatctgttatgaacacgttggttggctggattcagtaataaatatgtaaggcctttctttttaaaaaaaaaaaaaaaaaaaaaaaaaaaaaaattttgggggggcttgggncctggaaaaagtttttttagaacacattggtgtggggggcggggggcccagagggacacgggacactgtggccaaaacggggcccaaggaaaaccggggcagacaaagggcgggttctcacccaaataaaaaaacccccgggggaaaacgaaaaggtttctgagaaacaaaatccccaagggagaacaagagagggcacaaaacgaggggactctctattaaccagggaggtctcccaagggcagaccgccgaatatcccaatatagcccgggtctgcgtctgcagaaagaacggcaagcgagagagagaagacaaaagagcagaacaaaagacggaagacaaacacagacagagaa

SEQ ID NO: 322553 - DNA, 896 bp, Homo sapiens
agcggccgcctactactactaaattcgcggccgcgtcgacgcgagaagacgacagaaggggcctcttcctttctccgccatcgtggtgtgttcttgactccgctgctcgccatgtcttctcacaagactttcaggattaagcgattcctggccaagaaacaaaagcaaaatcgtcccattccccagtggattcggatgaaaactggaaataaaatcaggtacaactccaaaaggagacattggagaagaaccaagctgggtctataaggaattgcacatgagatggcacacatatttatgctgtctgaaggtcacgatcatgttaccatatcaagctgaaaatgtcaccactatctggagatttcgacgtgttttcctctctgaatctgttatgaacacgttggttggctggattcagtaataaatatgtaaggcctttctttttaaaaaaaacaaaaaaaagaaaaaaaaaaaaaaaaaaacaaaacaaaaaaaaaaaaaaaaaaaaaaaaaaaaaaaaaaacaaaaaaaaaaaaaaaaaaaaaaaaaaaaaaaaaaagaaggggggggcgcgcccccaaaaatctatcacgcaggggggcgacacaacaagatgcagccacactgtgtgtacaagagaggggcccccaaagagggggcactataaaaacacgaacagcgcggcggggcggcgcggccctaaaaaaaaacaaggcggatagagggaaaacaaagaccatccgatgagggaacgaagtcgaggagaaacaaacaacaccaccacagggaggggggggagaacaaaacaaggagagaggaacaccaaccaacacagagaaataaaacacctcagcgagaggaaaaaaaaaaaacgacgagcaagaagaggggcgaac

SEQ ID NO: 322554 - DNA, 1613 bp, Homo sapiens
agcggccgcctactactactaaattcgcggccgcgtcgacgcgagaagacgacagaaggggcctcttcctttctccgccatcgtggtgtgttcttgactccgctgctcgccatgtcttctcacaagactttcaggattaagcgattcctggccaagaaacaaaagcaaaatcgtcccattccccagtggattcggatgaaaactggaaataaaatcaggtacaactccaaaaggagacattggagaagaaccaagctgggtctataaggaattgcacatgagatggcacacatatttatgctgtctgaaggtcacgatcatgttaccatatcaagctgaaaatgtcaccactatctggagatttcgacgtgttttcctctctgaatctgttatgaacacgttggttggctggattcagtaataaatatgtaaggcctttctttttaaaaaaacaaagaacaagaaaaaaaaaaaaacaaaaaaaaaaaaacaaaaaaaagaaaaaaaaaaaaaaaaaaacaaaacaaaaaaaaaaaaaggggggggggccccaaaaaaacaccctccgagaggagggagcggccaaatattcacatgcgacaacaccgaaatatgtcggtagaaaccaagagagggggcgccccccaatagaggagaggcagccgattaataataaaaacgagagcgagagagcggcagacgagctaaaaaaaacacagccggggcgaggcggggagacaaacaacgtacccaacgggggacactcatcgtgagaggaagcaccaccaccacaaccaccgggggggcgggcggacaaacacacatgtagcggggagacacaacacaacactcccgcaacagagaagaaatgaacgacccaccgcgcgacgagagagaaaaacataaaaacacaactcaggagaagtcgagcatatgatctgcgggggggacaacacacccgcacgccaagaatatagcgcgcgaggcaccgcgatgaaaaacaagaacgatgctggccgcagcgagaagaaatatctaagcgaagaaaaacaactaccttatcacgagcgggcggcgctgtctcctctgctctatctaacactaacgtggtagaacaaaagacgagaaagacaaaagaaaaagatcgaagcacgagagacgacaacagataacagaagaagagaaagagcaagcaaagcggatgaagaaggatagacagaaggattcagaagagaagaagataaacagaaagaagaggaaacaaacagacagaatgataaagatcaaacagtagaaagaaacaacacgagaacaagaaacacgaaaagaaaaaacaaagagaggagcgcgcagccccccgcgcaacgacggcacacgcagagcagaccggacgcagcagaggagcaaacaggacgagagggaagaaaggaggaagaagaagggaggaaagaggaagacagagacaaacagagcgagagcagaggagagaaaagaacggaaccatgaaaagaacagacggatactacaagagcgagagacgaaagaggaagcacgagagacaagcagagagagaagacagcaacagacgagactccgagagggacggaagagag

SEQ ID NO: 322555 - DNA, 585 bp, Homo sapiens
  misc_feature (18)..(18): n is a, c, g, or t
  misc_feature (20)..(21): n is a, c, g, or t
  misc_feature (23)..(23): n is a, c, g, or t
cggacgcgtgggtcgacncnngngtcgcttgactccgctgctcgccatgtcttctcacaagactttcaggattaagcgattcctggccaagaaacaaaagcaaaatcgtcccattccccagtggattcggatgaaaactggaaataaaatcaggtacaactccaaaaggagacattggagaagaaccaagctgggtctataaggaattgcacatgagatggcacacatatttatgctgtctgaaggtcacgatcatgttaccatatcaagctgaaaatgtcaccactatctggagatttcgacgtgttttcctctctgaatctgttatgaacacgttggttggctggattcagtaataaatatgtaaggcctttctttttaaaaaaaaaaaaaaaaaaaaaaaaaaaaaaaaaaaaaaaaaaaaaaaaaaaaaaaaaaaaaaaaaaaaaaaaaccgggcgggcgcgcgcgcgcaagagactccagacaagcgcggggtgaccggaggccaaaaaaaagagaacacaaagcaaagaagaggagggacccaaaaaaaacacgagagaagaacaggggggggatccac

SEQ ID NO: 322556 - DNA, 986 bp, Homo sapiens
  misc_feature (986)..(986): n is a, c, g, or t
agcggccgcctactactactaaattcgcggccgcgtcgacgcgagaagacgacagaaggggcctcttcctttctccgccatcgtggtgtgttcttgactccgctgctcgccatgtcttctcacaagactttcaggattaagcgattcctggccaagaaacaaaagcaaaatcgtcccattccccagtggattcggatgaaaactggaaataaaatcaggtacaactccaaaaggagacattggagaagaaccaagctgggtctataaggaattgcacatgagatggcacacatatttatgctgtctgaaggtcacgatcatgttaccatatcaagctgaaaatgtcaccactatctggagatttcgacgtgttttcctctctgaatctgttatgaacacgttggttggctggattcagtaataaatatgtaaggcctttctttttaaaaaaaaaaaaaaaaaaaaaaaaaaaaaaaaaaaaaaaaaaaaaaaaaaaataaaacaagagaggggggcggcgcactctaagaaaggttccccccccgagggggggacagatgcttcgtcgacgctacccaagttttgttgtgaacacagggggccccaaatagtagggaggggccgagtaatataaggcaaagaggaacacggcgcccggcggttaaaacacaacgcgctcagcaagatgggagaaacacgtccgaacgggtgaggtacatcttgtcggagagaagaaacccttacttgtcggggggggcggacatatagtgggcgaaaaaacactccccacgtcgagagaatattaaagcaccgtcgagagaaacaatattaaacatttcagagggcttcttatgtgtggtttataaccaaccggcgaaattagtaggtcgcggcagtagaaaaaaatttgtggctcagaagaaggaatatttagtatttggggaaatatttttatttccgcggggggctgttattaatatatagan

SEQ ID NO: 322557 - DNA, 843 bp, Homo sapiens
agcggccgcctactactactaaattcgcggccgcgtcgacgcgagaagacgacagaaggggcctcttcctttctccgccatcgtggtgtgttcttgactccgctgctcgccatgtcttctcacaagactttcaggattaagcgattcctggccaagaaacaaaagcaaaatcgtcccattccccagtggattcggatgaaaactggaaataaaatcaggtacaactccaaaaggagacattggagaagaaccaagctgggtctataaggaattgcacatgagatggcacacatatttatgctgtctgaaggtcacgatcatgttaccatatcaagctgaaaatgtcaccactatctggagatttcgacgtgttttcctctctgaatctgttatgaacacgttggttggctggattcagtaataaatatgtaaggcctttctttttaaaaaaaaaaaaaaaaaaaaaaaaacaaaaaaaaaaaaaaaaaaaaaaaaaaaaaaaaaaagaaggggggggcgcgcccccaaaaatctatcacgcaggggggcgacacaacaagatgcagccacactgtgtgtacaagagaggggcccccaaagagggggcactataaaaacacgaacagcgcggcggggcggcgcggccctaaaaaaaaacaaggcggatagagggaaaacaaagaccatccgatgagggaacgaagtcgaggagaaacaaacaacaccaccacagggaggggggggagaacaaaacaaggagagaggaacaccaaccaacacagagaaataaaacacctcagcgagaggaaaaaaaaaaaacgacgagcaagaagaggggcgaac

SEQ ID NO: 322558 - DNA, 540 bp, Homo sapiens
  misc_feature (35)..(35): n is a, c, g, or t
  misc_feature (39)..(39): n is a, c, g, or t
  misc_feature (511)..(511): n is a, c, g, or t
  misc_feature (538)..(538): n is a, c, g, or t
caccccagccaaaaggccagctcctcccgagagcntgtntctaaaaagcaggaggcagaagggcccggaatccagaagagcagggtgaagtcagtaaggcagccgcgccgacgcacaacgagggcacactgccgacggccacagtcctctccaccagagcctcttccctcttcctttctccgccatcgtggtgtgttcttgactccgctgctcgccatgtcttctcacaagactttcaggattaagcgattcctggccaagaaacaaaagcaaaatcgtcccattccccagtggattcggatgaaaactggaaataaaatcaggtacaactccaaaaggagacattggagaagaaccaagctgggtctataaggaattgcacatgagatggcacacatatttatgctgtctgaaggtcacgatcatgttaccatatcaagctgaaaatgtcaccactatctggagatttcccccgggggaaaacggtttcctctctaatctgtataaacgnttttttttttttggaggttttttgggngg

SEQ ID NO: 322559 - DNA, 625 bp, Homo sapiens
  misc_feature (35)..(35): n is a, c, g, or t
  misc_feature (39)..(39): n is a, c, g, or t
caccccagccaaaaggccagctcctcccgagagcntgtntctaaaaagcaggaggcagaagggcccggaatccagaagagcagggtgaagtcagtaaggcagccgcgccgacgcacaacgagggcacactgccgacggccacagtcctctccaccagagcctcttccctcttcctttctccgccatcgtggtgtgttcttgactccgctgctcgccatgtcttctcacaagactttcaggattaagcgattcctggccaagaaacaaaagcaaaatcgtcccattccccagtggattcggatgaaaactggaaataaaatcaggtacaactccaaaaggagacattggagaagaaccaagctgggtctataaggaattgcacatgagatggcacacatatttatgctgtctgaaggtcacgatcatgttaccatatcaagctgtgaacacgttggttggctggactcaggaacaaatatcgaaggcctttctttttaccaccaccaacccaatatcctcccaccttctccccccctcctcctcctctccaccctgtccacccaccacaacatttgcccccccctccgccactccgtctttacctccccacctctatctccccccc

SEQ ID NO: 322560 - DNA, 1456 bp, Homo sapiens
agaaccaagctgggtctataaggaattgcacatgattttatttccagttttcatccgaatccactggggaatgggatgaaaactggaaataaaatcaggtacaactccaaaaggagacattggagaagaaccaagctgggtctataaggaattgcacatgagatggcacacatatttatgctgtctgaaggtcacgatcatgttaccatatcaagctgaaaatgtcaccactatctggagatttcgacgtgttttcctctctgaatctgttatgaacacgttggttggctggattcagtaataaatatgtaaggcctttctttttaaaaaaaacaaaaaaaagaaaaaaaaaaaaaaaaaaacaaaacaaaaaaaaaaaaaggggggggggccccaaaaaaacaccctccgagaggagggagcggccaaatattcacatgcgacaacaccgaaatatgtcggtagaaaccaagagagggggcgccccccaatagaggagaggcagccgattaataataaaaacgagagcgagagagcggcagacgagctaaaaaaaacacagccggggcgaggcggggagacaaacaacgtacccaacgggggacactcatcgtgagaggaagcaccaccaccacaaccaccgggggggcgggcggacaaacacacatgtagcggggagacacaacacaacactcccgcaacagagaagaaatgaacgacccaccgcgcgacgagagagaaaaacataaaaacacaactcaggagaagtcgagcatatgatctgcgggggggacaacacacccgcacgccaagaatatagcgcgcgaggcaccgcgatgaaaaacaagaacgatgctggccgcagcgagaagaaatatctaagcgaagaaaaacaactaccttatcacgagcgggcggcgctgtctcctctgctctatctaacactaacgtggtagaacaaaagacgagaaagacaaaagaaaaagatcgaagcacgagagacgacaacagataacagaagaagagaaagagcaagcaaagcggatgaagaaggatagacagaaggattcagaagagaagaagataaacagaaagaagaggaaacaaacagacagaatgataaagatcaaacagtagaaagaaacaacacgagaacaagaaacacgaaaagaaaaaacaaagagaggagcgcgcagccccccgcgcaacgacggcacacgcagagcagaccggacgcagcagaggagcaaacaggacgagagggaagaaaggaggaagaagaagggaggaaagaggaagacagagacaaacagagcgagagcagaggagagaaaagaacggaaccatgaaaagaacagacggatactacaagagcgagagacgaaagaggaagcacgagagacaagcagagagagaagacagcaacagacgagactccgagagggacggaagagag

SEQ ID NO: 322561 - DNA, 1515 bp, Homo sapiens
ggccatgtcttctcataatgactttcagtggattgaagacgagtatgcctggtcgcaagtaagacacatggcacaatatccgttgcccacttcgcaccagatggtattctgtgatagcaaaagctggtaaaattacaatcaggttaccaccttccagatagaggtacgacaattaggtatgacagataccaacgatgggtctataaggaattgcacatgagatggcacacatatttatgctgtctgaaggtcacgatcatgttaccatatcaagctgaaaatgtcaccactatctggagatttcgacgtgttttcctctctgaatctgttatgaacacgttggttggctggattcagtaataaatatgtaaggcctttctttttaaaaaaaacaaaaaaaagaaaaaaaaaaaaaaaaaaacaaaacaaaaaaaaaaaaaggggggggggccccaaaaaaacaccctccgagaggagggagcggccaaatattcacatgcgacaacaccgaaatatgtcggtagaaaccaagagagggggcgccccccaatagaggagaggcagccgattaataataaaaacgagagcgagagagcggcagacgagctaaaaaaaacacagccggggcgaggcggggagacaaacaacgtacccaacgggggacactcatcgtgagaggaagcaccaccaccacaaccaccgggggggcgggcggacaaacacacatgtagcggggagacacaacacaacactcccgcaacagagaagaaatgaacgacccaccgcgcgacgagagagaaaaacataaaaacacaactcaggagaagtcgagcatatgatctgcgggggggacaacacacccgcacgccaagaatatagcgcgcgaggcaccgcgatgaaaaacaagaacgatgctggccgcagcgagaagaaatatctaagcgaagaaaaacaactaccttatcacgagcgggcggcgctgtctcctctgctctatctaacactaacgtggtagaacaaaagacgagaaagacaaaagaaaaagatcgaagcacgagagacgacaacagataacagaagaagagaaagagcaagcaaagcggatgaagaaggatagacagaaggattcagaagagaagaagataaacagaaagaagaggaaacaaacagacagaatgataaagatcaaacagtagaaagaaacaacacgagaacaagaaacacgaaaagaaaaaacaaagagaggagcgcgcagccccccgcgcaacgacggcacacgcagagcagaccggacgcagcagaggagcaaacaggacgagagggaagaaaggaggaagaagaagggaggaaagaggaagacagagacaaacagagcgagagcagaggagagaaaagaacggaaccatgaaaagaacagacggatactacaagagcgagagacgaaagaggaagcacgagagacaagcagagagagaagacagcaacagacgagactccgagagggacggaagagag

SEQ ID NO: 322562 - DNA, 470 bp, Homo sapiens
cactactctgatcctagttaagagcctagccttcaaattattttgagaggataaaacttgacttggctagtttttaaacacatagggaattattttttttactctccagaaagaactccaaacttgttagaggagagaaaagcagtaccctttgtattttgtggtacctaaaaggttatgtgaatgggaacagctacattgctgtcagactgcctttgtaacttgacatttttttctgtgtaggtacaactccaaaaggagacattggagaagaaccaagctgggtctataaggaattgcacatgagatggcacacatatttatgctgtctgaaggtcacgatcatgttaccatatcaagctgaaaatgtcaccactatctggagatttcgacgtgttttcctctctgaatctgttatgaacacgttggttggctggattcagtaataaatatgtaaggcctttcttttt

SEQ ID NO: 322563 - DNA, 395 bp, Homo sapiens
agcggccgcctactactactaaattcgcggccgcgtcgaccttgactccgctgctcgccatgtcttctcacaagactttcaggattaagcgattcctggccaagaaacaaaagcaaaatcgtcccattccccagtggattcggatgaaaactggaaataaaatcaggtacaactccaaaaggagacattggagaagaaccaagctgggtctataaggaattgcacatgagatggcacacatatttatgctgtctgaaggtcacgatcatgttaccatatcaagctgaaaatgtcaccactatctggagatttcgacgtgttttcctctctgaatctgttatgaacacgttggttggctggattcagtaataaatatgtaaggcctttctttttaa

SEQ ID NO: 322564 - DNA, 457 bp, Homo sapiens
  misc_feature (12)..(12): n is a, c, g, or t
  misc_feature (21)..(21): n is a, c, g, or t
catcgacccccnttggcacgngccgcgcgccattgcgttgatacccgcgaattcggccattatggccggggcctcttcctttctccgccatcgtggtgtgttcttgactccgctgctcgccatgtcttctcacaagactttcaggattaagcgattcctggccaagaaacaaaagcaaaatcgtcccattccccagtggattcggatgaaaactggaaataaaatcaggtacaactccaaaaggagacattggagaagaaccaagctgggtctataaggaattgcacatgagatggcacacatatttatgctgtctgaaggtcacgatcatgttaccatatcaagctgaaaatgtcaccactatctggagatttcgacgtgttttcctctctgaatctgttatgaacacgttggttggctggattcagtaataaatatgtaaggcctttctttttaa

SEQ ID NO: 322565 - DNA, 552 bp, Homo sapiens
  misc_feature (35)..(35): n is a, c, g, or t
  misc_feature (39)..(39): n is a, c, g, or t
caccccagccaaaaggccagctcctcccgagagcntgtntctaaaaagcaggaggcagaagggcccggaatccagaagagcagggtgaagtcagtaaggcagccgcgccgacgcacaacgagggcacactgccgacggccacagtcctctccaccagagcctcttccctcttcctttctccgccatcgtggtgtgttcttgactccgctgctcgccatgtcttctcacaagactttcaggattaagcgattcctggccaagaaacaaaagcaaaatcgtcccattccccagtggattcggatgaaaactggaaataaaatcaggtacaactccaaaaggagacattggagaagaaccaagctgggtctataaggaattgcacatgagatggcacacatatttatgctgtctgaaggtcacgatcatgttaccatatcaagctgaaaatgtcaccactatctggagatttcgacgtgttttcctctctgaatctgttatgaacacgttggttggctggattcagtaataaatatgtaaggcctttctttttaa

SEQ ID NO: 322566 - DNA, 407 bp, Homo sapiens
agcggccgcctactactactaaattcgcggccgcgtcgactcgtggtgtgttcttgactccgctgctcgccatgtcttctcacaagactttcaggattaagcgattcctggccaagaaacaaaagcaaaatcgtcccattccccagtggattcggatgaaaactggaaataaaatcaggtacaactccaaaaggagacattggagaagaaccaagctgggtctataaggaattgcacatgagatggcacacatatttatgctgtctgaaggtcacgatcatgttaccatatcaagctgaaaatgtcaccactatctggagatttcgacgtgttttcctctctgaatctgttatgaacacgttggttggctggattcagtaataaatatgtaaggcctttctttttaa

SEQ ID NO: 322567 - DNA, 382 bp, Homo sapiens
  misc_feature (18)..(18): n is a, c, g, or t
  misc_feature (20)..(21): n is a, c, g, or t
  misc_feature (23)..(23): n is a, c, g, or t
cggacgcgtgggtcgacncnngngtcgcttgactccgctgctcgccatgtcttctcacaagactttcaggattaagcgattcctggccaagaaacaaaagcaaaatcgtcccattccccagtggattcggatgaaaactggaaataaaatcaggtacaactccaaaaggagacattggagaagaaccaagctgggtctataaggaattgcacatgagatggcacacatatttatgctgtctgaaggtcacgatcatgttaccatatcaagctgaaaatgtcaccactatctggagatttcgacgtgttttcctctctgaatctgttatgaacacgttggttggctggattcagtaataaatatgtaaggcctttctttttaa

SEQ ID NO: 322568 - DNA, 721 bp, Homo sapiens
  misc_feature (33)..(33): n is a, c, g, or t
ttggatccgaattcggatccaacgttggatccnccgccatcgtggtgtgttcttgactccgctgctcgccatgtcttctcacaagactttcaggattaagcgattcctggccaagaaacaaaagcaaaatcgtcccattccccagtggattcggatgaaaactggaaataaaatcaggtacaactccaaaaggagacattggagaagaaccaagctgggtctataaggaattgcacatgagatggcacacatatttatgctgtctgaaggtcacgatcatgttaccatatcaagctgaaaatgtcaccactatctggagatttcgacgtgttttcctctctgaatctgttatgaacacgttggttggctggattcagtaataaatatgtaaggcctttctttttaaaaaaaaaaaaaaaaaaaaaaaaaaaaaaaaaaaaaaaaaaaaaaaaaaacaaaaacaagggggggagaggaaaacaagaccagacacagagagcggacaaagagaaagagcaacacacgcaaggggaggagacaaaacacggggacgctaagaagaggcgcgcaacaaaaacaaaaaaacccaggagaacgcagtaaaagaaggacgagagagggaagacagagggaaaaacggggacaaattaggggaaaagacaaaccaaaccgaagaaggagggagacaaacaaaaaacagaaaacaaaacacagcaaacag

SEQ ID NO: 322569 - DNA, 447 bp, Homo sapiens
agcggccgcctactactactaaattcgcggccgcgtcgacgcgagaagacgacagaaggggcctcttcctttctccgccatcgtggtgtgttcttgactccgctgctcgccatgtcttctcacaagactttcaggattaagcgattcctggccaagaaacaaaagcaaaatcgtcccattccccagtggattcggatgaaaactggaaataaaatcaggtacaactccaaaaggagacattggagaagaaccaagctgggtctataaggaattgcacatgagatggcacacatatttatgctgtctgaaggtcacgatcatgttaccatatcaagctgaaaatgtcaccactatctggagatttcgacgtgttttcctctctgaatctgttatgaacacgttggttggctggattcagtaataaatatgtaaggcctttctttttaa

SEQ ID NO: 322570 - DNA, 801 bp, Homo sapiens
  misc_feature (35)..(35): n is a, c, g, or t
  misc_feature (39)..(39): n is a, c, g, or t
caccccagccaaaaggccagctcctcccgagagcntgtntctaaaaagcaggaggcagaagggcccggaatccagaagagcagggtgaagtcagtaaggcagccgcgccgacgcacaacgagggcacactgccgacggccacagtcctctccaccagagcctcttccctcttcctttctccgccatcgtggtgtgttcttgactccgctgctcgccatgtcttctcacaagactttcaggattaagcgattcctggccaagaaacaaaagcaaaatcgtcccattccccagtggattcggatgaaaactggaaataaaatcaggtacaactccaaaaggagacattggagaagaaccaagctgggtctataaggaattgcacatgagatggcacacatatttatgctgtctgaaggtcacgatcatgttaccatatcaagctgaaaatgtcaccactatctggagatttcgacgtgttttcctctctgaatctgttatgaacacgttggttggctggattcagtaataaatatgtaaggcctttctttttaaaaaaaaaaaaaaaaaaaaaaaaaaaaaaaaaaaaaaaaaaaaaaaaaaaaaaaaaaaaaaaaaaaaaacaaaaaaaaaaaaaaaaaaaaaaaaaaaaaaaaaaaaaaaaaaaaaaaaccgggcgggcgcgcgcgcgcaagagactccagacaagcgcggggtgaccggaggccaaaaaaaagagaacacaaagcaaagaagaggagggacccaaaaaaaacacgagagaagaacaggggggggatccac

SEQ ID NO: 322571 - DNA, 478 bp, Homo sapiens
gcccggccgctgccgagtcgggcagggattccggtttcccttcgcttgtagcgaactcgttctggaggcggggggtgggaggtggcagccacccccgaaatcgtggcctgactgtgggctgcccgtggcatgcgcaacgtggaggtcttctcacaagactttcaggattaagcgattcctggccaagaaacaaaagcaaaatcgtcccattccccagtggattcggatgaaaactggaaataaaatcaggtacaactccaaaaggagacattggagaagaaccaagctgggtctataaggaattgcacatgagatggcacacatatttatgctgtctgaaggtcacgatcatgttaccatatcaagctgaaaatgtcaccactatctggagatttcgacgtgttttcctctctgaatctgttatgaacacgttggttggctggattcagtaataaatatgtaaggcctttctttttaa

SEQ ID NO: 322572 - DNA, 802 bp, Homo sapiens
  misc_feature (743)..(743): n is a, c, g, or t
  misc_feature (753)..(753): n is a, c, g, or t
  misc_feature (791)..(791): n is a, c, g, or t
agcggccgcctactactactaaattcgcggccgcgtcgacgcgagaagacgacagaaggggcctcttcctttctccgccatcgtggtgtgttcttgactccgctgctcgccatgtcttctcacaagactttcaggattaagcgattcctggccaagaaacaaaagcaaaatcgtcccattccccagtggattcggatgaaaactggaaataaaatcaggtacaactccaaaaggagacattggagaagaaccaagctgggtctataaggaattgcacatgagatggcacacatatttatgctgtctgaaggtcacgatcatgttaccatatcaagctgaaaatgtcaccactatctggagatttcgacgtgttttcctctctgaatctgttatgaacacgttggttggctggattcagtaataaatatgtaaggcctttctttttaaaaaagactctcagaaactgctacaccagctgaatgccctgttggaacaggagtctagatgtcagccaaaggtctgtggtttgagactaattgagtctgcacacgataagggcctcagaatgactgcaagactaagggactttgaagtaaaagatcttcttagtctaactcagttctttggctttgacacagagacattttctctagctgtgaatttactggacagattcctgtctaaaatgaaggtacagcccaagcaccttgggtgtgttggactgaactgttttatttggctgnaaatcaattnaagaggaaaggaatgtccattggcactgacttgatccnataagcaatat

SEQ ID NO: 322573 - DNA, 772 bp, Homo sapiens
agcggccgcctactactactaaattcgcggccgcgtcgacgcgagaagacgacagaaggggcctcttcctttctccgccatcgtggtgtgttcttgactccgctgctcgccatgtcttctcacaagactttcaggattaagcgattcctggccaagaaacaaaagcaaaatcgtcccattccccagtggattcggatgaaaactggaaataaaatcaggtacaactccaaaaggagacattggagaagaaccaagctgggtctataaggaattgcacatgagatggcacacatatttatgctgtctgaaggtcacgatcatgttaccatatcaagctgaaaatgtcaccactatctggagatttcgacgtgttttcctctctgaatctgttatgaacacgttggttggctggattcagtaataaatatgtaaggcctttctttttaaaaaaaaaaaaaaaaaaaaaaaaacatgtcgtgcggctcggctcagcccagtctagtctagactaggctaaggtatgcgatgcgaacgcaagctgagttgactagtccaacctatcgtatggcgagttacattacactgcactgcgctttacatcacagcgactggaatgacaatgccgtgacgcaacttaattgaattgcattgcatcacattttcgtttggtgaggtgatatggggaatgtgaatggcgagctgtaatgttaagttaagcgtcgagttattgttaattagctcagtttattaccaaccgacaggccgagatagt

SEQ ID NO: 322574 - DNA, 696 bp, Homo sapiens
agcggccgcctactactactaaattcgcggccgcgtcgaccttgactccgctgctcgccatgtcttctcacaagactttcaggattaagcgattcctggccaagaaacaaaagcaaaatcgtcccattccccagtggattcggatgaaaactggaaataaaatcaggtacaactccaaaaggagacattggagaagaaccaagctgggtctataaggaattgcacatgagatggcacacatatttatgctgtctgaaggtcacgatcatgttaccatatcaagctgaaaatgtcaccactatctggagatttcgacgtgttttcctctctgaatctgttatgaacacgttggttggctggattcagtaataaatatgtaaggcctttctttttaaaaaaaaaaaaaaaaaaaaaaaaaaaaaaaaaaaaaaaaaaaaaaaaaaaaaaaaaaaaaaaaaaaaaaaaaaaaaaaaataaatttattaaataaaaaaaaaaatcacgggccggcgttttacaacgttgggactgggaaaaccctggcggttccaaatttaattgccttgaagaaaatccctttttgccagttggcgaataaccaaaagggccccaccgatcgcctttccaaaaattgcccaccctgaatggcaaatggcaaattgaagccgttaattttgggtaatccgcgttttgtgg

SEQ ID NO: 322575 - DNA, 628 bp, Homo sapiens
  misc_feature (35)..(35): n is a, c, g, or t
  misc_feature (39)..(39): n is a, c, g, or t
caccccagccaaaaggccagctcctcccgagagcntgtntctaaaaagcaggaggcagaagggcccggaatccagaagagcagggtgaagtcagtaaggcagccgcgccgacgcacaacgagggcacactgccgacggccacagtcctctccaccagagcctcttccctcttcctttctccgccatcgtggtgtgttcttgactccgctgctcgccatgtcttctcacaagactttcaggattaagcgattcctggccaagaaacaaaagcaaaatcgtcccattccccagtggattcggatgaaaactggaaataaaatcagctcttgaagatgatgtgtctcagagtttgttccttcagatgttcagatatgtccagagtttcttccttccagtgggttcgtggtctcactgacttcaggaatgaagctgcatacgctcacgctccacagaaaagttctccaagtccccactcgacccaggaagtcctgctgtcttcacctgtcaccagctactggggaggctgaggcaggagaatcgcttgaacccaggaggtggaggttgctgggagccaagccaagatcacgccactacactccagcctggcaacagagtgagactccgtctc

SEQ ID NO: 322576 - DNA, 1044 bp, Homo sapiens
aaacaagatagtttatttctcttcatgtaaaaatttgaatgacaatttagtgaaggtgacaagggcccacgcttctgctaaggtccaggcattcctagagtggtatatgatagatcatatggtataagatagatcacttccatagccacagagtatccagttattaatacaaacaaatgagaagaggaaggggagagcaagtctttctttgtttttagagcacaatccagaagttgaattcctatcttagtcacattaaattggctagagtatcgttacgtagtcagacctagagttgcaaaggagactgaaaaaatgcagtttaatctgaacagccatgtgtccaggtaaaaattctgttattagggaagaaagagagaatgaatattgggaaacactttcaaagacctcccaccaccaaagtacctacctaaatattttatcttcctatgtttgtgtgaggtattgaggttttataaatgtgcacataattttgcaattgtatttttatttatattacacagtaagaaaaacagaatgttctatatttatagtcttcctgttacaaatatgcgattagagcttaaagagtcatagtatcagaattagaatgttaatattcccactcaatatactgaggtctcattttcattatggtgggtttactaactgccccatatacttcgcagggctgctttgaagctaaaatgagatcattcatatgggatcacattaagctgctagaaattagaaaatgtacatgagatagtataaattttacagtcactaatttaagtttcttttcattagacgctgttggaagctctgactgtggcagttgttggtaagccgtaactgcatttctatatgttataataactttttaatgtagatagatctttcaggtaaaaaggtatttggggctaaagtttaacatcatggaatatcatatttcagaaatatagcataggacaaataatttctaaagtataagcaaaagttagatatttatcgtttacatatttcagctgagcttagaagtgg

SEQ ID NO: 322577 - DNA, 612 bp, Homo sapiens
cgtgatagctctccagtcatttcattaacttggtaataatgtgacctctgattttgtatgaatgaattttttggagactgttaattgcattatgggtgtggtttcactgtacccatgtagtcaaggatggataagaaatcttttctaattgtttttattggcataaagtacaggagaaaatgaagcatttctataaaatgccagaaaaagctgttttgtattgagcatgtttatatgcatgttaatcagtgttttaattttacagttactttctatgatgtatatattattctgcaagctttcatactgactactacagtattttttggtttgactgtgtatactctacaatctaagaaggatttcagcaaatttggagcagggtaagttgtatatattcttggatataatagatagatgtctttaattattataggtggttttgaggaatgtgctacactgttatttttgggtactgtcttttaaaatggagggtaataagagatcatctctttgagtactagggccaggtcctactcctagaacatacacagaaatggaaagtggctttgacttatttgcttctctcctatagtgaaagggaagtgaatt

SEQ ID NO: 322578 - DNA, 515 bp, Homo sapiens
  misc_feature (34)..(34): n is a, c, g, or t
  misc_feature (42)..(42): n is a, c, g, or t
cgcggccgcgcgacacggctgcgagaagacgacngaagggcnaaaaaaaaaaaaaccctaaattagccacgcatagcggttcgtttgcaattcaaaaataattttatgagtagataagaatatcagtttaccgttgtctagtgattttatctaaattttccctgaattattaagtaatattgatttggctttgattctgaagtagtagagtctttaccattataaactgtaaatctctttttgcttaaaaggaaaaaaatgtaaaagataaattccacagagaattattcagtattacattaaaatgttaatgactttttattttaaattgtactaacattaaaagttggcctgaaagtcagatattatgacaaaatttgacattaattgtttttaaagtatagatttcatttgaaattatagaatggtaatgtggttagaggacaccaaagatactgggtcatcagccattaagtatatctatttcaaaattaaaatatttgggaagtattgtc

SEQ ID NO: 322579 - DNA, 1597 bp, Homo sapiens
acggcttgctcggcctgggctcttcctcgcggaagtggggaggaggcggttgcggttagtggaccgggaccggtaggggtgctgttgccatcatggctgaccccgacccccggtaccctcgctcctcgatcgaggacgacttcaactatggcagcagcgtggcctccgccaccgtgcacatccgaatggcctttctgagaaaagtctacagcattctttctctgcaggttctcttaactacagtgacttcaacagtttttttatactttgagtctgtacggacatttgtacatgagagtcctgccttaattttgctgtttgccctcggatctctgggtttgatttttgcgttgattttaaacagacataagtatccccttaacctgtacctactttttggatttacgctgttggaagctctgactgtggcagttgttgttactttctatgatgtatatattattctgcaagctttcatactgactactacagtattttttggtttgactgtgtatactctacaatctaagaaggatttcagcaaatttggagcagggctgtttgctcttttgtggatattgtgcctgtcaggattcttgaagtttttttttatagtgagataatggagttggtcttagccgctgcaggagcccttcttttctgtggattcatcatctatgacacacactcactgatgcataaactgtcacctgaagagtacgtattagctgccatcagcctctacttggatatcatcaatctattcctgcacctgttacggtttctggaagcagttaataaaaagtaattaaaagtatctcagctcaactgaagaacaacaaaaaaatttaacgagaaaaaggattaaagtaattggaagcagtatatagaaactgtttcattaagtaataaagtttgaaacaatgattaaaaaaaaaaaaaaaaaaaaaaaaaaaaaaaaaaaaaaaaaaaaaaaaaaaaaaaaaaaaaaaaaaaaaaaaaaaaaaaaaaaacaaaagggggagggcaagcacacacatcagcgcaacgaaacagatcgagagcaacagagaggagcacacagcagcagaaaaaacgtactgaaaagagacctcagaacacaagaggcgacagagaagagagcaagggagagaaaaaggagaagaaagaagcgggggagacaaaagaaaaaagagaagaaacaagagagagagaaagagagagagaacacaaaaaaggaagcaaaaaaaaagcagagagagacacaaaagaggaaaaaaaggagaaagaggaaaaaacgaaaaaagggggagacccccacagacgaaaaaaaaaaatagagggaggaatgacaaacaggggagaggcgcgagacacgagccgggcgagaggtactaaggaaagaaacgagcacccaccagagacaaacgaaacggagaagcgcgccgcgaacaacgagcggaacaaccccaagaggagcgcaagatagaaaaggaagaccgaacagaggggacaaccagccagagaccaaaaggccaccaacaaaacgggaagaacgacggccgcggggaatgcacatggaggataggagcagaca

SEQ ID NO: 322580 - DNA, 1820 bp, Homo sapiens
  misc_feature (27)..(27): n is a, c, g, or t
cctggtggcgaattcggcacgagggangaggcggttgcggttagtggaccgggaccggtaggggtgctgttgccatcatggctgaccccgacccccggtaccctcgctcctcgatcgaggacgacttcaactatggcagcagcgtggcctccgccaccgtgcacatccgaatggcctttctgagaaaagtctacagcattctttctctgcaggttctcttaactacagtgacttcaacagtttttttatactttgagtctgtacggacatttgtacatgagagtcctgccttaattttgctgtttgccctcggatctctgggtttgatttttgcgttgattttaaacagacataagtatccccttaacctgtacctactttttggatttacgctgttggaagctctgactgtggcagttgttgttactttctatgatgtatatattattctgcaagctttcatactgactactacagtattttttggtttgactgtgtatactctacaatctaagaaggatttcagcaaatttggagcagggctgtttgctcttttgtggatattgtgcctgtcaggattcttgaagtttttttttatagtgagataatggagttggtcttagccgctgcaggagcccttcttttctgtggattcatcatctatgacacacactcactgatgcataaactgtcacctgaagagtacgtattagctgccatcagcctctacttggatatcatcaatctattcctgcacctgttacggtttctggaagcagttaataaaaagtaattaaaagtatctcagctcaactgaagaacaacaaaaaaatttaacgagaaaaaggattaaagtaattggaagcagtatatagaaactgtttcattaagtaataaagtttgaaacaatgattaaatactgttacaatctttatttgtatcatatgtaattttgagagctttaaaatcttactattctttatgatacctcatttctaaatccttgatttaggatctcagttaagagctatcaaaattctattaaaaatgcttttctggctgggcacagtggctcacgcctgtaatcccaccactttgggagaccgaggcaggtggatcacgaggtcaagaggttgagaccatcctggccaacatggtgaaaccccgtctctactaaaaatacaaaaattagctggatgtggtggcacacacctgtagtcccagctagtcaagaggctgaggccagagaatcgcttgaacctgggaggtggaggttgcattgagccaagatcacgccactgcattccagcctggtgacagagcgagactcagtctcaaaaaaaaaaaaaaaaatttttcttcctaaattagccacgcatagcggttcgtttgcaattcaaaaataattttatgagtagataagaatatcagtttaccgttgtctagtgattttatctaaattttccctgaattattaagtaatattgatttggctttgattctgaagtagtagagtctttaccattataaactgtaaatctctttttgcttaaaaggaaaaaaatgtaaaagataaattccacagagaattattcagtattacattaaaatgttaatgactttttattttaaattgtactaacattaaaagttggcctgaaagtcagatattatgacaaaatttgacattaattgtttttaaagtatagatttcatttgaaattatagaatggtaatgtggttagaggacaccaaagatactgggtcatcagccattaagtatatctatttcaaaattaaaatatttgggaagtattgtc

SEQ ID NO: 322581 - DNA, 2775 bp, Homo sapiens
acggcttgctcggcctgggctcttcctcgcggaagtggggaggaggcggttgcggttagtggaccgggaccggtaggggtgctgttgccatcatggctgaccccgacccccggtaccctcgctcctcgatcgaggacgacttcaactatggcagcagcgtggcctccgccaccgtgcacatccgaatgggtacgttgtcccctctccagtgcctcccagccgcttgtctgcactgctcggcctctagaagccgacttccggcttccgagggagagcggccatctcctgggactcacagggagtgctcactgagctcccggccctccttctccgggtaccagaggactggcgccctcctcagggagtcggggaggcgcttcctcccctcctagcgggtgtgggagggcgccaggcccagaaggcttgcggctgtcctgtgtgcgccccggctccccagcgggcgccgcggtgtaggaagggacagatggaaaccgccgcagcctgaatttggcatcttgaagtgaaaagaaacgtcgtggaaatgagtcggttgatcactgtgactgacgtacacacgagtggaatccacggcctgatgtttttgttctgtggggtttcgcgttacaggcttatatttaccgtcctgtgctaggctggaagctccctgacggcactatttcctctccgcagggcccagaatgcaacaggtctttgaggattattgaggaagttgctcaacacagaagcttcctaagtcagtctaaattgtgttttaagttattacgtagtagccaatgggcagaaatttttgaatttaaaatgctcagcttcatctacgtggaagccattgcctgctctagtttggtcatttgatcgccgaaacagccccagactttcagcctgtttaggcagctggaacttgttctggaaaaggaaagatgaagatagttctgatgtgctaagaatcttagtgcctagaacttgttctggaaaaggaaagatgaagatagttctgatgcaccaagaatcttggtgcctagcatttatatttttggaattgaattttgaaattattttggccagtgaactcagcttttttttaaaaaaaattaattgtggtaaaatacagcctttctgagaaaagtctacagcattctttctctgcaggttctcttaactacagtgacttcaacagtttttttatactttgagtctgtacggacatttgtacatgagagtcctgccttaattttgctgtttgccctcggatctctgggtttgatttttgcgttgattttaaacagacataagtatccccttaacctgtacctactttttggatttacgctgttggaagctctgactgtggcagttgttgttactttctatgatgtatatattattctgcaagctttcatactgactactacagtattttttggtttgactgtgtatactctacaatctaagaaggatttcagcaaatttggagcagggctgtttgctcttttgtggatattgtgcctgtcaggattcttgaagtttttttttatagtgagataatggagttggtcttagccgctgcaggagcccttcttttctgtggattcatcatctatgacacacactcactgatgcataaactgtcacctgaagagtacgtattagctgccatcagcctctacttggatatcatcaatctattcctgcacctgttacggtttctggaagcagttaataaaaagtaattaaaagtatctcagctcaactgaagaacaacaaaaaaatttaacgagaaaaaggattaaagtaattggaagcagtatatagaaactgtttcattaagtaataaagtttgaaacaatgattaaatactgttacaatctttatttgtatcatatgtaattttgagagctttaaaatcttactattctttatgatacctcatttctaaatccttgatttaggatctcagttaagagctatcaaaattctattaaaaatgcttttctggctgggcacagtggctcacgcctgtaatcccaccactttgggagaccgaggcaggtggatcacgaggtcaagaggttgagaccatcctggccaacatggtgaaaccccgtctctactaaaaatacaaaaattagctggatgtggtggcacacacctgtagtcccagctagtcaagaggctgaggccagagaatcgcttgaacctgggaggtggaggttgcattgagccaagatcacgccactgcattccagcctggtgacagagcgagactcagtctcaaaaaaaaaaaaaaaaatttttcttcctaaattagccacgcatagcggttcgtttgcaattcaaaaataattttatgagtagataagaatatcagtttaccgttgtctagtgattttatctaaattttccctgaattattaagtaatattgatttggctttgattctgaagtagtagagtctttaccattataaactgtaaatctctttttgcttaaaaggaaaaaaatgtaaaagataaattccacagagaattattcagtattacattaaaatgttaatgactttttattttaaattgtactaacattaaaagttggcctgaaagtcagatattatgacaaaatttgacattaattgtttttaaagtatagatttcatttgaaattatagaatggtaatgtggttagaggacaccaaagatactgggtcatcagccattaagtatatctatttcaaaattaaaatatttgggaagtattgtc

SEQ ID NO: 322582 - DNA, 2395 bp, Homo sapiens
acggcttgctcggcctgggctcttcctcgcggaagtggggaggaggcggttgcggttagtggaccgggaccggtaggggtgctgttgccatcatggctgaccccgacccccggtaccctcgctcctcgatcgaggacgacttcaactatggcagcagcgtggcctccgccaccgtgcacatccgaatggcctttctgagaaaagtctacagcattctttctctgcaggttctcttaactacagtgacttcaacagtttttttatactttgagtctgtacggacatttgtacatgagagtcctgccttaattttgctgtttgccctcggatctctgggtttgatttttgcgttgattttaaacagacataagtatccccttaacctgtacctactttttggatttacgctgttggaagctctgactgtggcagttgttgttactttctatgatgtatatattattctgcaagctttcatactgactactacagtattttttggtttgactgtgtatactctacaatctaagaaggatttcagcaaatttggagcagggctgtttgctcttttgtggatattgtgcctgtcaggattcttgaaggtaagttatgttataatggttaatttgaaatataattctggctgtgtcaatataaataacctcaaaaagctataagagatactcttatgataggacacttagttataattatccagaacatttgtatatagaatgattatagaattatccctttagaaaatcagggtcttgtgttggtccttattattgactgaaaaaaagatgaatgaataaatgaattaaattacatagaaagaggcccttgcttacaactgccaagctccagtggcacatttaattgtgaaaaacgaaatatatttttaaataatttatatgtggaatgctgtttttcaaagtgggtaatttagtttaatggaatataaccactcattcatccttccatccaacagaggcaagtttggacttgccttgcctttttctgcttttaacatttgtattcaaagttgtacaccattgtcaaatgtataatgtagcagtaaatcattagaggaagtaagttaagtcctgttaatactgttctcaaatataaacatatttctttaatctcttccctatagttttttttttttatagtgagataatggagttggtcttagccgctgcaggagcccttcttttctgtggattcatcatctatgacacacactcactgatgcataaactgtcacctgaagagtacgtattagctgccatcagcctctacttggatatcatcaatctattcctgcacctgttacggtttctggaagcagttaataaaaagtaattaaaagtatctcagctcaactgaagaacaacaaaaaaatttaacgagaaaaaggattaaagtaattggaagcagtatatagaaactgtttcattaagtaataaagtttgaaacaatgattaaatactgttacaatctttatttgtatcatatgtaattttgagagctttaaaatcttactattctttatgatacctcatttctaaatccttgatttaggatctcagttaagagctatcaaaattctattaaaaatgcttttctggctgggcacagtggctcacgcctgtaatcccaccactttgggagaccgaggcaggtggatcacgaggtcaagaggttgagaccatcctggccaacatggtgaaaccccgtctctactaaaaatacaaaaattagctggatgtggtggcacacacctgtagtcccagctagtcaagaggctgaggccagagaatcgcttgaacctgggaggtggaggttgcattgagccaagatcacgccactgcattccagcctggtgacagagcgagactcagtctcaaaaaaaaaaaaaaaaatttttcttcctaaattagccacgcatagcggttcgtttgcaattcaaaaataattttatgagtagataagaatatcagtttaccgttgtctagtgattttatctaaattttccctgaattattaagtaatattgatttggctttgattctgaagtagtagagtctttaccattataaactgtaaatctctttttgcttaaaaggaaaaaaatgtaaaagataaattccacagagaattattcagtattacattaaaatgttaatgactttttattttaaattgtactaacattaaaagttggcctgaaagtcagatattatgacaaaatttgacattaattgtttttaaagtatagatttcatttgaaattatagaatggtaatgtggttagaggacaccaaagatactgggtcatcagccattaagtatatctatttcaaaattaaaatatttgggaagtattgtc

SEQ ID NO: 322583 - DNA, 2241 bp, Homo sapiens
aaacaagatagtttatttctcttcatgtaaaaatttgaatgacaatttagtgaaggtgacaagggcccacgcttctgctaaggtccaggcattcctagagtggtatatgatagatcatatggtataagatagatcacttccatagccacagagtatccagttattaatacaaacaaatgagaagaggaaggggagagcaagtctttctttgtttttagagcacaatccagaagttgaattcctatcttagtcacattaaattggctagagtatcgttacgtagtcagacctagagttgcaaaggagactgaaaaaatgcagtttaatctgaacagccatgtgtccaggtaaaaattctgttattagggaagaaagagagaatgaatattgggaaacactttcaaagacctcccaccaccaaagtacctacctaaatattttatcttcctatgtttgtgtgaggtattgaggttttataaatgtgcacataattttgcaattgtatttttatttatattacacagtaagaaaaacagaatgttctatatttatagtcttcctgttacaaatatgcgattagagcttaaagagtcatagtatcagaattagaatgttaatattcccactcaatatactgaggtctcattttcattatggtgggtttactaactgccccatatacttcgcagggctgctttgaagctaaaatgagatcattcatatgggatcacattaagctgctagaaattagaaaatgtacatgagatagtataaattttacagtcactaatttaagtttcttttcattagacgctgttggaagctctgactgtggcagttgttgttactttctatgatgtatatattattctgcaagctttcatactgactactacagtattttttggtttgactgtgtatactctacaatctaagaaggatttcagcaaatttggagcagggctgtttgctcttttgtggatattgtgcctgtcaggattcttgaagtttttttttatagtgagataatggagttggtcttagccgctgcaggagcccttcttttctgtggattcatcatctatgacacacactcactgatgcataaactgtcacctgaagagtacgtattagctgccatcagcctctacttggatatcatcaatctattcctgcacctgttacggtttctggaagcagttaataaaaagtaattaaaagtatctcagctcaactgaagaacaacaaaaaaatttaacgagaaaaaggattaaagtaattggaagcagtatatagaaactgtttcattaagtaataaagtttgaaacaatgattaaatactgttacaatctttatttgtatcatatgtaattttgagagctttaaaatcttactattctttatgatacctcatttctaaatccttgatttaggatctcagttaagagctatcaaaattctattaaaaatgcttttctggctgggcacagtggctcacgcctgtaatcccaccactttgggagaccgaggcaggtggatcacgaggtcaagaggttgagaccatcctggccaacatggtgaaaccccgtctctactaaaaatacaaaaattagctggatgtggtggcacacacctgtagtcccagctagtcaagaggctgaggccagagaatcgcttgaacctgggaggtggaggttgcattgagccaagatcacgccactgcattccagcctggtgacagagcgagactcagtctcaaaaaaaaaaaaaaaaatttttcttcctaaattagccacgcatagcggttcgtttgcaattcaaaaataattttatgagtagataagaatatcagtttaccgttgtctagtgattttatctaaattttccctgaattattaagtaatattgatttggctttgattctgaagtagtagagtctttaccattataaactgtaaatctctttttgcttaaaaggaaaaaaatgtaaaagataaattccacagagaattattcagtattacattaaaatgttaatgactttttattttaaattgtactaacattaaaagttggcctgaaagtcagatattatgacaaaatttgacattaattgtttttaaagtatagatttcatttgaaattatagaatggtaatgtggttagaggacaccaaagatactgggtcatcagccattaagtatatctatttcaaaattaaaatatttgggaagtattgtc

SEQ ID NO: 322584 - DNA, 2546 bp, Homo sapiens
tgtcctgtgctgtttgctgtccagtgtccaagaactgttgtttcatatattttgtctggttttatttaaggaaggaggataaatgtggcctctgtaattccctgtgacctgaagcagctgataagtcccatattttataacaaaagactgacttcttagatgtcctttcttatataatttatactctctatatataacaattgaattgtaactcataaaattatagcagtgtcagatgtgtccatcaattaagttccataatacataagaataaaatggaaagtacattgtgaacttcgatagacatgttcacagaataacttgttattacttggtttaaaagtgcaatcctagttcatttgtttatatattttctaaaagtttttatagatctctgaattaaaatacttgtaatgatatttctgcttttatctgtattttatgttccaaaacttcacaaattatactgttaactaggtttgtataccataaagacaaatgttgaataaatagctgttctttcaatttctttaaaaaaaagatccaagatgggcattatattcattgtatgtttacaaattcttacattttagttattcttcagcaaaaaatccagatggatgtttttttcagaaagtgttgaatgggtttacaaagtttttttgtaaggaacaatattgcaaattactaaaattgtatttttataggctgtttgctcttttgtggatattgtgcctgtcaggattcttgaaggtaagttatgttataatggttaatttgaaatataattctggctgtgtcaatataaataacctcaaaaagctataagagatactcttatgataggacacttagttataattatccagaacatttgtatatagaatgattatagaattatccctttagaaaatcagggtcttgtgttggtccttattattgactgaaaaaaagatgaatgaataaatgaattaaattacatagaaagaggcccttgcttacaactgccaagctccagtggcacatttaattgtgaaaaacgaaatatatttttaaataatttatatgtggaatgctgtttttcaaagtgggtaatttagtttaatggaatataaccactcattcatccttccatccaacagaggcaagtttggacttgccttgcctttttctgcttttaacatttgtattcaaagttgtacaccattgtcaaatgtataatgtagcagtaaatcattagaggaagtaagttaagtcctgttaatactgttctcaaatataaacatatttctttaatctcttccctatagttttttttttttatagtgagataatggagttggtcttagccgctgcaggagcccttcttttctgtggattcatcatctatgacacacactcactgatgcataaactgtcacctgaagagtacgtattagctgccatcagcctctacttggatatcatcaatctattcctgcacctgttacggtttctggaagcagttaataaaaagtaattaaaagtatctcagctcaactgaagaacaacaaaaaaatttaacgagaaaaaggattaaagtaattggaagcagtatatagaaactgtttcattaagtaataaagtttgaaacaatgattaaatactgttacaatctttatttgtatcatatgtaattttgagagctttaaaatcttactattctttatgatacctcatttctaaatccttgatttaggatctcagttaagagctatcaaaattctattaaaaatgcttttctggctgggcacagtggctcacgcctgtaatcccaccactttgggagaccgaggcaggtggatcacgaggtcaagaggttgagaccatcctggccaacatggtgaaaccccgtctctactaaaaatacaaaaattagctggatgtggtggcacacacctgtagtcccagctagtcaagaggctgaggccagagaatcgcttgaacctgggaggtggaggttgcattgagccaagatcacgccactgcattccagcctggtgacagagcgagactcagtctcaaaaaaaaaaaaaaaaatttttcttcctaaattagccacgcatagcggttcgtttgcaattcaaaaataattttatgagtagataagaatatcagtttaccgttgtctagtgattttatctaaattttccctgaattattaagtaatattgatttggctttgattctgaagtagtagagtctttaccattataaactgtaaatctctttttgcttaaaaggaaaaaaatgtaaaagataaattccacagagaattattcagtattacattaaaatgttaatgactttttattttaaattgtactaacattaaaagttggcctgaaagtcagatattatgacaaaatttgacattaattgtttttaaagtatagatttcatttgaaattatagaatggtaatgtggttagaggacaccaaagatactgggtcatcagccattaagtatatctatttcaaaattaaaatatttgggaagtattgtc

SEQ ID NO: 322585 - DNA, 412 bp, Homo sapiens
ttcctaagtcagtctaaattgtgttttaagttattacgtagtagccaatgggcagaaatttttgaatttaaaatgctcagcttcatctacgtggaagccattgcctgctctagtttggtcatttgatcgccgaaacagccccagactttcagcctgtttaggcagctggaacttgttctggaaaaggaaagatgaagatagttctgatgtgctaagaatcttagtgcctagaacttgttctggaaaaggaaagatgaagatagttctgatgcaccaagaatcttggtgcctagcatttatatttttggaattgaattttgaaattattttggccagtgaactcagcttttttttaaaaaaaattaattgtggtaaaatacaggtaacataaaatttaccgtcttaactattt

SEQ ID NO: 322586 - DNA, 1835 bp, Homo sapiens
acggcttgctcggcctgggctcttcctcgcggaagtggggaggaggcggttgcggttagtggaccgggaccggtaggggtgctgttgccatcatggctgaccccgacccccggtaccctcgctcctcgatcgaggacgacttcaactatggcagcagcgtggcctccgccaccgtgcacatccgaatggcctttctgagaaaagtctacagcattctttctctgcaggttctcttaactacagtgacttcaacagtttttttatactttgagtctgtacggacatttgtacatgagagtcctgccttaattttgctgtttgccctcggatctctgggtttgatttttgcgttgattttaaacagacataagtatccccttaacctgtacctactttttggatttacgctgttggaagctctgactgtggcagttgttgttactttctatgatgtatatattattctgcaagctttcatactgactactacagtattttttggtttgactgtgtatactctacaatctaagaaggatttcagcaaatttggagcagggctgtttgctcttttgtggatattgtgcctgtcaggattcttgaagtttttttttatagtgagataatggagttggtcttagccgctgcaggagcccttcttttctgtggattcatcatctatgacacacactcactgatgcataaactgtcacctgaagagtacgtattagctgccatcagcctctacttggatatcatcaatctattcctgcacctgttacggtttctggaagcagttaataaaaagtaattaaaagtatctcagctcaactgaagaacaacaaaaaaatttaacgagaaaaaggattaaagtaattggaagcagtatatagaaactgtttcattaagtaataaagtttgaaacaatgattaaatactgttacaatctttatttgtatcatatgtaattttgagagctttaaaatcttactattctttatgatacctcatttctaaatccttgatttaggatctcagttaagagctatcaaaattctattaaaaatgcttttctggctgggcacagtggctcacgcctgtaatcccaccactttgggagaccgaggcaggtggatcacgaggtcaagaggttgagaccatcctggccaacatggtgaaaccccgtctctactaaaaatacaaaaattagctggatgtggtggcacacacctgtagtcccagctagtcaagaggctgaggccagagaatcgcttgaacctgggaggtggaggttgcattgagccaagatcacgccactgcattccagcctggtgacagagcgagactcagtctcaaaaaaaaaaaaaaaaatttttcttcctaaattagccacgcatagcggttcgtttgcaattcaaaaataattttatgagtagataagaatatcagtttaccgttgtctagtgattttatctaaattttccctgaattattaagtaatattgatttggctttgattctgaagtagtagagtctttaccattataaactgtaaatctctttttgcttaaaaggaaaaaaatgtaaaagataaattccacagagaattattcagtattacattaaaatgttaatgactttttattttaaattgtactaacattaaaagttggcctgaaagtcagatattatgacaaaatttgacattaattgtttttaaagtatagatttcatttgaaattatagaatggtaatgtggttagaggacaccaaagatactgggtcatcagccattaagtatatctatttcaaaattaaaatatttgggaagtattgtc

SEQ ID NO: 322587 - DNA, 2689 bp, Homo sapiens
  misc_feature (27)..(27): n is a, c, g, or t
cctggtggcgaattcggcacgagggangaggcggttgcggttagtggaccgggaccggtaggggtgctgttgccatcatggctgaccccgacccccggtaccctcgctcctcgatcgaggacgacttcaactatggcagcagcgtggcctccgccaccgtgcacatccgaatgggtacgttgtcccctctccagtgcctcccagccgcttgtctgcactgctcggcctctagaagccgacttccggcttccgagggagagcggccatctcctgggactcacagggagtgctcactgagctcccggccctccttctccgggtaccaggcccagaaggcttgcggctgtcctgtgtgcgccccggctccccagcgggcgccgcggtgtaggaagggacagatggaaaccgccgcagcctgaatttggcatcttgaagtgaaaagaaacgtcgtggaaatgagtcggttgatcactgtgactgacgtacacacgagtggaatccacggcctgatgtttttgttctgtggggtttcgcgttacaggcttatatttaccgtcctgtgctaggctggaagctccctgacggcactatttcctctccgcagggcccagaatgcaacaggtctttgaggattattgaggaagttgctcaacacagaagcttcctaagtcagtctaaattgtgttttaagttattacgtagtagccaatgggcagaaatttttgaatttaaaatgctcagcttcatctacgtggaagccattgcctgctctagtttggtcatttgatcgccgaaacagccccagactttcagcctgtttaggcagctggaacttgttctggaaaaggaaagatgaagatagttctgatgtgctaagaatcttagtgcctagaacttgttctggaaaaggaaagatgaagatagttctgatgcaccaagaatcttggtgcctagcatttatatttttggaattgaattttgaaattattttggccagtgaactcagcttttttttaaaaaaaattaattgtggtaaaatacagcctttctgagaaaagtctacagcattctttctctgcaggttctcttaactacagtgacttcaacagtttttttatactttgagtctgtacggacatttgtacatgagagtcctgccttaattttgctgtttgccctcggatctctgggtttgatttttgcgttgattttaaacagacataagtatccccttaacctgtacctactttttggatttacgctgttggaagctctgactgtggcagttgttgttactttctatgatgtatatattattctgcaagctttcatactgactactacagtattttttggtttgactgtgtatactctacaatctaagaaggatttcagcaaatttggagcagggctgtttgctcttttgtggatattgtgcctgtcaggattcttgaagtttttttttatagtgagataatggagttggtcttagccgctgcaggagcccttcttttctgtggattcatcatctatgacacacactcactgatgcataaactgtcacctgaagagtacgtattagctgccatcagcctctacttggatatcatcaatctattcctgcacctgttacggtttctggaagcagttaataaaaagtaattaaaagtatctcagctcaactgaagaacaacaaaaaaatttaacgagaaaaaggattaaagtaattggaagcagtatatagaaactgtttcattaagtaataaagtttgaaacaatgattaaatactgttacaatctttatttgtatcatatgtaattttgagagctttaaaatcttactattctttatgatacctcatttctaaatccttgatttaggatctcagttaagagctatcaaaattctattaaaaatgcttttctggctgggcacagtggctcacgcctgtaatcccaccactttgggagaccgaggcaggtggatcacgaggtcaagaggttgagaccatcctggccaacatggtgaaaccccgtctctactaaaaatacaaaaattagctggatgtggtggcacacacctgtagtcccagctagtcaagaggctgaggccagagaatcgcttgaacctgggaggtggaggttgcattgagccaagatcacgccactgcattccagcctggtgacagagcgagactcagtctcaaaaaaaaaaaaaaaaatttttcttcctaaattagccacgcatagcggttcgtttgcaattcaaaaataattttatgagtagataagaatatcagtttaccgttgtctagtgattttatctaaattttccctgaattattaagtaatattgatttggctttgattctgaagtagtagagtctttaccattataaactgtaaatctctttttgcttaaaaggaaaaaaatgtaaaagataaattccacagagaattattcagtattacattaaaatgttaatgactttttattttaaattgtactaacattaaaagttggcctgaaagtcagatattatgacaaaatttgacattaattgtttttaaagtatagatttcatttgaaattatagaatggtaatgtggttagaggacaccaaagatactgggtcatcagccattaagtatatctatttcaaaattaaaatatttgggaagtattgtc

SEQ ID NO: 322588 - DNA, 1797 bp, Homo sapiens
acggcttgctcggcctgggctcttcctcgcggaagtggggaggaggcggttgcggttagtggaccgggaccggtaggggtgctgttgccatcatggctgaccccgacccccggtaccctcgctcctcgatcgaggacgacttcaactatggcagcagcgtggcctccgccaccgtgcacatccgaatgggttctcttaactacagtgacttcaacagtttttttatactttgagtctgtacggacatttgtacatgagagtcctgccttaattttgctgtttgccctcggatctctgggtttgatttttgcgttgattttaaacagacataagtatccccttaacctgtacctactttttggatttacgctgttggaagctctgactgtggcagttgttgttactttctatgatgtatatattattctgcaagctttcatactgactactacagtattttttggtttgactgtgtatactctacaatctaagaaggatttcagcaaatttggagcagggctgtttgctcttttgtggatattgtgcctgtcaggattcttgaagtttttttttatagtgagataatggagttggtcttagccgctgcaggagcccttcttttctgtggattcatcatctatgacacacactcactgatgcataaactgtcacctgaagagtacgtattagctgccatcagcctctacttggatatcatcaatctattcctgcacctgttacggtttctggaagcagttaataaaaagtaattaaaagtatctcagctcaactgaagaacaacaaaaaaatttaacgagaaaaaggattaaagtaattggaagcagtatatagaaactgtttcattaagtaataaagtttgaaacaatgattaaatactgttacaatctttatttgtatcatatgtaattttgagagctttaaaatcttactattctttatgatacctcatttctaaatccttgatttaggatctcagttaagagctatcaaaattctattaaaaatgcttttctggctgggcacagtggctcacgcctgtaatcccaccactttgggagaccgaggcaggtggatcacgaggtcaagaggttgagaccatcctggccaacatggtgaaaccccgtctctactaaaaatacaaaaattagctggatgtggtggcacacacctgtagtcccagctagtcaagaggctgaggccagagaatcgcttgaacctgggaggtggaggttgcattgagccaagatcacgccactgcattccagcctggtgacagagcgagactcagtctcaaaaaaaaaaaaaaaaatttttcttcctaaattagccacgcatagcggttcgtttgcaattcaaaaataattttatgagtagataagaatatcagtttaccgttgtctagtgattttatctaaattttccctgaattattaagtaatattgatttggctttgattctgaagtagtagagtctttaccattataaactgtaaatctctttttgcttaaaaggaaaaaaatgtaaaagataaattccacagagaattattcagtattacattaaaatgttaatgactttttattttaaattgtactaacattaaaagttggcctgaaagtcagatattatgacaaaatttgacattaattgtttttaaagtatagatttcatttgaaattatagaatggtaatgtggttagaggacaccaaagatactgggtcatcagccattaagtatatctatttcaaaattaaaatatttgggaagtattgtc

SEQ ID NO: 322589 - DNA, 587 bp, Homo sapiens
cccccgggctgcaggattcggcacgagagaagacgcgtggtagcgagtaggcacaggcgtgcacctgctcccgaattactcaccgagacacacgggctgagcagacggccccgtggatggagacaaagagctcttctgaccatatccttcttaacacccgctggcatctcctttcgcgcctccctccctaacctactgacccaccttttgattttagcgcacctgtgattgataggccttccaaagagtcccacgctggcatcaccctccccgaggacggagatgaggagtagtcagcgtgatgccaaaacgcgtcttcttaatccaattctaattctgaatgtttcgtgtgggcttaataccatgtctattaatatatagcctcgatgatgagagagttacaaagaacaaaactccagacacaaacctccaaatttttcagcagaagcactctgcgtcgctgagctgaggtcggctctgcgatccatacgtggccgcacccacacagcacgtgctgtgacgatggctgaacggaaagtgtacactgttcctgaatattgaaataaaacaataaacttttaatggta

SEQ ID NO: 322590 - DNA, 829 bp, Homo sapiens
  misc_feature (676)..(676): n is a, c, g, or t
  misc_feature (715)..(715): n is a, c, g, or t
cccccgggctgcaggattcggcacgagagaagacgcgtggtagcgagtaggcacaggcgtgcacctgctcccgaattactcaccgagacacacgggctgagcagacggccccgtggatggagacaaagagctcttctgaccatatccttcttaacacccgctggcatctcctttcgcgcctccctccctaacctactgacccaccttttgattttagcgcacctgtgattgataggccttccaaagagtcccacgctggcatcaccctccccgaggacggagatgaggagtagtcagcgtgatgccaaaacgcgtcttcttaatccaattctaattctgaatgtttcgtgtgggcttaataccatgtctattaatatatagcctcgatgatgagagagttacaaagaacaaaactccagacacaaacctccaaatttttcagcagaagcactctgcgtcgctgagctgaggtcggctctgcgatccatacgtggccgcacccacacagcacgtgctgtgacgatggctgaacggaaagtgtacactgttcctgaatattgaaataaaacaataaacttttaatggtaaaaaaaaaaatataaataaaaaaataataaataataaattaaaaaataaaataaaaaatttatatattatatttaaaaattaatattantgtattttttttaaaatattattataattatattatatnttttttttaaatttaatttttaaaaaataacttgaggggggccaaaacccacatttttccttataggagacttttttacattcggttcccacttttaaacaccctaatttggga

SEQ ID NO: 322591 - DNA, 644 bp, Homo sapiens
  misc_feature (491)..(491): n is a, c, g, or t
  misc_feature (530)..(530): n is a, c, g, or t
cgccctcctagtgtaaaaaaacggcacgagagcgcacctgtgattgataggccttccaaagagtcccacgctggcatcaccctccccgaggacggagatgaggagtagtcagcgtgatgccaaaacgcgtcttcttaatccaattctaattctgaatgtttcgtgtgggcttaataccatgtctattaatatatagcctcgatgatgagagagttacaaagaacaaaactccagacacaaacctccaaatttttcagcagaagcactctgcgtcgctgagctgaggtcggctctgcgatccatacgtggccgcacccacacagcacgtgctgtgacgatggctgaacggaaagtgtacactgttcctgaatattgaaataaaacaataaacttttaatggtaaaaaaaaaaatataaataaaaaaataataaataataaattaaaaaataaaataaaaaatttatatattatatttaaaaattaatattantgtattttttttaaaatattattataattatattatatnttttttttaaatttaatttttaaaaaataacttgaggggggccaaaacccacatttttccttataggagacttttttacattcggttcccacttttaaacaccctaatttggga

SEQ ID NO: 322592 - DNA, 734 bp, Homo sapiens
ggtgacctagagttacgtcgacggaagcgggaaaggtaagaccttggaatgttttgattgatcatcacttttctgatagaccttctctaaaatcccataatgtaccaaagagagagttaggctccgagctaccagaatccatcccaaaacgtgttgccaggcagctcccaagtagaacaggtcggcagatccatgcacccctcctgtccctcccgcacctgcacagccgctgtggccctgagcctgcggcccccctcggagctccgggtggaacctgtttttaccacctcagctccactgtgctttgactgtgtttcctgttgattgaaaggactttcccttcactgaccaccatgtcattatttctctgtcttcctcatgcaggggagaggactgtccctgagcagatttagctgggtaggtgacgaacgcacttccatcggcttcctcttccgtcccagtcctcacagccccgcaacttttgtgttctgctctgtttcggttgcttcctggcctccttttctctcctctcgagacctctctgcccacagctgggatcgggccgccttgtcttccactggggaaatgaaacgtggtcttcccttccggaaggtctggtctcttgcttctgtgccggggacccagccctgcaaggccagatcctcttctcccagagggttcccaggcgacgtgactggtctccctcccagggagggagcaacaccacgtccgag

SEQ ID NO: 322593 - DNA, 2059 bp, Homo sapiens
ccaggatttggctacggaggcagagcgtccgactataaatcggctcacaagggattcaagggagtcgatgcccaggggcacagagacacgggcatccttgactccatcgggcgcttctttggcggtgacaggggtgcgcccaagcggggctctggcaaggactcacaccacccggcaagaactgctcactacggctccctgccccagaagtcacacggccggacccaagatgaaaaccccgtagtccacttcttcaagaacattgtgacgcctcgcacaccacccccgtcgcagggaaagggggccgaaggccagagaccaggatttggctacggaggcagagcgtccgactataaatcggctcacaagggattcaagggagtcgatgcccagggcacgctttccaaaatttttaagctgggaggaagagatagtcgctctggatcacccatggctagacgctgaaaacccacctggttccggaatcctgtcctcagcttcttaatataactgccttaaaactttaatcccacttgcccctgttacctaattagagcagatgacccctcccctaatgcctgcggagttgtgcacgtagtagggtcaggccacggcagcctaccggcaatttccggccaacagttaaatgagaacatgaaaacagaaaacggttaaaactgtccctttctgtgtgaagatcacgttccttcccccgcaatgtgcccccagacgcacgtgggtcttcagggggccaggtgcacagacgtccctccacgttcacccctccacccttggactttcttttcgccgtggctgcggcacccttgcgcttttgctggtcactgccatggaggcacacagctgcagagacagagaggacgtgggcggcagagaggactgttgacatccaagcttcctttgtttttttttcctgtccttctctcacctcctaaagtagacttcatttttcctaacaggattagacagtcaaggagtggcttactacatgtgggagcttttggtatgtgacatgcgggctgggcagctgttagagtccaacgtggggcagcacagagagggggccacctccccaggccgtggctgcccacacaccccaattagctgaattcgcgtgtggcagagggaggaaaaggaggcaaacgtgggctgggcaatggcctcacataggaaacagggtcttcctggagatttggtgatggagatgtcaagcaggtggcctctggacgtcaccgttgccctgcatggtggccccagagcagcctctatgaacaacctcgtttccaaaccacagcccacagccggagagtccaggaagacttgcgcactcagagcagaagggtaggagtcctctagacagcctcgcagccgcgccagtcgcccatagacactggctgtgaccgggcgtgctggcagcggcagtgcacagtggccagcactaaccctccctgagaagataaccggctcattcacttcctcccagaagacgcgtggtagcgagtaggcacaggcgtgcacctgctcccgaattactcaccgagacacacgggctgagcagacggccccgtggatggagacaaagagctcttctgaccatatccttcttaacacccgctggcatctcctttcgcgcctccctccctaacctactgacccaccttttgattttagcgcacctgtgattgataggccttccaaagagtcccacgctggcatcaccctccccgaggacggagatgaggagtagtcagcgtgatgccaaaacgcgtcttcttaatccaattctaattctgaatgtttcgtgtgggcttaataccatgtctattaatatatagcctcgatgatgagagagttacaaagaacaaaactccagacacaaacctccaaatttttcagcagaagcactctgcgtcgctgagctgaggtcggctctgcgatccatacgtggccgcacccacacagcacgtgctgtgacgatggctgaacggaaagtgtacactgttcctgaatattgaaataaaacaataaacttttaatggta

SEQ ID NO: 322594 - DNA, 2038 bp, Homo sapiens
ccaggatttggctacggaggcagagcgtccgactataaatcggctcacaagggattcaagggagtcgatgcccaggggcacagagacacgggcatccttgactccatcgggcgcttctttggcggtgacaggggtgcgcccaagcggggctctggcaaggactcacaccacccggcaagaactgctcactacggctccctgccccagaagtcacacggccggacccaagatgaaaaccccgtagtccacttcttcaagaacattgtgacgcctcgcacaccacccccgtcgcagggaaaggggagaggactgtccctgagcagatttagctggggggccgaaggccagagaccaggatttggctacggaggcagagcgtccgactataaatcggctcacaagggattcaagggagtcgatgcccagggcacgctttccaaaatttttaagctgggaggaagagatagtcgctctggatcacccatggctagacgctgaaaacccacctggttccggaatcctgtcctcagcttcttaatataactgccttaaaactttaatcccacttgcccctgttacctaattagagcagatgacccctcccctaatgcctgcggagttgtgcacgtagtagggtcaggccacggcagcctaccggcaatttccggccaacagttaaatgagaacatgaaaacagaaaacggttaaaagcacgtgggtcttcagggggccaggtgcacagacgtccctccacgttcacccctccacccttggactttcttttcgccgtggctgcggcacccttgcgcttttgctggtcactgccatggaggcacacagctgcagagacagagaggacgtgggcggcagagaggactgttgacatccaagcttcctttgtttttttttcctgtccttctctcacctcctaaagtagacttcatttttcctaacaggattagacagtcaaggagtggcttactacatgtgggagcttttggtatgtgacatgcgggctgggcagctgttagagtccaacgtggggcagcacagagagggggccacctccccaggccgtggctgcccacacaccccaattagctgaattcgcgtgtggcagagggaggaaaaggaggcaaacgtgggctgggcaatggcctcacataggaaacagggtcttcctggagatttggtgatggagatgtcaagcaggtggcctctggacgtcaccgttgccctgcatggtggccccagagcagcctctatgaacaacctcgtttccaaaccacagcccacagccggagagtccaggaagacttgcgcactcagagcagaagggtaggagtcctctagacagcctcgcagccgcgccagtcgcccatagacactggctgtgaccgggcgtgctggcagcggcagtgcacagtggccagcactaaccctccctgagaagataaccggctcattcacttcctcccagaagacgcgtggtagcgagtaggcacaggcgtgcacctgctcccgaattactcaccgagacacacgggctgagcagacggccccgtggatggagacaaagagctcttctgaccatatccttcttaacacccgctggcatctcctttcgcgcctccctccctaacctactgacccaccttttgattttagcgcacctgtgattgataggccttccaaagagtcccacgctggcatcaccctccccgaggacggagatgaggagtagtcagcgtgatgccaaaacgcgtcttcttaatccaattctaattctgaatgtttcgtgtgggcttaataccatgtctattaatatatagcctcgatgatgagagagttacaaagaacaaaactccagacacaaacctccaaatttttcagcagaagcactctgcgtcgctgagctgaggtcggctctgcgatccatacgtggccgcacccacacagcacgtgctgtgacgatggctgaacggaaagtgtacactgttcctgaatattgaaataaaacaataaacttttaatggta

SEQ ID NO: 322595 - DNA, 2401 bp, Homo sapiens
  misc_feature (2231)..(2231): n is a, c, g, or t
ccaggatttggctacggaggcagagcgtccgactataaatcggctcacaagggattcaagggagtcgatgcccaggggcacagagacacgggcatccttgactccatcgggcgcttctttggcggtgacaggggtgcgcccaagcggggctctggcaaggactcacaccacccggcaagaactgctcactacggctccctgccccagaagtcacacggccggacccaagatgaaaaccccgtagtccacttcttcaagaacattgtgacgcctcgcacaccacccccgtcgcagggaaaggggagaggactgtccctgagcagatttagctggggggccgaaggccagagaccaggatttggctacggaggcagagcgtccgactataaatcggctcacaagggattcaagggagtcgatgcccagggcacgctttccaaaatttttaagctgggaggaagagatagtcgctctggatcacccatggctagacgctgaaaacccacctggttccggaatcctgtcctcagcttcttaatataactgccttaaaactttaatcccacttgcccctgttacctaattagagcagatgacccctcccctaatgcctgcggagttgtgcacgtagtagggtcaggccacggcagcctaccggcaatttccggccaacagttaaatgagaacatgaaaacagaaaacggttaaaactgtccctttctgtgtgaagatcacgttccttcccccgcaatgtgcccccagacgcacgtgggtcttcagggggccaggtgcacagacgtccctccacgttcacccctccacccttggactttcttttcgccgtggctgcggcacccttgcgcttttgctggtcactgccatggaggcacacagctgcagagacagagaggacgtgggcggcagagaggactgttgacatccaagcttcctttgtttttttttcctgtccttctctcacctcctaaagtagacttcatttttcctaacaggattagacagtcaaggagtggcttactacatgtgggagcttttggtatgtgacatgcgggctgggcagctgttagagtccaacgtggggcagcacagagagggggccacctccccaggccgtggctgcccacacaccccaattagctgaattcgcgtgtggcagagggaggaaaaggaggcaaacgtgggctgggcaatggcctcacataggaaacagggtcttcctggagatttggtgatggagatgtcaagcaggtggcctctggacgtcaccgttgccctgcatggtggccccagagcagcctctatgaacaacctcgtttccaaaccacagcccacagccggagagtccaggaagacttgcgcactcagagcagaagggtaggagtcctctagacagcctcgcagccgcgccagtcgcccatagacactggctgtgaccgggcgtgctggcagcggcagtgcacagtggccagcactaaccctccctgagaagataaccggctcattcacttcctcccagaagacgcgtggtagcgagtaggcacaggcgtgcacctgctcccgaattactcaccgagacacacgggctgagcagacggccccgtggatggagacaaagagctcttctgaccatatccttcttaacacccgctggcatctcctttcgcgcctccctccctaacctactgacccaccttttgattttagcgcacctgtgattgataggccttccaaagagtcccacgctggcatcaccctccccgaggacggagatgaggagtagtcagcgtgatgccaaaacgcgtcttcttaatccaattctaattctgaatgtttcgtgtgggcttaataccatgtctattaatatatagcctcgatgatgagagagttacaaagaacaaaactccagacacaaacctccaaatttttcagcagaagcactctgcgtcgctgagctgaggtcggctctgcgatccatacgtggccgcacccacacagcacgtgctgtgacgatggctgaacggaaagtgtacactgttcctgaatattgaaataaaacaataaacttttaatggtaaaaaaaaaacgcgcctttcgcgcttctgccgtggccctctgcgggccgctccgccggtgctgtccctgggcgcctccgtgctctcagccaaccgcctctgagagcgcccactcgagcgccccgggagccagagggcggnggtcctcgccgggacccttctgtgggcccagggggtgagcagggcagcatttccttctcccactgctgctgagatggcagaaattagtcgaattcagtacgaaatggaatatactgaaggcattagtcagcgaatgagggtcccagagttagtagtagcccgcccgctgc

SEQ ID NO: 322596 - DNA, 2334 bp, Homo sapiens
  misc_feature (2181)..(2181): n is a, c, g, or t
  misc_feature (2220)..(2220): n is a, c, g, or t
ccaggatttggctacggaggcagagcgtccgactataaatcggctcacaagggattcaagggagtcgatgcccaggggcacagagacacgggcatccttgactccatcgggcgcttctttggcggtgacaggggtgcgcccaagcggggctctggcaaggactcacaccacccggcaagaactgctcactacggctccctgccccagaagtcacacggccggacccaagatgaaaaccccgtagtccacttcttcaagaacattgtgacgcctcgcacaccacccccgtcgcagggaaaggggagaggactgtccctgagcagatttagctggggggccgaaggccagagaccaggatttggctacggaggcagagcgtccgactataaatcggctcacaagggattcaagggagtcgatgcccagggcacgctttccaaaatttttaagctgggaggaagagatagtcgctctggatcacccatggctagacgctgaaaacccacctggttccggaatcctgtcctcagcttcttaatataactgccttaaaactttaatcccacttgcccctgttacctaattagagcagatgacccctcccctaatgcctgcggagttgtgcacgtagtagggtcaggccacggcagcctaccggcaatttccggccaacagttaaatgagaacatgaaaacagaaaacggttaaaactgtccctttctgtgtgaagatcacgttccttcccccgcaatgtgcccccagacgcacgtgggtcttcagggggccaggtgcacagacgtccctccacgttcacccctccacccttggactttcttttcgccgtggctgcggcacccttgcgcttttgctggtcactgccatggaggcacacagctgcagagacagagaggacgtgggcggcagagaggactgttgacatccaagcttcctttgtttttttttcctgtccttctctcacctcctaaagtagacttcatttttcctaacaggattagacagtcaaggagtggcttactacatgtgggagcttttggtatgtgacatgcgggctgggcagctgttagagtccaacgtggggcagcacagagagggggccacctccccaggccgtggctgcccacacaccccaattagctgaattcgcgtgtggcagagggaggaaaaggaggcaaacgtgggctgggcaatggcctcacataggaaacagggtcttcctggagatttggtgatggagatgtcaagcaggtggcctctggacgtcaccgttgccctgcatggtggccccagagcagcctctatgaacaacctcgtttccaaaccacagcccacagccggagagtccaggaagacttgcgcactcagagcagaagggtaggagtcctctagacagcctcgcagccgcgccagtcgcccatagacactggctgtgaccgggcgtgctggcagcggcagtgcacagtggccagcactaaccctccctgagaagataaccggctcattcacttcctcccagaagacgcgtggtagcgagtaggcacaggcgtgcacctgctcccgaattactcaccgagacacacgggctgagcagacggccccgtggatggagacaaagagctcttctgaccatatccttcttaacacccgctggcatctcctttcgcgcctccctccctaacctactgacccaccttttgattttagcgcacctgtgattgataggccttccaaagagtcccacgctggcatcaccctccccgaggacggagatgaggagtagtcagcgtgatgccaaaacgcgtcttcttaatccaattctaattctgaatgtttcgtgtgggcttaataccatgtctattaatatatagcctcgatgatgagagagttacaaagaacaaaactccagacacaaacctccaaatttttcagcagaagcactctgcgtcgctgagctgaggtcggctctgcgatccatacgtggccgcacccacacagcacgtgctgtgacgatggctgaacggaaagtgtacactgttcctgaatattgaaataaaacaataaacttttaatggtaaaaaaaaaaatataaataaaaaaataataaataataaattaaaaaataaaataaaaaatttatatattatatttaaaaattaatattantgtattttttttaaaatattattataattatattatatnttttttttaaatttaatttttaaaaaataacttgaggggggccaaaacccacatttttccttataggagacttttttacattcggttcccacttttaaacaccctaatttggga

SEQ ID NO: 322597 - DNA, 2413 bp, Homo sapiens
ccaggatttggctacggaggcagagcgtccgactataaatcggctcacaagggattcaagggagtcgatgcccaggggcacagagacacgggcatccttgactccatcgggcgcttctttggcggtgacaggggtgcgcccaagcggggctctggcaaggactcacaccacccggcaagaactgctcactacggctccctgccccagaagtcacacggccggacccaagatgaaaaccccgtagtccacttcttcaagaacattgtgacgcctcgcacaccacccccgtcgcagggaaaggggagaggactgtccctgagcagatttagctggggggccgaaggccagagaccaggatttggctacggaggcagagcgtccgactataaatcggctcacaagggattcaagggagtcgatgcccagggcacgctttccaaaatttttaagctgggaggaagagatagtcgctctggatcacccatggctagacgctgaaaacccacctggttccggaatcctgtcctcagcttcttaatataactgccttaaaactttaatcccacttgcccctgttacctaattagagcagatgacccctcccctaatgcctgcggagttgtgcacgtagtagggtcaggccacggcagcctaccggcaatttccggccaacagttaaatgagaacatgaaaacagaaaacggttaaaactgtccctttctgtgtgaagatcacgttccttcccccgcaatgtgcccccagacgcacgtgggtcttcagggggccaggtgcacagacgtccctccacgttcacccctccacccttggactttcttttcgccgtggctgcggcacccttgcgcttttgctggtcactgccatggaggcacacagctgcagagacagagaggacgtgggcggcagagaggactgttgacatccaagcttcctttgtttttttttcctgtccttctctcacctcctaaagtagacttcatttttcctaacaggattagacagtcaaggagtggcttactacatgtgggagcttttggtatgtgacatgcgggctgggcagctgttagagtccaacgtggggcagcacagagagggggccacctccccaggccgtggctgcccacacaccccaattagctgaattcgcgtgtggcagagggaggaaaaggaggcaaacgtgggctgggcaatggcctcacataggaaacagggtcttcctggagatttggtgatggagatgtcaagcaggtggcctctggacgtcaccgttgccctgcatggtggccccagagcagcctctatgaacaacctcgtttccaaaccacagcccacagccggagagtccaggaagacttgcgcactcagagcagaagggtaggagtcctctagacagcctcgcagccgcgccagtcgcccatagacactggctgtgaccgggcgtgctggcagcggcagtgcacagtggccagcactaaccctccctgagaagataaccggctcattcacttcctcccagaagacgcgtggtagcgagtaggcacaggcgtgcacctgctcccgaattactcaccgagacacacgggctgagcagacggccccgtggatggagacaaagagctcttctgaccatatccttcttaacacccgctggcatctcctttcgcgcctccctccctaacctactgacccaccttttgattttagcgcacctgtgattgataggccttccaaagagtcccacgctggcatcaccctccccgaggacggagatgaggagtagtcagcgtgatgccaaaacgcgtcttcttaatccaattctaattctgaatgtttcgtgtgggcttaataccatgtctattaatatatagcctcgatgatgagagagttacaaagaacaaaactccagacacaaacctccaaatttttcagcagaagcactctgcgtcgctgagctgaggtcggctctgcgatccatacgtggccgcacccacacagcacgtgctgtgacgatggctgaacggaaagtgtacactgttcctgaatattgaaataaaacaataaacttttaatggtaaaaaaaaaaaaaaaaaaaagggacatgaggaattttgatacaagcatgtaatgcttattaatcacatcatggaacacagggtatccatcccctcaagcgtttatcctttatattataaacaatctaattctacccttttcattattttaaagtacacaattaagttattattaactatagttaccctgttgtgctatcaaatactaggtaaatttgatcctattttcttgtacccattagccatcaccctcttcctccaagcaccccactacccttcctagcttctgatgactgtgcttctattctctatgtccatgagtt

SEQ ID NO: 322598 - DNA, 2585 bp, Homo sapiens
ccaggatttggctacggaggcagagcgtccgactataaatcggctcacaagggattcaagggagtcgatgcccaggggcacagagacacgggcatccttgactccatcgggcgcttctttggcggtgacaggggtgcgcccaagcggggctctggcaaggactcacaccacccggcaagaactgctcactacggctccctgccccagaagtcacacggccggacccaagatgaaaaccccgtagtccacttcttcaagaacattgtgacgcctcgcacaccacccccgtcgcagggaaaggggagaggactgtccctgagcagatttagctggggggccgaaggccagagaccaggatttggctacggaggcagagcgtccgactataaatcggctcacaagggattcaagggagtcgatgcccagggcacgctttccaaaatttttaagctgggaggaagagatagtcgctctggatcacccatggctagacgctgaaaacccacctggttccggaatcctgtcctcagcttcttaatataactgccttaaaactttaatcccacttgcccctgttacctaattagagcagatgacccctcccctaatgcctgcggagttgtgcacgtagtagggtcaggccacggcagcctaccggcaatttccggccaacagttaaatgagaacatgaaaacagaaaacggttaaaactgtccctttctgtgtgaagatcacgttccttcccccgcaatgtgcccccagacgcacgtgggtcttcagggggccaggtgcacagacgtccctccacgttcacccctccacccttggactttcttttcgccgtggctgcggcacccttgcgcttttgctggtcactgccatggaggcacacagctgcagagacagagaggacgtgggcggcagagaggactgttgacatccaagcttcctttgtttttttttcctgtccttctctcacctcctaaagtagacttcatttttcctaacaggattagacagtcaaggagtggcttactacatgtgggagcttttggtatgtgacatgcgggctgggcagctgttagagtccaacgtggggcagcacagagagggggccacctccccaggccgtggctgcccacacaccccaattagctgaattcgcgtgtggcagagggaggaaaaggaggcaaacgtgggctgggcaatggcctcacataggaaacagggtcttcctggagatttggtgatggagatgtcaagcaggtggcctctggacgtcaccgttgccctgcatggtggccccagagcagcctctatgaacaacctcgtttccaaaccacagcccacagccggagagtccaggaagacttgcgcactcagagcagaagggtaggagtcctctagacagcctcgcagccgcgccagtcgcccatagacactggctgtgaccgggcgtgctggcagcggcagtgcacagtggccagcactaaccctccctgagaagataaccggctcattcacttcctcccagaagacgcgtggtagcgagtaggcacaggcgtgcacctgctcccgaattactcaccgagacacacgggctgagcagacggccccgtggatggagacaaagagctcttctgaccatatccttcttaacacccgctggcatctcctttcgcgcctccctccctaacctactgacccaccttttgattttagcgcacctgtgattgataggccttccaaagagtcccacgctggcatcaccctccccgaggacggagatgaggagtagtcagcgtgatgccaaaacgcgtcttcttaatccaattctaattctgaatgtttcgtgtgggcttaataccatgtctattaatatatagcctcgatgatgagagagttacaaagaacaaaactccagacacaaacctccaaatttttcagcagaagcactctgcgtcgctgagctgaggtcggctctgcgatccatacgtggccgcacccacacagcacgtgctgtgacgatggctgaacggaaagtgtacactgttcctgaatattgaaataaaacaataaacttttaatggtaaaaaaaaaatgagaattccaaaatgccattcaaagagtcttggtcagggaggaaaactaatagggctgcagttcacaaatcaaaacacgagggcccgcaccaagattcattgatcgcagccttgggaatgaaactggggtcttcaaagtgggttgtgacaatctggcaacctttgaaaccctttgcttattcccagttggcttcccttgttagaaagagcactttgaaagaaaaccggcgaatttcatagtgtgggctcacacatttcaaggtggctaccattaagggggcacccttggggtgatccccgtgccacctttagtggggcccattggtcacggtgtgaaagtcccgatagtggatgaaggttctaactcggttccaaagcgcccaaataatggtgtccaattggcgcctgccaaacgggcgccgccggacctttaccctcgggcccatcctcttgcacatgcggcaccactccctcggggttgct

SEQ ID NO: 322599 - DNA, 2058 bp, Homo sapiens
ccaggatttggctacggaggcagagcgtccgactataaatcggctcacaagggattcaagggagtcgatgcccaggggcacagagacacgggcatccttgactccatcgggcgcttctttggcggtgacaggggtgcgcccaagcggggctctggcaaggactcacaccacccggcaagaactgctcactacggctccctgccccagaagtcacacggccggacccaagatgaaaaccccgtagtccacttcttcaagaacattgtgacgcctcgcacaccacccccgtcgcagggaaaggggagaggactgtccctgagcagatttagctggggggccgaaggccagagaccaggatttggctacggaggcagagcgtccgactataaatcggctcacaagggattcaagggagtcgatgcccagggcacgctttccaaaatttttaagctgggaggaagagatagtcgctctggatcacccatggctagacgctgaaaacccacctggttccggaatcctgtcctcagcttcttaatataactgccttaaaactttaatcccacttgcccctgttacctaattagagcagatgacccctcccctaatgcctgcggagttgtgcacgtagtagggtcaggccacggcagcctaccggcaatttccggccaacagttaaatgagaacatgaaaacagaaaacggttaaaactgtccctttctgtgtgaagatcacgttccttcccccgcaatgtgcccccagacgcacgtgggtcttcagggggccaggtgcacagacgtccctccacgttcacccctccacccttggactttcttttcgccgtggctgcggcacccttgcgcttttgctggtcactgccatggaggcacacagctgcagagacagagaggacgtgggcggcagagaggactgttgacatccaagcttcctttgtttttttttcctgtccttctctcacctcctaaagtagacttcatttttcctaacaggattagacagtcaaggagtggcttactacatgtgggagcttttggtatgtgacatgcgggctgggcagctgttagagtccaacgtggggcagcacagagagggggccacctccccaggccgtggctgcccacacaccccaattagctgaattcgcgtgtggcagagggaggaaaaggaggcaaacgtgggcctggagatttggtgatggagatgtcaagcaggtggcctctggacgtcaccgttgccctgcatggtggccccagagcagcctctatgaacaacctcgtttccaaaccacagcccacagccggagagtccaggaagacttgcgcactcagagcagaagggtaggagtcctctagacagcctcgcagccgcgccagtcgcccatagacactggctgtgaccgggcgtgctggcagcggcagtgcacagtggccagcactaaccctccctgagaagataaccggctcattcacttcctcccagaagacgcgtggtagcgagtaggcacaggcgtgcacctgctcccgaattactcaccgagacacacgggctgagcagacggccccgtggatggagacaaagagctcttctgaccatatccttcttaacacccgctggcatctcctttcgcgcctccctccctaacctactgacccaccttttgattttagcgcacctgtgattgataggccttccaaagagtcccacgctggcatcaccctccccgaggacggagatgaggagtagtcagcgtgatgccaaaacgcgtcttcttaatccaattctaattctgaatgtttcgtgtgggcttaataccatgtctattaatatatagcctcgatgatgagagagttacaaagaacaaaactccagacacaaacctccaaatttttcagcagaagcactctgcgtcgctgagctgaggtcggctctgcgatccatacgtggccgcacccacacagcacgtgctgtgacgatggctgaacggaaagtgtacactgttcctgaatattgaaataaaacaataaacttttaatggta

SEQ ID NO: 322600 - DNA, 2041 bp, Homo sapiens
ccaggatttggctacggaggcagagcgtccgactataaatcggctcacaagggattcaagggagtcgatgcccaggggcacagagacacgggcatccttgactccatcgggcgcttctttggcggtgacaggggtgcgcccaagcggggctctggcaaggactcacaccacccggcaagaactgctcactacggctccctgccccagaagtcacacggccggacccaagatgaaaaccccgtagtccacttcttcaagaacattgtgacgcctcgcacaccacccccgtcgcagggaaaggggagaggactgtccctgagcagatttagctggggggccgaaggccagagaccaggatttggctacggaggcagagcgtccgactataaatcggctcacaagggattcaagggagtcgatgcccagggcacgctttccaaaatttttaagctgggaggaagagatagtcgctctggatcacccatggctagacgctgaaaacccacctggttccggaatcctgtcctcagcttcttaatataactgccttaaaactttaatcccacttgcccctgttacctaattagagcagatgacccctcccctaatgcctgcggagttgtgcacgtagtagggtcaggccacggcagcctaccggcaatttccggccaacagttaaatgagaacatgaaaacagaaaacggttaaaactgtccctttctgtgtgaagatcacgttccttcccccgcaatgtgcccccagacgcacgtgggtcttcagggggccaggtgcacagacgtccctccacgttcacccctccacccttggactttcttttcgccgtggctgcggcacccttgcgcttttgctggtcactgccatggaggcacacagctgcagagacagagaggacgtgggcggcagagaggactgttgacatccaagcttcctttgtttttttttcctgtccttctctcacctcctaaagtagacttcatttttcctaacaggattagacagtcaaggagtggcttactacatgtgggagcttttggtatgtgacatgcgggctgggcagctgttagagtccaacgtggggcagcacagagagggggccacctccccaggccgtggctgcccacacaccccaattagctgaattcgcgtgtggcagagggaggaaaaggaggcaaacgtgggctgggcaatggcctcacataggaaacagggtcttcctggagatttggtgatggagatgtcaagcaggtggcctctggacgtcaccgttgccctgcatggtggccccagagcagcctctatgaacaacctcgtttccaaaccacagcccacagccggagagtccaggaagacttgcgcactcagagcagaagggtaggagtcctctagagctggcagcggcagtgcacagtggccagcactaaccctccctgagaagataaccggctcattcacttcctcccagaagacgcgtggtagcgagtaggcacaggcgtgcacctgctcccgaattactcaccgagacacacgggctgagcagacggccccgtggatggagacaaagagctcttctgaccatatccttcttaacacccgctggcatctcctttcgcgcctccctccctaacctactgacccaccttttgattttagcgcacctgtgattgataggccttccaaagagtcccacgctggcatcaccctccccgaggacggagatgaggagtagtcagcgtgatgccaaaacgcgtcttcttaatccaattctaattctgaatgtttcgtgtgggcttaataccatgtctattaatatatagcctcgatgatgagagagttacaaagaacaaaactccagacacaaacctccaaatttttcagcagaagcactctgcgtcgctgagctgaggtcggctctgcgatccatacgtggccgcacccacacagcacgtgctgtgacgatggctgaacggaaagtgtacactgttcctgaatattgaaataaaacaataaacttttaatggta

SEQ ID NO: 322601 - DNA, 2037 bp, Homo sapiens
ccaggatttggctacggaggcagagcgtccgactataaatcggctcacaagggattcaagggagtcgatgcccaggggcacagagacacgggcatccttgactccatcgggcgcttctttggcggtgacaggggtgcgcccaagcggggctctggcaaggactcacaccacccggcaagaactgctcactacggctccctgccccagaagtcacacggccggacccaagatgaaaaccccgtagtccacttcttcaagaacattgtgacgcctcgcacaccacccccgtcgcagggaaaggggagaggactgtccctgagcagatttagctggggggccgaaggccagagaccaggatttggctacggaggcagagcgtccgactataaatcggctcacaagggattcaagggagtcgatgcccagggcacgctttccaaaatttttaagctgggaggaagagatagtcgctctggatcacccatggctagacgctgaaaacccacctggttccggaatcctgtcctcagcttcttaatataactgccttaaaactttaatcccacttgcccctgttacctaattagagcagatgacccctcccctaatgcctgcggagttgtgcacgtagtagggtcaggccacggcagcctaccggcaatttccggccaacagttaaatgagaacatgaaaacagaaaacggttaaaactgtccctttctgtgtgaagatcacgttccttcccccgcaatgtgcccccagacgcacgtgggtcttcagggggccaggtgcacagacgtccctccacgttcacccctccacccttggactttcttttcgccgtggctgcggcacccttgcgcttttgctggtcactgccatggaggcacacagctgcagagacagagaggacgtgggcggcagagaggactgttgacatccaagcttcctttgtttttttttcctgtccttctctcacctcctaaagtagacttcatttttcctaacaggattagacagtcaaggagtggcttactacatgtgggagcttttggtatgtgacatgcgggctgggcagctgttagagtccaacgtggggcagcacagagagggggccacctccccaggccgtggctgcccacacaccccaattagctgaattcgcgtgtggcagagggaggaaaaggaggcaaacgtgggctgggcaatggcctcacataggaaacagggtcttcctggagatttggtgatggagatgtcaagcaggtggcctctggacgtcaccgttgccctgcatggtggccccagagcagcctctatgaacaacctcgtttccaaaccacagcccacagccggagagtccaggaagacttgcgcactcagagcagaagggtaggagtcctctagacagcctcgcagccgcgccagtcgcccatagacactggctgtgaccgggcgtgctggcagcggcagtgcacagtggccagcactaaccctccctgagaagataaccggctcattcacttcctcccagaagacgcgtggtagcgagtaggcacaggcgtgcacctgctcccgaattactcaccgagacacacgggctgagcagacggccccgtggatggagacaaagagctcttctgaccatatccttcttaacacccgctggcatctcctttcgcgcctccctccctaacctactgacccaccttttgattttagcgcacctgtgattgataggccttccaaagagtcccacgctggcatcaccctccccgaggacggagatgaggagtagtcagcgtgatgccaaaacgcgtcttcttaatccaattctaattctgaatgtttcgtgtgggcttaataccatgtctattaatatatagcctcgatgatgagagagttacaaagaacactgaggtcggctctgcgatccatacgtggccgcacccacacagcacgtgctgtgacgatggctgaacggaaagtgtacactgttcctgaatattgaaataaaacaataaacttttaatggta

SEQ ID NO: 322602 - DNA, 2030 bp, Homo sapiens
  misc_feature (1917)..(1917): n is a, c, g, or t
  misc_feature (1921)..(1921): n is a, c, g, or t
  misc_feature (1932)..(1932): n is a, c, g, or t
  misc_feature (1934)..(1935): n is a, c, g, or t
  misc_feature (1941)..(1941): n is a, c, g, or t
  misc_feature (1954)..(1954): n is a, c, g, or t
  misc_feature (1958)..(1958): n is a, c, g, or t
  misc_feature (1960)..(1960): n is a, c, g, or t
  misc_feature (1963)..(1963): n is a, c, g, or t
  misc_feature (1965)..(1965): n is a, c, g, or t
ccaggatttggctacggaggcagagcgtccgactataaatcggctcacaagggattcaagggagtcgatgcccaggggcacagagacacgggcatccttgactccatcgggcgcttctttggcggtgacaggggtgcgcccaagcggggctctggcaaggactcacaccacccggcaagaactgctcactacggctccctgccccagaagtcacacggccggacccaagatgaaaaccccgtagtccacttcttcaagaacattgtgacgcctcgcacaccacccccgtcgcagggaaaggggagaggactgtccctgagcagatttagctggggggccgaaggccagagaccaggatttggctacggaggcagagcgtccgactataaatcggctcacaagggattcaagggagtcgatgcccagggcacgctttccaaaatttttaagctgggaggaagagatagtcgctctggatcacccatggctagacgctgaaaacccacctggttccggaatcctgtcctcagcttcttaatataactgccttaaaactttaatcccacttgcccctgttacctaattagagcagatgacccctcccctaatgcctgcggagttgtgcacgtagtagggtcaggccacggcagcctaccggcaatttccggccaacagttaaatgagaacatgaaaacagaaaacggttaaaactgtccctttctgtgtgaagatcacgttccttcccccgcaatgtgcccccagacgcacgtgggtcttcagggggccaggtgcacagacgtccctccacgttcacccctccacccttggactttcttttcgccgtggctgcggcacccttgcgcttttgctggtcactgccatggaggcacacagctgcagagacagagaggacgtgggcggcagagaggactgttgacatccaagcttcctttgtttttttttcctgtccttctctcacctcctaaagtagacttcatttttcctaacaggattagacagtcaaggagtggcttactacatgtgggagcttttggtatgtgacatgcgggctgggcagctgttagagtccaacgtggggcagcacagagagggggccacctccccaggccgtggctgcccacacaccccaattagctgaattcgcgtgtggcagagggaggaaaaggaggcaaacgtgggctgggcaatggcctcacataggaaacagggtcttcctggagatttggtgatggagatgtcaagcaggtggcctctggacgtcaccgttgccctgcatggtggccccagagcagcctctatgaacaacctcgtttccaaaccacagcccacagccggagagtccaggaagacttgcgcactcagagcagaagggtaggagtcctctagacagcctcgcagccgcgccagtcgcccatagacactggctgtgaccgggcgtgctggcagcggcagtgcacagtggccagcactaaccctccctgagaagataaccggctcattcacttcctcccagaagacgcgtggtagcgagtaggcacaggcgtgcacctgctcccgaattactcaccgagacacacgggctgagcagacggccccgtggatggagacaaagagctcttctgaccatatccttcttaacacccgctggcatctcctttcgcgcctccctccctaacctactgacccaccttttgattttagcgcacctgtgattgataggccttccaaagagtcccacgctggcatcaccctccccgaggacggagatgaggagtagtcagcgtgatgccaaaacgcgtcttcttaatccaattctaattctgaatgtttcgtgtgggcttaataccatgtctattaatatatagcctcgatgatgagagagttacaaagaacagntacncgggaggctgngnngggagnactgcttgaaccngggngncanangttgcggtgggccgggatcgcgccactgcactccagcctgggcaacagagtgagactctgtctca

SEQ ID NO: 322603 - DNA, 1892 bp, Homo sapiens
  misc_feature (1865)..(1865): n is a, c, g, or t
ccaggatttggctacggaggcagagcgtccgactataaatcggctcacaagggattcaagggagtcgatgcccaggggcacagagacacgggcatccttgactccatcgggcgcttctttggcggtgacaggggtgcgcccaagcggggctctggcaaggactcacaccacccggcaagaactgctcactacggctccctgccccagaagtcacacggccggacccaagatgaaaaccccgtagtccacttcttcaagaacattgtgacgcctcgcacaccacccccgtcgcagggaaaggggagaggactgtccctgagcagatttagctggggggccgaaggccagagaccaggatttggctacggaggcagagcgtccgactataaatcggctcacaagggattcaagggagtcgatgcccagggcacgctttccaaaatttttaagctgggaggaagagatagtcgctctggatcacccatggctagacgctgaaaacccacctggttccggaatcctgtcctcagcttcttaatataactgccttaaaactttaatcccacttgcccctgttacctaattagagcagatgacccctcccctaatgcctgcggagttgtgcacgtagtagggtcaggccacggcagcctaccggcaatttccggccaacagttaaatgagaacatgaaaacagaaaacggttaaaactgtccctttctgtgtgaagatcacgttccttcccccgcaatgtgcccccagacgcacgtgggtcttcagggggccaggtgcacagacgtccctccacgttcacccctccacccttggactttcttttcgccgtggctgcggcacccttgcgcttttgctggtcactgccatggaggcacacagctgcagagacagagaggacgtgggcggcagagaggactgttgacatccaagcttcctttgtttttttttcctgtccttctctcacctcctaaagtagacttcatttttcctaacaggattagacagtcaaggagtggcttactacatgtgggagcttttggtatgtgacatgcgggctgggcagctgttagagtccaacgtggggcagcacagagagggggccacctccccaggccgtggctgcccacacaccccaattagctgaattcgcgtgtggcagagggaggaaaaggaggcaaacgtgggctgggcaatggcctcacataggaaacagggtcttcctggagatttggtgatggagatgtcaagcaggtggcctctggacgtcaccgttgccctgcatggtggccccagagcagcctctatgaacaacctcgtttccaaaccacagcccacagccggagagtccaggaagacttgcgcactcagagcagaagggtaggagtcctctagacagcctcgcagccgcgccagtcgcccatagacactggctgtgaccgggcgtgctggcagcggcagtgcacagtggccagcactaaccctccctgagaagataaccggctcattcacttcctcccagaagacgcgtggtagcgagtaggcacaggcgtgcacctgctcccgaattactcaccgagacacacgggctgagcagacggccccgtggatggagacaaagagctcttctgaccatatccttcttaacacccgctggcatctcctttcgcgcctccctccctaacctactgacccaccttttgattttagcgcacctgtgattgataggccttccaaagagtcccacgctggcatcaccctccccgaggacggagatgaggagtagtcagcgtgatgccaaaacgcgtcttcttaatccaattctaattctgaatgtttcgtgtgggcacacnttatggagggatcctctagaacaccca

SEQ ID NO: 322604 - DNA, 2004 bp, Homo sapiens
ccaggatttggctacggaggcagagcgtccgactataaatcggctcacaagggattcaagggagtcgatgcccaggggcacagagacacgggcatccttgactccatcgggcgcttctttggcggtgacaggggtgcgcccaagcggggctctggcaaggactcacaccacccggcaagaactgctcactacggctccctgccccagaagtcacacggccggacccaagatgaaaaccccgtagtccacttcttcaagaacattgtgacgcctcgcacaccacccccgtcgcagggaaaggggagaggactgtccctgagcagatttagctggggggccgaaggccagagaccaggatttggctacggaggcagagcgtccgactataaatcggctcacaagggattcaagggagtcgatgcccagggcacgctttccaaaatttttaagctgggaggaagagatagtcgctctggatcacccatggctagacgctgaaaacccacctggttccggaatcctgtcctcagcttcttaatataactgccttaaaactttaatcccacttgcccctgttacctaattagagcagatgacccctcccctaatgcctgcggagttgtgcacgtagtagggtcaggccacggcagcctaccggcaatttccggccaacagttaaatgagaacatgaaaacagaaaacggttaaaactgtccctttctgtgtgaagatcacgttccttcccccgcaatgtgcccccagacgcacgtgggtcttcagggggccaggtgcacagacgtccctccacgttcacccctccacccttggactttcttttcgccgtggctgcggcacccttgcgcttttgctggtcactgccatggaggcacacagctgcagagacagagaggacgtgggcggcagagaggactgttgacatccaagcttcctttgtttttttttcctgtccttctctcacctcctaaagtagacttcatttttcctaacaggattagacagtcaaggagtggcttactacatgtgggagcttttggtatgtgacatgcgggctgggcagctgttagagtccaacgtggggcagcacagagagggggccacctccccaggccgtggctgcccacacaccccaattagctgaattcgcgtgtggcagagggaggaaaaggaggcaaacgtgggctgggcaatggcctcacataggaaacagggtcttcctggagatttggtgatggagatgtcaagcaggtggcctctggacgtcaccgttgccctgcatggtggccccagagcagcctctatgaacaacctcgtttccaaaccacagcccacagccggagagtccaggaagacttgcgcactcagagcagaagggtaggagtcctctagacagcctcgcagccgcgccagtcgcccatagacactggctgtgaccgggcgtgctggcagcggcagtgcacagtggccagcactaaccctccctgagaagataaccggctcattcacttcctcccagaagacgcgtggtagcgagtaggcacaggcgtgcacctgctcccgaattactcaccgagacacacgggctgagcagacggccccgtggatggagacaaaagcgcacctgtgattgataggccttccaaagagtcccacgctggcatcaccctccccgaggacggagatgaggagtagtcagcgtgatgccaaaacgcgtcttcttaatccaattctaattctgaatgtttcgtgtgggcttaataccatgtctattaatatatagcctcgatgatgagagagttacaaagaacaaaactccagacacaaacctccaaatttttcagcagaagcactctgcgtcgctgagctgaggtcggctctgcgatccatacgtggccgcacccacacagcacgtgctgtgacgatggctgaacggaaagtgtacactgttcctgaatattgaaataaaacaataaacttttaatggta

SEQ ID NO: 322605 - DNA, 1908 bp, Homo sapiens
ccaggatttggctacggaggcagagcgtccgactataaatcggctcacaagggattcaagggagtcgatgcccaggggcacagagacacgggcatccttgactccatcgggcgcttctttggcggtgacaggggtgcgcccaagcggggctctggcaaggactcacaccacccggcaagaactgctcactacggctccctgccccagaagtcacacggccggacccaagatgaaaaccccgtagtccacttcttcaagaacattgtgacgcctcgcacaccacccccgtcgcagggaaaggggagaggactgtccctgagcagatttagctggggggccgaaggccagagaccaggatttggctacggaggcagagcgtccgactataaatcggctcacaagggattcaagggagtcgatgcccagggcacgctttccaaaatttttaagctgggaggaagagatagtcgctctggatcacccatggctagacgctgaaaacccacctggttccggaatcctgtcctcagcttcttaatataactgccttaaaactttaatcccacttgcccctgttacctaattagagcagatgacccctcccctaatgcctgcggagttgtgcacgtagtagggtcaggccacggcagcctaccggcaatttccggccaacagttaaatgagaacatgaaaacagaaaacggttaaaactgtccctttctgtgtgaagatcacgttccttcccccgcaatgtgcccccagacgcacgtgggtcttcagggggccaggtgcacagacgtccctccacgttcacccctccacccttggactttcttttcgccgtggctgcggcacccttgcgcttttgctggtcactgccatggaggcacacagctgcagagacagagaggacgtgggcggcagagaggactgttgacatccaagcttcctttgtttttttttcctgtccttctctcacctcctaaagtagacttcatttttcctaacaggattagacagtcaaggagtggcttactacatgtgggagcttttggtatgtgacatgcgggctgggcagctgttagagtccaacgtggggcagcacagagagggggccacctccccaggccgtggctgcccacacaccccaattagctgaattcgcgtgtggcagagggaggaaaaggaggcaaacgtgggctgggcaatggcctcacataggaaacagggtcttcctggagatttggtgatggagatgtcaagcaggtggcctctggacgtcaccgttgccctgcatggtggccccagagcagcctctatgaacaacctcgtttccaaaccacagcccacagccggagagtccaggaagacttgcgcactcagagcagaagggtaggagtcctctagacagcctcgcagccgcgccagtcgcccatagacactggctgtgaccgggcgtgctggcagcggcagtgcacagtggccagcactaaccctccctgagaagataaccggctcattcacttcctcccagaagacgcgtggtagcgagtaggcacaggcgtgcacctgctcccgaattactcaccgagacacgacggagatgaggagtagtcagcgtgatgccaaaacgcgtcttcttaatccaattctaattctgaatgtttcgtgtgggcttaataccatgtctattaatatatagcctcgatgatgagagagttacaaagaacaaaactccagacacaaacctccaaatttttcagcagaagcactctgcgtcgctgagctgaggtcggctctgcgatccatacgtggccgcacccacacagcacgtgctgtgacgatggctgaacggaaagtgtacactgttcctgaatattgaaataaaacaataaacttttaatggta

SEQ ID NO: 322606 - DNA, 1323 bp, Homo sapiens
ccaggatttggctacggaggcagagcgtccgactataaatcggctcacaagggattcaagggagtcgatgcccaggggcacagagacacgggcatccttgactccatcgggcgcttctttggcggtgacaggggtgcgcccaagcggggctctggcaaggactcacaccacccggcaagaactgctcactacggctccctgccccagaagtcacacggccggacccaagatgaaaaccccgtagtccacttcttcaagaacattgtgacgcctcgcacaccacccccgtcgcagggaaaggggagaggactgtccctgagcagatttagctggggggccgaaggccagagaccaggatttggctacggaggcagagcgtccgactataaatcggctcacaagggattcaagggagtcgatgcccagggcacgctttccaaaatttttaagctgggaggaagagatagtcgctctggatcacccatggctagacgctgaaaacccacctggttccggaatcctgtcctcagcttcttaatataactgccttaaaactttaatcccacttgcccctgttacctaattggagagtccaggaagacttgcgcactcagagcagaagggtaggagtcctctagacagcctcgcagccgcgccagtcgcccatagacactggctgtgaccgggcgtgctggcagcggcagtgcacagtggccagcactaaccctccctgagaagataaccggctcattcacttcctcccagaagacgcgtggtagcgagtaggcacaggcgtgcacctgctcccgaattactcaccgagacacacgggctgagcagacggccccgtggatggagacaaagagctcttctgaccatatccttcttaacacccgctggcatctcctttcgcgcctccctccctaacctactgacccaccttttgattttagcgcacctgtgattgataggccttccaaagagtcccacgctggcatcaccctccccgaggacggagatgaggagtagtcagcgtgatgccaaaacgcgtcttcttaatccaattctaattctgaatgtttcgtgtgggcttaataccatgtctattaatatatagcctcgatgatgagagagttacaaagaacaaaactccagacacaaacctccaaatttttcagcagaagcactctgcgtcgctgagctgaggtcggctctgcgatccatacgtggccgcacccacacagcacgtgctgtgacgatggctgaacggaaagtgtacactgttcctgaatattgaaataaaacaataaacttttaatggta

SEQ ID NO: 322607 - DNA, 1854 bp, Homo sapiens
ccaggatttggctacggaggcagagcgtccgactataaatcggctcacaagggattcaagggagtcgatgcccaggggcacagagacacgggcatccttgactccatcgggcgcttctttggcggtgacaggggtgcgcccaagcggggctctggcaaggactcacaccacccggcaagaactgctcactacggctccctgccccagaagtcacacggccggacccaagatgaaaaccccgtagtccacttcttcaagaacattgtgacgcctcgcacaccacccccgtcgcagggaaaggggagaggactgtccctgagcagatttagctggggggccgaaggccagagaccaggatttggctacggaggcagagcgtccgactataaatcggctcacaagggattcaagggagtcgatgcccagggcacgctttccaaaatttttaagctgggaggaagagatagtcgctctggatcacccatggctagacgctgaaaacccacctggttccggaatcctgtcctcagcttcttaatataactgccttaaaactttaatcccacttgcccctgttacctaattagagcagatgacccctcccctaatgcctgcggagttgtgcacgtagtagggtcaggccacggcagcctaccggcaatttccggccaacagttaaatgagaacatgaaaacagaaaacggttaaaactgtccctttctgtgtgaagatcacgttccttcccccgcaatgtgcccccagacgcacgtgggtcttcagggggccaggtgcacagacgtccctccacgttcacccctccacccttggactttcttttcgccgtggctgcggcacccttgcgcttttgctggtcactgccatggaggcacacagctgcagagacagagaggacgtgggcggcagagaggactgttgacatccaagcttcctttgtttttttttcctgtccttctctcacctcctaaagtagacttcatttttcctaacaggattagacagtcaaggagtggcttactacatgtgggagcttttggtatgtgacatgcgggctgggcagctgttagagtccaaccaccccaattagctgaattcgcgtgtggcagagggaggaaaaggaggcaaacgtgggctgggcaatggcctcacataggaaacagggtcttcctggagatttggtgatggagatgtcaagcaggtggcctctggacgtcaccgttgccctgcatggtggccccagagcagcctctatgaacaacctcgtttccaaaccacagcccacagccggagagtccaggaagacttgcgcactcagagcagaagggtaggagtcctctagacagcctcgcagccgcgccagtcgcccatagacactggctgtgaccgggcgtgctggcagcggcagtgcacagtggccagcactaaccctccctgagaagataaccggctcattcacttcctcccagcgcacctgtgattgataggccttccaaagagtcccacgctggcatcaccctccccgaggacggagatgaggagtagtcagcgtgatgccaaaacgcgtcttcttaatccaattctaattctgaatgtttcgtgtgggcttaataccatgtctattaatatatagcctcgatgatgagagagttacaaagaacaaaactccagacacaaacctccaaatttttcagcagaagcactctgcgtcgctgagctgaggtcggctctgcgatccatacgtggccgcacccacacagcacgtgctgtgacgatggctgaacggaaagtgtacactgttcctgaatattgaaataaaacaataaacttttaatggta

SEQ ID NO: 322608 - DNA, 1410 bp, Homo sapiens
ccaggatttggctacggaggcagagcgtccgactataaatcggctcacaagggattcaagggagtcgatgcccaggggcacagagacacgggcatccttgactccatcgggcgcttctttggcggtgacaggggtgcgcccaagcggggctctggcaaggactcacaccacccggcaagaactgctcactacggctccctgccccagaagtcacacggccggacccaagatgaaaaccccgtagtccacttcttcaagaacattgtgacgcctcgcacaccacccccgtcgcagggaaaggggagaggactgtccctgagcagatttagctggggggccgaaggccagagaccaggatttggctacggaggcagagcgtccgactataaatcggctcacaagggattcaagggagtcgatgcccagggcacgctttccaaaatttttaagctgggaggaagagatagtcgctctggatcacccatggctagacgctgaaaacccacctggttccggaatcctgtcctcagcttcttaatataactgccttaaaactttaatcccacttgcccctgttacctaattagagcagatgacccctcccctaatgcctgcggagttgtgcacgtagtagggtcaggccacggcagcctaccggcaatttccggccaacagttaaatgagaacatgaaaacagaaaacggttaaaactgtccctttctgtgtgaagatcacgttccttcccccgcaatgtgcccccagacgcacgtgggtcttcagggggccaggtgcacagacgtccctccacgttcacccctccacccttggactttcttttcgccgtggctgcggcacccttgcgcttttgctggtcactgccatggaggcacacagctgcagagacagagaggacgtgggcggcagagaggactgttgacatccaagcttcctttgtttttttttcctgtccttctctcacctcctaaagtagacttcatttttcctaacaggattagacagtcaaggagtggcttactacatgtgggagcttttggtatgtgacatgcgggctgggcagctgttagagtccaacgtggggcagcacagagagggggccacctccccaggccgtggctgcccacacaccccaattagctgaattcgcgtgtggcagagggaggaaaaggaggcaaacgtgggctgggcaatggcctcacataggaaacagggtcttcctggagatttggtgatggagatgtcaagcaggtggcctctggacgtcaccgttgccctgcatggtggccccagagcagcctctatgaacaacctcgtttccaaaccacagcccacagccagagagcgtcaccccacagagagagcgtcacccccaacagagagagcgtcggtacc

SEQ ID NO: 322609 - DNA, 1188 bp, Homo sapiens
ccaggatttggctacggaggcagagcgtccgactataaatcggctcacaagggattcaagggagtcgatgcccaggggcacagagacacgggcatccttgactccatcgggcgcttctttggcggtgacaggggtgcgcccaagcggggctctggcaaggactcacaccacccggcaagaactgctcactacggctccctgccccagaagtcacacggccggacccaagatgaaaaccccgtagtccacttcttcaagaacattgtgacgcctcgcacaccacccccgtcgcagggaaaggggagaggactgtccctgagcagatttagctggggggccgaaggccagagaccaggatttggctacggaggcagagcgtccgactataaatcggctcacaagggattcaagggagtcgatgcccagggcacgctttccaaaatttttaagctgggaggaagagatagtcgctctggatcacccatggctagacgctgaaaacccacctggttccggaatcctgtcctcagcttcttaatataactgccttaaaactttaatcccacttgcccctgttacctaattagagcagatgacccctcccctaatgcctgcggagttgtgcacgtagtagggtcaggccacggcagcctaccggcaatttccggccaacagttaaatgagaacatgaaaacagaaaacggttaaaactgtccctttctgtgtgaagatcacgttccttcccccgcaatgtgcccccagacgcacgtgggtcttcagggggccaggtgcacagacgtccctccacgttcacccagcgcacctgtgattgataggccttccaaagagtcccacgctggcatcaccctccccgaggacggagatgaggagtagtcagcgtgatgccaaaacgcgtcttcttaatccaattctaattctgaatgtttcgtgtgggcttaataccatgtctattaatatatagcctcgatgatgagagagttacaaagaacaaaactccagacacaaacctccaaatttttcagcagaagcactctgcgtcgctgagctgaggtcggctctgcgatccatacgtggccgcacccacacagcacgtgctgtgacgatggctgaacggaaagtgtacactgttcctgaatattgaaataaaacaataaacttttaatggta

SEQ ID NO: 322610 - DNA, 3917 bp, Homo sapiens
ccaggatttggctacggaggcagagcgtccgactataaatcggctcacaagggattcaagggagtcgatgcccaggggcacagagacacgggcatccttgactccatcgggcgcttctttggcggtgacaggggtgcgcccaagcggggctctggcaagaaggtgagctctgaggagtagaggagttttagtttaaatggaaaaagcaaaggagaaatcagtaggtgaactcagccattagaggaagaactggcacgtagcctcttgctgtctaaggtctcgttccgtgctggagaatgcatatgagcccaagagtgtgggcctgagtggctgcttaggacgttttcgtttaactcaccccctcttttcctcacaagggatggtggccggggtgtggctcaggaatgtaaggacatgctgaattctggatctctaagggtgcctggacatgggcgttgcagaaagagagccacattctcagggtctctggtggtgtgtgcttgcggacttgatgactgatgttgcctctgcagcccacacgctggggttcaacactgggttatgctcgttttttcctggagtcagtgctgctagcttcatgttgctctgcgacaatcataggattgaggtcgaggaagacttttgaacaaactcctcaatttaaatccgccttgagcaaacgttctctgtggtctgagaagtggaaggggggagggataaatgagtgtctatgaatcaaagctttattatcttgtgattccattaatttgcatacagagtcttagaagtttctttattcaaaagcaaatgtggataaaaatgtattacaaaaaaaaaaaactctgctatggggtccagagtctaggagtggtttctgcagttgattgtcagtggagaacctgtggctgctggttcatcaaagcgctggtccctgagtgccattcagattgcagatgcagtattttacgtgatgtttagagtgtttggtggttgtgtaattttggagagaaagaagtttttcccaaaaaagtccctagtttattgggtgttctcacacaacctgtaagatgaagctgtttttctgcctgtgtgcagggctgattctggaattccagaaggccttgtgggagcgtaaaaggcttttgaataaagtgtggaacagagcgcctcattctgataacatgcaatcataaaaaccatagggcaacttggagttaaggagtttctagaatttgctttagtctccaactgcaattctttattgatcatgaaattgttgaagagaaacacaaatgtcagttttacctttcctgtgggcgtgaaagcacatcgaagtttcaggcaactgttaacatctctaccatctgtctgagttgagatttcaggttgtgacacttgccgtgacttatttgtaaatgacattttgtgtgtcttagatactaatggaattcatattctggctagttctttcagtgcatttgtagacatgttcttttcctttgtagcagtcctccctcaccctgaaatgttggtgttctaaccgatttctaatgctaatttcaactggaagcactttttcaagcccagctatcaaaccacaccagacatgtatggattcgggttgcccaataaagcgttgctattatgtaagcatccctcacgcatacagcatcaccagttttgaaagcttgaactattctgcttacttcaaggtacagaaaaaaaaaatgtacttaaactgtgcagaaaagatgaaatcactggataatatgtattataaaataagcttcatgtgagtgacactggtttaagttgaaataaaatggtgaaagcattgatatcaatcattgtgactttatctcaaaacaatattgacacacatagatgtttttcttcctttatggtaagattacagcctttattgtcttaaatctcttatactcttcaatattttcaaagaaaacattctagtctcagaaatagtccatctctttgcaaaacagggctggccaattatcaaggacccataaaaatcaaaacactttcaaaaattttaaaaataaaaataattttcacatgattgctttaggaattttgaagtatccattcttttcactatggagtgttgaatatagaagattttttaatgaacaggcttgccctttgatgccaaaggcaaaaaataataataataacatttgcacgtgtgatcacagagcagctgtgaggcatcccgggggagcgcacgcagtggggatgtgattgctccactcaactattttatctagaacgaggttttcctggcagattcctgccagactctgagtggagcccccccatgaccctataaaaggggctgtttgtcctcctcccaccctcctgtgctcttcctccctccccttgagggcacatggccgctggtaccacatgttggagcggccgcccccgagcccgggaatgccctaacaacacccatgcttgtgttgctgggagctgacattcaagaaaagtgcattaaaaattccttgagaaggcatattcttttgagagccgtaaatgaaaagtgcattcacggagaacatgctcctttgttgtgagaggaaagaaaggactgttgttgcctttaaggaacaggtttcccagttccccggaatgtcagggtcacatgaggaatgggtgagcacttagggccaagattgtcgtgtgcttggcccggcagcttctctctaagtgacctctccagcatcactctgtgccagtgctcatatctgaggccacttgagtgtcacgaggcagagcctggaaacattagctttggaaaccgttccttcctttttatgtggaggaagtaaggtttcacaagacacctaagctggacatggtgatgtgccacttggatagttcccaaagcagaaagcagccaggacatcccagtaccccacttctccgtgccgtgtacttttagggaggttttcgaaagctagcttcttaccgatgattttgtctatttttctgttttatgtgaaaaccttcatttataacctgctcttctcagtgttcttctattcagcattcagtatgacttctatgcctctaattgcgactgtatggagaagaactgtttgtcattcagtgccgtgggatataatcagtcctgtaaattcatcagaatgttctgttgcctgattttttttccattgcattttaatttcattaaacatattttagttctacagtaacctaattcctcattgttaccatgagatcctaattctgtagctgtgttctgtaatcccatggggcgtgtaccatttggagacacatgaaggatacagtagacagcacggaaggcagcagcaacacacaggggtgtcctccctccccagagcccagtgtgcacacagaaccaaattcaatctcattcatcgtgagcttgcatggtaactgatccagccactcagtacctccattggataagagatttggccacagattcttctagagaaaatccaaatgtggagggtgcatttgtttctgcacccaaacaaataccttttgagatttcttataggcattcctctcgaagtctcattactctgatcagttattgatcggaggctaccctggctcagtcaccagctgctcactgtgtccttctgtggtctcaggagctgcagttgttgctgttgtatgaatagacgatagttaattagactggatgtgtctgtactggcagtgattttgcaacttcctctgtataagcgatacatttgtaaatcatgggaatgtatttgatggtaattgcctgtggtggttgtatcatgatttaattttattatgagcttttggctttatatatttttctgcctttttatgcattcattaaacagtttaacagaccaaggacagtgtactaa

SEQ ID NO: 322611 - DNA, 798 bp, Homo sapiens
  misc_feature (685)..(685): n is a, c, g, or t
  misc_feature (689)..(689): n is a, c, g, or t
  misc_feature (700)..(700): n is a, c, g, or t
  misc_feature (702)..(703): n is a, c, g, or t
  misc_feature (709)..(709): n is a, c, g, or t
  misc_feature (722)..(722): n is a, c, g, or t
  misc_feature (726)..(726): n is a, c, g, or t
  misc_feature (728)..(728): n is a, c, g, or t
  misc_feature (731)..(731): n is a, c, g, or t
  misc_feature (733)..(733): n is a, c, g, or t
ccaggatttggctacggaggcagagcgtccgactataaatcggctcacaagggattcaagggagtcgatgcccaggggcacagagacacgggcatccttgactccatcgggcgcttctttggcggtgacaggggtgcgcccaagcggggctctggcaaggactcacaccacccggcaagaactgctcactacggctccctgccccagaagtcacacggccggacccaagatgaaaaccccgtagtccacttcttcaagaacattgtgacgcctcgcacaccacccccgtcgcagggaaaggggagaggactgtccctgagcagatttagctggggggccgaaggccagagaccaggatttggctacggaggcagagcgtccgactataaatcggctcacaagggattcaagggagtcgatgcccagggcacgctttccaaaatttttaagctgggaggaagagatagtcgctctggatcacccatggctagacgctgaaaacccacctggttccggaatcctgtcctcagcttcttaatataactgccttaaaactttaatcccacttgcccctgttacctaattagagcagatgacccctcccctaatgcctgcggagttgtgcacgtagtagggtcaggccacggcagcctaccggcaattggcaggagcttgtagtcccagntacncgggaggctgngnngggagnactgcttgaaccngggngncanangttgcggtgggccgggatcgcgccactgcactccagcctgggcaacagagtgagactctgtctca

SEQ ID NO: 322612 - DNA, 714 bp, Homo sapiens
ccaggatttggctacggaggcagagcgtccgactataaatcggctcacaagggattcaagggagtcgatgcccaggggcacagagacacgggcatccttgactccatcgggcgcttctttggcggtgacaggggtgcgcccaagcggggctctggcaaggactcacaccacccggcaagaactgctcactacggctccctgccccagaagtcacacggccggacccaagatgaaaaccccgtagtccacttcttcaagaacattgtgacgcctcgcacaccacccccgtcgcagggaaaggggagaggactgtccctgagcagatttagctggggggccgaaggccagagaccaggatttggctacggaggcagagcgtccgactataaatcggctcacaagggattcaagggagtcgatgcccagggcacgctttccaaaatttttaagctgggaggaagagatagtcgctctggatcacccatggctagacgctgaaaacccacctggttccggaatcctgtcctcagcttcttaatataactgccttaaaactttaatcccacttgcccctgttacctaattagagcagatgacccctcccctaatgcctgcggagttgtgcacccacacagcacgtgctgtgacgatggctgaacggaaagtgtacactgttcctgaatattgaaataaaacaataaacttttaatggta

SEQ ID NO: 322613 - DNA, 1112 bp, Homo sapiens
ccaggatttggctacggaggcagagcgtccgactataaatcggctcacaagggattcaagggagtcgatgcccaggggcacagagacacgggcatccttgactccatcgggcgcttctttggcggtgacaggggtgcgcccaagcggggctctggcaagaaggtgagctctgaggagtagaggagttttagtttaaatggaaaaagcaaaggagaaatcagtaggtgaactcagccattagaggaagaactggcacgtagcctcttgctgtctaaggtctcgttccgtgctggagaatgcatatgagcccaagagtgtgggcctgagtggctgcttaggacgttttcgtttaactcaccccctcttttcctcacaagggatggtggccggggtgtggctcaggaatgtaaggacatgctgaattctggatctctaagggtgcctggacatgggcgttgcagaaagagagccacattctcagggtctctggtggtgtgtgcttgcggacttgatgactgatgttgcctctgcagcccacacgctggggttcaacactgggttatgctcgttttttcctggagtcagtgctgctagcttcatgttgctctgcgacaatcataggattgaggtcgaggaagacttttgaacaaactcctcaatttaaatccgccttgagcaaacgttctctgtggtctgagaagtggaaggggggagggataaatgagtgtctatgaatcaaagctttattatcttgtgattccattaatttgcatacagagtcttagaagtttctttattcaaaagcaaatgtggataaaaatgtattacaaaaaaaaaaaaaaaaaactcctggggctgcattgccctcaacgaccactttgtcaagctcatttcctggtatgacaacgaatttggctacagcaacagggtggtggacctcatggcccacatggcctccaaggagtaagacccctggaccaccagccccagcaagagcacaagaggaagagagagaccctcactgctggggagtccctgccacactcagtcccccaccacactgaatctcccctcctcacagttgccatgtagaccccttgaagaggggaggg

SEQ ID NO: 322614 - DNA, 650 bp, Homo sapiens
ccaggatttggctacggaggcagagcgtccgactataaatcggctcacaagggattcaagggagtcgatgcccaggggcacagagacacgggcatccttgactccatcgggcgcttctttggcggtgacaggggtgcgcccaagcggggctctggcaaggactcacaccacccggcaagaactgctcactacggctccctgccccagaagtcacacggccggacccaagatgaaaaccccgtagtccacttcttcaagaacattgtgacgcctcgcacaccacccccgtcgcagggaaaggggagaggactgtccctgagcagatttagctgggtaggtgacgaacgcacttccatcggcttcctcttccgtcccagtcctcacagccccgcaacttttgtgttctgctctgtttcggttgcttcctggcctccttttctctcctctcgagacctctctgcccacagctgggatcgggccgccttgtcttccactggggaaatgaaacgtggtcttcccttccggaaggtctggtctcttgcttctgtgccggggacccagccctgcaaggccagatcctcttctcccagagggttcccaggcgacgtgactggtctccctcccagggagggagcaacaccacgtccgag

SEQ ID NO: 322615 - DNA, 472 bp, Homo sapiens
atcttgaaaacagatgtgaaactgattatctgataaaaaatttataaagagacaaatgcattacaattattttgttgataaaacaatttatcttaagaaaagggtttgttgtgttttctttttccagaatagtgaaactaacagaggagaatctgaaaaaaagagaaacctgggtgaactttcacggacaacctcagaggacaacgaagtgttcggtaggtgacgcagatatcggcaacatggcgccacatggtgacagcgtgcacctgcactctcactcggggaagcctttgatttttttattgcatgggtgatccatggatctgtctgtactcattactaaaacatagaggctgggatcattgcttcatgtctgtaatcgcacacttcatggggtctatgcaagaggatcgcttgagcccaggagctcaagaccagcccgggcaacacaatgagacctcgtctctacaaa

SEQ ID NO: 322616 - DNA, 457 bp, Homo sapiens
acccccttcagcgtggttgctgccccgtggctcctgaaccactcaccagtccagtccggggcctgggcccttccccggggccctggtggcagctcccagtggctcaagcagcgtgcccagcaccgcgggtggaggttgagctccgtggtcttctcttgcagggggccgaaggccagagaccaggatttggctacggaggcagagcgtccgactataaatcggctcacaagggattcaagggagtcgatgcccagggcacgctttccaaaatttttaagctggtaaggtaccctctgctcagctccactgagcggggactaagggctcccagaatccccaactaagctgagtacaagggtggctgccgcctctggctcagccgcactgtaccctggacgtgctctgtcccagcaggcgtgcaggggctcaggtggcattgcccacccgcatttacgcg

SEQ ID NO: 322617 - DNA, 2092 bp, Homo sapiens
ccaggatttggctacggaggcagagcgtccgactataaatcggctcacaagggattcaagggagtcgatgcccaggggcacagagacacgggcatccttgactccatcgggcgcttctttggcggtgacaggggtgcgcccaagcggggctctggcaaggactcacaccacccggcaagaactgctcactacggctccctgccccagaagtcacacggccggacccaagatgaaaaccccgtagtccacttcttcaagaacattgtgacgcctcgcacaccacccccgtcgcagggaaaggggagaggactgtccctgagcagatttagctggggggccgaaggccagagaccaggatttggctacggaggcagagcgtccgactataaatcggctcacaagggattcaagggagtcgatgcccagggcacgctttccaaaatttttaagctgggaggaagagatagtcgctctggatcacccatggctagacgctgaaaacccacctggttccggaatcctgtcctcagcttcttaatataactgccttaaaactttaatcccacttgcccctgttacctaattagagcagatgacccctcccctaatgcctgcggagttgtgcacgtagtagggtcaggccacggcagcctaccggcaatttccggccaacagttaaatgagaacatgaaaacagaaaacggttaaaactgtccctttctgtgtgaagatcacgttccttcccccgcaatgtgcccccagacgcacgtgggtcttcagggggccaggtgcacagacgtccctccacgttcacccctccacccttggactttcttttcgccgtggctgcggcacccttgcgcttttgctggtcactgccatggaggcacacagctgcagagacagagaggacgtgggcggcagagaggactgttgacatccaagcttcctttgtttttttttcctgtccttctctcacctcctaaagtagacttcatttttcctaacaggattagacagtcaaggagtggcttactacatgtgggagcttttggtatgtgacatgcgggctgggcagctgttagagtccaacgtggggcagcacagagagggggccacctccccaggccgtggctgcccacacaccccaattagctgaattcgcgtgtggcagagggaggaaaaggaggcaaacgtgggctgggcaatggcctcacataggaaacagggtcttcctggagatttggtgatggagatgtcaagcaggtggcctctggacgtcaccgttgccctgcatggtggccccagagcagcctctatgaacaacctcgtttccaaaccacagcccacagccggagagtccaggaagacttgcgcactcagagcagaagggtaggagtcctctagacagcctcgcagccgcgccagtcgcccatagacactggctgtgaccgggcgtgctggcagcggcagtgcacagtggccagcactaaccctccctgagaagataaccggctcattcacttcctcccagaagacgcgtggtagcgagtaggcacaggcgtgcacctgctcccgaattactcaccgagacacacgggctgagcagacggccccgtggatggagacaaagagctcttctgaccatatccttcttaacacccgctggcatctcctttcgcgcctccctccctaacctactgacccaccttttgattttagcgcacctgtgattgataggccttccaaagagtcccacgctggcatcaccctccccgaggacggagatgaggagtagtcagcgtgatgccaaaacgcgtcttcttaatccaattctaattctgaatgtttcgtgtgggcttaataccatgtctattaatatatagcctcgatgatgagagagttacaaagaacaaaactccagacacaaacctccaaatttttcagcagaagcactctgcgtcgctgagctgaggtcggctctgcgatccatacgtggccgcacccacacagcacgtgctgtgacgatggctgaacggaaagtgtacactgttcctgaatattgaaataaaacaataaacttttaatggta

SEQ ID NO: 322618 - DNA, 1952 bp, Homo sapiens
ccaggatttggctacggaggcagagcgtccgactataaatcggctcacaagggattcaagggagtcgatgcccaggggcacagagacacgggcatccttgactccatcgggcgcttctttggcggtgacaggggtgcgcccaagcggggctctggcaaggactcacaccacccggcaagaactgctcactacggctccctgccccagaagtcacacggccggacccaagatgaaaacgtccgactataaatcggctcacaagggattcaagggagtcgatgcccagggcacgctttccaaaatttttaagctgggaggaagagatagtcgctctggatcacccatggctagacgctgaaaacccacctggttccggaatcctgtcctcagcttcttaatataactgccttaaaactttaatcccacttgcccctgttacctaattagagcagatgacccctcccctaatgcctgcggagttgtgcacgtagtagggtcaggccacggcagcctaccggcaatttccggccaacagttaaatgagaacatgaaaacagaaaacggttaaaactgtccctttctgtgtgaagatcacgttccttcccccgcaatgtgcccccagacgcacgtgggtcttcagggggccaggtgcacagacgtccctccacgttcacccctccacccttggactttcttttcgccgtggctgcggcacccttgcgcttttgctggtcactgccatggaggcacacagctgcagagacagagaggacgtgggcggcagagaggactgttgacatccaagcttcctttgtttttttttcctgtccttctctcacctcctaaagtagacttcatttttcctaacaggattagacagtcaaggagtggcttactacatgtgggagcttttggtatgtgacatgcgggctgggcagctgttagagtccaacgtggggcagcacagagagggggccacctccccaggccgtggctgcccacacaccccaattagctgaattcgcgtgtggcagagggaggaaaaggaggcaaacgtgggctgggcaatggcctcacataggaaacagggtcttcctggagatttggtgatggagatgtcaagcaggtggcctctggacgtcaccgttgccctgcatggtggccccagagcagcctctatgaacaacctcgtttccaaaccacagcccacagccggagagtccaggaagacttgcgcactcagagcagaagggtaggagtcctctagacagcctcgcagccgcgccagtcgcccatagacactggctgtgaccgggcgtgctggcagcggcagtgcacagtggccagcactaaccctccctgagaagataaccggctcattcacttcctcccagaagacgcgtggtagcgagtaggcacaggcgtgcacctgctcccgaattactcaccgagacacacgggctgagcagacggccccgtggatggagacaaagagctcttctgaccatatccttcttaacacccgctggcatctcctttcgcgcctccctccctaacctactgacccaccttttgattttagcgcacctgtgattgataggccttccaaagagtcccacgctggcatcaccctccccgaggacggagatgaggagtagtcagcgtgatgccaaaacgcgtcttcttaatccaattctaattctgaatgtttcgtgtgggcttaataccatgtctattaatatatagcctcgatgatgagagagttacaaagaacaaaactccagacacaaacctccaaatttttcagcagaagcactctgcgtcgctgagctgaggtcggctctgcgatccatacgtggccgcacccacacagcacgtgctgtgacgatggctgaacggaaagtgtacactgttcctgaatattgaaataaaacaataaacttttaatggta

SEQ ID NO: 322619 - DNA, 1771 bp, Homo sapiens
ccaggatttggctacggaggcagagcgtccgactataaatcggctcacaagggattcaagggagtcgatgcccaggggcacagagacacgggcatccttgactccatcgggcgcttctttggcggtgacaggggtgcgcccaagcggggctctggcaaggactcacaccacccggcaagaactgctcactacggctccctgccccagaagtcacacggccggacccaagatgaaaaccccgtagtccacttcttcaagaacattagagcagatgacccctcccctaatgcctgcggagttgtgcacgtagtagggtcaggccacggcagcctaccggcaatttccggccaacagttaaatgagaacatgaaaacagaaaacggttaaaactgtccctttctgtgtgaagatcacgttccttcccccgcaatgtgcccccagacgcacgtgggtcttcagggggccaggtgcacagacgtccctccacgttcacccctccacccttggactttcttttcgccgtggctgcggcacccttgcgcttttgctggtcactgccatggaggcacacagctgcagagacagagaggacgtgggcggcagagaggactgttgacatccaagcttcctttgtttttttttcctgtccttctctcacctcctaaagtagacttcatttttcctaacaggattagacagtcaaggagtggcttactacatgtgggagcttttggtatgtgacatgcgggctgggcagctgttagagtccaacgtggggcagcacagagagggggccacctccccaggccgtggctgcccacacaccccaattagctgaattcgcgtgtggcagagggaggaaaaggaggcaaacgtgggctgggcaatggcctcacataggaaacagggtcttcctggagatttggtgatggagatgtcaagcaggtggcctctggacgtcaccgttgccctgcatggtggccccagagcagcctctatgaacaacctcgtttccaaaccacagcccacagccggagagtccaggaagacttgcgcactcagagcagaagggtaggagtcctctagacagcctcgcagccgcgccagtcgcccatagacactggctgtgaccgggcgtgctggcagcggcagtgcacagtggccagcactaaccctccctgagaagataaccggctcattcacttcctcccagaagacgcgtggtagcgagtaggcacaggcgtgcacctgctcccgaattactcaccgagacacacgggctgagcagacggccccgtggatggagacaaagagctcttctgaccatatccttcttaacacccgctggcatctcctttcgcgcctccctccctaacctactgacccaccttttgattttagcgcacctgtgattgataggccttccaaagagtcccacgctggcatcaccctccccgaggacggagatgaggagtagtcagcgtgatgccaaaacgcgtcttcttaatccaattctaattctgaatgtttcgtgtgggcttaataccatgtctattaatatatagcctcgatgatgagagagttacaaagaacaaaactccagacacaaacctccaaatttttcagcagaagcactctgcgtcgctgagctgaggtcggctctgcgatccatacgtggccgcacccacacagcacgtgctgtgacgatggctgaacggaaagtgtacactgttcctgaatattgaaataaaacaataaacttttaatggta

SEQ ID NO: 322620 - DNA, 1822 bp, Homo sapiens
ccaggatttggctacggaggcagagcgtccgactataaatcggctcacaagggattcaagggagtcgatgcccaggggcacagagacacgggcatccttgactccatcgggcgcttctttggcggtgacaggggtgcgcccaagcggggctctggcaaggactcacaccacccggcaagaactgctcactacggctccctgccccagaagtcacacggccggacccaagatgaaaaccccgtagtccacttcttcaagaacattgtgacgcctcgcacaccacccccgtcgcagggaaaggggagaggactgtccctgagcagatttagctggggggccgaaggccagagaccaggatttggctacggaggcagagcgtccgactataaatcggctcacaagggattcaagggagtcgatgcccagggcacgctttccaaaatttttaagctgggaggaagagatagtcgctctggatcacccatggctagacgctgaaaacccacctggttccggaatcctgtcctcagcttcttaatataactgccttaaaactttaatcccacttgcccctgttacctaattccttgcgcttttgctggtcactgccatggaggcacacagctgcagagacagagaggacgtgggcggcagagaggactgttgacatccaagcttcctttgtttttttttcctgtccttctctcacctcctaaagtagacttcatttttcctaacaggattagacagtcaaggagtggcttactacatgtgggagcttttggtatgtgacatgcgggctgggcagctgttagagtccaacgtggggcagcacagagagggggccacctccccaggccgtggctgcccacacaccccaattagctgaattcgcgtgtggcagagggaggaaaaggaggcaaacgtgggctgggcaatggcctcacataggaaacagggtcttcctggagatttggtgatggagatgtcaagcaggtggcctctggacgtcaccgttgccctgcatggtggccccagagcagcctctatgaacaacctcgtttccaaaccacagcccacagccggagagtccaggaagacttgcgcactcagagcagaagggtaggagtcctctagacagcctcgcagccgcgccagtcgcccatagacactggctgtgaccgggcgtgctggcagcggcagtgcacagtggccagcactaaccctccctgagaagataaccggctcattcacttcctcccagaagacgcgtggtagcgagtaggcacaggcgtgcacctgctcccgaattactcaccgagacacacgggctgagcagacggccccgtggatggagacaaagagctcttctgaccatatccttcttaacacccgctggcatctcctttcgcgcctccctccctaacctactgacccaccttttgattttagcgcacctgtgattgataggccttccaaagagtcccacgctggcatcaccctccccgaggacggagatgaggagtagtcagcgtgatgccaaaacgcgtcttcttaatccaattctaattctgaatgtttcgtgtgggcttaataccatgtctattaatatatagcctcgatgatgagagagttacaaagaacaaaactccagacacaaacctccaaatttttcagcagaagcactctgcgtcgctgagctgaggtcggctctgcgatccatacgtggccgcacccacacagcacgtgctgtgacgatggctgaacggaaagtgtacactgttcctgaatattgaaataaaacaataaacttttaatggta

SEQ ID NO: 322621 - DNA, 2168 bp, Homo sapiens
ccaggatttggctacggaggcagagcgtccgactataaatcggctcacaagggattcaagggagtcgatgcccaggggcacagagacacgggcatccttgactccatcgggcgcttctttggcggtgacaggggtgcgcccaagcggggctctggcaaggactcacaccacccggcaagaactgctcactacggctccctgccccagaagtcacacggccggacccaagatgaaaaccccgtagtccacttcttcaagaacattgtgacgcctcgcacaccacccccgtcgcagggaaaggggagaggactgtccctgagcagatttagctggggggccgaaggccagagaccaggatttggctacggaggcagagcgtccgactataaatcggctcacaagggattcaagggagtcgatgcccagggcacgctttccaaaatttttaagctgggaggaagagatagtcgctctggatcacccatggctagacgctgaaaacccacctggttccggaatcctgtcctcagcttcttaatataactgccttaaaactttaatcccacttgcccctgttacctaattagagcagatgacccctcccctaatgcctgcggagttgtgcacgtagtagggtcaggccacggcagcctaccggcaatttccggccaacagttaaatgagaacatgaaaacagaaaacggttaaaactgtccctttctgtgtgaagatcacgttccttcccccgcaatgtgcccccagacgcacgtgggtcttcagggggccaggtgcacagacgtccctccacgttcacccctccacccttggactttcttttcgccgtggctgcggcacccttgcgcttttgctggtcactgccatggaggcacacagctgcagagacagagaggacgtgggcggcagagaggactgttgacatccaagcttcctttgtttttttttcctgtccttctctcacctcctaaagtagacttcatttttcctaacaggattagacagtcaaggagtggcttactacatgtgggagcttttggtatgtgacatgcgggctgggcagctgttagagtccaacgtggggcagcacagagagggggccacctccccaggccgtggctgcccacacaccccaattagctgaattcgcgtgtggcagagggaggaaaaggaggcaaacgtgggctgggcaatggcctcacataggaaacagggtcttcctggagatttggtgatggagatgtcaagcaggtggcctctggacgtcaccgttgccctgcatggtggccccagagcagcctctatgaacaacctcgtttccaaaccacagcccacagccggagagtccaggaagacttgcgcactcagagcagaagggtaggagtcctctagacagcctcgcagccgcgccagtcgcccatagacactggctgtgaccgggcgtgctggcagcggcagtgcacagtggccagcactaaccctccctgagaagataaccggctcattcacttcctcccagaagacgcgtggtagcgagtaggcacaggcgtgcacctgctcccgaattactcaccgagacacacgggctgagcagacggccccgtggatggagacaaagagctcttctgaccatatccttcttaacacccgctggcatctcctttcgcgcctccctccctaacctactgacccaccttttgattttagcgcacctgtgattgataggccttccaaagagtcccacgctggcatcaccctccccgaggacggagatgaggagtagtcagcgtgatgccaaaacgcgtcttcttaatccaattctaattctgaatgtttcgtgtgggcttaataccatgtctattaatatatagcctcgatgatgagagagttacaaagaacaaaactccagacacaaacctccaaatttttcagcagaagcactctgcgtcgctgagctgaggtcggctctgcgatccatacgtggccgcacccacacagcacgtgctgtgacgatggctgaacggaaagtgtacactgttcctgaatattgaaataaaacaataaacttttaatggtaaaaaaaaaacacttgccgccgtttaccacgtcgtgacttggccctgccgttaccactttcgccttgcggtcccctt

SEQ ID NO: 322622 - DNA, 2042 bp, Homo sapiens
ccaggatttggctacggaggcagagcgtccgactataaatcggctcacaagggattcaagggagtcgatgcccaggggcacagagacacgggcatccttgactccatcgggcgcttctttggcggtgacaggggtgcgcccaagcggggctctggcaaggactcacaccacccggcaagaactgctcactacggctccctgccccagaagtcacacggccggacccaagatgaaaaccccgtagtccacttcttcaagaacattgtgacgcctcgcacaccacccccgtcgcagggaaaggggagaggactgtccctgagcagatttagctggggggccgaaggccagagaccaggatttggctacggaggcagagcgtccgactataaatcggctcacaagggattcaagggagtcgatgcccagggcacgctttccaaaatttttaagctgggaggaagagatagtcgctctggatcacccatggctagacgctgaaaacccacctggttccggaatcctgtcctcagcttcttaatataactgccttaaaactttaatcccacttgcccctgttacctaattagagcagatgacccctcccctaatgcctgcggagttgtgcacgtagtagggtcaggccacggcagcctaccggcaatttccggccaacagttaaatgagaacatgaaaacagaaaacggttaaaactgtccctttctgtgtgaagatcacgttccttcccccgcaatgtgcccccagacgcacgtgggtcttcagggggccaggtgcacagacgtccctccacgttcacccctccacccttggactttcttttcgccgtggctgcggcacccttgcgcttttgctggtcactgccatggaggcacacagctgcagagacagagaggacgtgggcggcagagaggactgttgacatccaagcttcctttgtttttttttcctgtccttctctcacctcctaaagtagacttcatttttcctaacaggattagacagtcaaggagtggcttactacatgtgggagcttttggtatgtgacatgcgggctgggcagctgttagagtccaaccaccccaattagctgaattcgcgtgtggcagagggaggaaaaggaggcaaacgtgggctgggcaatggcctcacataggaaacagggtcttcctggagatttggtgatggagatgtcaagcaggtggcctctggacgtcaccgttgccctgcatggtggccccagagcagcctctatgaacaacctcgtttccaaaccacagcccacagccggagagtccaggaagacttgcgcactcagagcagaagggtaggagtcctctagacagcctcgcagccgcgccagtcgcccatagacactggctgtgaccgggcgtgctggcagcggcagtgcacagtggccagcactaaccctccctgagaagataaccggctcattcacttcctcccagaagacgcgtggtagcgagtaggcacaggcgtgcacctgctcccgaattactcaccgagacacacgggctgagcagacggccccgtggatggagacaaagagctcttctgaccatatccttcttaacacccgctggcatctcctttcgcgcctccctccctaacctactgacccaccttttgattttagcgcacctgtgattgataggccttccaaagagtcccacgctggcatcaccctccccgaggacggagatgaggagtagtcagcgtgatgccaaaacgcgtcttcttaatccaattctaattctgaatgtttcgtgtgggcttaataccatgtctattaatatatagcctcgatgatgagagagttacaaagaacaaaactccagacacaaacctccaaatttttcagcagaagcactctgcgtcgctgagctgaggtcggctctgcgatccatacgtggccgcacccacacagcacgtgctgtgacgatggctgaacggaaagtgtacactgttcctgaatattgaaataaaacaataaacttttaatggta

SEQ ID NO: 322623 - DNA, 1904 bp, Homo sapiens
ccaggatttggctacggaggcagagcgtccgactataaatcggctcacaagggattcaagggagtcgatgcccaggggcacagagacacgggcatccttgactccatcgggcgcttctttggcggtgacaggggtgcgcccaagcggggctctggcaaggactcacaccacccggcaagaactgctcactacggctccctgccccagaagtcacacggccggacccaagatgaaaaccccgtagtccacttcttcaagaacattgtgacgcctcgcacaccacccccgtcgcagggaaaggggagaggactgtccctgagcagatttagctggggggccgaaggccagagaccaggatttggctacggaggcagagcgtccgactataaatcggctcacaagggattcaagggagtcgatgcccagggcacgctttccaaaatttttaagctgggaggaagagatagtcgctctggatcacccatggctagacgctgaaaacccacctggttccggaatcctgtcctcagcttcttaatataactgccttaaaactttaatcccacttgcccctgttacctaattagagcagatgacccctcccctaatgcctgcggagttgtgcacgtagtagggtcaggccacggcagcctaccggcaatttccggccaacagttaaatgagaacatgaaaacagaaaacggttaaaactgtccctttctgtgtgaagatcacgttccttcccccgcaatgtgcccccagacgcacgtgggtcttcagggggccaggtgcacagacgtccctccacgttcacccctccacccttggactttcttttcgccgtggctgcggcacccttgcgcttttgctggtcactgccatggaggcacacagctgcagagacagagaggacgtgggcggcagagaggactgttgacatccaagcttcctttgtttttttttcctgtccttctctcacctcctaaagtagacttcatttttcctaacaggattagacagtcaaggagtggcttactacatgtgggagcttttggtatgtgacatgcgggctgggcagctgttagagtccaacgtggggcagcacagagagggggccacctccccaggccgtggctgcccacacaccccaattagctgaattcgcgtgtggcagagggaggaaaaggaggcaaacgtgggctgggcaatggcctcacataggaaacagggtcttcctggagatttggtgatggagatgtcaagcaggtggcctctggacgtcaccgttgccctgcatggtggccccagagcagcctctatgaacaacctcgtttccaaaccacagcccacagccggagagtccaggaagacttgcgcactcagagcagaagggtaggagtcctctagacagcctcgcagccgcgccagtcgcccatagacactggctgtgaccgggcgtgctggcagcggcagtgcacagtggccagcactaaccctccctgagaagataaccggctcattcacttcctcccagcgcacctgtgattgataggccttccaaagagtcccacgctggcatcaccctccccgaggacggagatgaggagtagtcagcgtgatgccaaaacgcgtcttcttaatccaattctaattctgaatgtttcgtgtgggcttaataccatgtctattaatatatagcctcgatgatgagagagttacaaagaacaaaactccagacacaaacctccaaatttttcagcagaagcactctgcgtcgctgagctgaggtcggctctgcgatccatacgtggccgcacccacacagcacgtgctgtgacgatggctgaacggaaagtgtacactgttcctgaatattgaaataaaacaataaacttttaatggta

SEQ ID NO: 322624 - DNA, 1296 bp, Homo sapiens
ccaggatttggctacggaggcagagcgtccgactataaatcggctcacaagggattcaagggagtcgatgcccaggggcacagagacacgggcatccttgactccatcgggcgcttctttggcggtgacaggggtgcgcccaagcggggctctggcaaggactcacaccacccggcaagaactgctcactacggctccctgccccagaagtcacacggccggacccaagatgaaaaccccgtagtccacttcttcaagaacattgtgacgcctcgcacaccacccccgtcgcagggaaaggggagaggactgtccctgagcagatttagctggggggccgaaggccagagaccaggatttggctacggaggcagagcgtccgactataaatcggctcacaagggattcaagggagtcgatgcccagggcacgctttccaaaatttttaagctgggaggaagagatagtcgctctggatcacccatggctagacgctgaaaacccacctggttccggaatcctgtcctcagcttcttaatataactgccttaaaactttaatcccacttgcccctgttacctaattagagcagatgacccctcccctaatgcctgcggagttgtgcacgtagtagggtcaggccacggcagcctaccggcaattgctggcagcggcagtgcacagtggccagcactaaccctccctgagaagataaccggctcattcacttcctcccagaagacgcgtggtagcgagtaggcacaggcgtgcacctgctcccgaattactcaccgagacacacgggctgagcagacggccccgtggatggagacaaagagctcttctgaccatatccttcttaacacccgctggcatctcctttcgcgcctccctccctaacctactgacccaccttttgattttagcgcacctgtgattgataggccttccaaagagtcccacgctggcatcaccctccccgaggacggagatgaggagtagtcagcgtgatgccaaaacgcgtcttcttaatccaattctaattctgaatgtttcgtgtgggcttaataccatgtctattaatatatagcctcgatgatgagagagttacaaagaacaaaactccagacacaaacctccaaatttttcagcagaagcactctgcgtcgctgagctgaggtcggctctgcgatccatacgtggccgcacccacacagcacgtgctgtgacgatggctgaacggaaagtgtacactgttcctgaatattgaaataaaacaataaacttttaatggta

SEQ ID NO: 322625 - DNA, 4215 bp, Homo sapiens
ccaggatttggctacggaggcagagcgtccgactataaatcggctcacaagggattcaagggagtcgatgcccaggggcacagagacacgggcatccttgactccatcgggcgcttctttggcggtgacaggggtgcgcccaagcggggctctggcaagaaggtgagctctgaggagtagaggagttttagtttaaatggaaaaagcaaaggagaaatcagtaggtgaactcagccattagaggaagaactggcacgtagcctcttgctgtctaaggtctcgttccgtgctggagaatgcatatgagcccaagagtgtgggcctgagtggctgcttaggacgttttcgtttaactcaccccctcttttcctcacaagggatggtggccggggtgtggctcaggaatgtaaggacatgctgaattctggatctctaagggtgcctggacatgggcgttgcagaaagagagccacattctcagggtctctggtggtgtgtgcttgcggacttgatgactgatgttgcctctgcagcccacacgctggggttcaacactgggttatgctcgttttttcctggagtcagtgctgctagcttcatgttgctctgcgacaatcataggattgaggtcgaggaagacttttgaacaaactcctcaatttaaatccgccttgagcaaacgttctctgtggtctgagaagtggaaggggggagggataaatgagtgtctatgaatcaaagctttattatcttgtgattccattaatttgcatacagagtcttagaagtttctttattcaaaagcaaatgtggataaaaatgtattacaaaaaaaaaaaactctgctatggggtccagagtctaggagtggtttctgcagttgattgtcagtggagaacctgtggctgctggttcatcaaagcgctggtccctgagtgccattcagattgcagatgcagtattttacgtgatgtttagagtgtttggtggttgtgtaattttggagagaaagaagtttttcccaaaaaagtccctagtttattgggtgttctcacacaacctgtaagatgaagctgtttttctgcctgtgtgcagggctgattctggaattccagaaggccttgtgggagcgtaaaaggcttttgaataaagtgtggaacagagcgcctcattctgataacatgcaatcataaaaaccatagggcaacttggagttaaggagtttctagaatttgctttagtctccaactgcaattctttattgatcatgaaattgttgaagagaaacacaaatgtcagttttacctttcctgtgggcgtgaaagcacatcgaagtttcaggcaactgttaacatctctaccatctgtctgagttgagatttcaggttgtgacacttgccgtgacttatttgtaaatgacattttgtgtgtcttagatactaatggaattcatattctggctagttctttcagtgcatttgtagacatgttcttttcctttgtagcagtcctccctcaccctgaaatgttggtgttctaaccgatttctaatgctaatttcaactggaagcactttttcaagcccagctatcaaaccacaccagacatgtatggattcgggttgcccaataaagcgttgctattatgtaagcatccctcacgcatacagcatcaccagttttgaaagcttgaactattctgcttacttcaaggtacagaaaaaaaaaatgtacttaaactgtgcagaaaagatgaaatcactggataatatgtattataaaataagcttcatgtgagtgacactggtttaagttgaaataaaatggtgaaagcattgatatcaatcattgtgactttatctcaaaacaatattgacacacatagatgtttttcttcctttatggtaagattacagcctttattgtcttaaatctcttatactcttcaatattttcaaagaaaacattctagtctcagaaatagtccatctctttgcaaaacagggctggccaattatcaaggacccataaaaatcaaaacactttcaaaaattttaaaaataaaaataattttcacatgattgctttaggaattttgaagtatccattcttttcactatggagtgttgaatatagaagattttttaatgaacaggcttgccctttgatgccaaaggcaaaaaataataataataacatttgcacgtgtgatcacagagcagctgtgaggcatcccgggggagcgcacgcagtggggatgtgattgctccactcaactattttatcacaaagtgttgtaaacatgggagatgaaagcttaactctctctacacccagctacagacccgcaatggccctaaaaatctggggtattcattgggtgggctgccatggaggaatttttggttttgtttttatttttatttgttgttctgtttacaaatcaggagagcccctgtttttatatgctaggaaggtccttgggataggccgaagaggtgtgcaaacgagcagtggaaggcccgggccctgtctctcaggaccacggcggcctgccccacacacagttctgcttctccctatctagaacgaggttttcctggcagattcctgccagactctgagtggagcccccccatgaccctataaaaggggctgtttgtcctcctcccaccctcctgtgctcttcctccctccccttgagggcacatggccgctggtaccacatgttggagcggccgcccccgagcccgggaatgccctaacaacacccatgcttgtgttgctgggagctgacattcaagaaaagtgcattaaaaattccttgagaaggcatattcttttgagagccgtaaatgaaaagtgcattcacggagaacatgctcctttgttgtgagaggaaagaaaggactgttgttgcctttaaggaacaggtttcccagttccccggaatgtcagggtcacatgaggaatgggtgagcacttagggccaagattgtcgtgtgcttggcccggcagcttctctctaagtgacctctccagcatcactctgtgccagtgctcatatctgaggccacttgagtgtcacgaggcagagcctggaaacattagctttggaaaccgttccttcctttttatgtggaggaagtaaggtttcacaagacacctaagctggacatggtgatgtgccacttggatagttcccaaagcagaaagcagccaggacatcccagtaccccacttctccgtgccgtgtacttttagggaggttttcgaaagctagcttcttaccgatgattttgtctatttttctgttttatgtgaaaaccttcatttataacctgctcttctcagtgttcttctattcagcattcagtatgacttctatgcctctaattgcgactgtatggagaagaactgtttgtcattcagtgccgtgggatataatcagtcctgtaaattcatcagaatgttctgttgcctgattttttttccattgcattttaatttcattaaacatattttagttctacagtaacctaattcctcattgttaccatgagatcctaattctgtagctgtgttctgtaatcccatggggcgtgtaccatttggagacacatgaaggatacagtagacagcacggaaggcagcagcaacacacaggggtgtcctccctccccagagcccagtgtgcacacagaaccaaattcaatctcattcatcgtgagcttgcatggtaactgatccagccactcagtacctccattggataagagatttggccacagattcttctagagaaaatccaaatgtggagggtgcatttgtttctgcacccaaacaaataccttttgagatttcttataggcattcctctcgaagtctcattactctgatcagttattgatcggaggctaccctggctcagtcaccagctgctcactgtgtccttctgtggtctcaggagctgcagttgttgctgttgtatgaatagacgatagttaattagactggatgtgtctgtactggcagtgattttgcaacttcctctgtataagcgatacatttgtaaatcatgggaatgtatttgatggtaattgcctgtggtggttgtatcatgatttaattttattatgagcttttggctttatatatttttctgcctttttatgcattcattaaacagtttaacagaccaaggacagtgtactaa

SEQ ID NO: 322626 - DNA, 1406 bp, Homo sapiens
ccaggatttggctacggaggcagagcgtccgactataaatcggctcacaagggattcaagggagtcgatgcccaggggcacagagacacgggcatccttgactccatcgggcgcttctttggcggtgacaggggtgcgcccaagcggggctctggcaaggactcacaccacccggcaagaactgctcactacggctccctgccccagaagtcacacggccggacccaagatgaaaaccccgtagtccacttcttcaagaacattgtgacgcctcgcacaccacccccgtcgcagggaaaggggagaggactgtccctgagcagatttagctggggggccgaaggccagagaccaggatttggctacggaggcagagcgtccgactataaatcggctcacaagggattcaagggagtcgatgcccagggcacgctttccaaaatttttaagctgggaggaagagatagtcgctctggatcacccatggctagacgctgaaaacccacctggttccggaatcctgtcctcagcttcttaatataactgccttaaaactttaatcccacttgcccctgttacctaattagagcagatgacccctcccctaatgcctgcggagttgtgcacgtagtagggtcaggccacggcagcctaccggcaatttccggccaacagttaaatgagaacatgaaaacagaaaacggttaaaactgtccctttctgtgtgaagatcacgttccttcccccgcaatgtgcccccagacgcacgtgggtcttcagggggccaggtgcacagacgtccctccacgttcacccctccacccttggactttcttttcgccgtggctgcggcacccttgcgcttttgctggtcactgccatggaggcacacagctgcagagacagagaggacgtgggcggcagagaggactgttgacatccaagcttcctttgtttttttttcctgtccttctctcacctcctaaagtagacttcatttttcctaacaggattagacagtcaaggagtggcttactacatgtgggagcttttggtatgtgacatgcgggctgggcagctgttagagtccaacgtggggcagcacagagagggggccacctccccaggccgtggctgcccacaccaattctaattctgaatgtttcgtgtgggcttaataccatgtctattaatatatagcctcgatgatgagagagttacaaagaacaaaactccagacacaaacctccaaatttttcagcagaagcactctgcgtcgctgagctgaggtcggctctgcgatccatacgtggccgcacccacacagcacgtgctgtgacgatggctgaacggaaagtgtacactgttcctgaatattgaaataaaacaataaacttttaatggta

SEQ ID NO: 322627 - DNA, 1395 bp, Homo sapiens
ccaggatttggctacggaggcagagcgtccgactataaatcggctcacaagggattcaagggagtcgatgcccaggggcacagagacacgggcatccttgactccatcgggcgcttctttggcggtgacaggggtgcgcccaagcggggctctggcaaggactcacaccacccggcaagaactgctcactacggctccctgccccagaagtcacacggccggacccaagatgaaaaccccgtagtccacttcttcaagaacattgtgacgcctcgcacaccacccccgtcgcagggaaaggggagaggactgtccctgagcagatttagctggggggccgaaggccagagaccaggatttggctacggaggcagagcgtccgactataaatcggctcacaagggattcaagggagtcgatgcccagggcacgctttccaaaatttttaagctgggaggaagagatagtcgctctggatcacccatggctagacgctgaaaacccacctggttccggaatcctgtcctcagcttcttaatataactgccttaaaactttaatcccacttgcccctgttacctaattagagcagatgacccctcccctaatgcctgcggagttgtgcacgtagtagggtcaggccacggcagcctaccggcaatttccggccaacagttaaatgagaacatgaaaacagaaaacggttaaaactgtccctttctgtgtgaagatcacgttccttcccccgcaatgtgcccccagacgcacgtgggtcttcagggggccaggtgcacagacgtccctccacgttcacccctccacccttggactttcttttcgccgtggctgcggcacccttgcgcttttgctggtcactgccatggaggcacacagctgcagagacagagaggacgtgggcggcagagaggactgttgacatccaagcttcctttgtttttttttcctgtccttctctcacctcctaaagtagacttcatttttcctaacaggattagacagtcaaggagtggcttactacatgtgggagcttttggtatgtgacatgcgggctgggcagctgttagagtccaacgtggggcagcacagagagggggccacctccccaggccgtggctgcccacacaccccaattagctgaattcgcgtgtggcagagggaggaaaaggaggcaaacgtgggcggacctcgaacaaccccctgtgttcctgcacattaagcatgagcatgcaaacatgtttccaggtctgcgcaggcacacacctccacaccgctttgcacatagacacgtgtgagtgccatgcacacactttcacacccgggtgcacatgctctatgccccactttcatgtccacacaagcacggtccccagagtc

SEQ ID NO: 322628 - DNA, 1230 bp, Homo sapiens
ccaggatttggctacggaggcagagcgtccgactataaatcggctcacaagggattcaagggagtcgatgcccaggggcacagagacacgggcatccttgactccatcgggcgcttctttggcggtgacaggggtgcgcccaagcggggctctggcaaggactcacaccacccggcaagaactgctcactacggctccctgccccagaagtcacacggccggacccaagatgaaaaccccgtagtccacttcttcaagaacattgtgacgcctcgcacaccacccccgtcgcagggaaaggggagaggactgtccctgagcagatttagctggggggccgaaggccagagaccaggatttggctacggaggcagagcgtccgactataaatcggctcacaagggattcaagggagtcgatgcccagggcacgctttccaaaatttttaagctgggaggaagagatagtcgctctggatcacccatggctagacgctgaaaacccacctggttccggaatcctgtcctcagcttcttaatataactgccttaaaactttaatcccacttgcccctgttacctaattggagagtccaggaagacttgcgcactcagagcagaagggtaggagtcctctagacagcctcgcagccgcgccagtcgcccatagacactggctgtgaccgggcgtgctggcagcggcagtgcacagtggccagcactaaccctccctgagaagataaccggctcattcacttcctcccagaagacgcgtggtagcgagtaggcacaggcgtgcacagcgcacctgtgattgataggccttccaaagagtcccacgctggcatcaccctccccgaggacggagatgaggagtagtcagcgtgatgccaaaacgcgtcttcttaatccaattctaattctgaatgtttcgtgtgggcttaataccatgtctattaatatatagcctcgatgatgagagagttacaaagaacaaaactccagacacaaacctccaaatttttcagcagaagcactctgcgtcgctgagctgaggtcggctctgcgatccatacgtggccgcacccacacagcacgtgctgtgacgatggctgaacggaaagtgtacactgttcctgaatattgaaataaaacaataaacttttaatggtaaaaaacaaaaaattggccgcgttttccaaacgtcgacctgggaacccttggctaccca

SEQ ID NO: 322629 - DNA, 840 bp, Homo sapiens
ccaggatttggctacggaggcagagcgtccgactataaatcggctcacaagggattcaagggagtcgatgcccaggggcacagagacacgggcatccttgactccatcgggcgcttctttggcggtgacaggggtgcgcccaagcggggctctggcaagaaggtgagctctgaggagtagaggagttttagtttaaatggaaaaagcaaaggagaaatcagtaggtgaactcagccattagaggaagaactggcacgtagcctcttgctgtctaaggtctcgttccgtgctggagaatgcatatgagcccaagagtgtgggcctgagtggctgcttaggacgttttcgtttaactcaccccctcttttcctcacaagggatggtggccggggtgtggctcaggaatgtaaggacatgctgaattctggatctctaagggtgcctggacatgggcgttgcagaaagagagccacattctcagggtctctggtggtgtgtgcttgcggacttgatgactgatgttgcctctgcagcccacacgctggggttcaacactgggttatgctcgttttttcctggagtcagtgctgctagcttcatgttgctctgcgacaatcataggattgaggtcgaggaagacttttgaacaaactcctcaatttaaatccgccttgagcaaacgttctctgtggtctgagaagtggaaggggggagggataaatgagtgtctatgaatcaaagctttattatcttgtgattccattaatttgcatacagagtcttagaagtttctttattcaaaagcaaatgtggataaaaatgtattacaaaaaaaaaaaa

SEQ ID NO: 322630 - DNA, 279 bp, Homo sapiens
ggaggacaagccgcagggactgtggacttgtcctgaggtcaccgcgcctctgtgtttcaggactcacaccacccggcaagaactgctcactacggctccctgccccagaagtcacacggccggacccaagatgaaaaccccgtagtccacttcttcaagaacattgtaagtgacgatcgatgggaagaggtagcaactgtgagggggaggaggggtgctggccactgctgtcatccacacaggacgttcgtacgctcgggggtggcaccggggtcatca

SEQ ID NO: 322631 - DNA, 997 bp, Homo sapiens
gatccggtgggagggaacatctggaacattagacaggatgctgatcttctggacaatcacacttttcctgctgggagcagccaaaggaaaagaagtttgctatgaggacctcgggtgcttttctgacactgagccctggggcgggacagcaatcaggcccctgaaaattctcccctggagccctgagaagatcggcacccgcttcctgctgtacaccaatgaaaacccaaacaactttcaaattctcctcctctctgatccatcaacaattgaggcatcaaattttcaaatggacagaaagacccggttcatcatccatggcttcatagacaaaggagatgagagctgggtgacagacatgtgcaaggtaggagccagctctgatccctgtggccagctgaggccaacacttctgctaacatctctgcatcactttatgcactcaagaaatctttacatattaggtaactttatgcaattaaaatgcttctcttcacaaaaattaaaatgcctttccatgtttccgcactacatttgcacactgaagcaaccacatttgctgttagaaaagtactcctactacctaatttctggttaaaccaaggcctgatgttttctgcttccatttgtagtgagggtactttgtatcctataagcgagggactataggggtttctttgttcaaatttttcccacatccctgagaggctgacatgtgttgctgtgaccacttaattgatcccagcactttgggaggccaaggtggatggatcacctgaggtcaggagttcgagaccagcctggcgaacatggtgaaaccctatctctactaatgatacaaaaatcagcctgttgtggtggcaggctcttgtagtcccagctacttgggaggctgaggcaggaaaattgcttgaacccaggaggcaaaggttgcaatgagccaatattgtgccactacactccagcctgggcaacagagtgagactccatctcaaaa

SEQ ID NO: 322632 - DNA, 629 bp, Homo sapiens
cacacacaaacacacacacatgtgcgtgcaatataccacaatataccatcatcctttctatttatgtggagactagttcaatcgatttttctgtcacctaagaatttacctaccccaggagcctgccttccacacatacattaataacaccaaccagtaatgtcaaaaggaaaaattacaaacccagaaaattaaagtcattctgcacttgcccttggtttaacaggcatttcactcttggcacctttcctgtcctatcattaataagcatcttattgatacagtttatactccaaattctccaggcttgtgaaagtttcctcaggattgcttgaaaatgaaagtcctggccaggtgcgcagtggctcatgcctgtaatcccagcactttgagaggccgaggcgggtggatcacccgaggtcaggagttcaagaccagcgtagccaacatggtgaaaccctgtctctactaaaagtacaaaaattagccaggtgtggtcgcaggcgcctgtagtcctagctactcaggaggctgaggcaggagaattgcttaaattcggaggcagaggttgcagtgagctgagatcgcgccactgcactccagcctgggcgacagaatgaggctgtctc

SEQ ID NO: 322633 - DNA, 177 bp, Homo sapiens
  misc_feature (59)..(59): n is a, c, g, or t
aaaaaaacaacatttaacaattcaataaaacaaaaaacaaagttgtggacaacaactgnagcgcttaacagggcaaacaaaacacgctgctcaccctcacgccctgctaagctcccggggcgacgaggctgctgcgttcacactaataaaatccactggtgcatctgtaaaaaatgg

SEQ ID NO: 322634 - DNA, 1627 bp, Homo sapiens
ctactgtgagggctgttgaatttttctccaaagctcagatgcccagtattcctagtcttcgaaagagagagaggaagattgagagagagagagagagagagagagagaagaagttttcttaatcagagatttctctttactttcaactaattgcagatgctgatcttctggacaatcacacttttcctgctgggagcagccaaaggaaaagaagtttgctatgaggacctcgggtgcttttctgacactgagccctggggcgggacagcaatcaggcccctgaaaattctcccctggagccctgagaagatcggcacccgcttcctgctgtacaccaatgaaaacccaaacaactttcaaattctcctcctctctgatccatcaacaattgaggcatcaaattttcaaatggacagaaagacccggttcatcatccatggcttcatagacaaaggagatgagagctgggtgacagacatgtgcaagaaactgttcgaggtggaggaggtgaactgcatctgcgtggactggaagaagggctcccaagccacctacacacaggctgccaacaacgtgcgagtggtgggcgcccaggtggcccagatgctcgacatcctcttgacagagtatagctaccccccttccaaagttcacctcattggccacagcctgggagcccacgtggctggagaggcaggaagcaagactccaggcctgagcaggattacagggttggatcctgtagaagcaagtttcgagagtactcctgaagaggtgcgacttgatccctctgatgctgactttgttgatgtgattcacacggatgcagctcccctgatcccattcttgggttttggaacgaaccaacagatgggtcatcttgacttcttccccaatggaggagagagcatgccgggatgcaagaagaatgccctgtctcagatcgtggatctagatggcatctgggcgggaacccgggactttgtggcttgcaatcacctaagaagctacaagtattacttggaaagcatcctcaatcccgatgggtttgctgcatatccctgcacttcctacaagtcctttgagtctgacaagtgcttcccgtgtccagatcaaggatgcccacagatgggtcactatgctgataaatttgctggcaggacaagtgaagagcagcagaaattcttcttgaacacaggagaggctagcaatttcgctcgctggagatatggggtttccatcacactgtctggaagaacagccactggtcagatcaaagttgctttgtttggaaataagggaaacactcaccagtacagcatcttcagggggattctcaaaccaggctcaacccattcctatgagtttgatgcaaagctggatgttggaacaattgagaaagtcaagtttctttggaataacaatgtgataaatccaaccctccccaaagtgggtgccaccaagatcactgtgcaaaagggagaagagaagacagtgtacaacttctgtagcgaagacacagtgcgggaagacacgctgctcaccctcacgccctgctaagctcccggggcgacgaggctgctgcgttcacactaataaaatccactggtgcatctgtaaaaaatgg

SEQ ID NO: 322635 - DNA, 1919 bp, Homo sapiens
gatccggtgggagggaacatctggaacattagacaggatgctgatcttctggacaatcacacttttcctgctgggagcagccaaaggaaaagaagtttgctatgaggacctcgggtgcttttctgacactgagccctggggcgggacagcaatcaggcccctgaaaattctcccctggagccctgagaagatcggcacccgcttcctgctgtacaccaatgaaaacccaaacaactttcaaattctcctcctctctgatccatcaacaattgaggcatcaaattttcaaatggacagaaagacccggttcatcatccatggcttcatagacaaaggagatgagagctgggtgacagacatgtgcaagcctggggcatcgccaagagcctgaaaggaccccttacagtcaaatccacaaggtcatttagacactggccaccggagattgcacctaagacttttccttttcaaaacaggactcttttcatgatgcaattgtttttcccttactaaccaaccttactgaatttggttgaaggaaaccagagagtagccagcttccaattaatctgcaagctggagggggaatcagtttgcctttctcatagcattcaccctgaaggataactcctaattaccaacaggattccctaacagagtctagtttatctcatgccctagctaggagaagagagaagtggccatttctgagccctggctggataaggtttcccctgctcccattatctccccaaccccactatctccccaacaccagaaactgttcgaggtggaggaggtgaactgcatctgcgtggactggaagaagggctcccaagccacctacacacaggctgccaacaacgtgcgagtggtgggcgcccaggtggcccagatgctcgacatcctcttgacagagtatagctaccccccttccaaagttcacctcattggccacagcctgggagcccacgtggctggagaggcaggaagcaagactccaggcctgagcaggattacagggttggatcctgtagaagcaagtttcgagagtactcctgaagaggtgcgacttgatccctctgatgctgactttgttgatgtgattcacacggatgcagctcccctgatcccattcttgggttttggaacgaaccaacagatgggtcatcttgacttcttccccaatggaggagagagcatgccgggatgcaagaagaatgccctgtctcagatcgtggatctagatggcatctgggcgggaacccgggactttgtggcttgcaatcacctaagaagctacaagtattacttggaaagcatcctcaatcccgatgggtttgctgcatatccctgcacttcctacaagtcctttgagtctgacaagtgcttcccgtgtccagatcaaggatgcccacagatgggtcactatgctgataaatttgctggcaggacaagtgaagagcagcagaaattcttcttgaacacaggagaggctagcaatttcgctcgctggagatatggggtttccatcacactgtctggaagaacagccactggtcagatcaaagttgctttgtttggaaataagggaaacactcaccagtacagcatcttcagggggattctcaaaccaggctcaacccattcctatgagtttgatgcaaagctggatgttggaacaattgagaaagtcaagtttctttggaataacaatgtgataaatccaaccctccccaaagtgggtgccaccaagatcactgtgcaaaagggagaagagaagacagtgtacaacttctgtagcgaagacacagtgcgggaagacacgctgctcaccctcacgccctgctaagctcccggggcgacgaggctgctgcgttcacactaataaaatccactggtgcatctgtaaaaaatgg

SEQ ID NO: 322636 - DNA, 1508 bp, Homo sapiens
gatccggtgggagggaacatctggaacattagacaggatgctgatcttctggacaatcacacttttcctgctgggagcagccaaaggaaaagaagtttgctatgaggacctcgggtgcttttctgacactgagccctggggcgggacagcaatcaggcccctgaaaattctcccctggagccctgagaagatcggcacccgcttcctgctgtacaccaatgaaaacccaaacaactttcaaattctcctcctctctgatccatcaacaattgaggcatcaaattttcaaatggacagaaagacccggttcatcatccatggcttcatagacaaaggagatgagagctgggtgacagacatgtgcaagaaactgttcgaggtggaggaggtgaactgcatctgcgtggactggaagaagggctcccaagccacctacacacaggctgccaacaacgtgcgagtggtgggcgcccaggtggcccagatgctcgacatcctcttgacagagtatagctaccccccttccaaagttcacctcattggccacagcctgggagcccacgtggctggagaggcaggaagcaagactccaggcctgagcaggattacagggttggatcctgtagaagcaagtttcgagagtactcctgaagaggtgcgacttgatccctctgatgctgactttgttgatgtgattcacacggatgcagctcccctgatcccattcttgggttttggaacgaaccaacagatgggtcatcttgacttcttccccaatggaggagagagcatgccgggatgcaagaagaatgccctgtctcagatcgtggatctagatggcatctgggcgggaacccgggactttgtggcttgcaatcacctaagaagctacaagtattacttggaaagcatcctcaatcccgatgggtttgctgcatatccctgcacttcctacaagtcctttgagtctgacaagtgcttcccgtgtccagatcaaggatgcccacagatgggtcactatgctgataaatttgctggcaggacaagtgaagagcagcagaaattcttcttgaacacaggagaggctagcaatttcgctcgctggagatatggggtttccatcacactgtctggaagaacagccactggtcagatcaaagttgctttgtttggaaataagggaaacactcaccagtacagcatcttcagggggattctcaaaccaggctcaacccattcctatgagtttgatgcaaagctggatgttggaacaattgagaaagtcaagtttctttggaataacaatgtgataaatccaaccctccccaaagtgggtgccaccaagatcactgtgcaaaagggagaagagaagacagtgtacaacttctgtagcgaagacacagtgcgggaagacacgctgctcaccctcacgccctgctaagctcccggggcgacgaggctgctgcgttcacactaataaaatccactggtgcatctgtaaaaaatgg

SEQ ID NO: 322637 - DNA, 2845 bp, Homo sapiens
cgcccgggggcgggccttcgccgggggtaggactccggccttggtggcgggtggctggcggttccgttaggtctgagggagcgatggcggtacgcgcgttgaagctgctgaccacactgctggctgtcgtggccgctgcctcccaagccgaggtcgagtccgaggcaggatggggcatggtgacgcctgatctgctcttcgccgaggggaccgcagcctacgcgcgcggggactggcccggggtggtcctgagcatggaacgggcgctgcgctcccgggcagccctccgcgcccttcgcctgcgctgccgcacccagtgtgccgccgacttcccgtgggagctggaccccgactggtcccccagcccggcccaggcctcgggcgccgccgccctgcgcgacctgagcttcttcgggggccttctgcgtcgcgctgcctgcctgcgccgctgcctcgggccgccggccgcccactcgctcagcgaagagatggagctggagttccgcaagcggagcccctacaactacctgcaggtcgcctacttcaagatcaacaagttggagaaagctgttgctgcagcacacaccttcttcgtgggcaatcctgagcacatggaaatgcagcagaacctagactattaccaaaccatgtctggagtgaaggaggccgacttcaaggatcttgagactcaaccccatatgcaagaatttcgactgggagtgcgactctactcagaggaacagccacaggaagctgtgccccacctagaggcggcgctgcaagaatactttgtggcctatgaggagtgccgtgccctctgcgaagggccctatgactacgatggctacaactaccttgagtacaacgctgacctcttccaggccatcacagatcattacatccaggtcctcaactgtaagcagaactgtgtcacggagcttgcttcccacccaagtcgagagaagccctttgaagacttcctcccatcgcattataattatctgcagtttgcctactataacattgggaattatacacaggctgttgaatgtgccaagacctatcttctcttcttccccaatgacgaggtgatgaaccaaaatttggcctattatgcagctatgcttggagaagaacacaccagatccatcggcccccgtgagcagggcacctagggaaagatgtgaccccggaaagtactcagtttccctgccctggagtgccaaggagtaccgacagcgaagcctactggaaaaagaactgcttttcttcgcttatgatgtttttggaattccctttgtggatccggattcatggactccagaagaagtgattcccaagagattgcaagagaaacagaagtgaggaccttgaagaaactgcatggttggatcagtctgatgaagcacttgaggcttcctgagcccaggcagatgtgaactcctggcaaggggtgggcaggtccagtttgggaagtcggggtggagcccagggctggccctggaatgcagtcctcagagcggctgtgctcataggtcagaacgggaaacagccgtacgcatctcccaggagattgggaaccttatgaaggaaatcgagacccttgtggaagagaagaccaaggagtcactggatgtgagcagactgacccgggaaggtggccccctgctgtatgaaggcatcagtctcaccatgaactccaaactcctgaatggttcccagcgggtggtgatggacggcgtaatctctgaccacgagtgtcaggagctgcagagactgaccaatgtggcagcaacctcaggagatggctaccggggtcagacctccccacatactcccaatgaaaagttctatggtgtcactgtcttcaaagccctcaagctggggcaagaaggcaaagttcctctgcagagtgcccacctgtactacaacgtgacggagaaggtgcggcgcatcatggagtcctacttccgcctggatacgcccctctacttttcctactctcatctggtgtgccgcactgccatcgaagaggtccaggcagagaggaaggatgatagtcatccagtccacgtggacaactgcatcctgaatgccgagaccctcgtgtgtgtcaaagagcccccagcctacaccttccgcgactacagcgccatcctttacctaaatggggacttcgatggcggaaacttttatttcactgaactggatgccaagaccgtgacggcagaggtgcagcctcagtgtggaagagccgtgggattctcttcaggcactgaaaacccacatggagtgaaggctgtcaccagggggcagcgctgtgccatcgccctgtggttcaccctggaccctcgacacagcgagcgggacagggtgcaggcagatgacctggtgaagatgctcttcagcccagaagagatggacctctcccaggagcagcccctggatgcccagcagggcccccccgaacctgcacaagagtctctctcaggcagtgaatcgaagcccaaggatgagctatgacagcgtccaggtcagacggatgggtgactagacccatggagaggaactcttctgcactctgagctggccagcccctcggggctgcagagcagtgagcctacatctgccactcagccgaggggaccctgctcacagccttctacatggtgctactgctcttggagtggacatgaccagacaccgcaccccctggatctggctgagggctcaggacacaggcccagccacccccaggggcctccacaggccgctgcataacagcgatacagtacttaagtgtctgtgtagacaaccaaagaataaatgattcatggtttttttt

SEQ ID NO: 322638 - DNA, 3035 bp, Homo sapiens
cgcccgggggcgggccttcgccgggggtaggactccggccttggtggcgggtggctggcggttccgttaggtctgagggagcgatggcggtacgcgcgttgaagctgctgaccacactgctggctgtcgtggccgctgcctcccaagccgaggtcgagtccgaggcaggatggggcatggtgacgcctgatctgctcttcgccgaggggaccgcagcctacgcgcgcggggactggcccggggtggtcctgagcatggaacgggcgctgcgctcccgggcagccctccgcgcccttcgcctgcgctgccgcacccagtgtgccgccgacttcccgtgggagctggaccccgactggtcccccagcccggcccaggcctcgggcgccgccgccctgcgcgacctgagcttcttcgggggccttctgcgtcgcgctgcctgcctgcgccgctgcctcgggccgccggccgcccactcgctcagcgaagagatggagctggagttccgcaagcggagcccctacaactacctgcaggtcgcctacttcaagatcaacaagttggagaaagctgttgctgcagcacacaccttcttcgtgggcaatcctgagcacatggaaatgcagcagaacctagactattaccaaaccatgtctggagtgaaggaggccgacttcaaggatcttgagactcaaccccatatgcaagaatttcgactgggagtgcgactctactcagaggaacagccacaggaagctgtgccccacctagaggcggcgctgcaagaatactttgtggcctatgaggagtgccgtgccctctgcgaagggccctatgactacgatggctacaactaccttgagtacaacgctgacctcttccaggccatcacagatcattacatccaggtcctcaactgtaagcagaactgtgtcacggagcttgcttcccacccaagtcgagagaagccctttgaagacttcctcccatcgcattataattatctgcagtttgcctactataacattgggaattatacacaggctgttgaatgtgccaagacctatcttctcttcttccccaatgacgaggtgatgaaccaaaatttggcctattatgcagctatgcttggagaagaacacaccagatccatcggcccccgtgagagtgccaaggagtaccgacagcgaagcctactggaaaaagaactgcttttcttcgcttatgatgtttttggaattccctttgtggatccggattcatggactccagaagaagtgattcccaagagattgcaagagaaacagaagtcagaacgggaaacagccgtacgcatctcccaggagattgggaaccttatgaaggaaatcgagacccttgtggaagagaagaccaaggagtcactggatgtgagcagactgacccgggaaggtggccccctgctgtatgaaggcatcagtctcaccatgaactccaaactcctgaatggttcccagcgggtggtgatggacggcgtaatctctgaccacgagtgtcaggagctgcagagactgaccaatgtggcagcaacctcaggagatggctaccggggtcagacctccccacatactcccaatgaaaagttctatggtgtcactgtcttcaaagccctcaagctggggcaagaaggcaaagttcctctgcagagtgcccacctgtactacaacgtgacggagaaggtgcggcgcatcatggagtcctacttccgcctggatacgcccctctacttttcctactctcatctggtgtgccgcactgccatcgaagaggtccaggcagagaggaaggatgatagtcatccagtccacgtggacaactgcatcctgaatgccgagaccctcgtgtgtgtcaaagagcccccagcctacaccttccgcgactacagcgccatcctttacctaaatggggacttcgatggcggaaacttttatttcactgaactggatgccaagaccgtgacggcagaggtgcagcctcagtgtggaagagccgtgggattctcttcaggcactgaaaacccacatggagtgaaggctgtcaccagggggcagcgctgtgccatcgccctgtggttcaccctggaccctcgacacagcgagcgggtgagagcagctcgagcgggtgagagcagctggtgctgtggtgacccgttcccagagcgcccttggtttgcctttctcttccccaaatcccattgccagtggctgagacacgaaaggagcacttgggacaccagctccaacgccctgtcattatggtcacattgccttgtcctccctgggcctgctgtgaacgggatccaggtggggaaagaggtcaagacagggagcgatgctgagttcttggttccctccttgggccccacttcagctgtccttttccagagagtaggacctgctgggaaggagatgagcctggggccattaaggaaccttccttgtcccctgggaagtagcagctgagagatagcgagtgtctggagcggaggcctctctgaatgggcaggggtttgtccttgcaggacagggtgcaggcagatgacctggtgaagatgctcttcagcccagaagagatggacctctcccaggagcagcccctggatgcccagcagggcccccccgaacctgcacaagagtctctctcaggcagtgaatcgaagcccaaggatgagctatgacagcgtccaggtcagacggatgggtgactagacccatggagaggaactcttctgcactctgagctggccagcccctcggggctgcagagcagtgagcctacatctgccactcagccgaggggaccctgctcacagccttctacatggtgctactgctcttggagtggacatgaccagacaccgcaccccctggatctggctgagggctcaggacacaggcccagccacccccaggggcctccacaggccgctgcataacagcgatacagtacttaagtgtctgtgtagacaaccaaagaataaatgattcatggtttttttt

SEQ ID NO: 322639 - DNA, 1560 bp, Homo sapiens
cggacgcgtgggtcgacccacgcgtccgcgaggtgatgaaccaaaatttggcctattatgcagctatgcttggagaagaacacaccagatccatcggcccccgtgagagtgccaaggagtaccgacagcgaagcctactggaaaaagaactgcttttcttcgcttatgatgtttttggaattccctttgtggatccggattcatggactccagaagaagtgattcccaagagattgcaagagaaacagaagtcagaacgggaaacagccgtacgcatctcccaggagattgggaaccttatgaaggaaatcgagacccttgtggaagagaagaccaaggagtcactggatgtgagcagactgacccgggaaggtggccccctgctgtatgaaggcatcagtctcaccatgaactccaaactcctgaatggttcccagcgggtggtgatggacggcgtaatctctgaccacgagtgtcaggagctgcagagactgaccaatgtggcagcaacctcaggagatggctaccggggtcagacctccccacatactcccaatgaaaagttctatggtgtcactgtcttcaaagccctcaagctggggcaagaaggcaaagttcctctgcagagtgcccacctgtactacaacgtgacggagaaggtgcggcgcatcatggagtcctacttccgcctggatacgcccctctacttttcctactctcatctggtgtgccgcactgccatcgaagaggtccaggcagagaggaaggatgatagtcatccagtccacgtggacaactgcatcctgaatgccgagaccctcgtgtgtgtcaaagagcccccagcctacaccttccgcgactacagcgccatcctttacctaaatggggacttcgatggcggaaacttttatttcactgaactggatgccaagaccgtgacggcagaggtgcagcctcagtgtggaagagccgtgggattctcttcaggcactgaaaacccacatggagtgaaggctgtcaccagggggcagcgctgtgccatcgccctgtggttcaccctggaccctcgacacagcgagcgggacagggtgcaggcagatgacctggtgaagatgctcttcagcccagaagagatggacctctcccaggagcagcccctggatgcccagcagggcccccccgaacctgcacaagagtctctctcaggcagtgaatcgaagcccaaggatgagctatgacagcgtccaggtcagacggatgggtgactagacccatggagaggaactcttctgcactctgagctggccagcccctcggggctgcagagcagtgagcctacatctgccactcagccgaggggaccctgctcacagccttctacatggtgctactgctcttggagtggacatgaccagacaccgcaccccctggatctggctgagggctcaggacacaggcccagccacccccaggggcctccacaggccgctgcataacagcgatacagtacttaagtgtctgtgtagacaaccaaagaataaatgattcatggtttttttt

SEQ ID NO: 322640 - DNA, 820 bp, Homo sapiens
ggggctttgagacgtgtccatcactcctctagaccagtcaccctttctctttagttctggtcttagggaagccatactgaagagctgccctcggtcgtgagccctaatgagcccatgtctcttctgagagtggattacagtctttgtcctgtgcaacccccctccctttctgtcccccttaggcagaggtgcagcctcagtgtggaagagccgtgggattctcttcaggcactgaaaacccacatggagtgaaggctgtcaccagggggcagcgctgtgccatcgccctgtggttcaccctggaccctcgacacagcgagcgggtgagagcagctcgagcgggacagggtgcaggcagatgacctggtgaagatgctcttcagcccagaagagatggacctctcccaggagcagcccctggatgcccagcagggcccccccgaacctgcacaagagtctctctcaggcagtgaatcgaagcccaaggatgagctatgacagcgtccaggtcagacggatgggtgactagacccatggagaggaactcttctgcactctgagctggccagcccctcggggctgcagagcagtgagcctacatctgccactcagccgaggggaccctgctcacagccttctacatggtgctactgctcttggagtggacatgaccagacaccgcaccccctggatctggctgagggctcaggacacaggcccagccacccccaggggcctccacaggccgctgcataacagcgatacagtacttaagtgtctgtgtagacaaccaaagaataaatgattcatggtttttttt

SEQ ID NO: 322641 - DNA, 747 bp, Homo sapiens
ggggctttgagacgtgtccatcactcctctagaccagtcaccctttctctttagttctggtcttagggaagccatactgaagagctgccctcggtcgtgagccctaatgagcccatgtctcttctgagagtggattacagtctttgtcctgtgcaacccccctccctttctgtcccccttaggcagaggtgcagcctcagtgtggaagagccgtgggattctcttcaggcactgtgtggttcaccctggaccctcgacacagcgagcgggacagggtgcaggcagatgacctggtgaagatgctcttcagcccagaagagatggacctctcccaggagcagcccctggatgcccagcagggcccccccgaacctgcacaagagtctctctcaggcagtgaatcgaagcccaaggatgagctatgacagcgtccaggtcagacggatgggtgactagacccatggagaggaactcttctgcactctgagctggccagcccctcggggctgcagagcagtgagcctacatctgccactcagccgaggggaccctgctcacagccttctacatggtgctactgctcttggagtggacatgaccagacaccgcaccccctggatctggctgagggctcaggacacaggcccagccacccccaggggcctccacaggccgctgcataacagcgatacagtacttaagtgtctgtgtagacaaccaaagaataaatgattcatggtttttttt

SEQ ID NO: 322642 - DNA, 1494 bp, Homo sapiens
cgcccgggggcgggccttcgccgggggtaggactccggccttggtggcgggtggctggcggttccgttaggtctgagggagcgatggcggtacgcgcgttgaagctgctgaccacactgctggctgtcgtggccgctgcctcccaagccgaggtcgagtccgaggcaggatggggcatggtgacgcctgatctgctcttcgccgaggggaccgcagcctacgcgcgcggggactggcccggggtggtcctgagcatggaacgggcgctgcgctcccgggcagccctccgcgcccttcgcctgcgctgccgcacccagtgtgccgccgacttcccgtgggagctggaccccgactggtcccccagcccggcccaggcctcgggcgccgccgccctgcgcgacctgagcttcttcgggggccttctgcgtcgcgctgcctgcctgcgccgctgcctcgggccgccggccgcccactcgctcagcgaagagatggagctggagttccgcaagcggagcccctacaactacctgcaggtcgcctacttcaagatcaacaagttggagaaagctgttgctgcagcacacaccttcttcgtgggcaatcctgagcacatggaaatgcagcagaacctagactattaccaaaccatgtctggagtgaaggaggccgacttcaaggatcttgagactcaaccccatatggtgaaaaaaactttatccccttctttctttctttctttttaaatttattttagagacagagtcttgctctgtcacccaggctggagtgcagtggcttgatcatagctcgctgtaacctcaaattcctggactcaagagaccctctagtctcggcctcctgagtagttgggactacaggcatgcattcttttgtttttttttaaatgacattactaaggttgttttctaattacattacagaagtaatgaatgttcattgtataacattgtagaaatgtaggtaagtataaaataaaaagtaatcatttgtaataccgccaccttaagaaaaccagtttatattttgccctattttttaagtcttccgtatataattttttcatctaatttggtgttatatcatgtatgcattttttatcatcttttttattttttttgaggcagggtctcactttgttgtccaggctgcagtgcaatggtgtgatcatagctcactgcagccttgacctcctgggctcaagtgatcctcccgcctcagccccacaaatagctgggactagaggcatgcaccaccacacccagctattgtttttattttttgtagagacggggtctcactgtgttgcccaggctgatttcaaactcctggcctcaagcgatcctactgccttgggctcccaaagtgctgggattgcaggtgtgagccaccatggccagccccatcatcattttttaactaacattattatcatgagtcttttctcatgtcttcagttttatttgaaaacataat

SEQ ID NO: 322643 - DNA, 466 bp, Homo sapiens
tgctgcccctcctgtgtgggttgtcattgtagttgtcctctttagccactagatggtgaccatctggctttaagatggcacttccggtctcttcctcttaggtaaatatagtagatgacataggattcattgactcctttaattcctccttgaactgcctcatgttttatttcaactgatgtctcctttttctcttccttcctcctcctgctgcttggagattagcagggcacctagggaaagatgtgaccccggaaagtactcagtttccctgccctgggtaagccttgcctgggagtccatgtgggaagcccagagtgccaggccctcccctttagctgcttatcctcagggaggggtgtggtctggttagggtctgagaggaggcaggtggcagagcagaaagcacatgggctttaggactgtaaagacccggctttatctgtccaaatgcacattctgctat

SEQ ID NO: 322644 - DNA, 2526 bp, Homo sapiens
cgcccgggggcgggccttcgccgggggtaggactccggccttggtggcgggtggctggcggttccgttaggtctgagggagcgatggcggtacgcgcgttgaagctgctgaccacactgctggctgtcgtggccgctgcctcccaagccgaggtcgagtccgaggcaggatggggcatggtgacgcctgatctgctcttcgccgaggggaccgcagcctacgcgcgcggggactggcccggggtggtcctgagcatggaacgggcgctgcgctcccgggcagccctccgcgcccttcgcctgcgctgccgcacccagtgtgccgccgacttcccgtgggagctggaccccgactggtcccccagcccggcccaggcctcgggcgccgccgccctgcgcgacctgagcttcttcgggggccttctgcgtcgcgctgcctgcctgcgccgctgcctcgggccgccggccgcccactcgctcagcgaagagatggagctggagttccgcaagcggagcccctacaactacctgcaggtcgcctacttcaagatcaacaagttggagaaagctgttgctgcagcacacaccttcttcgtgggcaatcctgagcacatggaaatgcagcagaacctagactattaccaaaccatgtctggagtgaaggaggccgacttcaaggatcttgagactcaaccccatatgcaagaatttcgactgggagtgcgactctactcagaggaacagccacaggaagctgtgccccacctagaggcggcgctgcaagaatactttgtggcctatgaggagtgccgtgccctctgcgaagggccctatgactacgatggctacaactaccttgagtacaacgctgacctcttccaggccatcacagatcattacatccaggtcctcaactgtaagcagaactgtgtcacggagcttgcttcccacccaagtcgagagaagccctttgaagacttcctcccatcgcattataattatctgcagtttgcctactataacattgggaattatacacaggctgttgaatgtgccaagacctatcttctcttcttccccaatgacgaggtgatgaaccaaaatttggcctattatgcagctatgcttggagaagaacacaccagatccatcggcccccgtgaggattcatggactccagaagaagtgattcccaagagattgcaagagaaacagaagtcagaacgggaaacagccgtacgcatctcccaggagattgggaaccttatgaaggaaatcgagacccttgtggaagagaagaccaaggagtcactggatgtgagcagactgacccgggaaggtggccccctgctgtatgaaggcatcagtctcaccatgaactccaaactcctgaatggttcccagcgggtggtgatggacggcgtaatctctgaccacgagtgtcaggagctgcagagactgaccaatgtggcagcaacctcaggagatggctaccggggtcagacctccccacatactcccaatgaaaagttctatggtgtcactgtcttcaaagccctcaagctggggcaagaaggcaaagttcctctgcagagtgcccacctgtactacaacgtgacggagaaggtgcggcgcatcatggagtcctacttccgcctggatacgcccctctacttttcctactctcatctggtgtgccgcactgccatcgaagaggtccaggcagagaggaaggatgatagtcatccagtccacgtggacaactgcatcctgaatgccgagaccctcgtgtgtgtcaaagagcccccagcctacaccttccgcgactacagcgccatcctttacctaaatggggacttcgatggcggaaacttttatttcactgaactggatgccaagaccgtgacggcagaggtgcagcctcagtgtggaagagccgtgggattctcttcaggcactgaaaacccacatggagtgaaggctgtcaccagggggcagcgctgtgccatcgccctgtggttcaccctggaccctcgacacagcgagcgggacagggtgcaggcagatgacctggtgaagatgctcttcagcccagaagagatggacctctcccaggagcagcccctggatgcccagcagggcccccccgaacctgcacaagagtctctctcaggcagtgaatcgaagcccaaggatgagctatgacagcgtccaggtcagacggatgggtgactagacccatggagaggaactcttctgcactctgagctggccagcccctcggggctgcagagcagtgagcctacatctgccactcagccgaggggaccctgctcacagccttctacatggtgctactgctcttggagtggacatgaccagacaccgcaccccctggatctggctgagggctcaggacacaggcccagccacccccaggggcctccacaggccgctgcataacagcgatacagtacttaagtgtctgtgtagacaaccaaagaataaatgattcatggtttttttt

SEQ ID NO: 322645 - DNA, 2430 bp, Homo sapiens
cggctgggttgggaattcggacgagcgcagcctacgcgcgcggggactggcccggggtggtcctgagcatggaacgggcgctgcgctcccgggcagccctccgcgcccttcgcctgcgctgccgcacccagtgtgccgccgacttcccgtgggagctggaccccgactggtcccccagcccggcccaggcctcgggcgccgccgccctgcgcgacctgagcttcttcgggggccttctgcgtcgcgctgcctgcctgcgccgctgcctcgggccgccggccgcccactcgctcagcgaagagatggagctggagttccgcaagcggagcccctacaactacctgcaggtcgcctacttcaagatcaacaagttggagaaagctgttgctgcagcacacaccttcttcgtgggcaatcctgagcacatggaaatgcagcagaacctagactattaccaaaccatgtctggagtgaaggaggccgacttcaaggatcttgagactcaaccccatatgcaagaatttcgactgggagtgcgactctactcagaggaacagccacaggaagctgtgccccacctagaggcggcgctgcaagaatactttgtggcctatgaggagtgccgtgccctctgcgaagggccctatgactacgatggctacaactaccttgagtacaacgctgacctcttccaggccatcacagatcattacatccaggtcctcaactgtaagcagaactgtgtcacggagcttgcttcccacccaagtcgagagaagccctttgaagacttcctcccatcgcattataattatctgcagtttgcctactataacattgggaattatacacaggctgttgaatgtgccaagacctatcttctcttcttccccaatgacgaggtgatgaaccaaaatttggcctattatgcagctatgcttggagaagaacacaccagatccatcggcccccgtgagagtgccaaggagtaccgacagcgaagcctactggaaaaagaactgcttttcttcgcttatgatgtttttggaattccctttgtggatccggattcatggactccagaagaagtgattcccaagagattgcaagagaaacagaagtcagaacgggaaacagccgtacgcatctcccaggagattgggaaccttatgaaggaaatcgagacccttgtggaagagaagaccaaggagtcactggatgtgagcagactgacccgggaaggtggccccctgctgtatgaaggcatcagtctcaccatgaactccaaactcctgaatggttcccagcgggtggtgatggacggcgtaatctctgaccacgagtgtcaggagctgcagagactgaccaatgtggcagcaacctcaggagatggctaccggggtcagacctccccacatactcccaatgaaaagttctatggtgtcactgtcttcaaagccctcaagctggggcaagaaggcaaagttcctctgcagagtgcccacctgtactacaacgtgacggagaaggtgcggcgcatcatggagtcctacttccgcctggatacgcccctctacttttcctactctcatctggtgtgccgcactgccatcgaagaggtccaggcagagaggaaggatgatagtcatccagtccacgtggacaactgcatcctgaatgccgagaccctcgtgtgtgtcaaagagcccccagcctacaccttccgcgactacagcgccatcctttacctaaatggggacttcgatggcggaaacttttatttcactgaactggatgccaagaccgtgacggcagaggtgcagcctcagtgtggaagagccgtgggattctcttcaggcactgaaaacccacatggagtgaaggctgtcaccagggggcagcgctgtgccatcgccctgtggttcaccctggaccctcgacacagcgagcgggacagggtgcaggcagatgacctggtgaagatgctcttcagcccagaagagatggacctctcccaggagcagcccctggatgcccagcagggcccccccgaacctgcacaagagtctctctcaggcagtgaatcgaagcccaaggatgagctatgacagcgtccaggtcagacggatgggtgactagacccatggagaggaactcttctgcactctgagctggccagcccctcggggctgcagagcagtgagcctacatctgccactcagccgaggggaccctgctcacagccttctacatggtgctactgctcttggagtggacatgaccagacaccgcaccccctggatctggctgagggctcaggacacaggcccagccacccccaggggcctccacaggccgctgcataacagcgatacagtacttaagtgtctgtgtagacaaccaaagaataaatgattcatggtttttttt

SEQ ID NO: 322646 - DNA, 2487 bp, Homo sapiens
cgcccgggggcgggccttcgccgggggtaggactccggccttggtggcgggtggctggcggttccgttaggtctgagggagcgatggcggtacgcgcgttgaagctgctgaccacactgctggctgtcgtggccgctgcctcccaagccgaggtcgagtccgaggcaggatggggcatggtgacgcctgatctgctcttcgccgaggggaccgcagcctacgcgcgcggggactggcccggggtggtcctgagcatggaacgggcgctgcgctcccgggcagccctccgcgcccttcgcctgcgctgccgcacccagtgtgccgccgacttcccgtgggagctggaccccgactggtcccccagcccggcccaggcctcgggcgccgccgccctgcgcgacctgagcttcttcgggggccttctgcgtcgcgctgcctgcctgcgccgctgcctcgggccgccggccgcccactcgctcagcgaagagatggagctggagttccgcaagcggagcccctacaactacctgcaggtcgcctacttcaaggatcttgagactcaaccccatatgcaagaatttcgactgggagtgcgactctactcagaggaacagccacaggaagctgtgccccacctagaggcggcgctgcaagaatactttgtggcctatgaggagtgccgtgccctctgcgaagggccctatgactacgatggctacaactaccttgagtacaacgctgacctcttccaggccatcacagatcattacatccaggtcctcaactgtaagcagaactgtgtcacggagcttgcttcccacccaagtcgagagaagccctttgaagacttcctcccatcgcattataattatctgcagtttgcctactataacattgggaattatacacaggctgttgaatgtgccaagacctatcttctcttcttccccaatgacgaggtgatgaaccaaaatttggcctattatgcagctatgcttggagaagaacacaccagatccatcggcccccgtgagagtgccaaggagtaccgacagcgaagcctactggaaaaagaactgcttttcttcgcttatgatgtttttggaattccctttgtggatccggattcatggactccagaagaagtgattcccaagagattgcaagagaaacagaagtcagaacgggaaacagccgtacgcatctcccaggagattgggaaccttatgaaggaaatcgagacccttgtggaagagaagaccaaggagtcactggatgtgagcagactgacccgggaaggtggccccctgctgtatgaaggcatcagtctcaccatgaactccaaactcctgaatggttcccagcgggtggtgatggacggcgtaatctctgaccacgagtgtcaggagctgcagagactgaccaatgtggcagcaacctcaggagatggctaccggggtcagacctccccacatactcccaatgaaaagttctatggtgtcactgtcttcaaagccctcaagctggggcaagaaggcaaagttcctctgcagagtgcccacctgtactacaacgtgacggagaaggtgcggcgcatcatggagtcctacttccgcctggatacgcccctctacttttcctactctcatctggtgtgccgcactgccatcgaagaggtccaggcagagaggaaggatgatagtcatccagtccacgtggacaactgcatcctgaatgccgagaccctcgtgtgtgtcaaagagcccccagcctacaccttccgcgactacagcgccatcctttacctaaatggggacttcgatggcggaaacttttatttcactgaactggatgccaagaccgtgacggcagaggtgcagcctcagtgtggaagagccgtgggattctcttcaggcactgaaaacccacatggagtgaaggctgtcaccagggggcagcgctgtgccatcgccctgtggttcaccctggaccctcgacacagcgagcgggacagggtgcaggcagatgacctggtgaagatgctcttcagcccagaagagatggacctctcccaggagcagcccctggatgcccagcagggcccccccgaacctgcacaagagtctctctcaggcagtgaatcgaagcccaaggatgagctatgacagcgtccaggtcagacggatgggtgactagacccatggagaggaactcttctgcactctgagctggccagcccctcggggctgcagagcagtgagcctacatctgccactcagccgaggggaccctgctcacagccttctacatggtgctactgctcttggagtggacatgaccagacaccgcaccccctggatctggctgagggctcaggacacaggcccagccacccccaggggcctccacaggccgctgcataacagcgatacagtacttaagtgtctgtgtagacaaccaaagaataaatgattcatggtttttttt

SEQ ID NO: 322647 - DNA, 3085 bp, Homo sapiens
cgcccgggggcgggccttcgccgggggtaggactccggccttggtggcgggtggctggcggttccgttaggtctgagggagcgatggcggtacgcgcgttgaagctgctgaccacactgctggctgtcgtggccgctgcctcccaagccgaggtcgagtccgaggcaggatggggcatggtgacgcctgatctgctcttcgccgaggggaccgcagcctacgcgcgcggggactggcccggggtggtcctgagcatggaacgggcgctgcgctcccgggcagccctccgcgcccttcgcctgcgctgccgcacccagtgtgccgccgacttcccgtgggagctggaccccgactggtcccccagcccggcccaggcctcgggcgccgccgccctgcgcgacctgagcttcttcgggggccttctgcgtcgcgctgcctgcctgcgccgctgcctcgggccgccggccgcccactcgctcagcgaagagatggagctggagttccgcaagcggagcccctacaactacctgcaggtcgcctacttcaagatcaacaagttggagaaagctgttgctgcagcacacaccttcttcgtgggcaatcctgagcacatggaaatgcagcagaacctagactattaccaaaccatgtctggagtgaaggaggccgacttcaaggatcttgagactcaaccccatatgcaagaatttcgactgggagtgcgactctactcagaggaacagccacaggaagctgtgccccacctagaggcggcgctgcaagaatactttgtggcctatgaggagtgccgtgccctctgcgaagggccctatgactacgatggctacaactaccttgagtacaacgctgacctcttccaggccatcacagatcattacatccaggtcctcaactgtaagcagaactgtgtcacggagcttgcttcccacccaagtcgagagaagccctttgaagacttcctcccatcgcattataattatctgcagtttgcctactataacattgggaattatacacaggctgttgaatgtgccaagacctatcttctcttcttccccaatgacgaggtgatgaaccaaaatttggcctattatgcagctatgcttggagaagaacacaccagatccatcggcccccgtgagagtgccaaggagtaccgacagcgaagcctactggaaaaagaactgcttttcttcgcttatgatgtttttggaattccctttgtggatccggattcatggactccagaagaagtgattcccaagagattgcaagagaaacagaagtcagaacgggaaacagccgtacgcatctcccaggagattgggaaccttatgaaggaaatcgagacccttgtggaagagaagaccaaggagtcactggatgtgagcagactgacccgggaaggtggccccctgctgtatgaaggcatcagtctcaccatgaactccaaactcctgaatggttcccagcgggtggtgatggacggcgtaatctctgaccacgagtgtcaggagctgcagagactgaccaatgtggcagcaacctcaggagatggctaccggggtcagacctccccacatactcccaatgaaaagttctatggtgtcactgtcttcaaagccctcaagctggggcaagaaggcaaagttcctctgcagagtgcccacctgtactacaacgtgacggagaaggtgcggcgcatcatggagtcctacttccgcctggatacgcccctctacttttcctactctcatctggtgtgccgcactgccatcgaagaggtccaggcagagaggaaggatgatagtcatccagtccacgtggacaactgcatcctgaatgccgagaccctcgtgtgtgtcaaagagcccccagcctacaccttccgcgactacagcgccatcctttacctaaatggggacttcgatggcggaaacttttatttcactgaactggatgccaagaccgtgacggcagaggtgcagcctcagtgtggaagagccgtgggattctcttcaggcactgaaaacccacatggagtgaaggctgtcaccagggggcagcgctgtgccatcgccctgtggttcaccctggaccctcgacacagcgagcgggtgagagcagctcgagcgggtgagagcagctggtgctgtggtgacccgttcccagagcgcccttggtttgcctttctcttccccaaatcccattgccagtggctgagacacgaaaggagcacttgggacaccagctccaacgccctgtcattatggtcacattgccttgtcctccctgggcctgctgtgaacgggatccaggtggggaaagaggtcaagacagggagcgatgctgagttcttggttccctccttgggccccacttcagctgtccttttccagagagtaggacctgctgggaaggagatgagcctggggccattaaggaaccttccttgtcccctgggaagtagcagctgagagatagcgagtgtctggagcggaggcctctctgaatgggcaggggtttgtccttgcaggacagggtgcaggcagatgacctggtgaagatgctcttcagcccagaagagatggacctctcccaggagcagcccctggatgcccagcagggcccccccgaacctgcacaagagtctctctcaggcagtgaatcgaagcccaaggatgagctatgacagcgtccaggtcagacggatgggtgactagacccatggagaggaactcttctgcactctgagctggccagcccctcggggctgcagagcagtgagcctacatctgccactcagccgaggggaccctgctcacagccttctacatggtgctactgctcttggagtggacatgaccagacaccgcaccccctggatctggctgagggctcaggacacaggcccagccacccccaggggcctccacaggccgctgcataacagcgatacagtacttaagtgtctgtgtagacaaccaaagaataaatgattcatggttttttttacttggtttgttcagacaatggaaatttgcccattctgtcaaaaaaatct

SEQ ID NO: 322648 - DNA, 2970 bp, Homo sapiens
cgcccgggggcgggccttcgccgggggtaggactccggccttggtggcgggtggctggcggttccgttaggtctgagggagcgatggcggtacgcgcgttgaagctgctgaccacactgctggctgtcgtggccgctgcctcccaagccgaggtcgagtccgaggcaggatggggcatggtgacgcctgatctgctcttcgccgaggggaccgcagcctacgcgcgcggggactggcccggggtggtcctgagcatggaacgggcgctgcgctcccgggcagccctccgcgcccttcgcctgcgctgccgcacccagtgtgccgccgacttcccgtgggagctggaccccgactggtcccccagcccggcccaggcctcgggcgccgccgccctgcgcgacctgagcttcttcgggggccttctgcgtcgcgctgcctgcctgcgccgctgcctcgggccgccggccgcccactcgctcagcgaagagatggagctggagttccgcaagcggagcccctacaactacctgcaggtcgcctacttcaagatcaacaagttggagaaagctgttgctgcagcacacaccttcttcgtgggcaatcctgagcacatggaaatgcagcagaacctagactattaccaaaccatgtctggagtgaaggaggccgacttcaaggatcttgagactcaaccccatatgcaagaatttcgactgggagtgcgactctactcagaggaacagccacaggaagctgtgccccacctagaggcggcgctgcaagaatactttgtggcctatgaggagtgccgtgccctctgcgaagggccctatgactacgatggctacaactaccttgagtacaacgctgacctcttccaggccatcacagatcattacatccaggtcctcaactgtaagcagaactgtgtcacggagcttgcttcccacccaagtcgagagaagccctttgaagacttcctcccatcgcattataattatctgcagtttgcctactataacattgggaattatacacaggctgttgaatgtgccaagacctatcttctcttcttccccaatgacgaggtgatgaaccaaaatttggcctattatgcagctatgcttggagaagaacacaccagatccatcggcccccgtgagagtgccaaggagtaccgacagcgaagcctactggaaaaagaactgcttttcttcgcttatgatgtttttggaattccctttgtggatccggattcatggactccagaagaagtgattcccaagagattgcaagagaaacagaagtcagaacgggaaacagccgtacgcatctcccaggagattgggaaccttatgaaggaaatcgagacccttgtggaagagaagaccaaggagtcactggatgtgagcagactgacccgggaaggtggccccctgctgtatgaaggcatcagtctcaccatgaactccaaactcctgaatggttcccagcgggtggtgatggacggcgtaatctctgaccacgagtgtcaggagctgcagagactgaccaatgtggcagcaacctcaggagatggctaccggggtcagacctccccacatactcccaatgaaaagttctatggtgtcactgtcttcaaagccctcaagctggggcaagaaggcaaagttcctctgcagagtgcccacctgtactacaacgtgacggagaaggtgcggcgcatcatggagtcctacttccgcctggatacgcccctctacttttcctactctcatctggtgtgccgcactgccatcgaagaggtccaggcagagaggaaggatgatagtcatccagtccacgtggacaactgcatcctgaatgccgagaccctcgtgtgtgtcaaagagcccccagcctacaccttccgcgactacagcgccatcctttacctaaatggggacttcgatggcggaaacttttatttcactgaactggatgccaagaccgtgacggcagaggtgcagcctcagtgtggaagagccgtgggattctcttcaggcactgaaaacccacatggagtgaaggctgtcaccagggggcagcgctgtgccatcgccctgtggttcaccctggaccctcgacacagcgagcgggacagggtgcaggcagatgacctggtgaagatgctcttcagcccagaagagatggacctctcccaggagcagcccctggatgcccagcagggcccccccgaacctgcacaagagtctctctcaggcagtgaatcgaagcccaaggatgagctatgacagcgtccaggtcagacggatgggtgactagacccatggagaggaactcttctgcactctgagctggccagcccctcggggctgcagagcagtgagcctacatctgccactcagccgaggggaccctgctcacagccttctacatggtgctactgctcttggagtggacatgaccagacaccgcaccccctggatctggctgagggctcaggacacaggcccagccacccccaggggcctccacaggccgctgcataacagcgatacagtacttaagtgtctgtgtagacaaccaaagaataaatgattcatggttttttttaaaaaaaaaaaaaaaaaaaaaaaaaaaaatttttggggcgccgggcccaaaaaagtttaaaaccctggtggggggcggggccccggggtacggtagcccctgtggggccaacgcggtgtcccaagagagaaacccgggggcaggacctgagggcgggggtttccccaccattaaaaaacgcccgggggggaacccgggcggtcctggaacaaaccacagggggacgtcccggagggcccatcacggggctctacccacggagcccccaagcgagagccgataccaaatgacgcggcgccgggggaaaacacagcaggaaaacgagacaaaacacacacaacaacacgaaacatg

SEQ ID NO: 322649 - DNA, 2717 bp, Homo sapiens
cgcccgggggcgggccttcgccgggggtaggactccggccttggtggcgggtggctggcggttccgttaggtctgagggagcgatggcggtacgcgcgttgaagctgctgaccacactgctggctgtcgtggccgctgcctcccaagccgaggtcgagtccgaggcaggatggggcatggtgacgcctgatctgctcttcgccgaggggaccgcagcctacgcgcgcggggactggcccggggtggtcctgagcatggaacgggcgctgcgctcccgggcagccctccgcgcccttcgcctgcgctgccgcacccagtgtgccgccgacttcccgtgggagctggaccccgactggtcccccagcccggcccaggcctcgggcgccgccgccctgcgcgacctgagcttcttcgggggccttctgcgtcgcgctgcctgcctgcgccgctgcctcgggccgccggccgcccactcgctcagcgaagagatggagctggagttccgcaagcggagcccctacaactacctgcaggtcgcctacttcaagatcaacaagttggagaaagctgttgctgcagcacacaccttcttcgtgggcaatcctgagcacatggaaatgcagcagaacctagactattaccaaaccatgtctggagtgaaggaggccgacttcaaggatcttgagactcaaccccatatgcaagaatttcgactgggagtgcgactctactcagaggaacagccacaggaagctgtgccccacctagaggcggcgctgcaagaatactttgtggcctatgaggagtgccgtgccctctgcgaagggccctatgactacgatggctacaactaccttgagtacaacgctgacctcttccaggccatcacagatcattacatccaggtcctcaactgtaagcagaactgtgtcacggagcttgcttcccacccaagtcgagagaagccctttgaagacttcctcccatcgcattataattatctgcagtttgcctactataacattgggaattatacacaggctgttgaatgtgccaagacctatcttctcttcttccccaatgacgaggtgatgaaccaaaatttggcctattatgcagctatgcttggagaagaacacaccagatccatcggcccccgtgagagtgccaaggagtaccgacagcgaagcctactggaaaaagaactgcttttcttcgcttatgatgtttttggaattccctttgtggatccggattcatggactccagaagaagtgattcccaagagattgcaagagaaacagaagtcagaacgggaaacagccgtacgcatctcccaggagattgggaaccttatgaaggaaatcgagacccttgtggaagagaagaccaaggagtcactggatgtgagcagactgacccgggaaggtggccccctgctgtatgaaggcatcagtctcaccatgaactccaaactcctgaatggttcccagcgggtggtgatggacggcgtaatctctgaccacgagtgtcaggagctgcagagactgaccaatgtggcagcaacctcaggagatggctaccggggtcagacctccccacatactcccaatgaaaagttctatggtgtcactgtcttcaaagccctcaagctggggcaagaaggcaaagttcctctgcagagtgcccacctgtactacaacgtgacggagaaggtgcggcgcatcatggagtcctacttccgcctggatacgcccctctacttttcctactctcatctggtgtgccgcactgccatcgaagaggtccaggcagagaggaaggatgatagtcatccagtccacgtggacaactgcatcctgaatgccgagaccctcgtgtgtgtcaaagagcccccagcctacaccttccgcgactacagcgccatcctttacctaaatggggacttcgatggcggaaacttttatttcactgaactggatgccaagaccgtgacggcagaggtgcagcctcagtgtggaagagccgtgggattctcttcaggcactgaaaacccacatggagtgaaggctgtcaccagggggcagcgctgtgccatcgccctgtggttcaccctggaccctcgacacagcgagcgggacagggtgcaggcagatgacctggtgaagatgctcttcagcccagaagagatggacctctcccaggagcagcccctggatgcccagcagggcccccccgaacctgcacaagagtctctctcaggcagtgaatcgaagcccaaggatgagctatgacagcgtccaggtcagacggatgggtgactagacccatggagaggaactcttctgcactctgagctggccagcccctcggggctgcagagcagtgagcctacatctgccactcagccgaggggaccctgctcacagccttctacatggtgctactgctcttggagtggacatgaccagacaccgcaccccctggatctggctgagggctcaggacacaggcccagccacccccaggggcctccacaggccgctgcataacagcgatacagtacttaagtgtctgtgtagacaaccaaagaataaatgattcatggtttttttttttttttttttttttttttttttttttttttggggggggggggggggggaaaaaaataaaggggggggaaggggggggggaaataaaaaaaaggggggggg

SEQ ID NO: 322650 - DNA, 2543 bp, Homo sapiens
cgcccgggggcgggccttcgccgggggtaggactccggccttggtggcgggtggctggcggttccgttaggtctgagggagcgatggcggtacgcgcgttgaagctgctgaccacactgctggctgtcgtggccgctgcctcccaagccgaggtcgagtccgaggcaggatggggcatggtgacgcctgatctgctcttcgccgaggggaccgcagcctacgcgcgcggggactggcccggggtggtcctgagcatggaacgggcgctgcgctcccgggcagccctccgcgcccttcgcctgcgctgccgcacccagtgtgccgccgacttcccgtgggagctggaccccgactggtcccccagcccggcccaggcctcgggcgccgccgccctgcgcgacctgagcttcttcgggggccttctgcgtcgcgctgcctgcctgcgccgctgcctcgggccgccggccgcccactcgctcagcgaagagatggagctggagttccgcaagcggagcccctacaactacctgcaggtcgcctacttcaagatcaacaagttggagaaagctgttgctgcagcacacaccttcttcgtgggcaatcctgagcacatggaaatgcagcagaacctagactattaccaaaccatgtctggagtgaaggaggccgacttcaaggatcttgagactcaaccccatatgcaagaatttcgactgggagtgcgactctactcagaggaacagccacaggaagctgtgccccacctagaggcggcgctgcaagaatactttgtggcctatgaggagtgccgtgccctctgcgaagggccctatgactacgatggctacaactaccttgagtacaacgctgacctcttccaggccatcacagatcattacatccaggtcctcaactgtaagcagaactgtgtcacggagcttgcttcccacccaagtcgagagaagccctttgaagacttcctcccatcgcattataattatctgcagtttgcctactataacattgggaattatacacaggctgttgaatgtgccaagacctatcttctcttcttccccaatgacgaggtgatgaaccaaaatttggcctattatgcagctatgcttggagaagaacacaccagatccatcggcccccgtgagagtgccaaggagtaccgacagcgaagcctactggaaaaagaactgcttttcttcgcttatgatgtttttggaattccctttgtggatccggattcatggactccagaagaagtgattcccaagagattgcaagagaaacagaagtcagaacgggaaacagccgtacgcatctcccaggagattgggaaccttatgaaggaaatcgagacccttgtggaagagaagaccaaggagtcactggatgtgagcagactgacccgggaaggtggccccctgctgtatgaaggcatcagtctcaccatgaactccaaactcctgaatggttcccagcgggtggtgatggacggcgtaatctctgaccacgagtgtcaggagctgcagagactgaccaatgtggcagcaacctcaggagatggctaccggggtcagacctccccacatactcccaatgaaaagttctatggtgtcactgtcttcaaagccctcaagctggggcaagaaggcaaagttcctctgcagagtgcccacctgtactacaacgtgacggagaaggtgcggcgcatcatggagtcctacttccgcctggatacgcccctctacttttcctactctcatctggtgtgccgcactgccatcgaagaggtccaggcagagaggaaggatgatagtcatccagtccacgtggacaactgcatcctgaatgccgagaccctcgtgtgtgtcaaagagcccccagcctacaccttccgcgactacagcgccatcctttacctaaatggggacttcgatggcggaaacttttatttcactgaactggatgccaagaccgtgacggcagaggtgcagcctcagtgtggaagagccgtgggattctcttcaggcactgaaaacccacatggagtgaaggctgtcaccagggagcagcccctggatgcccagcagggcccccccgaacctgcacaagagtctctctcaggcagtgaatcgaagcccaaggatgagctatgacagcgtccaggtcagacggatgggtgactagacccatggagaggaactcttctgcactctgagctggccagcccctcggggctgcagagcagtgagcctacatctgccactcagccgaggggaccctgctcacagccttctacatggtgctactgctcttggagtggacatgaccagacaccgcaccccctggatctggctgagggctcaggacacaggcccagccacccccaggggcctccacaggccgctgcataacagcgatacagtacttaagtgtctgtgtagacaaccaaagaataaatgattcatggttttttttacttggtttgttcagacaatggaaatttgcccattctgtcaaaaaaatct

SEQ ID NO: 322651 - DNA, 1882 bp, Homo sapiens
cgcccgggggcgggccttcgccgggggtaggactccggccttggtggcgggtggctggcggttccgttaggtctgagggagcgatggcggtacgcgcgttgaagctgctgaccacactgctggctgtcgtggccgctgcctcccaagccgaggtcgagtccgaggcaggatggggcatggtgacgcctgatctgctcttcgccgaggggaccgcagcctacgcgcgcggggactggcccggggtggtcctgagcatggaacgggcgctgcgctcccgggcagccctccgcgcccttcgcctgcgctgccgcacccagtgtgccgccgacttcccgtgggagctggaccccgactggtcccccagcccggcccaggcctcgggcgccgccgccctgcgcgacctgagcttcttcgggggccttctgcgtcgcgctgcctgcctgcgccgctgcctcgggccgccggccgcccactcgctcagcgaagagatggagctggagttccgcaagcggagcccctacaactacctgcaggtcgcctacttcaagatcaacaagttggagaaagctgttgctgcagcacacaccttcttcgtgggcaatcctgagcacatggaaatgcagcagaacctagactattaccaaaccatgtctggagtgaaggaggccgacttcaaggatcttgagactcaaccccatatgcaagaatttcgactgggagtgcgactctactcagaggaacagccacaggaagctgtgccccacctagaggcggcgctgcaagaatactttgtggcctatgaggagtgccgtgccctctgcgaagggccctatgactacgatggctacaactaccttgagtacaacgctgacctcttccaggccatcacagatcattacatccaggtcctcaactgtaagcagaactgtgtcacggagcttgcttcccacccaagtcgagagaagccctttgaagacttcctcccatcgcattataattatctgcagtttgcctactataacattgggaattatacacaggctgttgaatgtgccaagacctatcttctcttcttccccaatgacgaggtgatgaaccaaaatttggcctattatgcagctatgcttggagaagaacacaccagatccatcggcccccgtgagagtgccaaggagtaccgacagcgaagcctactggaaaaagaactgcttttcttcgcttatgatgtttttggaattccctttgtggatccggattcatggactccagaagaagtgattcccaagagattgcaagagaaacagaagtcagaacgggaaacagccgtacgcatctcccaggagattgggaaccttatgaaggaaatcgagacccttgtggaagagaagaccaaggagtcactggatgtgagcagactgacccgggaaggtggccccctgctgtatgaaggcatcagtctcaccatgaactccaaactcctgaatggttcccagcgggtggtgatggacggcgtaatctctgaccacgagtgtcaggagctgcagagactgaccaatgtggcagcaacctcaggagatggctaccggggtcagacctccccacatactcccaatgaaaagttctatggtgtcactgtcttcaaagccctcaagctggggcaagaaggcaaagttcctctgcagagtgcccacctgtactacaacgtgacggagaaggtgcggcgcatcatggagtcctacttccgcctggctggatctggctgagggctcaggacacaggcccagccacccccaggggcctccacaggccgctgcataacagcgatacagtacttaagtgtctgtgtagacaaccaaagaataaatgattcatggtttttttt

SEQ ID NO: 322652 - DNA, 1596 bp, Homo sapiens
  misc_feature (1556)..(1556): n is a, c, g, or t
cgcccgggggcgggccttcgccgggggtaggactccggccttggtggcgggtggctggcggttccgttaggtctgagggagcgatggcggtacgcgcgttgaagctgctgaccacactgctggctgtcgtggccgctgcctcccaagccgaggtcgagtccgaggcaggatggggcatggtgacgcctgatctgctcttcgccgaggggaccgcagcctacgcgcgcggggactggcccggggtggtcctgagcatggaacgggcgctgcgctcccgggcagccctccgcgcccttcgcctgcgctgccgcacccagtgtgccgccgacttcccgtgggagctggaccccgactggtcccccagcccggcccaggcctcgggcgccgccgccctgcgcgacctgagcttcttcgggggccttctgcgtcgcgctgcctgcctgcgccgctgcctcgggccgccggccgcccactcgctcagcgaagagatggagctggagttccgcaagcggagcccctacaactacctgcaggtcgcctacttcaagatcaacaagttggagaaagctgttgctgcagcacacaccttcttcgtgggcaatcctgagcacatggaaatgcagcagaacctagactattaccaaaccatgtctggagtgaaggaggccgacttcaaggatcttgagactcaaccccatatgcaagaatttcgactgggagtgcgactctactcagaggaacagccacaggaagctgtgccccacctagaggcggcgctgcaagaatactttgtggcctatgaggagtgccgtgccctctgcgaagggccctatgactacgatggctacaactaccttgagtacaacgctgacctcttccaggccatcacagatcattacatccaggtcctcaactgtaagcagaactgtgtcacggagcttgcttcccacccaagtcgagagaagccctttgaagacttcctcccatcgcattataattatctgcagtttgcctactataacattgggaattatacacaggctgttgaatgtgccaagacctatcttctcttcttccccaatgacgaggtgatgaaccaaaatttggcctattatgcagctatgcttggagaagaacacaccagatccatcggcccccgtgagagtgccaaggagtaccgacagcgaagcctactggaaaaagaactgcttttcttcgcttatgatgtttttggaattccctttgtggatccggattcatggactccagaagaagtgattcccaagagattgcaagagaaacagaagtcagaacgggaaacagccgtacgcatctcccaggagattgggaaccttatgaaggaaatcgagacccttgtggaagagaagaccaaggagtcactggatgtgagcagactgacccgggaaggtggccccctgctgtatgaaggcatcagtctcaccatgaactccaaactcctgaatggttcccagcgggtggtgatggacggcgtaatctctgaccccggtagccatctcctgaggttgctgccacanttggtcagtctacagctcgtacatctcgtgtcaagtacat

SEQ ID NO: 322653 - DNA, 944 bp, Homo sapiens
aagacacccccctagttcattgggcattccgtagactcaaacacattttgggaagcacctcccctgccaagaagagagctatgccgtctcccgaggtgctcccttgctaacatgtgtgacattggccccagaggtccaggcagagaggaaggatgatagtcatccagtccacgtggacaactgcatcctgaatgccgagaccctcgtgtgtgtcaaagagcccccagcctacaccttccgcgactacagcgccatcctttacctaaatggggacttcgatggcggaaacttttatttcactgaactggatgccaagaccgtgacggcagaggtgcagcctcagtgtggaagagccgtgggattctcttcaggcactgaaaacccacatggagtgaaggctgtcaccagggggcagcgctgtgccatcgccctgtggttcaccctggaccctcgacacagcgagcgggacagggtgcaggcagatgacctggtgaagatgctcttcagcccagaagagatggacctctcccaggagcagcccctggatgcccagcagggcccccccgaacctgcacaagagtctctctcaggcagtgaatcgaagcccaaggatgagctatgacagcgtccaggtcagacggatgggtgactagacccatggagaggaactcttctgcactctgagctggccagcccctcggggctgcagagcagtgagcctacatctgccactcagccgaggggaccctgctcacagccttctacatggtgctactgctcttggagtggacatgaccagacaccgcaccccctggatctggctgagggctcaggacacaggcccagccacccccaggggcctccacaggccgctgcataacagcgatacagtacttaagtgtctgtgtagacaaccaaagaataaatgattcatggtttttttt

SEQ ID NO: 322654 - DNA, 870 bp, Homo sapiens
ggggctttgagacgtgtccatcactcctctagaccagtcaccctttctctttagttctggtcttagggaagccatactgaagagctgccctcggtcgtgagccctaatgagcccatgtctcttctgagagtggattacagtctttgtcctgtgcaacccccctccctttctgtcccccttaggcagaggtgcagcctcagtgtggaagagccgtgggattctcttcaggcactgaaaacccacatggagtgaaggctgtcaccagggggcagcgctgtgccatcgccctgtggttcaccctggaccctcgacacagcgagcgggtgagagcagctcgagcgggacagggtgcaggcagatgacctggtgaagatgctcttcagcccagaagagatggacctctcccaggagcagcccctggatgcccagcagggcccccccgaacctgcacaagagtctctctcaggcagtgaatcgaagcccaaggatgagctatgacagcgtccaggtcagacggatgggtgactagacccatggagaggaactcttctgcactctgagctggccagcccctcggggctgcagagcagtgagcctacatctgccactcagccgaggggaccctgctcacagccttctacatggtgctactgctcttggagtggacatgaccagacaccgcaccccctggatctggctgagggctcaggacacaggcccagccacccccaggggcctccacaggccgctgcataacagcgatacagtacttaagtgtctgtgtagacaaccaaagaataaatgattcatggttttttttacttggtttgttcagacaatggaaatttgcccattctgtcaaaaaaatct

SEQ ID NO: 322655 - DNA, 2616 bp, Homo sapiens
cgcccgggggcgggccttcgccgggggtaggactccggccttggtggcgggtggctggcggttccgttaggtctgagggagcgatggcggtacgcgcgttgaagctgctgaccacactgctggctgtcgtggccgctgcctcccaagccgaggtcgagtccgaggcaggatggggcatggtgacgcctgatctgctcttcgccgaggggaccgcagcctacgcgcgcggggactggcccggggtggtcctgagcatggaacgggcgctgcgctcccgggcagccctccgcgcccttcgcctgcgctgccgcacccagtgtgccgccgacttcccgtgggagctggaccccgactggtcccccagcccggcccaggcctcgggcgccgccgccctgcgcgacctgagcttcttcgggggccttctgcgtcgcgctgcctgcctgcgccgctgcctcgggccgccggccgcccactcgctcagcgaagagatggagctggagttccgcaagcggagcccctacaactacctgcaggtcgcctacttcaagatcaacaagttggagaaagctgttgctgcagcacacaccttcttcgtgggcaatcctgagcacatggaaatgcagcagaacctagactattaccaaaccatgtctggagtgaaggaggccgacttcaaggatcttgagactcaaccccatatgcaagaatttcgactgggagtgcgactctactcagaggaacagccacaggaagctgtgccccacctagaggcggcgctgcaagaatactttgtggcctatgaggagtgccgtgccctctgcgaagggccctatgactacgatggctacaactaccttgagtacaacgctgacctcttccaggccatcacagatcattacatccaggtcctcaactgtaagcagaactgtgtcacggagcttgcttcccacccaagtcgagagaagccctttgaagacttcctcccatcgcattataattatctgcagtttgcctactataacattgggaattatacacaggctgttgaatgtgccaagacctatcttctcttcttccccaatgacgaggtgatgaaccaaaatttggcctattatgcagctatgcttggagaagaacacaccagatccatcggcccccgtgagagtgccaaggagtaccgacagcgaagcctactggaaaaagaactgcttttcttcgcttatgatgtttttggaattccctttgtggatccggattcatggactccagaagaagtgattcccaagagattgcaagagaaacagaagtcagaacgggaaacagccgtacgcatctcccaggagattgggaaccttatgaaggaaatcgagacccttgtggaagagaagaccaaggagtcactggatgtgagcagactgacccgggaaggtggccccctgctgtatgaaggcatcagtctcaccatgaactccaaactcctgaatggttcccagcgggtggtgatggacggcgtaatctctgaccacgagtgtcaggagctgcagagactgaccaatgtggcagcaacctcaggagatggctaccggggtcagacctccccacatactcccaatgaaaagttctatggtgtcactgtcttcaaagccctcaagctggggcaagaaggcaaagttcctctgcagagtgcccacctgtactacaacgtgacggagaaggtgcggcgcatcatggagtcctacttccgcctggatacgcccctctacttttcctactctcatctggtgtgccgcactgccatcgaagaggtccaggcagagaggaaggatgatagtcatccagtccacgtggacaactgcatcctgaatgccgagaccctcgtgtgtgtcaaagagcccccagcctacaccttccgcgactacagcgccatcctttacctaaatggggacttcgatggcggaaacttttatttcactgaactggatgccaagaccgtgacggcagaggtgcagcctcagtgtggaagagccgtgggattctcttcaggcactgaaaacccacatggagtgaaggctgtcaccagggggcagcgctgtgccatcgccctgtggttcaccctggaccctcgacacagcgagcgggacagggtgcaggcagatgacctggtgaagatgctcttcagcccagaagagatggacctctcccaggagcagcccctggatgcccagcagggcccccccgaacctgcacaagagtctctctcaggcagtgaatcgaagcccaaggatgagctatgacagcgtccaggtcagacggatgggtgactagacccatggagaggaactcttctgcactctgagctggccagcccctcggggctgcagagcagtgagcctacatctgccactcagccgaggggaccctgctcacagccttctacatggtgctactgctcttggagtggacatgaccagacaccgcaccccctggatctggctgagggctcaggacacaggcccagccacccccaggggcctccacaggccgctgcataacagcgatacagtacttaagtgtctgtgtagacaaccaaagaataaatgattcatggtttttttt

SEQ ID NO: 322656 - DNA, 1621 bp, Homo sapiens
cgcccgggggcgggccttcgccgggggtaggactccggccttggtggcgggtggctggcggttccgttaggtctgagggagcgatggcggtacgcgcgttgaagctgctgaccacactgctggctgtcgtggccgctgcctcccaagccgaggtcgagtccgaggcaggatggggcatggtgacgcctgatctgctcttcgccgaggggaccgcagcctacgcgcgcggggactggcccggggtggtcctgagcatggaacgggcgctgcgctcccgggcagccctccgcgcccttcgcctgcgctgccgcacccagtgtgccgccgacttcccgtgggagctggaccccgactggtcccccagcccggcccaggcctcgggcgccgccgccctgcgcgacctgagcttcttcgggggccttctgcgtcgcgctgcctgcctgcgccgctgcctcgggccgccggccgcccactcgctcagcgaagagatggagctggagttccgcaagcggagcccctacaactacctgcaggtcgcctacttcaaggtgcagacctgcctggaaccaggcggccggggtccttctggggagaggagtgttgcaggggacctgaggagcttgggggatcggggaagtgtccgcagggaggggaaagtggcctcctggctggggagctctcctcggagccggggagagctgctccctggcaggagaccttcctcgcccagttcgcatgggcagatgctaaccccaaaggtccagcctggggttagggcacaggccaagcaaaactcatggccattttgttccctgggaaatctcctggaaggaattaaagcggcagtttgggtctcccattctgatgtcattgtaagtgtccgagtgagaagctagtagcggtctacaatatctcccttccggttggttttccagtggtgcttttcctgctgtttgattcagcagctctctttcaggatgtgaggttgccacgtcgccagcaggggctgcctggccctttctgtgtgtgtgtgggggcgggggggggaccctctggctagtctgccaggtttacaaagaaaatgagtatttttcggaatgccagagtgccatgtgtccaagtgtacacttgggcttggagcgttccaggcttgtttggtggtggtgatggtgacgatgatgatgatgatgatagccagcacatacttccaggcactattttaagcagtttgcatttattaacgcatttgccctaatcttcataatatcttgtcaggtagatgctgttattagtcccactgtattgggggtggggggagaaagagttgtgcattatatctggtatatctgttgtttaaaagaccttcgattcgatctaaagagacacttagagactcttggggacctcagatttccacccctccacagcattctgcctacacagttcccctcatttttcctagttactcggaagagcgctggacttgaaatcaaaataattgcgttatgtctttggttatgtcgcttcatcatagcactttctaaaactatttgacaaacatgtattgcatacctactgcattccagttcttgtacaagtaattaaatgctcgactaacgtc

SEQ ID NO: 322657 - DNA, 2666 bp, Homo sapiens
cgcccgggggcgggccttcgccgggggtaggactccggccttggtggcgggtggctggcggttccgttaggtctgagggagcgatggcggtacgcgcgttgaagctgctgaccacactgctggctgtcgtggccgctgcctcccaagccgaggtcgagtccgaggcaggatggggcatggtgacgcctgatctgctcttcgccgaggggaccgcagcctacgcgcgcggggactggcccggggtggtcctgagcatggaacgggcgctgcgctcccgggcagccctccgcgcccttcgcctgcgctgccgcacccagtgtgccgccgacttcccgtgggagctggaccccgactggtcccccagcccggcccaggcctcgggcgccgccgccctgcgcgacctgagcttcttcgggggccttctgcgtcgcgctgcctgcctgcgccgctgcctcgggccgccggccgcccactcgctcagcgaagagatggagctggagttccgcaagcggagcccctacaactacctgcaggtcgcctacttcaagatcaacaagttggagaaagctgttgctgcagcacacaccttcttcgtgggcaatcctgagcacatggaaatgcagcagaacctagactattaccaaaccatgtctggagtgaaggaggccgacttcaaggatcttgagactcaaccccatatgcaagaatttcgactgggagtgcgactctactcagaggaacagccacaggaagctgtgccccacctagaggcggcgctgcaagaatactttgtggcctatgaggagtgccgtgccctctgcgaagggccctatgactacgatggctacaactaccttgagtacaacgctgacctcttccaggccatcacagatcattacatccaggtcctcaactgtaagcagaactgtgtcacggagcttgcttcccacccaagtcgagagaagccctttgaagacttcctcccatcgcattataattatctgcagtttgcctactataacattgggaattatacacaggctgttgaatgtgccaagacctatcttctcttcttccccaatgacgaggtgatgaaccaaaatttggcctattatgcagctatgcttggagaagaacacaccagatccatcggcccccgtgagagtgccaaggagtaccgacagcgaagcctactggaaaaagaactgcttttcttcgcttatgatgtttttggaattccctttgtggatccggattcatggactccagaagaagtgattcccaagagattgcaagagaaacagaagtcagaacgggaaacagccgtacgcatctcccaggagattgggaaccttatgaaggaaatcgagacccttgtggaagagaagaccaaggagtcactggatgtgagcagactgacccgggaaggtggccccctgctgtatgaaggcatcagtctcaccatgaactccaaactcctgaatggttcccagcgggtggtgatggacggcgtaatctctgaccacgagtgtcaggagctgcagagactgaccaatgtggcagcaacctcaggagatggctaccggggtcagacctccccacatactcccaatgaaaagttctatggtgtcactgtcttcaaagccctcaagctggggcaagaaggcaaagttcctctgcagagtgcccacctgtactacaacgtgacggagaaggtgcggcgcatcatggagtcctacttccgcctggatacgcccctctacttttcctactctcatctggtgtgccgcactgccatcgaagaggtccaggcagagaggaaggatgatagtcatccagtccacgtggacaactgcatcctgaatgccgagaccctcgtgtgtgtcaaagagcccccagcctacaccttccgcgactacagcgccatcctttacctaaatggggacttcgatggcggaaacttttatttcactgaactggatgccaagaccgtgacggcagaggtgcagcctcagtgtggaagagccgtgggattctcttcaggcactgaaaacccacatggagtgaaggctgtcaccagggggcagcgctgtgccatcgccctgtggttcaccctggaccctcgacacagcgagcgggacagggtgcaggcagatgacctggtgaagatgctcttcagcccagaagagatggacctctcccaggagcagcccctggatgcccagcagggcccccccgaacctgcacaagagtctctctcaggcagtgaatcgaagcccaaggatgagctatgacagcgtccaggtcagacggatgggtgactagacccatggagaggaactcttctgcactctgagctggccagcccctcggggctgcagagcagtgagcctacatctgccactcagccgaggggaccctgctcacagccttctacatggtgctactgctcttggagtggacatgaccagacaccgcaccccctggatctggctgagggctcaggacacaggcccagccacccccaggggcctccacaggccgctgcataacagcgatacagtacttaagtgtctgtgtagacaaccaaagaataaatgattcatggttttttttacttggtttgttcagacaatggaaatttgcccattctgtcaaaaaaatct

SEQ ID NO: 322658 - DNA, 2790 bp, Homo sapiens
cgcccgggggcgggccttcgccgggggtaggactccggccttggtggcgggtggctggcggttccgttaggtctgagggagcgatggcggtacgcgcgttgaagctgctgaccacactgctggctgtcgtggccgctgcctcccaagccgaggtcgagtccgaggcaggatggggcatggtgacgcctgatctgctcttcgccgaggggaccgcagcctacgcgcgcggggactggcccggggtggtcctgagcatggaacgggcgctgcgctcccgggcagccctccgcgcccttcgcctgcgctgccgcacccagtgtgccgccgacttcccgtgggagctggaccccgactggtcccccagcccggcccaggcctcgggcgccgccgccctgcgcgacctgagcttcttcgggggccttctgcgtcgcgctgcctgcctgcgccgctgcctcgggccgccggccgcccactcgctcagcgaagagatggagctggagttccgcaagcggagcccctacaactacctgcaggtcgcctacttcaagatcaacaagttggagaaagctgttgctgcagcacacaccttcttcgtgggcaatcctgagcacatggaaatgcagcagaacctagactattaccaaaccatgtctggagtgaaggaggccgacttcaaggatcttgagactcaaccccatatgcaagaatttcgactgggagtgcgactctactcagaggaacagccacaggaagctgtgccccacctagaggcggcgctgcaagaatactttgtggcctatgaggagtgccgtgccctctgcgaagggccctatgactacgatggctacaactaccttgagtacaacgctgacctcttccaggccatcacagatcattacatccaggtcctcaactgtaagcagaactgtgtcacggagcttgcttcccacccaagtcgagagaagccctttgaagacttcctcccatcgcattataattatctgcagtttgcctactataacattgggaattatacacaggctgttgaatgtgccaagacctatcttctcttcttccccaatgacgaggtgatgaaccaaaatttggcctattatgcagctatgcttggagaagaacacaccagatccatcggcccccgtgagagtgccaaggagtaccgacagcgaagcctactggaaaaagaactgcttttcttcgcttatgatgtttttggaattccctttgtggatccggattcatggactccagaagaagtgattcccaagagattgcaagagaaacagaagtgaggaccttgaagaaactgcatggttggatcagtctgatgaagcacttgaggcttcctgagcccaggcagatgtgaactcctggcaaggggtgggcaggtccagtttgggaagtcggggtggagcccagggctggccctggaatgcagtcctcagagcggctgtgctcataggtcagaacgggaaacagccgtacgcatctcccaggagattgggaaccttatgaaggaaatcgagacccttgtggaagagaagaccaaggagtcactggatgtgagcagactgacccgggaaggtggccccctgctgtatgaaggcatcagtctcaccatgaactccaaactcctgaatggttcccagcgggtggtgatggacggcgtaatctctgaccacgagtgtcaggagctgcagagactgaccaatgtggcagcaacctcaggagatggctaccggggtcagacctccccacatactcccaatgaaaagttctatggtgtcactgtcttcaaagccctcaagctggggcaagaaggcaaagttcctctgcagagtgcccacctgtactacaacgtgacggagaaggtgcggcgcatcatggagtcctacttccgcctggatacgcccctctacttttcctactctcatctggtgtgccgcactgccatcgaagaggtccaggcagagaggaaggatgatagtcatccagtccacgtggacaactgcatcctgaatgccgagaccctcgtgtgtgtcaaagagcccccagcctacaccttccgcgactacagcgccatcctttacctaaatggggacttcgatggcggaaacttttatttcactgaactggatgccaagaccgtgacggcagaggtgcagcctcagtgtggaagagccgtgggattctcttcaggcactgaaaacccacatggagtgaaggctgtcaccagggggcagcgctgtgccatcgccctgtggttcaccctggaccctcgacacagcgagcgggacagggtgcaggcagatgacctggtgaagatgctcttcagcccagaagagatggacctctcccaggagcagcccctggatgcccagcagggcccccccgaacctgcacaagagtctctctcaggcagtgaatcgaagcccaaggatgagctatgacagcgtccaggtcagacggatgggtgactagacccatggagaggaactcttctgcactctgagctggccagcccctcggggctgcagagcagtgagcctacatctgccactcagccgaggggaccctgctcacagccttctacatggtgctactgctcttggagtggacatgaccagacaccgcaccccctggatctggctgagggctcaggacacaggcccagccacccccaggggcctccacaggccgctgcataacagcgatacagtacttaagtgtctgtgtagacaaccaaagaataaatgattcatggtttttttt

SEQ ID NO: 322659 - DNA, 2586 bp, Homo sapiens
atgctttgtaacttaacgtgttaaaagcaggtcgcgatctcggtgtgcggtctagtctgagacgaggtacgcgcgtgactgtgacactgctggctgtcgtggccgctgcctcccaagccgaggtcgagtccgaggcaggatggggcatggtgacgcctgatctgctcttcgccgaggggaccgcagcctacgcgcgcggggactggcccggggtggtcctgagcatggaacgggcgctgcgctcccgggcagccctccgcgcccttcgcctgcgctgccgcacccagtgtgccgccgacttcccgtgggagctggaccccgactggtcccccagcccggcccaggcctcgggcgccgccgccctgcgcgacctgagcttcttcgggggccttctgcgtcgcgctgcctgcctgcgccgctgcctcgggccgccggccgcccactcgctcagcgaagagatggagctggagttccgcaagcggagcccctacaactacctgcaggtcgcctacttcaagatcaacaagttggagaaagctgttgctgcagcacacaccttcttcgtgggcaatcctgagcacatggaaatgcagcagaacctagactattaccaaaccatgtctggagtgaaggaggccgacttcaaggatcttgagactcaaccccatatgcaagaatttcgactgggagtgcgactctactcagaggaacagccacaggaagctgtgccccacctagaggcggcgctgcaagaatactttgtggcctatgaggagtgccgtgccctctgcgaagggccctatgactacgatggctacaactaccttgagtacaacgctgacctcttccaggccatcacagatcattacatccaggtcctcaactgtaagcagaactgtgtcacggagcttgcttcccacccaagtcgagagaagccctttgaagacttcctcccatcgcattataattatctgcagtttgcctactataacattgggaattatacacaggctgttgaatgtgccaagacctatcttctcttcttccccaatgacgaggtgatgaaccaaaatttggcctattatgcagctatgcttggagaagaacacaccagatccatcggcccccgtgagagtgccaaggagtaccgacagcgaagcctactggaaaaagaactgcttttcttcgcttatgatgtttttggaattccctttgtggatccggattcatggactccagaagaagtgattcccaagagattgcaagagaaacagaagtcagaacgggaaacagccgtacgcatctcccaggagattgggaaccttatgaaggaaatcgagacccttgtggaagagaagaccaaggagtcactggatgtgagcagactgacccgggaaggtggccccctgctgtatgaaggcatcagtctcaccatgaactccaaactcctgaatggttcccagcgggtggtgatggacggcgtaatctctgaccacgagtgtcaggagctgcagagactgaccaatgtggcagcaacctcaggagatggctaccggggtcagacctccccacatactcccaatgaaaagttctatggtgtcactgtcttcaaagccctcaagctggggcaagaaggcaaagttcctctgcagagtgcccacctgtactacaacgtgacggagaaggtgcggcgcatcatggagtcctacttccgcctggatacgcccctctacttttcctactctcatctggtgtgccgcactgccatcgaagaggtccaggcagagaggaaggatgatagtcatccagtccacgtggacaactgcatcctgaatgccgagaccctcgtgtgtgtcaaagagcccccagcctacaccttccgcgactacagcgccatcctttacctaaatggggacttcgatggcggaaacttttatttcactgaactggatgccaagaccgtgacggcagaggtgcagcctcagtgtggaagagccgtgggattctcttcaggcactgaaaacccacatggagtgaaggctgtcaccagggggcagcgctgtgccatcgccctgtggttcaccctggaccctcgacacagcgagcgggacagggtgcaggcagatgacctggtgaagatgctcttcagcccagaagagatggacctctcccaggagcagcccctggatgcccagcagggcccccccgaacctgcacaagagtctctctcaggcagtgaatcgaagcccaaggatgagctatgacagcgtccaggtcagacggatgggtgactagacccatggagaggaactcttctgcactctgagctggccagcccctcggggctgcagagcagtgagcctacatctgccactcagccgaggggaccctgctcacagccttctacatggtgctactgctcttggagtggacatgaccagacaccgcaccccctggatctggctgagggctcaggacacaggcccagccacccccaggggcctccacaggccgctgcataacagcgatacagtacttaagtgtctgtgtagacaaccaaagaataaatgattcatggtttttttt

SEQ ID NO: 322660 - DNA, 2685 bp, Homo sapiens
cgcccgggggcgggccttcgccgggggtaggactccggccttggtggcgggtggctggcggttccgttaggtctgagggagcgatggcggtacgcgcgttgaagctgctgaccacactgctggctgtcgtggccgctgcctcccaagccgaggtcgagtccgaggcaggatggggcatggtgacgcctgatctgctcttcgccgaggggaccgcagcctacgcgcgcggggactggcccggggtggtcctgagcatggaacgggcgctgcgctcccgggcagccctccgcgcccttcgcctgcgctgccgcacccagtgtgccgccgacttcccgtgggagctggaccccgactggtcccccagcccggcccaggcctcgggcgccgccgccctgcgcgacctgagcttcttcgggggccttctgcgtcgcgctgcctgcctgcgccgctgcctcgggccgccggccgcccactcgctcagcgaagagatggagctggagttccgcaagcggagcccctacaactacctgcaggtcgcctacttcaagatcaacaagttggagaaagctgttgctgcagcacacaccttcttcgtgggcaatcctgagcacatggaaatgcagcagaacctagactattaccaaaccatgtctggagtgaaggaggccgacttcaaggatcttgagactcaaccccatatgcaagaatttcgactgggagtgcgactctactcagaggaacagccacaggaagctgtgccccacctagaggcggcgctgcaagaatactttgtggcctatgaggagtgccgtgccctctgcgaagggccctatgactacgatggctacaactaccttgagtacaacgctgacctcttccaggccatcacagatcattacatccaggtcctcaactgtaagcagaactgtgtcacggagcttgcttcccacccaagtcgagagaagccctttgaagacttcctcccatcgcattataattatctgcagtttgcctactataacattgggaattatacacaggctgttgaatgtgccaagacctatcttctcttcttccccaatgacgaggtgatgaaccaaaatttggcctattatgcagctatgcttggagaagaacacaccagatccatcggcccccgtgagagtgccaaggagtaccgacagcgaagcctactggaaaaagaactgcttttcttcgcttatgatgtttttggaattccctttgtggatccggattcatggactccagaagaagtgattcccaagagattgcaagagaaacagaagtcagaacgggaaacagccgtacgcatctcccaggagattgggaaccttatgaaggaaatcgagacccttgtggaagagaagaccaaggagtcactggatgtgagcagactgacccgggaaggtggccccctgctgtatgaaggcatcagtctcaccatgaactccaaactcctgaatggttcccagcgggtggtgatggacggcgtaatctctgaccacgagtgtcaggagctgcagagactgaccaatgtggcagcaacctcaggagatggctaccggggtcagacctccccacatactcccaatgaaaagttctatggtgtcactgtcttcaaagccctcaagctggggcaagaaggcaaagttcctctgcagagtgcccacctgtactacaacgtgacggagaaggtgcggcgcatcatggagtcctacttccgcctggatacgcccctctacttttcctactctcatctggtgtgccgcactgccatcgaagaggtccaggcagagaggaaggatgatagtcatccagtccacgtggacaactgcatcctgaatgccgagaccctcgtgtgtgtcaaagagcccccagcctacaccttccgcgactacagcgccatcctttacctaaatggggacttcgatggcggaaacttttatttcactgaactggatgccaagaccgtgacggcagaggtgcagcctcagtgtggaagagccgtgggattctcttcaggcactgaaaacccacatggagtgaaggctgtcaccagggggcagcgctgtgccatcgccctgtggttcaccctggaccctcgacacagcgagcgggtgagagcagctcgagcgggacagggtgcaggcagatgacctggtgaagatgctcttcagcccagaagagatggacctctcccaggagcagcccctggatgcccagcagggcccccccgaacctgcacaagagtctctctcaggcagtgaatcgaagcccaaggatgagctatgacagcgtccaggtcagacggatgggtgactagacccatggagaggaactcttctgcactctgagctggccagcccctcggggctgcagagcagtgagcctacatctgccactcagccgaggggaccctgctcacagccttctacatggtgctactgctcttggagtggacatgaccagacaccgcaccccctggatctggctgagggctcaggacacaggcccagccacccccaggggcctccacaggccgctgcataacagcgatacagtacttaagtgtctgtgtagacaaccaaagaataaatgattcatggttttttttacttggtttgttcagacaatggaaatttgcccattctgtcaaaaaaatct

SEQ ID NO: 322661 - DNA, 2716 bp, Homo sapiens
cgcccgggggcgggccttcgccgggggtaggactccggccttggtggcgggtggctggcggttccgttaggtctgagggagcgatggcggtacgcgcgttgaagctgctgaccacactgctggctgtcgtggccgctgcctcccaagccgaggtcgagtccgaggcaggatggggcatggtgacgcctgatctgctcttcgccgaggggaccgcagcctacgcgcgcggggactggcccggggtggtcctgagcatggaacgggcgctgcgctcccgggcagccctccgcgcccttcgcctgcgctgccgcacccagtgtgccgccgacttcccgtgggagctggaccccgactggtcccccagcccggcccaggcctcgggcgccgccgccctgcgcgacctgagcttcttcgggggccttctgcgtcgcgctgcctgcctgcgccgctgcctcgggccgccggccgcccactcgctcagcgaagagatggagctggagttccgcaagcggagcccctacaactacctgcaggtcgcctacttcaagatcaacaagttggagaaagctgttgctgcagcacacaccttcttcgtgggcaatcctgagcacatggaaatgcagcagaacctagactattaccaaaccatgtctggagtgaaggaggccgacttcaaggatcttgagactcaaccccatatgcaagaatttcgactgggagtgcgactctactcagaggaacagccacaggaagctgtgccccacctagaggcggcgctgcaagaatactttgtggcctatgaggagtgccgtgccctctgcgaagggccctatgactacgatggctacaactaccttgagtacaacgctgacctcttccaggccatcacagatcattacatccaggtcctcaactgtaagcagaactgtgtcacggagcttgcttcccacccaagtcgagagaagccctttgaagacttcctcccatcgcattataattatctgcagtttgcctactataacattgggaattatacacaggctgttgaatgtgccaagacctatcttctcttcttccccaatgacgaggtgatgaaccaaaatttggcctattatgcagctatgcttggagaagaacacaccagatccatcggcccccgtgagagtgccaaggagtaccgacagcgaagcctactggaaaaagaactgcttttcttcgcttatgatgtttttggaattccctttgtggatccggattcatggactccagaagaagtgattcccaagagattgcaagagaaacagaagtcagaacgggaaacagccgtacgcatctcccaggagattgggaaccttatgaaggaaatcgagacccttgtggaagagaagaccaaggagtcactggatgtgagcagactgacccgggaaggtggccccctgctgtatgaaggcatcagtctcaccatgaactccaaactcctgaatggttcccagcgggtggtgatggacggcgtaatctctgaccacgagtgtcaggagctgcagagactgaccaatgtggcagcaacctcaggagatggctaccggggtcagacctccccacatactcccaatgaaaagttctatggtgtcactgtcttcaaagccctcaagttccatgtggctggggaagcctcacaatcatggtggaaggcaaagaggagcaagtcacatcttacatggatggcagcaggcaaagagagaacttctgcagctggggcaagaaggcaaagttcctctgcagagtgcccacctgtactacaacgtgacggagaaggtgcggcgcatcatggagtcctacttccgcctggatacgcccctctacttttcctactctcatctggtgtgccgcactgccatcgaagaggtccaggcagagaggaaggatgatagtcatccagtccacgtggacaactgcatcctgaatgccgagaccctcgtgtgtgtcaaagagcccccagcctacaccttccgcgactacagcgccatcctttacctaaatggggacttcgatggcggaaacttttatttcactgaactggatgccaagaccgtgacggcagaggtgcagcctcagtgtggaagagccgtgggattctcttcaggcactgaaaacccacatggagtgaaggctgtcaccagggggcagcgctgtgccatcgccctgtggttcaccctggaccctcgacacagcgagcgggacagggtgcaggcagatgacctggtgaagatgctcttcagcccagaagagatggacctctcccaggagcagcccctggatgcccagcagggcccccccgaacctgcacaagagtctctctcaggcagtgaatcgaagcccaaggatgagctatgacagcgtccaggtcagacggatgggtgactagacccatggagaggaactcttctgcactctgagctggccagcccctcggggctgcagagcagtgagcctacatctgccactcagccgaggggaccctgctcacagccttctacatggtgctactgctcttggagtggacatgaccagacaccgcaccccctggatctggctgagggctcaggacacaggcccagccacccccaggggcctccacaggccgctgcataacagcgatacagtacttaagtgtctgtgtagacaaccaaagaataaatgattcatggtttttttt

SEQ ID NO: 322662 - DNA, 2810 bp, Homo sapiens
cgcccgggggcgggccttcgccgggggtaggactccggccttggtggcgggtggctggcggttccgttaggtctgagggagcgatggcggtacgcgcgttgaagctgctgaccacactgctggctgtcgtggccgctgcctcccaagccgaggtcgagtccgaggcaggatggggcatggtgacgcctgatctgctcttcgccgaggggaccgcagcctacgcgcgcggggactggcccggggtggtcctgagcatggaacgggcgctgcgctcccgggcagccctccgcgcccttcgcctgcgctgccgcacccagtgtgccgccgacttcccgtgggagctggaccccgactggtcccccagcccggcccaggcctcgggcgccgccgccctgcgcgacctgagcttcttcgggggccttctgcgtcgcgctgcctgcctgcgccgctgcctcgggccgccggccgcccactcgctcagcgaagagatggagctggagttccgcaagcggagcccctacaactacctgcaggtcgcctacttcaagatcaacaagttggagaaagctgttgctgcagcacacaccttcttcgtgggcaatcctgagcacatggaaatgcagcagaacctagactattaccaaaccatgtctggagtgaaggaggccgacttcaaggatcttgagactcaaccccatatgcaagaatttcgactgggagtgcgactctactcagaggaacagccacaggaagctgtgccccacctagaggcggcgctgcaagaatactttgtggcctatgaggagtgccgtgccctctgcgaagggccctatgactacgatggctacaactaccttgagtacaacgctgacctcttccaggccatcacagatcattacatccaggtcctcaactgtaagcagaactgtgtcacggagcttgcttcccacccaagtcgagagaagccctttgaagacttcctcccatcgcattataattatctgcagtttgcctactataacattgggaattatacacaggctgttgaatgtgccaagacctatcttctcttcttccccaatgacgaggtgatgaaccaaaatttggcctattatgcagctatgcttggagaagaacacaccagatccatcggcccccgtgagagtgccaaggagtaccgacagcgaagcctactggaaaaagaactgcttttcttcgcttatgatgtttttggaattccctttgtggatccggattcatggactccagaagaagtgattcccaagagattgcaagagaaacagaagtcagaacgggaaacagccgtacgcatctcccaggagattgggaaccttatgaaggaaatcgagacccttgtggaagagaagaccaaggagtcactggatgtgagcagactgacccgggaaggtggccccctgctgtatgaaggcatcagtctcaccatgaactccaaactcctgaatggttcccagcgggtggtgatggacggcgtaatctctgaccacgagtgtcaggagctgcagagactgaccaatgtggcagcaacctcaggagatggctaccggggtcagacctccccacatactcccaatgaaaagttctatggtgtcactgtcttcaaagccctcaagaggggcgttgtgttagtccgttttcacactgctgataaagacgtacccgagactgggcaatttacaaaagaaagaggtttacttggacttacagttccatgtggctggggaagcctcacaatcatggtggaaggcaaagaggagcaagtcacatcttacatggatggcagcaggcaaagagagaacttctgcagctggggcaagaaggcaaagttcctctgcagagtgcccacctgtactacaacgtgacggagaaggtgcggcgcatcatggagtcctacttccgcctggatacgcccctctacttttcctactctcatctggtgtgccgcactgccatcgaagaggtccaggcagagaggaaggatgatagtcatccagtccacgtggacaactgcatcctgaatgccgagaccctcgtgtgtgtcaaagagcccccagcctacaccttccgcgactacagcgccatcctttacctaaatggggacttcgatggcggaaacttttatttcactgaactggatgccaagaccgtgacggcagaggtgcagcctcagtgtggaagagccgtgggattctcttcaggcactgaaaacccacatggagtgaaggctgtcaccagggggcagcgctgtgccatcgccctgtggttcaccctggaccctcgacacagcgagcgggacagggtgcaggcagatgacctggtgaagatgctcttcagcccagaagagatggacctctcccaggagcagcccctggatgcccagcagggcccccccgaacctgcacaagagtctctctcaggcagtgaatcgaagcccaaggatgagctatgacagcgtccaggtcagacggatgggtgactagacccatggagaggaactcttctgcactctgagctggccagcccctcggggctgcagagcagtgagcctacatctgccactcagccgaggggaccctgctcacagccttctacatggtgctactgctcttggagtggacatgaccagacaccgcaccccctggatctggctgagggctcaggacacaggcccagccacccccaggggcctccacaggccgctgcataacagcgatacagtacttaagtgtctgtgtagacaaccaaagaataaatgattcatggtttttttt

SEQ ID NO: 322663 - DNA, 2635 bp, Homo sapiens
cgcccgggggcgggccttcgccgggggtaggactccggccttggtggcgggtggctggcggttccgttaggtctgagggagcgatggcggtacgcgcgttgaagctgctgaccacactgctggctgtcgtggccgctgcctcccaagccgaggtcgagtccgaggcaggatggggcatggtgacgcctgatctgctcttcgccgaggggaccgcagcctacgcgcgcggggactggcccggggtggtcctgagcatggaacgggcgctgcgctcccgggcagccctccgcgcccttcgcctgcgctgccgcacccagtgtgccgccgacttcccgtgggagctggaccccgactggtcccccagcccggcccaggcctcgggcgccgccgccctgcgcgacctgagcttcttcgggggccttctgcgtcgcgctgcctgcctgcgccgctgcctcgggccgccggccgcccactcgctcagcgaagagatggagctggagttccgcaagcggagcccctacaactacctgcaggtcgcctacttcaagatcaacaagttggagaaagctgttgctgcagcacacaccttcttcgtgggcaatcctgagcacatggaaatgcagcagaacctagactattaccaaaccatgtctggagtgaaggaggccgacttcaaggatcttgagactcaaccccatatgcaagaatttcgactgggagtgcgactctactcagaggaacagccacaggaagctgtgccccacctagaggcggcgctgcaagaatactttgtggcctatgaggagtgccgtgccctctgcgaagggccctatgactacgatggctacaactaccttgagtacaacgctgacctcttccaggccatcacagatcattacatccaggtcctcaactgtaagcagaactgtgtcacggagcttgcttcccacccaagtcgagagaagccctttgaagacttcctcccatcgcattataattatctgcagtttgcctactataacattgggaattatacacaggctgttgaatgtgccaagacctatcttctcttcttccccaatgacgaggtgatgaaccaaaatttggcctattatgcagctatgcttggagaagaacacaccagatccatcggcccccgtgagagtgccaaggagtaccgacagcgaagcctactggaaaaagaactgcttttcttcgcttatgatgtttttggaattccctttgtggatccggattcatggactccagaagaagtgattcccaagagattgcaagagaaacagaagtcagaacgggaaacagccgtacgcatctcccaggagattgggaaccttatgaaggaaatcgagacccttgtggaagagaagaccaaggagtcactggatgtgagcagactgacccgggaaggtggccccctgctgtatgaaggcatcagtctcaccatgaactccaaactcctgaatggttcccagcgggtggtgatggacggcgtaatctctgaccacgagtgtcaggagctgcagagactgaccaatgtggcagcaacctcaggagatggctaccggggtcagacctccccacatactcccaatgaaaagttctatggtgtcactgtcttcaaagccctcaagctggggcaagaaggcaaagttcctctgcagagtgcccacctgtactacaacgtgacggagaaggtgcggcgcatcatggagtcctacttccgcctggatacgcccctctacttttcctactctcatctggtgtgccgcactgccatcgaagaggtccaggcagagaggaaggatgatagtcatccagtccacgtggacaactgcatcctgaatgccgagaccctcgtgtgtgtcaaagagcccccagcctacaccttccgcgactacagcgccatcctttacctaaatggggacttcgatggcggaaacttttatttcactgaactggatgccaagaccgtgacggcagaggtgcagcctcagtgtggaagagccgtgggattctcttcaggcactgaaaacccacatggagtgaaggctgtcaccagggggcagcgctgtgccatcgccctgtggttcaccctggaccctcgacacagcgagcgggtgagagcagctcgagcgggacagggtgcaggcagatgacctggtgaagatgctcttcagcccagaagagatggacctctcccaggagcagcccctggatgcccagcagggcccccccgaacctgcacaagagtctctctcaggcagtgaatcgaagcccaaggatgagctatgacagcgtccaggtcagacggatgggtgactagacccatggagaggaactcttctgcactctgagctggccagcccctcggggctgcagagcagtgagcctacatctgccactcagccgaggggaccctgctcacagccttctacatggtgctactgctcttggagtggacatgaccagacaccgcaccccctggatctggctgagggctcaggacacaggcccagccacccccaggggcctccacaggccgctgcataacagcgatacagtacttaagtgtctgtgtagacaaccaaagaataaatgattcatggtttttttt

SEQ ID NO: 322664 - DNA, 2300 bp, Homo sapiens
cgcccgggggcgggccttcgccgggggtaggactccggccttggtggcgggtggctggcggttccgttaggtctgagggagcgatggcggtacgcgcgttgaagctgctgaccacactgctggctgtcgtggccgctgcctcccaagccgaggtcgagtccgaggcaggatggggcatggtgacgcctgatctgctcttcgccgaggggaccgcagcctacgcgcgcggggactggcccggggtggtcctgagcatggaacgggcgctgcgctcccgggcagccctccgcgcccttcgcctgcgctgccgcacccagtgtgccgccgacttcccgtgggagctggaccccgactggtcccccagcccggcccaggcctcgggcgccgccgccctgcgcgacctgagcttcttcgggggccttctgcgtcgcgctgcctgcctgcgccgctgcctcgggccgccggccgcccactcgctcagcgaagagatggagctggagttccgcaagcggagcccctacaactacctgcaggtcgcctacttcaagatcaacaagttggagaaagctgttgctgcagcacacaccttcttcgtgggcaatcctgagcacatggaaatgcagcagaacctagactattaccaaaccatgtctggagtgaaggaggccgacttcaaggatcttgagactcaaccccatatgcaagaatttcgactgggagtgcgactctactcagaggaacagccacaggaagctgtgccccacctagaggcggcgctgcaagaatactttgtggcctatgaggagtgccgtgccctctgcgaagggccctatgactacgatggctacaactaccttgagtacaacgctgacctcttccaggccatcacagatcattacatccaggtcctcaactgtaagcagaactgtgtcacggagcttgcttcccacccaagtcgagagaagccctttgaagacttcctcccatcgcattataattatctgcagtttgcctactataacattgggaattatacacaggctgttgaatgtgccaagacctatcttctcttcttccccaatgacgaggtgatgaaccaaaatttggcctattatgcagctatgcttggagaagaacacaccagatccatcggcccccgtgagagtgccaaggagtaccgacagcgaagcctactggaaaaagaactgcttttcttcgcttatgatgtttttggaattccctttgtggatccggattcatggactccagaagaagtgattcccaagagattgcaagagaaacagaagtcagaacgggaaacagccgtacgcatctcccaggagattgggaaccttatgaaggaaatcgagacccttgtggaagagaagaccaaggagtcactggatgtgagcagactgacccgggaaggtggccccctgctgtatgaaggcatcagtctcaccatgaactccaaactcctgaatggttcccagcgggtggtgatggacggcgtaatctctgaccacgagtgtcaggagctgcagagactgaccaatgtggcagcaacctcaggagatggctaccggggtcagacctccccacatactcccaatgaaaagttctatggtgtcactgtcttcaaagccctcaagctggggcaagaaggcaaagttcctctgcagagtgcccacctgtactacaacgtgacggagaaggtgcggcgcatcatggagtcctacttccgcctggatacgcccctctacttttcctactctcatctggtgtgccgcactgccatcgaagaggtccaggcagagaggaaggatgatagtcatccagtccacgtggacaactgcatcctgaatgccgagaccctcgtgtgtgtcaaagagcccccagcctacaccttccgcgactacagcgccatcctttacctaaatggggacttcgatgatcgaagcccaaggatgagctatgacagcgtccaggtcagacggatgggtgactagacccatggagaggaactcttctgcactctgagctggccagcccctcggggctgcagagcagtgagcctacatctgccactcagccgaggggaccctgctcacagccttctacatggtgctactgctcttggagtggacatgaccagacaccgcaccccctggatctggctgagggctcaggacacaggcccagccacccccaggggcctccacaggccgctgcataacagcgatacagtacttaagtgtctgtgtagacaaccaaagaataaatgattcatggtttttttt

SEQ ID NO: 322665 - DNA, 2333 bp, Homo sapiens
cgcccgggggcgggccttcgccgggggtaggactccggccttggtggcgggtggctggcggttccgttaggtctgagggagcgatggcggtacgcgcgttgaagctgctgaccacactgctggctgtcgtggccgctgcctcccaagccgaggtcgagtccgaggcaggatggggcatggtgacgcctgatctgctcttcgccgaggggaccgcagcctacgcgcgcggggactggcccggggtggtcctgagcatggaacgggcgctgcgctcccgggcagccctccgcgcccttcgcctgcgctgccgcacccagtgtgccgccgacttcccgtgggagctggaccccgactggtcccccagcccggcccaggcctcgggcgccgccgccctgcgcgacctgagcttcttcgggggccttctgcgtcgcgctgcctgcctgcgccgctgcctcgggccgccggccgcccactcgctcagcgaagagatggagctggagttccgcaagcggagcccctacaactacctgcaggtcgcctacttcaagatcaacaagttggagaaagctgttgctgcagcacacaccttcttcgtgggcaatcctgagcacatggaaatgcagcagaacctagactattaccaaaccatgtctggagtgaaggaggccgacttcaaggatcttgagactcaaccccatatgcaagaatttcgactgggagtgcgactctactcagaggaacagccacaggaagctgtgccccacctagaggcggcgctgcaagaatactttgtggcctatgaggagtgccgtgccctctgcgaagggccctatgactacgatggctacaactaccttgagtacaacgctgacctcttccaggccatcacagatcattacatccaggtcctcaactgtaagcagaactgtgtcacggagcttgcttcccacccaagtcgagagaagccctttgaagacttcctcccatcgcattataattatctgcagtttgcctactataacattgggaattatacacaggctgttgaatgtgccaagacctatcttctcttcttccccaatgacgaggtgatgaaccaaaatttggcctattatgcagctatgcttggagaagaacacaccagatccatcggcccccgtgagagtgccaaggagtaccgacagcgaagcctactggaaaaagaactgcttttcttcgcttatgatgtttttggaattccctttgtggatccggattcatggactccagaagaagtgattcccaagagattgcaagagaaacagaagtcagaacgggaaacagccgtacgcatctcccaggagattgggaaccttatgaaggaaatcgagacccttgtggaagagaagaccaaggagtcactggatgtgagcagactgacccgggaaggtggccccctgctgtatgaaggcatcagtctcaccatgaactccaaactcctgaatggttcccagcgggtggtgatggacggcgtaatctctgaccacgagtgtcaggagctgcagagactgaccaatgtggcagcaacctcaggagatggctaccggggtcagacctccccacatactcccaatgaaaagttctatggtgtcactgtcttcaaagccctcaagctggggcaagaaggcaaagttcctctgcagagtgcccacctgtactacaacgtgacggagaaggtgcggcgcatcatggagtcctacttccgcctggatacgcccctctacttttcctactctcatctggtgtgccgcactgccatcgaagaggtccaggcagagaggaaggatgatagtcatccagtccacgtggacaactgcatcctgaatgccgagaccctcgtgtgtgtcaaagagcccccagcctacaccttccgcgactacagcgccatcctttacctaaatggggacttcgatggcggaaacttttatttcactgaactggatgccaagaccgtgacggcagaggtgcagcctcagtgtggaagagccgtgggattctcttcaggcactgaaaacccacatggagtgaaggctgtcaccagggagcagcccctggatgcccagcagggcccccccgaacctgcacaagagtctctctcaggcagtgaccttctacatggtgctactgctcttggagtggacatgaccagacaccgcaccccctggatctggctgagggctcaggacacaggcccagccacccccaggggcctccacaggccgctgcataacagcgatacagtacttaagtgtctgtgtagacaaccaaagaataaatgattcatggtttttttt

SEQ ID NO: 322666 - DNA, 1843 bp, Homo sapiens
cgcccgggggcgggccttcgccgggggtaggactccggccttggtggcgggtggctggcggttccgttaggtctgagggagcgatggcggtacgcgcgttgaagctgctgaccacactgctggctgtcgtggccgctgcctcccaagccgaggtcgagtccgaggcaggatggggcatggtgacgcctgatctgctcttcgccgaggggaccgcagcctacgcgcgcggggactggcccggggtggtcctgagcatggaacgggcgctgcgctcccgggcagccctccgcgcccttcgcctgcgctgccgcacccagtgtgccgccgacttcccgtgggagctggaccccgactggtcccccagcccggcccaggcctcgggcgccgccgccctgcgcgacctgagcttcttcgggggccttctgcgtcgcgctgcctgcctgcgccgctgcctcgggccgccggccgcccactcgctcagcgaagagatggagctggagttccgcaagcggagcccctacaactacctgcaggtcgcctacttcaagatcaacaagttggagaaagctgttgctgcagcacacaccttcttcgtgggcaatcctgagcacatggaaatgcagcagaacctagactattaccaaaccatgtctggagtgaaggaggccgacttcaaggatcttgagactcaaccccatatgcaagaatttcgactgggagtgcgactctactcagaggaacagccacaggaagctgtgccccacctagaggcggcgctgcaagaatactttgtggcctatgaggagtgccgtgccctctgcgaagggccctatgactacgatggctacaactaccttgagtacaacgctgacctcttccaggccatcacagatcattacatccaggtcctcaactgtaagcagaactgtgtcacggagcttgcttcccacccaagtcgagagaagccctttgaagacttcctcccatcgcattataattatctgcagtttgcctactataacattgggaattatacacaggctgttgaatgtgccaagacctatcttctcttcttccccaatgacgaggtgatgaaccaaaatttggcctattatgcagctatgcttggagaagaacacaccagatccatcggcccccgtgagagtgccaaggagtaccgacagcgaagcctactggaaaaagaactgcttttcttcgcttatgatgtttttggaattccctttgtggatccggattcatggactccagaagaagtgattcccaagagattgcaagagaaacagaagtcagaacgggaaacagccgtacgcatctcccaggagattgggaaccttatgaaggaaatcgagacccttgtggaagagaagaccaaggagtcactggatgtgagcagactgacccgggaaggtggccccctgctgtatgaaggcatcagtctcaccatgaactccaaactcctgaatggttcccagcgggtggtgatggacggcgtaatctctgaccacgagtgtcaggagctgcagagactgaccaatgtggcagcaacctcaggagatggctaccggggtcagacctccccacatactcccaatgaaaagttctatggtgtcactgtcttcaaagccctcaagctggggcaagaaggcaaagttcctctgcagagtgcccacctgtactacaacgtgacggagaaggtgcggcgcatcatggagtcctacttccgcctggccccaggggcctccacaggccgctgcataacagcgatacagtacttaagtgtctgtgtagacaaccaaagaataaatgattcatggtttttttt

SEQ ID NO: 322667 - DNA, 891 bp, Homo sapiens
tgggttcgctaaaccgaggaaatacgcacaactagttgtctactctacatctggatgtgccgcacatgccaggcgaagaggtccaggcagagaggaaggatgatagtcatccagtccacgtggacaactgcatcctgaatgccgagaccctcgtgtgtgtcaaagagcccccagcctacaccttccgcgactacagcgccatcctttacctaaatggggacttcgatggcggaaacttttatttcactgaactggatgccaagaccgtgacggcagaggtgcagcctcagtgtggaagagccgtgggattctcttcaggcactgaaaacccacatggagtgaaggctgtcaccagggggcagcgctgtgccatcgccctgtggttcaccctggaccctcgacacagcgagcgggacagggtgcaggcagatgacctggtgaagatgctcttcagcccagaagagatggacctctcccaggagcagcccctggatgcccagcagggcccccccgaacctgcacaagagtctctctcaggcagtgaatcgaagcccaaggatgagctatgacagcgtccaggtcagacggatgggtgactagacccatggagaggaactcttctgcactctgagctggccagcccctcggggctgcagagcagtgagcctacatctgccactcagccgaggggaccctgctcacagccttctacatggtgctactgctcttggagtggacatgaccagacaccgcaccccctggatctggctgagggctcaggacacaggcccagccacccccaggggcctccacaggccgctgcataacagcgatacagtacttaagtgtctgtgtagacaaccaaagaataaatgattcatggtttttttt

SEQ ID NO: 322668 - DNA, 826 bp, Homo sapiens
cggacgcgtgggtcgacccacgcgtccgcgaggtgatgaaccaaaatttggcctattatgcagctatgcttggagaagaacacaccagatccatcggcccccgtgagagtgccaaggagtaccgacagcgaagcctactggaaaaagaactgcttttcttcgcttatgatgtttttggaattccctttgtggatccggattcatggactccagaagaagtgattcccaagagattgcaagagaaacagaagtcagaacgggaaacagccgtacgcatctcccaggagattgggaaccttatgaaggaaatcgagacccttgtggaagagaagaccaaggagtcactggatgtgagcagactgacccgggaaggtggccccctgctgtatgaaggcatcagtctcaccatgaactccaaactcctgaatggttcccagcgggtggtgatggacggcgtaatctctgaccacgagtgtcaggagctgcagagactgaccaatgtggcagcaacctcaggagatggctaccggggtcagacctccccacatactcccaatgaaaagttctatggtgtcactgtcttcaaagccctcaagctggggcaagaaggcaaagttcctctgcagagtgcccacctgtactacaacgtgacggagaaggtgcggcgcatcatggagtcctacttccgcctggctggatctggctgagggctcaggacacaggcccagccacccccaggggcctccacaggccgctgcataacagcgatacagtacttaagtgtctgtgtagacaaccaaagaataaatgattcatggtttttttt

SEQ ID NO: 322669 - DNA, 314 bp, Homo sapiens
tgggtatggaaaagattctgattcaaggccaaaaagagggtgagcaatgtgggctttggggagcttacaaccctgctgtgtgtcaagattagtatcaatacagccgatcatagacccagcctaacaggcttaacttatttgagatttagattcctaccacgtaatctgaataatgccttcatagaagtgatcgtaatatacaatccaacaggatcaaagaactaaatcattctgagaaactctgctgaaacctgagaaaaaggaccagggagaagctgggagatagatggatgagaaagggaagacaaggaaaa

SEQ ID NO: 322670 - DNA, 2767 bp, Homo sapiens
agagtcatccagctggagccctgagtggctgagctcaggccttcgcagcattcttgggtgggagcagccacgggtcagccacaagggccacagccatgaatggcacagaaggccctaacttctacgtgcccttctccaatgcgacgggtgtggtacgcagccccttcgagtacccacagtactacctggctgagccatggcagttctccatgctggccgcctacatgtttctgctgatcgtgctgggcttccccatcaacttcctcacgctctacgtcaccgtccagcacaagaagctgcgcacgcctctcaactacatcctgctcaacctagccgtggctgacctcttcatggtcctaggtggcttcaccagcaccctctacacctctctgcatggatacttcgtcttcgggcccacaggatgcaatttggagggcttctttgccaccctgggcggtgaaattgccctgtggtccttggtggtcctggccatcgagcggtacgtggtggtgtgtaagcccatgagcaacttccgcttcggggagaaccatgccatcatgggcgttgccttcacctgggtcatggcgctggcctgcgccgcacccccactcgccggctggtccaggtacatccccgagggcctgcagtgctcgtgtggaatcgactactacacgctcaagccggaggtcaacaacgagtcttttgtcatctacatgttcgtggtccacttcaccatccccatgattatcatctttttctgctatgggcagctcgtcttcaccgtcaaggaggccgctgcccagcagcaggagtcagccaccacacagaaggcagagaaggaggtcacccgcatggtcatcatcatggtcatcgctttcctgatctgctgggtgccctacgccagcgtggcattctacatcttcacccaccagggctccaacttcggtcccatcttcatgaccatcccagcgttctttgccaagagcgccgccatctacaaccctgtcatctatatcatgatgaacaagcagttccggaactgcatgctcaccaccatctgctgcggcaagaacccactgggtgacgatgaggcctctgctaccgtgtccaagacggagacgagccaggtggccccggcctaagacctgcctaggactctgtggccgactataggcgtctcccatcccctacaccttcccccagccacagccatcccaccaggagcagcgcctgtgcagaatgaacgaagtcacataggctccttaatttttttttttttttaagaaataattaatgaggctcctcactcacctgggacagcctgagaagggacatccaccaagacctactgatctggagtcccacgttccccaaggccagcgggatgtgtgcccctcctcctcccaactcatctttcaggaacacgaggattcttgctttctggaaaagtgtcccagcttagggataagtgtctagcacagaatggggcacacagtaggtgcttaataaatgctggatggatgcaggaaggaatggaggaatgaatgggaagggagaacatatctatcctctcagaccctcgcagcagcagcaactcatacttggctaatgatatggagcagttgtttttccctccctgggcctcactttcttctcctataaaatggaaatcccagatccctggtcctgccgacacgcagctactgagaagaccaaaagaggtgtgtgtgtgtctatgtgtgtgtttcagcactttgtaaatagcaagaagctgtacagattctagttaatgttgtgaataacatcaattaatgtaactagttaattactatgattatcacctcctgatagtgaacattttgagattgggcattcagatgatggggtttcacccaaccttggggcaggtttttaaaaattagctaggcatcaaggccagaccagggctgggggttgggctgtaggcagggacagtcacaggaatgcagaatgcagtcatcagacctgaaaaaacaacactgggggagggggacggtgaaggccaagttcccaatgagggtgagattgggcctggggtctcacccctagtgtggggccccaggtcccgtgcctccccttcccaatgtggcctatggagagacaggcctttctctcagcctctggaagccacctgctcttttgctctagcacctgggtcccagcatctagagcatggagcctctagaagccatgctcacccgcccacatttaattaacagctgagtccctgatgtcatccttatctcgaagagcttagaaacaaagagtgggaaattccactgggcctaccttccttggggatgttcatgggccccagtttccagtttcccttgccagacaagcccatcttcagcagttgctagtccattctccattctggagaatctgctccaaaaagctggccacatctctgaggtgtcagaattaagctgcctcagtaactgctcccccttctccatataagcaaagccagaagctctagctttacccagctctgcctggagactaaggcaaattgggccattaaaagctcagctcctatgttggtattaacggtggtgggttttgttgctttcacactctatccacaggatagattgaaactgccagcttccacctgatccctgaccctgggatggctggattgagcaatgagcagagccaagcagcacagagtcccctggggctagaggtggaggaggcagtcctgggaatgggaaaaacccca

SEQ ID NO: 322671 - DNA, 659 bp, Homo sapiens
agagtcatccagctggagccctgagtggctgagctcaggccttcgcagcattcttgggtgggagcagccacgggtcagccacaagggccacagccatgaatggcacagaaggccctaacttctacgtgcccttctccaatgcgacgggtgtggtacgcagccccttcgagtacccacagtactacctggctgagccatggcagttctccatgctggccgcctacatgtttctgctgatcgtgctgggcttccccatcaacttcctcacgctctacgtcaccgtccagcacaagaagctgcgcacgcctctcaactacatcctgctcaacctagccgtggctgacctcttcatggtcctaggtggcttcaccagcaccctctacacctctctgcatggatacttcgtcttcgggcccacaggatgcaatttggagggcttctttgccaccctgggcggtgaaattgccctgtggtccttggtggtcctggccatcgagcggtacgtggtggtgtgtaagcccatgagcaacttccgcttcggggagaaccatgccatcatgggcgttgccttcacctgggtcatggcgctggcctgcgccgcacccccactcgccggctggtccaggtaatccgaggactgagtctgtgtgaatgatagc

SEQ ID NO: 322672 - DNA, 2079 bp, Homo sapiens
  misc_feature (34)..(34): n is a, c, g, or t
  misc_feature (56)..(56): n is a, c, g, or t
  misc_feature (62)..(62): n is a, c, g, or t
  misc_feature (71)..(71): n is a, c, g, or t
  misc_feature (84)..(84): n is a, c, g, or t
  misc_feature (94)..(94): n is a, c, g, or t
aaccgggctattttggaccccccactcacgggcncccgattttcaacaattggccnctccanccatgatanactttctccatgnagtctcttcncctcaaggagccgctgcccagcagcaggagtcagccaccacacagaaggcagagaaggaggtcacccgcatggtcatcatcatggtcatcgctttcctgatctgctgggtgccctacgccagcgtggcattctacatcttcacccaccagggctccaacttcggtcccatcttcatgaccatcccagcgttctttgccaagagcgccgccatctacaaccctgtcatctatatcatgatgaacaagcagttccggaactgcatgctcaccaccatctgctgcggcaagaacccactgggtgacgatgaggcctctgctaccgtgtccaagacggagacgagccaggtggccccggcctaagacctgcctaggactctgtggccgactataggcgtctcccatcccctacaccttcccccagccacagccatcccaccaggagcagcgcctgtgcagaatgaacgaagtcacataggctccttaatttttttttttttttaagaaataattaatgaggctcctcactcacctgggacagcctgagaagggacatccaccaagacctactgatctggagtcccacgttccccaaggccagcgggatgtgtgcccctcctcctcccaactcatctttcaggaacacgaggattcttgctttctggaaaagtgtcccagcttagggataagtgtctagcacagaatggggcacacagtaggtgcttaataaatgctggatggatgcaggaaggaatggaggaatgaatgggaagggagaacatatctatcctctcagaccctcgcagcagcagcaactcatacttggctaatgatatggagcagttgtttttccctccctgggcctcactttcttctcctataaaatggaaatcccagatccctggtcctgccgacacgcagctactgagaagaccaaaagaggtgtgtgtgtgtctatgtgtgtgtttcagcactttgtaaatagcaagaagctgtacagattctagttaatgttgtgaataacatcaattaatgtaactagttaattactatgattatcacctcctgatagtgaacattttgagattgggcattcagatgatggggtttcacccaaccttggggcaggtttttaaaaattagctaggcatcaaggccagaccagggctgggggttgggctgtaggcagggacagtcacaggaatgcagaatgcagtcatcagacctgaaaaaacaacactgggggagggggacggtgaaggccaagttcccaatgagggtgagattgggcctggggtctcacccctagtgtggggccccaggtcccgtgcctccccttcccaatgtggcctatggagagacaggcctttctctcagcctctggaagccacctgctcttttgctctagcacctgggtcccagcatctagagcatggagcctctagaagccatgctcacccgcccacatttaattaacagctgagtccctgatgtcatccttatctcgaagagcttagaaacaaagagtgggaaattccactgggcctaccttccttggggatgttcatgggccccagtttccagtttcccttgccagacaagcccatcttcagcagttgctagtccattctccattctggagaatctgctccaaaaagctggccacatctctgaggtgtcagaattaagctgcctcagtaactgctcccccttctccatataagcaaagccagaagctctagctttacccagctctgcctggagactaaggcaaattgggccattaaaagctcagctcctatgttggtattaacggtggtgggttttgttgctttcacactctatccacaggatagattgaaactgccagcttccacctgatccctgaccctgggatggctggattgagcaatgagcagagccaagcagcacagagtcccctggggctagaggtggaggaggcagtcctgggaatgggaaaaacccca

SEQ ID NO: 322673 - DNA, 3164 bp, Homo sapiens
  misc_feature (2030)..(2030): n is a, c, g, or t
caacaggaagcggcccctcccggcttcggagccgccgccactcgtctctgcccagctgctgccctccccaggaggcctccatggcttcacctacctccaccaacccagcgcatgcccactttgagagcttcctgcaggcccagctgtgccaggacgtgctgagcagcttccaggagctgtgtggggccctggggctggaacccggtggggggctgccccagtaccacaagatcaaggaccagctcaactactggagcgccaagtcactgtggaccaagctggacaagcgagcaggccagcctgtctaccagcagggccgggcctgcaccagcaccaagtgcctggtggtgggtgctggaccttgcgggctgcgggtcgctgtggagctggcgctgctgggggcccgagtggtgctggtggaaaagcgcaccaagttctctcgccacaacgtgctccacctctggcccttcaccatccacgacctgcgggcactcggtgctaagaagttctacgggcgcttctgcaccggcaccctggaccacatcagcatcaggcagctccagctgcttctgctgaaggtagcattgctgctgggggtggaaattcactggggtgtcactttcactggcctccagccccctcctaggaaggggagtggctggcgtgcccagctccaacccaacccccctgcccagctggccaactatgaatttgacgtccttatctcggctgcaggaggtaaattcgtccctgaaggcttcaaagttcgagaaatgcgaggcaaactggccattggcatcacagccaactttgtgaatggacgcaccgtggaggagacacaggtgccggagatcagtggtgtagccaggatctacaaccagagcttcttccagagccttctcaaagccacaggcattgatctggagaacattgtgtactacaaggacgacacccactactttgtgatgacagccaagaagcagtgcctgctgcggctgggggtgctgcgccagcccttctggcccctgggcactggagtggcacggggcttcctggcagcctttgatgcagcctggatggtgaagcggtgggcagagggcgctgagtccctagaggtgttggctgagcgtgagagcctgtaccagcttctgtcacagacatccccagaaaacatgcatcgcaatgtggcccagtatgggctggacccagccacccgctaccccaacctgaacctccgggcagtgacccccaatcaggtacgagacctgtatgatgtgctagccaaggagcctgtgcagaggaacaacgacaagacagatacagggatgccagccaccgggtcggcaggcacccaggaggagctgctacgctggtgccaggagcagacagctgggtacccgggagtccacgtctccgatttgtcttcctcctgggctgatgggctagctctgtgtgccctggtgtaccggctgcagcctggcctgctggaaccctcagagctgcaggggctgggagctctggaagcaactgcttgggcactaaaggtggcagagaatgagctgggcatcacaccggtggtgtctgcacaggccgtggtagcagggagtgacccactgggcctcattgcctacctcagccacttccacagtgccttcaagagcatggcccacagcccaggccctgtcagccaggcctccccagggacctccagtgctgtattattccttagtaaacttcagaggaccctgcagcgatcccgggccaaggaaaatgcagaggatgctggtggcaagaagctgcgcttggagatggaggccgagaccccaagtactgaggtgccacctgacccagagcctggtgtacccctgacacccccatcccaacaccaggaggccggtgctggggacctgtgtgcactttgtggggaacacctctatgtcctggaacgcctctgtgtcaacggccatttcttccaccggagctgcttccgctgccatacctgtgaggccacactgtggccaggtggctangagcagcacccaggagatggacatttctactgcctccagcacctgccccagacagaccacaaagcggaaggcagcgatagaggccctgagagtccggagctccccacaccaagtgagaatagcatgccaccaggcctctcaactcccacagcctcgcaggagggggccggtcctgttccagatcccagccagcccacccgtcggcagatccgcctctccagcccggagcgccagcggttgtcctcccttaaccttacccctgacccggaaatggagcctccacccaagcctccccgcagctgctccgccttggcccgccacgccctggagagcagctttgtgggctggggcctgccagtccagagccctcaagctcttgtggccatggagaaggaggaaaaagagagtcccttctccagtgaagaggaagaagaagatgtgcctttggactcagatgtggaacaggccctgcagacctttgccaagacctcaggcaccatgaataactacccaacatggcgtcggactctgctgcgccgtgcgaaggaggaggagatgaagaggttctgcaaggcccagaccatccaacggcgactaaatgagattgaggctgccttgagggagctagaggccgagggcgtgaagctggagctggccttgaggcgccagagcagttccccagaacagcaaaagaaactatgggtaggacagctgctacagctcgttgacaagaaaaacagcctggtggctgaggaggccgagctcatgatcacggtgcaggaattgaatctggaggagaaacagtggcagctggaccaggagctacgaggctacatgaaccgggaagaaaacctaaagacagctgctgatcggcaggctgaggaccaggtcctgaggaagctggtggatttggtcaaccagagagatgccctcatccgcttccaggaggagcgcaggctcagcgagctggccttggggacaggggcccagggctagacgagggtgggccgtctgctttcgttcccacaaagaaagcacctcaccccagcacagtgccacccctgttcatctgggctgcctggcagagagccttgctgtttacaattaaaatgtttctgccacaaaaaaaaaaaa

SEQ ID NO: 322674 - DNA, 3653 bp, Homo sapiens
  misc_feature (2519)..(2519): n is a, c, g, or t
ggggtgcgcttccggggaaacgcagctgcggtcgctcgggaaccacgcctggcaggttcagtcgcaacatcctcccgccgtttgttgaggcagtttggtggagggaagtggaacctacgcggacagaggctgtttctctgtcaggaggcaagcacgagtgctgaggaaaactttgcccttgccatgagacacttctcagacacagcgtggcactgaggccatcaaggggcgccggcacagggacgcttggagggagatggggcaggatccactcgtctctgcccagctgctgccctccccaggaggcctccatggcttcacctacctccaccaacccagcgcatgcccactttgagagcttcctgcaggcccagctgtgccaggacgtgctgagcagcttccaggagctgtgtggggccctggggctggaacccggtggggggctgccccagtaccacaagatcaaggaccagctcaactactggagcgccaagtcactgtggaccaagctggacaagcgagcaggccagcctgtctaccagcagggccgggcctgcaccagcaccaagtgcctggtggtgggtgctggaccttgcgggctgcgggtcgctgtggagctggcgctgctgggggcccgagtggtgctggtggaaaagcgcaccaagttctctcgccacaacgtgctccacctctggcccttcaccatccacgacctgcgggcactcggtgctaagaagttctacgggcgcttctgcaccggcaccctggaccacatcagcatcaggcagctccagctgcttctgctgaaggtagcattgctgctgggggtggaaattcactggggtgtcactttcactggcctccagccccctcctaggaaggggagtggctggcgtgcccagctccaacccaacccccctgcccagctggccaactatgaatttgacgtccttatctcggctgcaggaggtaaattcgtccctgaaggcttcaaagttcgagaaatgcgaggcaaactggccattggcatcacagccaactttgtgaatggacgcaccgtggaggagacacaggtgccggagatcagtggtgtagccaggatctacaaccagagcttcttccagagccttctcaaagccacaggcattgatctggagaacattgtgtactacaaggacgacacccactactttgtgatgacagccaagaagcagtgcctgctgcggctgggggtgctgcgccaggactggccagacaccaatcggctgctgggcagtgccaatgtggtgcccgaggctctgcagcgctttacccgggcagctgctgactttgccacccatggcaagctcgggaaactagagtttgcccaggatgcccatgggcagcctgatgtctctgcctttgacttcacgagcatgatgcgggcagagagttctgctcgtgtgcaagagaagcatggcgcccgcctgctgctgggactggtgggggactgcctggtggagcccttctggcccctgggcactggagtggcacggggcttcctggcagcctttgatgcagcctggatggtgaagcggtgggcagagggcgctgagtccctagaggtgttggctgagcgtgagagcctgtaccagcttctgtcacagacatccccagaaaacatgcatcgcaatgtggcccagtatgggctggacccagccacccgctaccccaacctgaacctccgggcagtgacccccaatcaggtacgagacctgtatgatgtgctagccaaggagcctgtgcagaggaacaacgacaagacagatacagggatgccagccaccgggtcggcaggcacccaggaggagctgctacgctggtgccaggagcagacagctgggtacccgggagtccacgtctccgatttgtcttcctcctgggctgatgggctagctctgtgtgccctggtgtaccggctgcagcctggcctgctggaaccctcagagctgcaggggctgggagctctggaagcaactgcttgggcactaaaggtggcagagaatgagctgggcatcacaccggtggtgtctgcacaggccgtggtagcagggagtgacccactgggcctcattgcctacctcagccacttccacagtgccttcaagagcatggcccacagcccaggccctgtcagccaggcctccccagggacctccagtgctgtattattccttagtaaacttcagaggaccctgcagcgatcccgggccaaggaaaatgcagaggatgctggtggcaagaagctgcgcttggagatggaggccgagaccccaagtactgaggtgccacctgacccagagcctggtgtacccctgacacccccatcccaacaccaggaggccggtgctggggacctgtgtgcactttgtggggaacacctctatgtcctggaacgcctctgtgtcaacggccatttcttccaccggagctgcttccgctgccatacctgtgaggccacactgtggccaggtggctangagcagcacccaggagatggacatttctactgcctccagcacctgccccagacagaccacaaagcggaaggcagcgatagaggccctgagagtccggagctccccacaccaagtgagaatagcatgccaccaggcctctcaactcccacagcctcgcaggagggggccggtcctgttccagatcccagccagcccacccgtcggcagatccgcctctccagcccggagcgccagcggttgtcctcccttaaccttacccctgacccggaaatggagcctccacccaagcctccccgcagctgctccgccttggcccgccacgccctggagagcagctttgtgggctggggcctgccagtccagagccctcaagctcttgtggccatggagaaggaggaaaaagagagtcccttctccagtgaagaggaagaagaagatgtgcctttggactcagatgtggaacaggccctgcagacctttgccaagacctcaggcaccatgaataactacccaacatggcgtcggactctgctgcgccgtgcgaaggaggaggagatgaagaggttctgcaaggcccagaccatccaacggcgactaaatgagattgaggctgccttgagggagctagaggccgagggcgtgaagctggagctggccttgaggcgccagagcagttccccagaacagcaaaagaaactatgggtaggacagctgctacagctcgttgacaagaaaaacagcctggtggctgaggaggccgagctcatgatcacggtgcaggaattgaatctggaggagaaacagtggcagctggaccaggagctacgaggctacatgaaccgggaagaaaacctaaagacagctgctgatcggcaggctgaggaccaggtcctgaggaagctggtggatttggtcaaccagagagatgccctcatccgcttccaggaggagcgcaggctcagcgagctggccttggggacaggggcccagggctagacgagggtgggccgtctgctttcgttcccacaaagaaagcacctcaccccagcacagtgccacccctgttcatctgggctgcctggcagagagccttgctgtttacaattaaaatgtttctgccacaaaaaaaaaaaa

SEQ ID NO: 322675 - DNA, 3442 bp, Homo sapiens
  misc_feature (2308)..(2308): n is a, c, g, or t
ggggtgcgcttccggggaaacgcagctgcggtcgctcgggaaccacgcctggcaggtccactcgtctctgcccagctgctgccctccccaggaggcctccatggcttcacctacctccaccaacccagcgcatgcccactttgagagcttcctgcaggcccagctgtgccaggacgtgctgagcagcttccaggagctgtgtggggccctggggctggaacccggtggggggctgccccagtaccacaagatcaaggaccagctcaactactggagcgccaagtcactgtggaccaagctggacaagcgagcaggccagcctgtctaccagcagggccgggcctgcaccagcaccaagtgcctggtggtgggtgctggaccttgcgggctgcgggtcgctgtggagctggcgctgctgggggcccgagtggtgctggtggaaaagcgcaccaagttctctcgccacaacgtgctccacctctggcccttcaccatccacgacctgcgggcactcggtgctaagaagttctacgggcgcttctgcaccggcaccctggaccacatcagcatcaggcagctccagctgcttctgctgaaggtagcattgctgctgggggtggaaattcactggggtgtcactttcactggcctccagccccctcctaggaaggggagtggctggcgtgcccagctccaacccaacccccctgcccagctggccaactatgaatttgacgtccttatctcggctgcaggaggtaaattcgtccctgaaggcttcaaagttcgagaaatgcgaggcaaactggccattggcatcacagccaactttgtgaatggacgcaccgtggaggagacacaggtgccggagatcagtggtgtagccaggatctacaaccagagcttcttccagagccttctcaaagccacaggcattgatctggagaacattgtgtactacaaggacgacacccactactttgtgatgacagccaagaagcagtgcctgctgcggctgggggtgctgcgccaggactggccagacaccaatcggctgctgggcagtgccaatgtggtgcccgaggctctgcagcgctttacccgggcagctgctgactttgccacccatggcaagctcgggaaactagagtttgcccaggatgcccatgggcagcctgatgtctctgcctttgacttcacgagcatgatgcgggcagagagttctgctcgtgtgcaagagaagcatggcgcccgcctgctgctgggactggtgggggactgcctggtggagcccttctggcccctgggcactggagtggcacggggcttcctggcagcctttgatgcagcctggatggtgaagcggtgggcagagggcgctgagtccctagaggtgttggctgagcgtgagagcctgtaccagcttctgtcacagacatccccagaaaacatgcatcgcaatgtggcccagtatgggctggacccagccacccgctaccccaacctgaacctccgggcagtgacccccaatcaggtacgagacctgtatgatgtgctagccaaggagcctgtgcagaggaacaacgacaagacagatacagggatgccagccaccgggtcggcaggcacccaggaggagctgctacgctggtgccaggagcagacagctgggtacccgggagtccacgtctccgatttgtcttcctcctgggctgatgggctagctctgtgtgccctggtgtaccggctgcagcctggcctgctggaaccctcagagctgcaggggctgggagctctggaagcaactgcttgggcactaaaggtggcagagaatgagctgggcatcacaccggtggtgtctgcacaggccgtggtagcagggagtgacccactgggcctcattgcctacctcagccacttccacagtgccttcaagagcatggcccacagcccaggccctgtcagccaggcctccccagggacctccagtgctgtattattccttagtaaacttcagaggaccctgcagcgatcccgggccaaggaaaatgcagaggatgctggtggcaagaagctgcgcttggagatggaggccgagaccccaagtactgaggtgccacctgacccagagcctggtgtacccctgacacccccatcccaacaccaggaggccggtgctggggacctgtgtgcactttgtggggaacacctctatgtcctggaacgcctctgtgtcaacggccatttcttccaccggagctgcttccgctgccatacctgtgaggccacactgtggccaggtggctangagcagcacccaggagatggacatttctactgcctccagcacctgccccagacagaccacaaagcggaaggcagcgatagaggccctgagagtccggagctccccacaccaagtgagaatagcatgccaccaggcctctcaactcccacagcctcgcaggagggggccggtcctgttccagatcccagccagcccacccgtcggcagatccgcctctccagcccggagcgccagcggttgtcctcccttaaccttacccctgacccggaaatggagcctccacccaagcctccccgcagctgctccgccttggcccgccacgccctggagagcagctttgtgggctggggcctgccagtccagagccctcaagctcttgtggccatggagaaggaggaaaaagagagtcccttctccagtgaagaggaagaagaagatgtgcctttggactcagatgtggaacaggccctgcagacctttgccaagacctcaggcaccatgaataactacccaacatggcgtcggactctgctgcgccgtgcgaaggaggaggagatgaagaggttctgcaaggcccagaccatccaacggcgactaaatgagattgaggctgccttgagggagctagaggccgagggcgtgaagctggagctggccttgaggcgccagagcagttccccagaacagcaaaagaaactatgggtaggacagctgctacagctcgttgacaagaaaaacagcctggtggctgaggaggccgagctcatgatcacggtgcaggaattgaatctggaggagaaacagtggcagctggaccaggagctacgaggctacatgaaccgggaagaaaacctaaagacagctgctgatcggcaggctgaggaccaggtcctgaggaagctggtggatttggtcaaccagagagatgccctcatccgcttccaggaggagcgcaggctcagcgagctggccttggggacaggggcccagggctagacgagggtgggccgtctgctttcgttcccacaaagaaagcacctcaccccagcacagtgccacccctgttcatctgggctgcctggcagagagccttgctgtttacaattaaaatgtttctgccacaaaaaaaaaaaa

SEQ ID NO: 322676 - DNA, 3967 bp, Homo sapiens
  misc_feature (2833)..(2833): n is a, c, g, or t
caacaggaagcggcccctcccggcttcggagccgccgccactcgtctctgcccagctgctgccctccccaggaggcctccatggcttcacctacctccaccaacccagcgcatgcccactttgagagcttcctgcaggcccagctgtgccaggacgtgctgagcagcttccaggagctgtgtggggccctggggctggaacccggtggggggctgccccagtaccacaagatcaaggaccagctcaactactggagcgccaagtcactgtggaccaagctggacaagcgagcaggccagcctgtctaccagcagggccgggcctgcaccagcaccaagtgcctggtggtgggtgctggaccttgcgggctgcgggtcgctgtggagctggcgctgctgggggcccgagtggtgctggtggaaaagcgcaccaagttctctcgccacaacgtgctccacctctggcccttcaccatccacgacctgcgggcactcggtgctaagaagttctacgggcgcttctgcaccggcaccctggaccacatcagcatcaggcagctccagctgcttctgctgaaggtagcattgctgctgggggtggaaattcactggggtgtcactttcactggcctccagccccctcctaggaaggggagtggctggcgtgcccagctccaacccaacccccctgcccagctggccaactatgaatttgacgtccttatctcggctgcaggaggtaaattcgtccctgaaggcttcaaagttcgagaaatgcgaggcaaactggccattggcatcacagccaactttgtgaatggacgcaccgtggaggagacacaggtgccggagatcagtggtgtagccaggatctacaaccagagcttcttccagagccttctcaaagccacaggtcagggaccctcttgctgaatttcccctccccctgcctgactgtggcctggctcctgcctctcccttccaaacttgtcctcactgcaaggaactccacacttttctgtttttttggtctcagcagcaaaggagaaggaacctgtcccctcagggattaagcaagcacagccctagttgatcacccagcatgaaaagtcctggaatctctcagagatgaacctgtgtatgggagttttgcttaagtggtacttcaagaaggtgcctctgtttactttggttttgcactgccatgcgaccaggtggtgcaggtctcccaaatgccacccccctccaagcttccctctttgctctaagtcctcaggcctcctgggcctgggacagatggttgtttgtgtcatcaggactcgtggggttctatgcgtggagcactcaccgcagcctaagctgggatcccagctcagaggtcaggccatgttgggatgtttagggaaggtgatgcattatcaggagacatatctactgtcccctgccctgtacccccaggcattgatctggagaacattgtgtactacaaggacgacacccactactttgtgatgacagccaagaagcagtgcctgctgcggctgggggtgctgcgccaggactggccagacaccaatcggctgctgggcagtgccaatgtggtgcccgaggctctgcagcgctttacccgggcagctgctgactttgccacccatggcaagctcgggaaactagagtttgcccaggatgcccatgggcagcctgatgtctctgcctttgacttcacgagcatgatgcgggcagagagttctgctcgtgtgcaagagaagcatggcgcccgcctgctgctgggactggtgggggactgcctggtggagcccttctggcccctgggcactggagtggcacggggcttcctggcagcctttgatgcagcctggatggtgaagcggtgggcagagggcgctgagtccctagaggtgttggctgagcgtgagagcctgtaccagcttctgtcacagacatccccagaaaacatgcatcgcaatgtggcccagtatgggctggacccagccacccgctaccccaacctgaacctccgggcagtgacccccaatcaggtacgagacctgtatgatgtgctagccaaggagcctgtgcagaggaacaacgacaagacagatacagggatgccagccaccgggtcggcaggcacccaggaggagctgctacgctggtgccaggagcagacagctgggtacccgggagtccacgtctccgatttgtcttcctcctgggctgatgggctagctctgtgtgccctggtgtaccggctgcagcctggcctgctggaaccctcagagctgcaggggctgggagctctggaagcaactgcttgggcactaaaggtggcagagaatgagctgggcatcacaccggtggtgtctgcacaggccgtggtagcagggagtgacccactgggcctcattgcctacctcagccacttccacagtgccttcaagagcatggcccacagcccaggccctgtcagccaggcctccccagggacctccagtgctgtattattccttagtaaacttcagaggaccctgcagcgatcccgggccaaggaaaatgcagaggatgctggtggcaagaagctgcgcttggagatggaggccgagaccccaagtactgaggtgccacctgacccagagcctggtgtacccctgacacccccatcccaacaccaggaggccggtgctggggacctgtgtgcactttgtggggaacacctctatgtcctggaacgcctctgtgtcaacggccatttcttccaccggagctgcttccgctgccatacctgtgaggccacactgtggccaggtggctangagcagcacccaggagatggacatttctactgcctccagcacctgccccagacagaccacaaagcggaaggcagcgatagaggccctgagagtccggagctccccacaccaagtgagaatagcatgccaccaggcctctcaactcccacagcctcgcaggagggggccggtcctgttccagatcccagccagcccacccgtcggcagatccgcctctccagcccggagcgccagcggttgtcctcccttaaccttacccctgacccggaaatggagcctccacccaagcctccccgcagctgctccgccttggcccgccacgccctggagagcagctttgtgggctggggcctgccagtccagagccctcaagctcttgtggccatggagaaggaggaaaaagagagtcccttctccagtgaagaggaagaagaagatgtgcctttggactcagatgtggaacaggccctgcagacctttgccaagacctcaggcaccatgaataactacccaacatggcgtcggactctgctgcgccgtgcgaaggaggaggagatgaagaggttctgcaaggcccagaccatccaacggcgactaaatgagattgaggctgccttgagggagctagaggccgagggcgtgaagctggagctggccttgaggcgccagagcagttccccagaacagcaaaagaaactatgggtaggacagctgctacagctcgttgacaagaaaaacagcctggtggctgaggaggccgagctcatgatcacggtgcaggaattgaatctggaggagaaacagtggcagctggaccaggagctacgaggctacatgaaccgggaagaaaacctaaagacagctgctgatcggcaggctgaggaccaggtcctgaggaagctggtggatttggtcaaccagagagatgccctcatccgcttccaggaggagcgcaggctcagcgagctggccttggggacaggggcccagggctagacgagggtgggccgtctgctttcgttcccacaaagaaagcacctcaccccagcacagtgccacccctgttcatctgggctgcctggcagagagccttgctgtttacaattaaaatgtttctgccacaaaaaaaaaaaa

SEQ ID NO: 322677 - DNA, 3457 bp, Homo sapiens
  misc_feature (2288)..(2288): n is a, c, g, or t
caacaggaagcggcccctcccggcttcggagccgccgccactcgtctctgcccagctgctgccctccccaggaggcctccatggcttcacctacctccaccaacccagcgcatgcccactttgagagcttcctgcaggcccagctgtgccaggacgtgctgagcagcttccaggagctgtgtggggccctggggctggaacccggtggggggctgccccagtaccacaagatcaaggaccagctcaactactggagcgccaagtcactgtggaccaagctggacaagcgagcaggccagcctgtctaccagcagggccgggcctgcaccagcaccaagtgcctggtggtgggtgctggaccttgcgggctgcgggtcgctgtggagctggcgctgctgggggcccgagtggtgctggtggaaaagcgcaccaagttctctcgccacaacgtgctccacctctggcccttcaccatccacgacctgcgggcactcggtgctaagaagttctacgggcgcttctgcaccggcaccctggaccacatcagcatcaggcagctccagctgcttctgctgaaggtagcattgctgctgggggtggaaattcactggggtgtcactttcactggcctccagccccctcctaggaaggggagtggctggcgtgcccagctccaacccaacccccctgcccagctggccaactatgaatttgacgtccttatctcggctgcaggaggtaaattcgtccctgaaggcttcaaagttcgagaaatgcgaggcaaactggccattggcatcacagccaactttgtgaatggacgcaccgtggaggagacacaggtgccggagatcagtggtgtagccaggatctacaaccagagcttcttccagagccttctcaaagccacaggcattgatctggagaacattgtgtactacaaggacgacacccactactttgtgatgacagccaagaagcagtgcctgctgcggctgggggtgctgcgccaggactggccagacaccaatcggctgctgggcagtgccaatgtggtgcccgaggctctgcagcgctttacccgggcagctgctgactttgccacccatggcaagctcgggaaactagagtttgcccaggatgcccatgggcagcctgatgtctctgcctttgacttcacgagcatgatgcgggcagagagttctgctcgtgtgcaagagaagcatggcgcccgcctgctgctgggactggtgggggactgcctggtggagcccttctggcccctgggcactggagtggcacggggcttcctggcagcctttgatgcagcctggatggtgaagcggtgggcagagggcgctgagtccctagaggtgttggctgagcgtgagagcctgtaccagcttctgtcacagacatccccagaaaacatgcatcgcaatgtggcccagtatgggctggacccagccacccgctaccccaacctgaacctccgggcagtgacccccaatcaggtacgagacctgtatgatgtgctagccaaggagcctgtgcagaggaacaacgacaagacagatacagggatgccagccaccgggtcggcaggcacccaggaggagctgctacgctggtgccaggagcagacagctgggtacccgggagtccacgtctccgatttgtcttcctcctgggctgatgggctagctctgtgtgccctggtgtaccggctgcagcctggcctgctggaaccctcagagctgcaggggctgggagctctggaagcaactgcttgggcactaaaggtggcagagaatgagctgggcatcacaccggtggtgtctgcacaggccgtggtagcagggagtgacccactgggcctcattgcctacctcagccacttccacagtgccttcaagagcatggcccacagcccaggccctgtcagccaggcctccccagggacctccagtgctgtattattccttagtaaacttcagaggaccctgcagcgatcccgggccaaggaaaatgcagaggatgctggtggcaagaagctgcgcttggagatggaggccgagaccccaagtactgaggtgccacctgacccagagcctggtgtacccctgacacccccatcccaacaccaggaggccggtgctggggacctgtgtgcactttgtggggaacacctctatgtcctggaacgcctctgtgtcaacggccatttcttccaccggagctgcttccgctgccatacctgtgaggccacactgtggccaggtggctangagcagcacccaggagatggacatttctactgcctccagcacctgccccagacagaccacaaagcggaaggcagcgatagaggccctgagagtccggagctccccacaccaagtgagaatagcatgccaccaggcctctcaactcccacagcctcgcaggagggggccggtcctgttccagatcccagccagcccacccgtcggcagatccgcctctccagcccggagcgccagcggttgtcctcccttaaccttacccctgacccggaaatggagcctccacccaagcctccccgcagctgctccgccttggcccgccacgccctggagagcagctttgtgggctggggcctgccagtccagagccctcaaggcgctggaggcagtagaacgtctcagttcttcttcctcttgtggccatggagaaggaggaaaaagagagtcccttctccagtgaagaggaagaagaagatgtgcctttggactcagatgtggaacaggccctgcagacctttgccaagacctcaggcaccatgaataactacccaacatggcgtcggactctgctgcgccgtgcgaaggaggaggagatgaagaggttctgcaaggcccagaccatccaacggcgactaaatgagattgaggctgccttgagggagctagaggccgagggcgtgaagctggagctggccttgaggcgccagagcagttccccagaacagcaaaagaaactatgggtaggacagctgctacagctcgttgacaagaaaaacagcctggtggctgaggaggccgagctcatgatcacggtgcaggaattgaatctggaggagaaacagtggcagctggaccaggagctacgaggctacatgaaccgggaagaaaacctaaagacagctgctgatcggcaggctgaggaccaggtcctgaggaagctggtggatttggtcaaccagagagatgccctcatccgcttccaggaggagcgcaggctcagcgagctggccttggggacaggggcccagggctagacgagggtgggccgtctgctttcgttcccacaaagaaagcacctcaccccagcacagtgccacccctgttcatctgggctgcctggcagagagccttgctgtttacaattaaaatgtttctgccacaaaaaaaaaaaa

SEQ ID NO: 322678 - DNA, 1729 bp, Homo sapiens
  misc_feature (595)..(595): n is a, c, g, or t
taggctggttacggcccggggtgtatgggatcggctgcagcctggcctgctggaaccctcagagctgcaggggctgggagctctggaagcaactgcttgggcactaaaggtggcagagaatgagctgggcatcacaccggtggtgtctgcacaggccgtggtagcagggagtgacccactgggcctcattgcctacctcagccacttccacagtgccttcaagagcatggcccacagcccaggccctgtcagccaggcctccccagggacctccagtgctgtattattccttagtaaacttcagaggaccctgcagcgatcccgggccaaggaaaatgcagaggatgctggtggcaagaagctgcgcttggagatggaggccgagaccccaagtactgaggtgccacctgacccagagcctggtgtacccctgacacccccatcccaacaccaggaggccggtgctggggacctgtgtgcactttgtggggaacacctctatgtcctggaacgcctctgtgtcaacggccatttcttccaccggagctgcttccgctgccatacctgtgaggccacactgtggccaggtggctangagcagcacccaggagatggacatttctactgcctccagcacctgccccagacagaccacaaagcggaaggcagcgatagaggccctgagagtccggagctccccacaccaagtgagaatagcatgccaccaggcctctcaactcccacagcctcgcaggagggggccggtcctgttccagatcccagccagcccacccgtcggcagatccgcctctccagcccggagcgccagcggttgtcctcccttaaccttacccctgacccggaaatggagcctccacccaagcctccccgcagctgctccgccttggcccgccacgccctggagagcagctttgtgggctggggcctgccagtccagagccctcaagctcttgtggccatggagaaggaggaaaaagagagtcccttctccagtgaagaggaagaagaagatgtgcctttggactcagatgtggaacaggccctgcagacctttgccaagacctcaggcaccatgaataactacccaacatggcgtcggactctgctgcgccgtgcgaaggaggaggagatgaagaggttctgcaaggcccagaccatccaacggcgactaaatgagattgaggctgccttgagggagctagaggccgagggcgtgaagctggagctggccttgaggcgccagagcagttccccagaacagcaaaagaaactatgggtaggacagctgctacagctcgttgacaagaaaaacagcctggtggctgaggaggccgagctcatgatcacggtgcaggaattgaatctggaggagaaacagtggcagctggaccaggagctacgaggctacatgaaccgggaagaaaacctaaagacagctgctgatcggcaggctgaggaccaggtcctgaggaagctggtggatttggtcaaccagagagatgccctcatccgcttccaggaggagcgcaggctcagcgagctggccttggggacaggggcccagggctagacgagggtgggccgtctgctttcgttcccacaaagaaagcacctcaccccagcacagtgccacccctgttcatctgggctgcctggcagagagccttgctgtttacaattaaaatgtttctgccacaaaaaaaaaaaa

SEQ ID NO: 322679 - DNA, 3328 bp, Homo sapiens
  misc_feature (2288)..(2288): n is a, c, g, or t
caacaggaagcggcccctcccggcttcggagccgccgccactcgtctctgcccagctgctgccctccccaggaggcctccatggcttcacctacctccaccaacccagcgcatgcccactttgagagcttcctgcaggcccagctgtgccaggacgtgctgagcagcttccaggagctgtgtggggccctggggctggaacccggtggggggctgccccagtaccacaagatcaaggaccagctcaactactggagcgccaagtcactgtggaccaagctggacaagcgagcaggccagcctgtctaccagcagggccgggcctgcaccagcaccaagtgcctggtggtgggtgctggaccttgcgggctgcgggtcgctgtggagctggcgctgctgggggcccgagtggtgctggtggaaaagcgcaccaagttctctcgccacaacgtgctccacctctggcccttcaccatccacgacctgcgggcactcggtgctaagaagttctacgggcgcttctgcaccggcaccctggaccacatcagcatcaggcagctccagctgcttctgctgaaggtagcattgctgctgggggtggaaattcactggggtgtcactttcactggcctccagccccctcctaggaaggggagtggctggcgtgcccagctccaacccaacccccctgcccagctggccaactatgaatttgacgtccttatctcggctgcaggaggtaaattcgtccctgaaggcttcaaagttcgagaaatgcgaggcaaactggccattggcatcacagccaactttgtgaatggacgcaccgtggaggagacacaggtgccggagatcagtggtgtagccaggatctacaaccagagcttcttccagagccttctcaaagccacaggcattgatctggagaacattgtgtactacaaggacgacacccactactttgtgatgacagccaagaagcagtgcctgctgcggctgggggtgctgcgccaggactggccagacaccaatcggctgctgggcagtgccaatgtggtgcccgaggctctgcagcgctttacccgggcagctgctgactttgccacccatggcaagctcgggaaactagagtttgcccaggatgcccatgggcagcctgatgtctctgcctttgacttcacgagcatgatgcgggcagagagttctgctcgtgtgcaagagaagcatggcgcccgcctgctgctgggactggtgggggactgcctggtggagcccttctggcccctgggcactggagtggcacggggcttcctggcagcctttgatgcagcctggatggtgaagcggtgggcagagggcgctgagtccctagaggtgttggctgagcgtgagagcctgtaccagcttctgtcacagacatccccagaaaacatgcatcgcaatgtggcccagtatgggctggacccagccacccgctaccccaacctgaacctccgggcagtgacccccaatcaggtacgagacctgtatgatgtgctagccaaggagcctgtgcagaggaacaacgacaagacagatacagggatgccagccaccgggtcggcaggcacccaggaggagctgctacgctggtgccaggagcagacagctgggtacccgggagtccacgtctccgatttgtcttcctcctgggctgatgggctagctctgtgtgccctggtgtaccggctgcagcctggcctgctggaaccctcagagctgcaggggctgggagctctggaagcaactgcttgggcactaaaggtggcagagaatgagctgggcatcacaccggtggtgtctgcacaggccgtggtagcagggagtgacccactgggcctcattgcctacctcagccacttccacagtgccttcaagagcatggcccacagcccaggccctgtcagccaggcctccccagggacctccagtgctgtattattccttagtaaacttcagaggaccctgcagcgatcccgggccaaggaaaatgcagaggatgctggtggcaagaagctgcgcttggagatggaggccgagaccccaagtactgaggtgccacctgacccagagcctggtgtacccctgacacccccatcccaacaccaggaggccggtgctggggacctgtgtgcactttgtggggaacacctctatgtcctggaacgcctctgtgtcaacggccatttcttccaccggagctgcttccgctgccatacctgtgaggccacactgtggccaggtggctangagcagcacccaggagatggacatttctactgcctccagcacctgccccagacagaccacaaagcggaaggcagcgatagaggccctgagagtccggagctccccacaccaagtgagaatagcatgccaccaggcctctcaactcccacagcctcgcaggagggggccggtcctgttccagatcccagccagcccacccgtcggcagatccgcctctccagcccggagcgccagcggttgtcctcccttaaccttacccctgacccggaaatggagcctccacccaagcctccccgcagctgctccgccttggcccgccacgccctggagagcagctttgtgggctggggcctgccagtccagagccctcaagctcttgtggccatggagaaggaggaaaaagagagtcccttctccagtgaagaggaagaagaagatgtgcctttggactcagatgtggaacaggccctgcagacctttgccaagacctcaggcaccatgaataactacccaacatggcgtcggactctgctgcgccgtgcgaaggaggaggagatgaagaggttctgcaaggcccaggttccccagaacagcaaaagaaactatgggtaggacagctgctacagctcgttgacaagaaaaacagcctggtggctgaggaggccgagctcatgatcacggtgcaggaattgaatctggaggagaaacagtggcagctggaccaggagctacgaggctacatgaaccgggaagaaaacctaaagacagctgctgatcggcaggctgaggaccaggtcctgaggaagctggtggatttggtcaaccagagagatgccctcatccgcttccaggaggagcgcaggctcagcgagctggccttggggacaggggcccagggctagacgagggtgggccgtctgctttcgttcccacaaagaaagcacctcaccccagcacagtgccacccctgttcatctgggctgcctggcagagagccttgctgtttacaattaaaatgtttctgccacaaaaaaaaaaaa

SEQ ID NO: 322680 - DNA, 1384 bp, Homo sapiens
  misc_feature (305)..(305): n is a, c, g, or t
agccccttgtgttcatctgtacgcatcccctcccagctggccctgcccctctaccctccctgcctgagcacttacctccttagatggaggccgagaccccaagtactgaggtgccacctgacccagagcctggtgtacccctgacacccccatcccaacaccaggaggccggtgctggggacctgtgtgcactttgtggggaacacctctatgtcctggaacgcctctgtgtcaacggccatttcttccaccggagctgcttccgctgccatacctgtgaggccacactgtggccaggtggctangagcagcacccaggagatggacatttctactgcctccagcacctgccccagacagaccacaaagcggaaggcagcgatagaggccctgagagtccgcctcgcaggagggggccggtcctgttccagatcccagccagcccacccgtcggcagatccgcctctccagcccggagcgccagcggttgtcctcccttaaccttacccctgacccggaaatggagcctccacccaagcctccccgcagctgctccgccttggcccgccacgccctggagagcagctttgtgggctggggcctgccagtccagagccctcaagctcttgtggccatggagaaggaggaaaaagagagtcccttctccagtgaagaggaagaagaagatgtgcctttggactcagatgtggaacaggccctgcagacctttgccaagacctcaggcaccatgaataactacccaacatggcgtcggactctgctgcgccgtgcgaaggaggaggagatgaagaggttctgcaaggcccagaccatccaacggcgactaaatgagattgaggctgccttgagggagctagaggccgagggcgtgaagctggagctggccttgaggcgccagagcagttccccagaacagcaaaagaaactatgggtaggacagctgctacagctcgttgacaagaaaaacagcctggtggctgaggaggccgagctcatgatcacggtgcaggaattgaatctggaggagaaacagtggcagctggaccaggagctacgaggctacatgaaccgggaagaaaacctaaagacagctgctgatcggcaggctgaggaccaggtcctgaggaagctggtggatttggtcaaccagagagatgccctcatccgcttccaggaggagcgcaggctcagcgagctggccttggggacaggggcccagggctagacgagggtgggccgtctgctttcgttcccacaaagaaagcacctcaccccagcacagtgccacccctgttcatctgggctgcctggcagagagccttgctgtttacaattaaaatgtttctgccacaaaaaaaaaaaa

SEQ ID NO: 322681 - DNA, 613 bp, Homo sapiens
gcagccgcctactactactaaattcccggccggtcgacagaggttctgcaaggcccagaccatccaacggcgactaaatgagattgaggctgccttgagggagctagaggccgagggcgtgaagctggagctggccttgaggcgccagagcagttccccagaacagcaaaagaaactatgggtaggacagctgctacagctcgttgacaagaaaaacagcctggtggctgaggaggccgagctcatgatcacggtgcaggaattgaatctggaggagaaacagtggcagctggaccaggagctacgaggctacatgaaccgggaagaaaacctaaagacagctgctgatcggcaggctgaggaccaggtcctgaggaagctggtggatttggtcaaccagagagatgccctcatccgcttccaggaggagcgcaggctcagcgagctggccttggggacaggggcccagggctagacgagggtgggccgtctgctttcgttcccacaaagaaagcacctcaccccagcacagtgccacccctgttcatctgggctgcctggcagagagccttgctgtttacaattaaaatgtttctgccacaaaaaaaaaaaa

SEQ ID NO: 322682 - DNA, 1620 bp, Homo sapiens
caacaggaagcggcccctcccggcttcggagccgccgccactcgtctctgcccagctgctgccctccccaggaggcctccatggcttcacctacctccaccaacccagcgcatgcccactttgagagcttcctgcaggcccagctgtgccaggacgtgctgagcagcttccaggagctgtgtggggccctggggctggaacccggtggggggctgccccagtaccacaagatcaaggaccagctcaactactggagcgccaagtcactgtggaccaagctggacaagcgagcaggccagcctgtctaccagcagggccgggcctgcaccagcaccaagtgcctggtggtgggtgctggaccttgcgggctgcgggtcgctgtggagctggcgctgctgggggcccgagtggtgctggtggaaaagcgcaccaagttctctcgccacaacgtgctccacctctggcccttcaccatccacgacctgcgggcactcggtgctaagaagttctacgggcgcttctgcaccggcaccctggaccacatcagcatcaggcagctccagctgcttctgctgaaggtagcattgctgctgggggtggaaattcactggggtgtcactttcactggcctccagccccctcctaggaaggggagtggctggcgtgcccagctccaacccaacccccctgcccagctggccaactatgaatttgacgtccttatctcggctgcaggaggtaaattcgtccctgaaggcttcaaagttcgagaaatgcgaggcaaactggccattggcatcacagccaactttgtgaatggacgcaccgtggaggagacacaggtgccggagatcagtggtgtagccaggatctacaaccagagcttcttccagagccttctcaaagccacaggcattgatctggagaacattgtgtactacaaggacgacacccactactttgtgatgacagccaagaagcagtgcctgctgcggctgggggtgctgcgccaggactggccagacaccaatcggctgctgggcagtgccaatgtggtgcccgaggctctgcagcgctttacccgggcagctgctgactttgccacccatggcaagctcgggaaactagagtttgcccaggatgcccatgggcagcctgatgtctctgcctttgacttcacgagcatgatgcgggcagagagttctgctcgtgtgcaagagaagcatggcgcccgcctgctgctgggactggtgggggactgcctggtggagcccttctggcccctgggcactggagtggcacggggcttcctggcagcctttgatgcagcctggatggtgaagcggtgggcagagggcgctgagtccctagaggtgttggctgagcgtgagagcctgtaccagcttctgtcacagacatccccagaaaacatgcatcgcaatgtggcccagtatgggctggacccagccacccgctaccccaacctgaacctccgggcagtgacccccaatcaggtacgagacctgtatgatgtgctagccaaggagcctgtgcagaggaacaacgacaagacagatacagggatgccagccaccggtgagcaggccttcctcccaaggg

SEQ ID NO: 322683 - DNA, 505 bp, Homo sapiens
tgctcagcagctggggttgtgggtatcagatctgtccctgtgttgcatgcaaaggcagctctgtcctctccacatctaagaaatccccgcacaccctgattccaaggcctaaggaaggcaggctaagaattcctaccccagggcttggagatccctggacagggaggctgaactggaggctcccctggtgtcccatgtgccctctgtgcccaagactaatgtttttcacttccaaatttggcaaatttcacttggagtggactggatagcagctgtctctggagcagatgctggcaggggaatgggctgggaggagcagagccaatcactggtgaatcccgagctccctggggacaccagcctgctctcttcgcctccccttcctttttatttcttctgttctccagcctcttccccttctttttccacctctccagccactcgtctctgcccagctgctgccctccccaggaggcctccatggcttcacctacctccaccaacc

SEQ ID NO: 322684 - DNA, 377 bp, Homo sapiens
aaaccccctcgggcacccttcaggtggcgtgggagggggcgacaaagcgaggctttgtctccggagattcctgggagagcgcgcccgggcgcacagggggcggggcggggtaggggtcgatcagggaggggggaacctgggaggggcgcacccggctgcggtcgacccccagccctacccacggccccctggagtagggcacattcacagaggaagtgttttgaccacagtgcgtcagaaatagacccaggcctccgttccccagtcagtcgcaacatcctcccgccgtttgttgaggcagtttggtggagggaagtggaacctacgcggacagaggctgtttctctgtcaggaggcaagcacgagtgctgaggaaa

SEQ ID NO: 322685 - DNA, 3422 bp, Homo sapiens
  misc_feature (2288)..(2288): n is a, c, g, or t
caacaggaagcggcccctcccggcttcggagccgccgccactcgtctctgcccagctgctgccctccccaggaggcctccatggcttcacctacctccaccaacccagcgcatgcccactttgagagcttcctgcaggcccagctgtgccaggacgtgctgagcagcttccaggagctgtgtggggccctggggctggaacccggtggggggctgccccagtaccacaagatcaaggaccagctcaactactggagcgccaagtcactgtggaccaagctggacaagcgagcaggccagcctgtctaccagcagggccgggcctgcaccagcaccaagtgcctggtggtgggtgctggaccttgcgggctgcgggtcgctgtggagctggcgctgctgggggcccgagtggtgctggtggaaaagcgcaccaagttctctcgccacaacgtgctccacctctggcccttcaccatccacgacctgcgggcactcggtgctaagaagttctacgggcgcttctgcaccggcaccctggaccacatcagcatcaggcagctccagctgcttctgctgaaggtagcattgctgctgggggtggaaattcactggggtgtcactttcactggcctccagccccctcctaggaaggggagtggctggcgtgcccagctccaacccaacccccctgcccagctggccaactatgaatttgacgtccttatctcggctgcaggaggtaaattcgtccctgaaggcttcaaagttcgagaaatgcgaggcaaactggccattggcatcacagccaactttgtgaatggacgcaccgtggaggagacacaggtgccggagatcagtggtgtagccaggatctacaaccagagcttcttccagagccttctcaaagccacaggcattgatctggagaacattgtgtactacaaggacgacacccactactttgtgatgacagccaagaagcagtgcctgctgcggctgggggtgctgcgccaggactggccagacaccaatcggctgctgggcagtgccaatgtggtgcccgaggctctgcagcgctttacccgggcagctgctgactttgccacccatggcaagctcgggaaactagagtttgcccaggatgcccatgggcagcctgatgtctctgcctttgacttcacgagcatgatgcgggcagagagttctgctcgtgtgcaagagaagcatggcgcccgcctgctgctgggactggtgggggactgcctggtggagcccttctggcccctgggcactggagtggcacggggcttcctggcagcctttgatgcagcctggatggtgaagcggtgggcagagggcgctgagtccctagaggtgttggctgagcgtgagagcctgtaccagcttctgtcacagacatccccagaaaacatgcatcgcaatgtggcccagtatgggctggacccagccacccgctaccccaacctgaacctccgggcagtgacccccaatcaggtacgagacctgtatgatgtgctagccaaggagcctgtgcagaggaacaacgacaagacagatacagggatgccagccaccgggtcggcaggcacccaggaggagctgctacgctggtgccaggagcagacagctgggtacccgggagtccacgtctccgatttgtcttcctcctgggctgatgggctagctctgtgtgccctggtgtaccggctgcagcctggcctgctggaaccctcagagctgcaggggctgggagctctggaagcaactgcttgggcactaaaggtggcagagaatgagctgggcatcacaccggtggtgtctgcacaggccgtggtagcagggagtgacccactgggcctcattgcctacctcagccacttccacagtgccttcaagagcatggcccacagcccaggccctgtcagccaggcctccccagggacctccagtgctgtattattccttagtaaacttcagaggaccctgcagcgatcccgggccaaggaaaatgcagaggatgctggtggcaagaagctgcgcttggagatggaggccgagaccccaagtactgaggtgccacctgacccagagcctggtgtacccctgacacccccatcccaacaccaggaggccggtgctggggacctgtgtgcactttgtggggaacacctctatgtcctggaacgcctctgtgtcaacggccatttcttccaccggagctgcttccgctgccatacctgtgaggccacactgtggccaggtggctangagcagcacccaggagatggacatttctactgcctccagcacctgccccagacagaccacaaagcggaaggcagcgatagaggccctgagagtccggagctccccacaccaagtgagaatagcatgccaccaggcctctcaactcccacagcctcgcaggagggggccggtcctgttccagatcccagccagcccacccgtcggcagatccgcctctccagcccggagcgccagcggttgtcctcccttaaccttacccctgacccggaaatggagcctccacccaagcctccccgcagctgctccgccttggcccgccacgccctggagagcagctttgtgggctggggcctgccagtccagagccctcaagctcttgtggccatggagaaggaggaaaaagagagtcccttctccagtgaagaggaagaagaagatgtgcctttggactcagatgtggaacaggccctgcagacctttgccaagacctcaggcaccatgaataactacccaacatggcgtcggactctgctgcgccgtgcgaaggaggaggagatgaagaggttctgcaaggcccagaccatccaacggcgactaaatgagattgaggctgccttgagggagctagaggccgagggcgtgaagctggagctggccttgaggcgccagagcagttccccagaacagcaaaagaaactatgggtaggacagctgctacagctcgttgacaagaaaaacagcctggtggctgaggaggccgagctcatgatcacggtgcaggaattgaatctggaggagaaacagtggcagctggaccaggagctacgaggctacatgaaccgggaagaaaacctaaagacagctgctgatcggcaggctgaggaccaggtcctgaggaagctggtggatttggtcaaccagagagatgccctcatccgcttccaggaggagcgcaggctcagcgagctggccttggggacaggggcccagggctagacgagggtgggccgtctgctttcgttcccacaaagaaagcacctcaccccagcacagtgccacccctgttcatctgggctgcctggcagagagccttgctgtttacaattaaaatgtttctgccacaaaaaaaaaaaa

SEQ ID NO: 322686 - DNA, 558 bp, Homo sapiens
tcctcccatgccccaacacatacattcagtctttaccagacttgcagggcctccgtcaccaccatgctctttgttgcctgactggggcaggcgctggaggcagtagaacgtctcagttcttcttcctcttgtggccatggagaaggaggaaaaagagagtcccttctccagtgaagaggaagaagaagatgtgcctttggactcagatgtggaacaggccctgcagacctttgccaagacctcaggcaccatgaataactacccaacatggcgtcggactctgctgcgccgtgcgaaggaggaggagatgaagaggttctgcaaggcccagaccatccaacggcgactaaatgagattgaggctgccttgagggagctagaggccgagggcgtgaagctggagctggccttgaggcgccagagcagttccccagaacagcaaaagaaactatgggtaggacagctgctacagctcgttgacaagaaaaacagcctggtggctgaggaggccgagctcatgatcacgtaaggggaaggggatggtgacagtggcccatg

SEQ ID NO: 322687 - DNA, 3841 bp, Homo sapiens
  misc_feature (2707)..(2707): n is a, c, g, or t
caacaggaagcggcccctcccggcttcggagccgccgccactcgtctctgcccagctgctgccctccccaggaggcctccatggcttcacctacctccaccaacccagcgcatgcccactttgagagcttcctgcaggcccagctgtgccaggacgtgctgagcagcttccaggagctgtgtggggccctggggctggaacccggtggggggctgccccagtaccacaagatcaaggaccagctcaactactggagcgccaagtcactgtggaccaagctggacaagcgagcaggccagcctgtctaccagcagggccgggcctgcaccagcaccaagtgcctggtggtgggtgctggaccttgcgggctgcgggtcgctgtggagctggcgctgctgggggcccgagtggtgctggtggaaaagcgcaccaagttctctcgccacaacgtgctccacctctggcccttcaccatccacgacctgcgggcactcggtgctaagaagttctacgggcgcttctgcaccggcaccctggaccacatcagcatcaggcagctccagctgcttctgctgaaggtagcattgctgctgggggtggaaattcactggggtgtcactttcactggcctccagccccctcctaggaaggggagtggctggcgtgcccagctccaacccaacccccctgcccagctggccaactatgaatttgacgtccttatctcggctgcaggaggtaaattcgtccctgaaggcttcaaagttcgagaaatgcgaggcaaactggccattggcatcacagccaactttgtgaatggacgcaccgtggaggagacacaggtgccggagatcagtggtgtagccaggatctacaaccagagcttcttccagagccttctcaaagccacagcaaaggagaaggaacctgtcccctcagggattaagcaagcacagccctagttgatcacccagcatgaaaagtcctggaatctctcagagatgaacctgtgtatgggagttttgcttaagtggtacttcaagaaggtgcctctgtttactttggttttgcactgccatgcgaccaggtggtgcaggtctcccaaatgccacccccctccaagcttccctctttgctctaagtcctcaggcctcctgggcctgggacagatggttgtttgtgtcatcaggactcgtggggttctatgcgtggagcactcaccgcagcctaagctgggatcccagctcagaggtcaggccatgttgggatgtttagggaaggtgatgcattatcaggagacatatctactgtcccctgccctgtacccccaggcattgatctggagaacattgtgtactacaaggacgacacccactactttgtgatgacagccaagaagcagtgcctgctgcggctgggggtgctgcgccaggactggccagacaccaatcggctgctgggcagtgccaatgtggtgcccgaggctctgcagcgctttacccgggcagctgctgactttgccacccatggcaagctcgggaaactagagtttgcccaggatgcccatgggcagcctgatgtctctgcctttgacttcacgagcatgatgcgggcagagagttctgctcgtgtgcaagagaagcatggcgcccgcctgctgctgggactggtgggggactgcctggtggagcccttctggcccctgggcactggagtggcacggggcttcctggcagcctttgatgcagcctggatggtgaagcggtgggcagagggcgctgagtccctagaggtgttggctgagcgtgagagcctgtaccagcttctgtcacagacatccccagaaaacatgcatcgcaatgtggcccagtatgggctggacccagccacccgctaccccaacctgaacctccgggcagtgacccccaatcaggtacgagacctgtatgatgtgctagccaaggagcctgtgcagaggaacaacgacaagacagatacagggatgccagccaccgggtcggcaggcacccaggaggagctgctacgctggtgccaggagcagacagctgggtacccgggagtccacgtctccgatttgtcttcctcctgggctgatgggctagctctgtgtgccctggtgtaccggctgcagcctggcctgctggaaccctcagagctgcaggggctgggagctctggaagcaactgcttgggcactaaaggtggcagagaatgagctgggcatcacaccggtggtgtctgcacaggccgtggtagcagggagtgacccactgggcctcattgcctacctcagccacttccacagtgccttcaagagcatggcccacagcccaggccctgtcagccaggcctccccagggacctccagtgctgtattattccttagtaaacttcagaggaccctgcagcgatcccgggccaaggaaaatgcagaggatgctggtggcaagaagctgcgcttggagatggaggccgagaccccaagtactgaggtgccacctgacccagagcctggtgtacccctgacacccccatcccaacaccaggaggccggtgctggggacctgtgtgcactttgtggggaacacctctatgtcctggaacgcctctgtgtcaacggccatttcttccaccggagctgcttccgctgccatacctgtgaggccacactgtggccaggtggctangagcagcacccaggagatggacatttctactgcctccagcacctgccccagacagaccacaaagcggaaggcagcgatagaggccctgagagtccggagctccccacaccaagtgagaatagcatgccaccaggcctctcaactcccacagcctcgcaggagggggccggtcctgttccagatcccagccagcccacccgtcggcagatccgcctctccagcccggagcgccagcggttgtcctcccttaaccttacccctgacccggaaatggagcctccacccaagcctccccgcagctgctccgccttggcccgccacgccctggagagcagctttgtgggctggggcctgccagtccagagccctcaagctcttgtggccatggagaaggaggaaaaagagagtcccttctccagtgaagaggaagaagaagatgtgcctttggactcagatgtggaacaggccctgcagacctttgccaagacctcaggcaccatgaataactacccaacatggcgtcggactctgctgcgccgtgcgaaggaggaggagatgaagaggttctgcaaggcccagaccatccaacggcgactaaatgagattgaggctgccttgagggagctagaggccgagggcgtgaagctggagctggccttgaggcgccagagcagttccccagaacagcaaaagaaactatgggtaggacagctgctacagctcgttgacaagaaaaacagcctggtggctgaggaggccgagctcatgatcacggtgcaggaattgaatctggaggagaaacagtggcagctggaccaggagctacgaggctacatgaaccgggaagaaaacctaaagacagctgctgatcggcaggctgaggaccaggtcctgaggaagctggtggatttggtcaaccagagagatgccctcatccgcttccaggaggagcgcaggctcagcgagctggccttggggacaggggcccagggctagacgagggtgggccgtctgctttcgttcccacaaagaaagcacctcaccccagcacagtgccacccctgttcatctgggctgcctggcagagagccttgctgtttacaattaaaatgtttctgccacaaaaaaaaaaaa

SEQ ID NO: 322688 - DNA, 3703 bp, Homo sapiens
  misc_feature (2288)..(2288): n is a, c, g, or t
caacaggaagcggcccctcccggcttcggagccgccgccactcgtctctgcccagctgctgccctccccaggaggcctccatggcttcacctacctccaccaacccagcgcatgcccactttgagagcttcctgcaggcccagctgtgccaggacgtgctgagcagcttccaggagctgtgtggggccctggggctggaacccggtggggggctgccccagtaccacaagatcaaggaccagctcaactactggagcgccaagtcactgtggaccaagctggacaagcgagcaggccagcctgtctaccagcagggccgggcctgcaccagcaccaagtgcctggtggtgggtgctggaccttgcgggctgcgggtcgctgtggagctggcgctgctgggggcccgagtggtgctggtggaaaagcgcaccaagttctctcgccacaacgtgctccacctctggcccttcaccatccacgacctgcgggcactcggtgctaagaagttctacgggcgcttctgcaccggcaccctggaccacatcagcatcaggcagctccagctgcttctgctgaaggtagcattgctgctgggggtggaaattcactggggtgtcactttcactggcctccagccccctcctaggaaggggagtggctggcgtgcccagctccaacccaacccccctgcccagctggccaactatgaatttgacgtccttatctcggctgcaggaggtaaattcgtccctgaaggcttcaaagttcgagaaatgcgaggcaaactggccattggcatcacagccaactttgtgaatggacgcaccgtggaggagacacaggtgccggagatcagtggtgtagccaggatctacaaccagagcttcttccagagccttctcaaagccacaggcattgatctggagaacattgtgtactacaaggacgacacccactactttgtgatgacagccaagaagcagtgcctgctgcggctgggggtgctgcgccaggactggccagacaccaatcggctgctgggcagtgccaatgtggtgcccgaggctctgcagcgctttacccgggcagctgctgactttgccacccatggcaagctcgggaaactagagtttgcccaggatgcccatgggcagcctgatgtctctgcctttgacttcacgagcatgatgcgggcagagagttctgctcgtgtgcaagagaagcatggcgcccgcctgctgctgggactggtgggggactgcctggtggagcccttctggcccctgggcactggagtggcacggggcttcctggcagcctttgatgcagcctggatggtgaagcggtgggcagagggcgctgagtccctagaggtgttggctgagcgtgagagcctgtaccagcttctgtcacagacatccccagaaaacatgcatcgcaatgtggcccagtatgggctggacccagccacccgctaccccaacctgaacctccgggcagtgacccccaatcaggtacgagacctgtatgatgtgctagccaaggagcctgtgcagaggaacaacgacaagacagatacagggatgccagccaccgggtcggcaggcacccaggaggagctgctacgctggtgccaggagcagacagctgggtacccgggagtccacgtctccgatttgtcttcctcctgggctgatgggctagctctgtgtgccctggtgtaccggctgcagcctggcctgctggaaccctcagagctgcaggggctgggagctctggaagcaactgcttgggcactaaaggtggcagagaatgagctgggcatcacaccggtggtgtctgcacaggccgtggtagcagggagtgacccactgggcctcattgcctacctcagccacttccacagtgccttcaagagcatggcccacagcccaggccctgtcagccaggcctccccagggacctccagtgctgtattattccttagtaaacttcagaggaccctgcagcgatcccgggccaaggaaaatgcagaggatgctggtggcaagaagctgcgcttggagatggaggccgagaccccaagtactgaggtgccacctgacccagagcctggtgtacccctgacacccccatcccaacaccaggaggccggtgctggggacctgtgtgcactttgtggggaacacctctatgtcctggaacgcctctgtgtcaacggccatttcttccaccggagctgcttccgctgccatacctgtgaggccacactgtggccaggtggctangagcagcacccaggagatggacatttctactgcctccagcacctgccccagacagaccacaaagcggaaggcagcgatagaggccctgagagtccgaaagactgaaggcgtgtatgtatattggggcatgggaagaggaagagggtctcgtcaaaccagcgctttgctgggggtaactgaatgtcgtcttctactagcatgtaagctctgtgaaggcagggatgcctgtctgcttacacttcttgttctctcaagtatctaaaacacagccagacactgtttgtaaatggttttaagtgaatgaatgccaaggctcacctttgctccgaaggggtggcctcaccccccgacctcactccacatggtggcttttccaggagctccccacaccaagtgagaatagcatgccaccaggcctctcaactcccacagcctcgcaggagggggccggtcctgttccagatcccagccagcccacccgtcggcagatccgcctctccagcccggagcgccagcggttgtcctcccttaaccttacccctgacccggaaatggagcctccacccaagcctccccgcagctgctccgccttggcccgccacgccctggagagcagctttgtgggctggggcctgccagtccagagccctcaagctcttgtggccatggagaaggaggaaaaagagagtcccttctccagtgaagaggaagaagaagatgtgcctttggactcagatgtggaacaggccctgcagacctttgccaagacctcaggcaccatgaataactacccaacatggcgtcggactctgctgcgccgtgcgaaggaggaggagatgaagaggttctgcaaggcccagaccatccaacggcgactaaatgagattgaggctgccttgagggagctagaggccgagggcgtgaagctggagctggccttgaggcgccagagcagttccccagaacagcaaaagaaactatgggtaggacagctgctacagctcgttgacaagaaaaacagcctggtggctgaggaggccgagctcatgatcacggtgcaggaattgaatctggaggagaaacagtggcagctggaccaggagctacgaggctacatgaaccgggaagaaaacctaaagacagctgctgatcggcaggctgaggaccaggtcctgaggaagctggtggatttggtcaaccagagagatgccctcatccgcttccaggaggagcgcaggctcagcgagctggccttggggacaggggcccagggctagacgagggtgggccgtctgctttcgttcccacaaagaaagcacctcaccccagcacagtgccacccctgttcatctgggctgcctggcagagagccttgctgtttacaattaaaatgtttctgccacaaaaaaaaaaaa

SEQ ID NO: 322689 - DNA, 3508 bp, Homo sapiens
  misc_feature (2288)..(2288): n is a, c, g, or t
caacaggaagcggcccctcccggcttcggagccgccgccactcgtctctgcccagctgctgccctccccaggaggcctccatggcttcacctacctccaccaacccagcgcatgcccactttgagagcttcctgcaggcccagctgtgccaggacgtgctgagcagcttccaggagctgtgtggggccctggggctggaacccggtggggggctgccccagtaccacaagatcaaggaccagctcaactactggagcgccaagtcactgtggaccaagctggacaagcgagcaggccagcctgtctaccagcagggccgggcctgcaccagcaccaagtgcctggtggtgggtgctggaccttgcgggctgcgggtcgctgtggagctggcgctgctgggggcccgagtggtgctggtggaaaagcgcaccaagttctctcgccacaacgtgctccacctctggcccttcaccatccacgacctgcgggcactcggtgctaagaagttctacgggcgcttctgcaccggcaccctggaccacatcagcatcaggcagctccagctgcttctgctgaaggtagcattgctgctgggggtggaaattcactggggtgtcactttcactggcctccagccccctcctaggaaggggagtggctggcgtgcccagctccaacccaacccccctgcccagctggccaactatgaatttgacgtccttatctcggctgcaggaggtaaattcgtccctgaaggcttcaaagttcgagaaatgcgaggcaaactggccattggcatcacagccaactttgtgaatggacgcaccgtggaggagacacaggtgccggagatcagtggtgtagccaggatctacaaccagagcttcttccagagccttctcaaagccacaggcattgatctggagaacattgtgtactacaaggacgacacccactactttgtgatgacagccaagaagcagtgcctgctgcggctgggggtgctgcgccaggactggccagacaccaatcggctgctgggcagtgccaatgtggtgcccgaggctctgcagcgctttacccgggcagctgctgactttgccacccatggcaagctcgggaaactagagtttgcccaggatgcccatgggcagcctgatgtctctgcctttgacttcacgagcatgatgcgggcagagagttctgctcgtgtgcaagagaagcatggcgcccgcctgctgctgggactggtgggggactgcctggtggagcccttctggcccctgggcactggagtggcacggggcttcctggcagcctttgatgcagcctggatggtgaagcggtgggcagagggcgctgagtccctagaggtgttggctgagcgtgagagcctgtaccagcttctgtcacagacatccccagaaaacatgcatcgcaatgtggcccagtatgggctggacccagccacccgctaccccaacctgaacctccgggcagtgacccccaatcaggtacgagacctgtatgatgtgctagccaaggagcctgtgcagaggaacaacgacaagacagatacagggatgccagccaccgggtcggcaggcacccaggaggagctgctacgctggtgccaggagcagacagctgggtacccgggagtccacgtctccgatttgtcttcctcctgggctgatgggctagctctgtgtgccctggtgtaccggctgcagcctggcctgctggaaccctcagagctgcaggggctgggagctctggaagcaactgcttgggcactaaaggtggcagagaatgagctgggcatcacaccggtggtgtctgcacaggccgtggtagcagggagtgacccactgggcctcattgcctacctcagccacttccacagtgccttcaagagcatggcccacagcccaggccctgtcagccaggcctccccagggacctccagtgctgtattattccttagtaaacttcagaggaccctgcagcgatcccgggccaaggaaaatgcagaggatgctggtggcaagaagctgcgcttggagatggaggccgagaccccaagtactgaggtgccacctgacccagagcctggtgtacccctgacacccccatcccaacaccaggaggccggtgctggggacctgtgtgcactttgtggggaacacctctatgtcctggaacgcctctgtgtcaacggccatttcttccaccggagctgcttccgctgccatacctgtgaggccacactgtggccaggtggctangagcagcacccaggagatggacatttctactgcctccagcacctgccccagacagaccacaaagcggaaggcagcgatagaggccctgagagtccggagctccccacaccaagtgagaatagcatgccaccaggcctctcaactcccacagcctcgcaggagggggccggtcctgttccagatcccagccagcccacccgtcggcagatccgcctctccagcccggagcgccagcggttgtcctcccttaaccttacccctgacccggaaatggagcctccacccaagcctccccgcagctgctccgccttggcccgccacgccctggagagcagctttgtgggctggggcctgccagtccagagccctcaagacttgcagggcctccgtcaccaccatgctctttgttgcctgactggggcaggcgctggaggcagtagaacgtctcagttcttcttcctcttgtggccatggagaaggaggaaaaagagagtcccttctccagtgaagaggaagaagaagatgtgcctttggactcagatgtggaacaggccctgcagacctttgccaagacctcaggcaccatgaataactacccaacatggcgtcggactctgctgcgccgtgcgaaggaggaggagatgaagaggttctgcaaggcccagaccatccaacggcgactaaatgagattgaggctgccttgagggagctagaggccgagggcgtgaagctggagctggccttgaggcgccagagcagttccccagaacagcaaaagaaactatgggtaggacagctgctacagctcgttgacaagaaaaacagcctggtggctgaggaggccgagctcatgatcacggtgcaggaattgaatctggaggagaaacagtggcagctggaccaggagctacgaggctacatgaaccgggaagaaaacctaaagacagctgctgatcggcaggctgaggaccaggtcctgaggaagctggtggatttggtcaaccagagagatgccctcatccgcttccaggaggagcgcaggctcagcgagctggccttggggacaggggcccagggctagacgagggtgggccgtctgctttcgttcccacaaagaaagcacctcaccccagcacagtgccacccctgttcatctgggctgcctggcagagagccttgctgtttacaattaaaatgtttctgccacaaaaaaaaaaaa

SEQ ID NO: 322690 - DNA, 1439 bp, Homo sapiens
  misc_feature (305)..(305): n is a, c, g, or t
agccccttgtgttcatctgtacgcatcccctcccagctggccctgcccctctaccctccctgcctgagcacttacctccttagatggaggccgagaccccaagtactgaggtgccacctgacccagagcctggtgtacccctgacacccccatcccaacaccaggaggccggtgctggggacctgtgtgcactttgtggggaacacctctatgtcctggaacgcctctgtgtcaacggccatttcttccaccggagctgcttccgctgccatacctgtgaggccacactgtggccaggtggctangagcagcacccaggagatggacatttctactgcctccagcacctgccccagacagaccacaaagcggaaggcagcgatagaggccctgagagtccggagctccccacaccaagtgagaatagcatgccaccaggcctctcaactcccacagcctcgcaggagggggccggtcctgttccagatcccagccagcccacccgtcggcagatccgcctctccagcccggagcgccagcggttgtcctcccttaaccttacccctgacccggaaatggagcctccacccaagcctccccgcagctgctccgccttggcccgccacgccctggagagcagctttgtgggctggggcctgccagtccagagccctcaagctcttgtggccatggagaaggaggaaaaagagagtcccttctccagtgaagaggaagaagaagatgtgcctttggactcagatgtggaacaggccctgcagacctttgccaagacctcaggcaccatgaataactacccaacatggcgtcggactctgctgcgccgtgcgaaggaggaggagatgaagaggttctgcaaggcccagaccatccaacggcgactaaatgagattgaggctgccttgagggagctagaggccgagggcgtgaagctggagctggccttgaggcgccagagcagttccccagaacagcaaaagaaactatgggtaggacagctgctacagctcgttgacaagaaaaacagcctggtggctgaggaggccgagctcatgatcacggtgcaggaattgaatctggaggagaaacagtggcagctggaccaggagctacgaggctacatgaaccgggaagaaaacctaaagacagctgctgatcggcaggctgaggaccaggtcctgaggaagctggtggatttggtcaaccagagagatgccctcatccgcttccaggaggagcgcaggctcagcgagctggccttggggacaggggcccagggctagacgagggtgggccgtctgctttcgttcccacaaagaaagcacctcaccccagcacagtgccacccctgttcatctgggctgcctggcagagagccttgctgtttacaattaaaatgtttctgccacaaaaaaaaaaaa

SEQ ID NO: 322691 - DNA, 3513 bp, Homo sapiens
  misc_feature (2288)..(2288): n is a, c, g, or t
caacaggaagcggcccctcccggcttcggagccgccgccactcgtctctgcccagctgctgccctccccaggaggcctccatggcttcacctacctccaccaacccagcgcatgcccactttgagagcttcctgcaggcccagctgtgccaggacgtgctgagcagcttccaggagctgtgtggggccctggggctggaacccggtggggggctgccccagtaccacaagatcaaggaccagctcaactactggagcgccaagtcactgtggaccaagctggacaagcgagcaggccagcctgtctaccagcagggccgggcctgcaccagcaccaagtgcctggtggtgggtgctggaccttgcgggctgcgggtcgctgtggagctggcgctgctgggggcccgagtggtgctggtggaaaagcgcaccaagttctctcgccacaacgtgctccacctctggcccttcaccatccacgacctgcgggcactcggtgctaagaagttctacgggcgcttctgcaccggcaccctggaccacatcagcatcaggcagctccagctgcttctgctgaaggtagcattgctgctgggggtggaaattcactggggtgtcactttcactggcctccagccccctcctaggaaggggagtggctggcgtgcccagctccaacccaacccccctgcccagctggccaactatgaatttgacgtccttatctcggctgcaggaggtaaattcgtccctgaaggcttcaaagttcgagaaatgcgaggcaaactggccattggcatcacagccaactttgtgaatggacgcaccgtggaggagacacaggtgccggagatcagtggtgtagccaggatctacaaccagagcttcttccagagccttctcaaagccacaggcattgatctggagaacattgtgtactacaaggacgacacccactactttgtgatgacagccaagaagcagtgcctgctgcggctgggggtgctgcgccaggactggccagacaccaatcggctgctgggcagtgccaatgtggtgcccgaggctctgcagcgctttacccgggcagctgctgactttgccacccatggcaagctcgggaaactagagtttgcccaggatgcccatgggcagcctgatgtctctgcctttgacttcacgagcatgatgcgggcagagagttctgctcgtgtgcaagagaagcatggcgcccgcctgctgctgggactggtgggggactgcctggtggagcccttctggcccctgggcactggagtggcacggggcttcctggcagcctttgatgcagcctggatggtgaagcggtgggcagagggcgctgagtccctagaggtgttggctgagcgtgagagcctgtaccagcttctgtcacagacatccccagaaaacatgcatcgcaatgtggcccagtatgggctggacccagccacccgctaccccaacctgaacctccgggcagtgacccccaatcaggtacgagacctgtatgatgtgctagccaaggagcctgtgcagaggaacaacgacaagacagatacagggatgccagccaccgggtcggcaggcacccaggaggagctgctacgctggtgccaggagcagacagctgggtacccgggagtccacgtctccgatttgtcttcctcctgggctgatgggctagctctgtgtgccctggtgtaccggctgcagcctggcctgctggaaccctcagagctgcaggggctgggagctctggaagcaactgcttgggcactaaaggtggcagagaatgagctgggcatcacaccggtggtgtctgcacaggccgtggtagcagggagtgacccactgggcctcattgcctacctcagccacttccacagtgccttcaagagcatggcccacagcccaggccctgtcagccaggcctccccagggacctccagtgctgtattattccttagtaaacttcagaggaccctgcagcgatcccgggccaaggaaaatgcagaggatgctggtggcaagaagctgcgcttggagatggaggccgagaccccaagtactgaggtgccacctgacccagagcctggtgtacccctgacacccccatcccaacaccaggaggccggtgctggggacctgtgtgcactttgtggggaacacctctatgtcctggaacgcctctgtgtcaacggccatttcttccaccggagctgcttccgctgccatacctgtgaggccacactgtggccaggtggctangagcagcacccaggagatggacatttctactgcctccagcacctgccccagacagaccacaaagcggaaggcagcgatagaggccctgagagtccggagctccccacaccaagtgagaatagcatgccaccaggcctctcaactcccacagcctcgcaggagggggccggtcctgttccagatcccagccagcccacccgtcggcagatccgcctctccagcccggagcgccagcggttgtcctcccttaaccttacccctgacccggaaatggagcctccacccaagcctccccgcagctgctccgccttggcccgccacgccctggagagcagctttgtgggctggggcctgccagtccagagccctcaagctcttgtggccatggagaaggaggaaaaagagagtcccttctccagtgaagaggaagaagaagatgtgcctttggactcagatgtggaacaggccctgcagacctttgccaagacctcaggcaccatgaataactacccaacatggcgtcggactctgctgcgccgtgcgaaggaggaggagatgaagaggttctgcaaggcccagaccatccaacggcgactaaatgagattgaggctgccttgagggagctagaggccgagggcgtgaagctggagctggccttgaggcgccagagcatgttcccccgagaaaccaggcaaaaaaggaaacactatgggggttaggggaccaaaggtcctgggcttaacaggtctcccggctggggacccaaaaggaacaccaaacaccaacggcccctgttgtcgcccttgggacgccaagcgccggaggcctcagttggatccaccgggcgcgcaggcgacaatttcggacattctgcggagggcagaccaccacgggtgggcccacgccttgggacccccagggaaggctaacggaagggctcacatgttgaaaccgggcggacaggaaaaaacccttaagaggaacaggtctgggctagaatacggggcaagggctctggaagggacccagtgttccctgtggagggaaaaagctggcgggaattcgtggtccaacccacagatgaggattgccctcaatcccggcttccagcgaggaagccgcagggcttcaaggagatggctgggcctgggggagaacaggggggccaggggtttagacgagggtttgggccggccctggttttccgttccccaacaaaggaag

SEQ ID NO: 322692 - DNA, 2274 bp, Homo sapiens
caacaggaagcggcccctcccggcttcggagccgccgccactcgtctctgcccagctgctgccctccccaggaggcctccatggcttcacctacctccaccaacccagcgcatgcccactttgagagcttcctgcaggcccagctgtgccaggacgtgctgagcagcttccaggagctgtgtggggccctggggctggaacccggtggggggctgccccagtaccacaagatcaaggaccagctcaactactggagcgccaagtcactgtggaccaagctggacaagcgagcaggccagcctgtctaccagcagggccgggcctgcaccagcaccaagtgcctggtggtgggtgctggaccttgcgggctgcgggtcgctgtggagctggcgctgctgggggcccgagtggtgctggtggaaaagcgcaccaagttctctcgccacaacgtgctccacctctggcccttcaccatccacgacctgcgggcactcggtgctaagaagttctacgggcgcttctgcaccggcaccctggaccacatcagcatcaggcagctccagctgcttctgctgaaggtagcattgctgctgggggtggaaattcactggggtgtcactttcactggcctccagccccctcctaggaaggggagtggctggcgtgcccagctccaacccaacccccctgcccagctggccaactatgaatttgacgtccttatctcggctgcaggaggtaaattcgtccctgaaggcttcaaagttcgagaaatgcgaggcaaactggccattggcatcacagccaactttgtgaatggacgcaccgtggaggagacacaggtgccggagatcagtggtgtagccaggatctacaaccagagcttcttccagagccttctcaaagccacaggcattgatctggagaacattgtgtactacaaggacgacacccactactttgtgatgacagccaagaagcagtgcctgctgcggctgggggtgctgcgccaggactggccagacaccaatcggctgctgggcagtgccaatgtggtgcccgaggctctgcagcgctttacccgggcagctgctgactttgccacccatggcaagctcgggaaactagagtttgcccaggatgcccatgggcagcctgatgtctctgcctttgacttcacgagcatgatgcgggcagagagttctgctcgtgtgcaagagaagcatggcgcccgcctgctgctgggactggtgggggactgcctggtggagcccttctggcccctgggcactggagtggcacggggcttcctggcagcctttgatgcagcctggatggtgaagcggtgggcagagggcgctgagtccctagaggtgttggctgagcgtgagagcctgtaccagcttctgtcacagacatccccagaaaacatgcatcgcaatgtggcccagtatgggctggacccagccacccgctaccccaacctgaacctccgggcagtgacccccaatcaggtacgagacctgtatgatgtgctagccaaggagcctgtgcagaggaacaacgacaagacagatacagggatgccagccaccgggtcggcaggcacccaggaggagctgctacgctggtgccaggagcagacagctgggtacccgggagtccacgtctccgatttgtcttcctcctgggctgatgggctagctctgtgtgccctggtgtaccggctgcagcctggcctgctggaaccctcagagctgcaggggctgggagctctggaagcaactgcttgggcactaaaggtggcagagaatgagctgggcatcacaccggtggtgtctgcacaggccgtggtagcagggagtgacccactgggcctcattgcctacctcagccacttccacagtgccttcaagagcatggcccacagcccaggccctgtcagccaggcctccccagggacctccagtgctgtattattccttagtaaacttcagaggaccctgcagcgatcccgggccaaggaaaatgcagaggatgctggtggcaagaagctgcgcttggagatggaggccgagaccccaagtactgaggtgccacctgacccagagcctggtgtacccctgacacccccatcccaacaccaggaggccggtgctggggacctgtgtgcactttgtggggaacacctctatgtcctggaacgcctctgtgtcaaacgggggggccccgcccaacatttttttttttcccttttttttctcccaaaacccc

SEQ ID NO: 322693 - DNA, 501 bp, Homo sapiens
ggagtggctggcgtgcccagctccaacccaacccccctgcccagctggccaactatgaatttgacgtccttatctcggctgcaggaggtaaattcgtccctgaaggtgagtgatcacttccctcaaagaagccagcatctctggcacatcctgggcctttctagattgttataaccccctcctcctgccattgttcacctaccgccacctctaggcttcaaagttcgagaaatgcgaggcaaactggccattggcatcacagccaactttgtgaatggacgcaccgtggaggagacacaggtgccggagatcagtggtgtagccaggatctacaaccagagcttcttccagagccttctcaaagccacaggtcagggaccctcttgctgaatttcccctccccctgcctgactgtggcctggctcctgcctctcccttccaaacttgtcctcactgcaaggaactccacacttttctgtttttttggtctcagcagcaaag

SEQ ID NO: 322694 - DNA, 487 bp, Homo sapiens
ctagaggagcgtaccggatcccacccattgtgtgttaaacaacacatctcccagacacagaaacacactcactgggaaactactgcaaagtgaatagttcctgaaatgcttagctccttgtaagtctccaggagctactgttttaagaaaaccatttgtgcacttcttagcatgtgcttgttatcattacccatcagcaggctaggaggtgctttcgagaactgatagtgaccttgccttggtttgcctacgtatatactgttctaaaggtaaattcctccttactttggagaaatctcttgtatttctgtgtgccgtgagaattaatttgtgtttgaacagacttaggcttattcatattacctatgggatgaatccaaaatagtaaacattgcaggcttttcatctttatagttagaccaagtttattgctgaacaacttgggacgataattgctaatgtattttgcattttgatactaactctg

SEQ ID NO: 322695 - DNA, 332 bp, Homo sapiens
ctcaatcagcaatttaaaaggaacagctatagaagttgaacaacagtcgtactaaatggttcctaaggaagttatttttgaaaaagtataaatatcaacatgaaaaggtttcagaattcagtgtataagtgaaaaaaggacatgttcttggtttaataatcattttgttgcagagcacttttttcggaataaaaaaaatttgattatttcatttagggaagattaacaggaaatagtgttatcaaactgtgccctcagttttatagatgactcagtcttaaaaactccacacatcggaatgtgatgatgtgttcattagctgctctgtttga

SEQ ID NO: 322696 - DNA, 7264 bp, Homo sapiens
gcacgcggccaccgagctggaggaagcggcgggcgtgagaccgggaatgcttggggcccccgccttcctcgcagccatccagcactcggtgcacgccccgcgaggccagcggctgctccctcccggggctattgctgctagtgccgtgagcaccgcccagccattgtctctgtgtctccgtcagccgtgccgagccgcgcacccagaggcgagggcgcgcatggggagcctccgttgatgctgccgcggctgccgcgccgccctccgaggctgcgtcccggggagtccggcttcccgagcgctccggcctggcccggcgccccggacctgagtgcctccccatggaggcgcccgggccggcccaggcggccgcggcggagagcaactcccgagaggtgacggaggatgccgccgactgggcgcccgcgctctgccccagccccgaggcgcggtcgccggaggcgcctgcctaccgcctgcaggactgcgacgcgctggtcaccatgggcactgggacgttcgggcgggtgcacctggtgaaggagaagacagccaagcatttcttcgccctcaaggtgatgagcattcccgacgtcatccgccggaagcaggagcagcacgtgcacaatgagaagtctgtcctgaaggaagtcagccacccgttcctcatcaggctgttctggacgtggcatgaggagcgcttcctctacatgctcatggagtatgtgccgggtggcgagctcttcagctacctgcgcaaccgggggcacttctccagcaccacggggctcttctactctgcggagatcatctgtgccattgagtacctgcactccaaggagatcgtctacagggatttgaagccggagaacatcctgctggatagggatggtcacatcaagctcacggactttgggtttgccaagaagctggtagacaggacttggaccctctgtggaacacccgagtacctagcccccgaagtcattcagagcaagggccacggaagggccgtggactggtgggccctcggcatcctgatattcgagatgctttcggggtttcctccattttttgatgacaacccgtttggcatttatcagaaaattcttgcaggcaaactatatttccccagacatttggatttccatgtaaaaacggggcgaatgatgtgaaacaccatcggtggttccgctccgtggactggaaagctgttccgcagagaaaactgaagcctcccatcgtgcccacgatagctggcaacggcgacacttccaacttcgaaacttaccctgagcatgactgggacacagccgcgcccgtgccgcagaaggatttagaaatcttcaagaatttctgaggacgagctcacatctggaagaaacaggaagattggaatctgcctggaacaaagaactgcacctaagcagaccagaagcaaaatgtcttcttcacggcctgaggacatttccagttttctctgtacctgtgtgtatagaaatagatcagagcacagttgaaattcatggaactggcattatttaagcaaccagaattccacactgtaggaaggttttgaaaattgtttcgttatagattttatcttatcttttggtgttgtcttggtttttctcatagactttataagtttgaactggacttatttgattataaccacaaattgtgtgtgtgtgtgtgtgtgtatatatagaagtcattatggcagatgcacaaattgtgcagtgatgtaaatatacatacttcacagagcctattatttttatttttcaattcagtttctcaaattatcttcccttctcttggggacaacatctgaagggtatgttgcatgcatttttaaaaaaatcatctcatatgcattgtatagtttgggggaataagatatccgggggccgggggtgtctacattcagtatctttagttcttcctacctagtaacttgagactttaaaagaagaaacatggagaagatgtgggagcgaatttattgcaggaatccacaatgactttgaagttgttggagcaatgcattgtattcagaaaacctgtgtcacattaaaaaatttcatctaggctaggtgcagtggcttgttcctgtagtcccagcactctgggaacctgggttgggaggattgcttaaggccaggagtttgagaccagcttgggcaacatagtgaaccctgtctgtatggaatttacacaaattataaaaattagtcgggtgtcattgtgcatacctgtagtcccagctattcaggagctgttgtaggagagattgcctgagctcaagaggttgaggctgcagtgagccctgattgtgccagtgcactccaggctggacgacagagcaagaccctgtattaaaaaaaaaattcatcctgcacagggaaatggctacctattaaagtcccagttgaaattttttgaaaaaatacacctcccacagttcacaaataacttttaagatcagctcatctataaggctgaccttcatgcagagattttatttcacctttagttttgggaaaagcgagaaacagatgatctataggatgtgagtgggtggcagagtcaaaaggaacctcacctgttcctaatttctccttttaaatattcatgttgagtgtgcctaatactctcctcgacaagtcatgctgttttatgcagaataatccaggcgtgagagtgttctcttgggaaatgactggggagacacctgaaaggagcaacccccagatgttcttccctgggtgttgatggcatgacagccatacagtgagtttgttctgaaacatctcttgctaaatgtgggtcatgctagacacagcataaactgagggtgtggggtctggctttgtacataactcattttctcccttgctttttctctggaccatcctggctggaaacttggctgtagacatctgaagagggtgcaccttttctctttactgtgactcacctcaaatatggcattgctcaaatctgctgtgtatgaggtcacagggcccagctgtggcaggggtgagtgcattgaagaagtaggttttggagccttccaggaattccttgttgacaacaggggtacactcacacagacctccaagactttcttctccacctcttctttttctcatgccctgccttcatctgtctccttctgcacccagagtaggggtggagtatacccttgccatgtgttagtgaaaatgtgtgcagtgagaagccagttgggtcccctcggctcctaatctcttctcaaaactcagtagctcaggttctctggagccatccggtgcattccttgctattggagctgtttttccaagcaatatctgggaagagatttctccctctagcacttgctacctctcttctgcacacatatcacacatcagtactgtggagagtttctgttaggaaaagccatacatttttaaaaatgtagcaaaatgtcaagggaaatgtaatcagatttggccagagttcgcctacagataagaaggcactgggccaggctcacacctgtaatcctaagtaacactttgggaggctggggcgagaggattgcttgagcccaggagttcaatacctgtctgggaaacacctcatctctacaaaatacaaaaaagttaactgggcatggtggagcatgcctgtagtctcagctactcaggaggctgagatgagaggatcacttgagcctgaggaggtccaggccacagtgatctgagatcacaccattgccctccagcctgggtgacagagtgagaccctgttccaaaaaaaaaaaaaaacccaaaaaacctcaatggctttttgcttttgaaggtggtatgaagagaacgtccactttaaggctttaaaagacagtgaagctggttgtagggctcacttttataatcctaggatttggggaagctgaagcagaaagattgcttgagcctgggagtttgagactggcctgggcagcatagcgagaccccatctctatataaaaaaaaagatgttaaaacagtgaaattacagaaacagaacatagccaccctgtttcatcagtgaccttttcttcacgtgacggtcaactcagtaggtgagaataattagtaggttcagcagaataaactctttacaattaataactcagtggaaaatgatgttcagatggtgaaatgtggaaatgttttagacaactctattttcagcctgtgcttctcactcaccatcctgttgggattaacagttgagggccatcgctgcctaaacatttagcgtgcggtttcccatcagttttactgtgaatgtgaaaaggtgaaactgttgctgacttcggtagcaggtatactaaaattggaatgacacagaggagattagcatggccccctgcgcgaggaagatccgcagattcatgcagcattccatatttttttaaaaaaaggttacactgtgcaccgacgtggagctagaaggaaaagcatgaagtctcatgtttgctgactataaaaataaatcatagtaataatattattgaacattctactttaaaaattattaataaaaccataaatgaaacacttgagcacactttaaaaagtacataaacccatgagtccatatgtgtaattttatgttgtctgttttattatccaggatttcatactcagatgagcattagcatcaggaaagcctgaaatgccttaattgtgaactgatacgcaggaaaatgaaatatgtaagcacattggtgaccttgttctttacagacatcatgatcagcctccagccatacagaacaaatgagaaattagaagcaattccaagaacgtgtgatggtgtgaacccacttttgaccgtcacacacatttcagcatttgaagagacacaggctacctggaaactgcccatggcggggtcataatttaaatgtcccaatgtcatatagaggttaatttaatcaaaatgagctaaaacatggaacaatcactgaataatttaaaaagagtttacctggcagagtgtgtcatgcctgcaatcccagcactttgggaggccaaggcaggcagatcacctgaggtcaggagtttgagaccagcctggccaacatgatgaaacccttgtctctattaaaaacacaaaaattagccagatgtggtggcacatgcctgtaatcccagttagtcgggaggctgaggcaggagaatatggaactcaggaggcggaggctgcagtcaaccaagattgcgccactgcactccagccagggcgaaggagtgagactcccatctcaaaaaataaaaaaaaaaataaataaaaatagttgacccgggtgggcattccaaaatgttcccatagatgatcgtgaaacaatcactgtgcaaaatgtagaggaaaattcttacgataatcacaaaatttgtatcagaaaaacattacaaatttactttgctccatgtaattttatgaattggcagtattttcttaaattgggatacagtaagagaatatctttaggaaatggaaatgttaaaacaagaagtaacaagaggttgtttttctgaagggaaatgccaccggcctgctttcataggcattgataaagccaggaaggaaataaagtcacaaccgaatagtatacactgtatctactgaattcttctaattccttcacaacagaagtctaaatcctgcttagcctaaacatatctatagccagcgatgggcaaattatatttgctgtcagcatgatggaataagaaacagaaaccccccagcagtggggtaagattgcacgcttcatcccctcaaaatgcagttcagccccactccctctccatgcccatcaaacaactgcaaaatcacttgttactgaatttctcattcagcgttttgtttctttctgtccatacttaaagaccaaattatttgtttgctttgaagaaaaagcaaaagcaacaaaaacaccaaatcatttgaaatccaaccttaacccaattaaaaaaaaattccaccagtggaactaaacagttgagtggtttgggatgtgttgttcgccatttctgtgtttgacctacatggtctctagttctttggacaattgtaactgtgaaactatggcttaacactgttaaagactccaaggctccactctgtagccaggtgcaactcaggctgcacaaataccccaccagaatgtcacaatcattcattgctccagctgctgagtgaacagagtgcaagacagcactggcttgggttttatttttgcagccagttaactttgcatcaggtctacacagtccttgcagcctttgatttctccagttgtacagatttgaaatggggtgcccgggttcctctcgtttttccttcaatctacctagcatgcattttacacacattggaggagtcgatgcactgtttttctcttgctgatggaggcaagaacgccttctaattagtataacttaaatggacgggattgacttaaaagcaagaagaaaagcacatgaacaggtgtcttaatgcatttggatactttggggtgtgtgcctgtctgtgtgtgtgtcttggtgaaggtgggctgtattttcaccaagccttttcataatcaagtttgctttgcaaaccatctggccttgcccccagcagtacagtccttcctaataacggggatgctctgtcatgtttctctgtaaattgttgtgtgttgggaagttctgttgaggcttagtttgatcttccatggtggacatgtctgttctgtatataaaaagcattacatctgtgttttagcaggtgggatttgaagcttttccacagtccttgtgctctgagatggctgttgagctctgctcagctgtcacagctgaattctttttttgtgctgaacactgggcagcctcaccttgttgccaacgtgcttctggggcccctgtgactgctgccggatgctgtgcacacaggcagagtgccttggcaggtttgtgcaccccttggcgagccagaactgggaaccccgcggagtgaccccaccttctcatggggggtcagggaggggagtgcctatttttaatcttgtttgttgcgcaatggaaatcactgtgatttgtacatatgccctaggaaaattttaccgctgtctaatttatgtaataatactgatgattctaggtttgtttaataaaactttatatcttttcagaagcaaggctccactctgtagccaggtgcaactcaggctgca

SEQ ID NO: 322697 - DNA, 6521 bp, Homo sapiens
taggtggaaagctgacgtggacgaaggctgttccgcagagaaaactgaagcctcccatcgtgcccacgatagctggcaacggcgacacttccaacttcgaaacttaccctgagcatgactgggacacagccgcgcccgtgccgcagaaggatttagaaatcttcaagaatttctgaggacgagctcacatctggaaggacttggaccctctgtggaacacccgagtacctagcccccgaagtcattcagagcaagggccacggaagggccgtggactggtgggccctcggcatcctgatattcgagatgctttcggggtttcctccattttttgatgacaacccgtttggcatttatcagaaaattcttgcaggcaaactatatttccccagacatttggatttccatgtaaaaacggggcgaatgatgtgaaacaccatcggtggttccgctccgtggactggaaagctgttccgcagagaaaactgaagcctcccatcgtgcccacgatagctggcaacggcgacacttccaacttcgaaacttaccctgagcatgactgggacacagccgcgcccgtgccgcagaaggatttagaaatcttcaagaatttctgaggacgagctcacatctggaagaaacaggaagattggaatctgcctggaacaaagaactgcacctaagcagaccagaagcaaaatgtcttcttcacggcctgaggacatttccagttttctctgtacctgtgtgtatagaaatagatcagagcacagttgaaattcatggaactggcattatttaagcaaccagaattccacactgtaggaaggttttgaaaattgtttcgttatagattttatcttatcttttggtgttgtcttggtttttctcatagactttataagtttgaactggacttatttgattataaccacaaattgtgtgtgtgtgtgtgtgtgtatatatagaagtcattatggcagatgcacaaattgtgcagtgatgtaaatatacatacttcacagagcctattatttttatttttcaattcagtttctcaaattatcttcccttctcttggggacaacatctgaagggtatgttgcatgcatttttaaaaaaatcatctcatatgcattgtatagtttgggggaataagatatccgggggccgggggtgtctacattcagtatctttagttcttcctacctagtaacttgagactttaaaagaagaaacatggagaagatgtgggagcgaatttattgcaggaatccacaatgactttgaagttgttggagcaatgcattgtattcagaaaacctgtgtcacattaaaaaatttcatctaggctaggtgcagtggcttgttcctgtagtcccagcactctgggaacctgggttgggaggattgcttaaggccaggagtttgagaccagcttgggcaacatagtgaaccctgtctgtatggaatttacacaaattataaaaattagtcgggtgtcattgtgcatacctgtagtcccagctattcaggagctgttgtaggagagattgcctgagctcaagaggttgaggctgcagtgagccctgattgtgccagtgcactccaggctggacgacagagcaagaccctgtattaaaaaaaaaattcatcctgcacagggaaatggctacctattaaagtcccagttgaaattttttgaaaaaatacacctcccacagttcacaaataacttttaagatcagctcatctataaggctgaccttcatgcagagattttatttcacctttagttttgggaaaagcgagaaacagatgatctataggatgtgagtgggtggcagagtcaaaaggaacctcacctgttcctaatttctccttttaaatattcatgttgagtgtgcctaatactctcctcgacaagtcatgctgttttatgcagaataatccaggcgtgagagtgttctcttgggaaatgactggggagacacctgaaaggagcaacccccagatgttcttccctgggtgttgatggcatgacagccatacagtgagtttgttctgaaacatctcttgctaaatgtgggtcatgctagacacagcataaactgagggtgtggggtctggctttgtacataactcattttctcccttgctttttctctggaccatcctggctggaaacttggctgtagacatctgaagagggtgcaccttttctctttactgtgactcacctcaaatatggcattgctcaaatctgctgtgtatgaggtcacagggcccagctgtggcaggggtgagtgcattgaagaagtaggttttggagccttccaggaattccttgttgacaacaggggtacactcacacagacctccaagactttcttctccacctcttctttttctcatgccctgccttcatctgtctccttctgcacccagagtaggggtggagtatacccttgccatgtgttagtgaaaatgtgtgcagtgagaagccagttgggtcccctcggctcctaatctcttctcaaaactcagtagctcaggttctctggagccatccggtgcattccttgctattggagctgtttttccaagcaatatctgggaagagatttctccctctagcacttgctacctctcttctgcacacatatcacacatcagtactgtggagagtttctgttaggaaaagccatacatttttaaaaatgtagcaaaatgtcaagggaaatgtaatcagatttggccagagttcgcctacagataagaaggcactgggccaggctcacacctgtaatcctaagtaacactttgggaggctggggcgagaggattgcttgagcccaggagttcaatacctgtctgggaaacacctcatctctacaaaatacaaaaaagttaactgggcatggtggagcatgcctgtagtctcagctactcaggaggctgagatgagaggatcacttgagcctgaggaggtccaggccacagtgatctgagatcacaccattgccctccagcctgggtgacagagtgagaccctgttccaaaaaaaaaaaaaaacccaaaaaacctcaatggctttttgcttttgaaggtggtatgaagagaacgtccactttaaggctttaaaagacagtgaagctggttgtagggctcacttttataatcctaggatttggggaagctgaagcagaaagattgcttgagcctgggagtttgagactggcctgggcagcatagcgagaccccatctctatataaaaaaaaagatgttaaaacagtgaaattacagaaacagaacatagccaccctgtttcatcagtgaccttttcttcacgtgacggtcaactcagtaggtgagaataattagtaggttcagcagaataaactctttacaattaataactcagtggaaaatgatgttcagatggtgaaatgtggaaatgttttagacaactctattttcagcctgtgcttctcactcaccatcctgttgggattaacagttgagggccatcgctgcctaaacatttagcgtgcggtttcccatcagttttactgtgaatgtgaaaaggtgaaactgttgctgacttcggtagcaggtatactaaaattggaatgacacagaggagattagcatggccccctgcgcgaggaagatccgcagattcatgcagcattccatatttttttaaaaaaaggttacactgtgcaccgacgtggagctagaaggaaaagcatgaagtctcatgtttgctgactataaaaataaatcatagtaataatattattgaacattctactttaaaaattattaataaaaccataaatgaaacacttgagcacactttaaaaagtacataaacccatgagtccatatgtgtaattttatgttgtctgttttattatccaggatttcatactcagatgagcattagcatcaggaaagcctgaaatgccttaattgtgaactgatacgcaggaaaatgaaatatgtaagcacattggtgaccttgttctttacagacatcatgatcagcctccagccatacagaacaaatgagaaattagaagcaattccaagaacgtgtgatggtgtgaacccacttttgaccgtcacacacatttcagcatttgaagagacacaggctacctggaaactgcccatggcggggtcataatttaaatgtcccaatgtcatatagaggttaatttaatcaaaatgagctaaaacatggaacaatcactgaataatttaaaaagagtttacctggcagagtgtgtcatgcctgcaatcccagcactttgggaggccaaggcaggcagatcacctgaggtcaggagtttgagaccagcctggccaacatgatgaaacccttgtctctattaaaaacacaaaaattagccagatgtggtggcacatgcctgtaatcccagttagtcgggaggctgaggcaggagaatatggaactcaggaggcggaggctgcagtcaaccaagattgcgccactgcactccagccagggcgaaggagtgagactcccatctcaaaaaataaaaaaaaaaataaataaaaatagttgacccgggtgggcattccaaaatgttcccatagatgatcgtgaaacaatcactgtgcaaaatgtagaggaaaattcttacgataatcacaaaatttgtatcagaaaaacattacaaatttactttgctccatgtaattttatgaattggcagtattttcttaaattgggatacagtaagagaatatctttaggaaatggaaatgttaaaacaagaagtaacaagaggttgtttttctgaagggaaatgccaccggcctgctttcataggcattgataaagccaggaaggaaataaagtcacaaccgaatagtatacactgtatctactgaattcttctaattccttcacaacagaagtctaaatcctgcttagcctaaacatatctatagccagcgatgggcaaattatatttgctgtcagcatgatggaataagaaacagaaaccccccagcagtggggtaagattgcacgcttcatcccctcaaaatgcagttcagccccactccctctccatgcccatcaaacaactgcaaaatcacttgttactgaatttctcattcagcgttttgtttctttctgtccatacttaaagaccaaattatttgtttgctttgaagaaaaagcaaaagcaacaaaaacaccaaatcatttgaaatccaaccttaacccaattaaaaaaaaattccaccagtggaactaaacagttgagtggtttgggatgtgttgttcgccatttctgtgtttgacctacatggtctctagttctttggacaattgtaactgtgaaactatggcttaacactgttaaagactccaaggctccactctgtagccaggtgcaactcaggctgcacaaataccccaccagaatgtcacaatcattcattgctccagctgctgagtgaacagagtgcaagacagcactggcttgggttttatttttgcagccagttaactttgcatcaggtctacacagtccttgcagcctttgatttctccagttgtacagatttgaaatggggtgcccgggttcctctcgtttttccttcaatctacctagcatgcattttacacacattggaggagtcgatgcactgtttttctcttgctgatggaggcaagaacgccttctaattagtataacttaaatggacgggattgacttaaaagcaagaagaaaagcacatgaacaggtgtcttaatgcatttggatactttggggtgtgtgcctgtctgtgtgtgtgtcttggtgaaggtgggctgtattttcaccaagccttttcataatcaagtttgctttgcaaaccatctggccttgcccccagcagtacagtccttcctaataacggggatgctctgtcatgtttctctgtaaattgttgtgtgttgggaagttctgttgaggcttagtttgatcttccatggtggacatgtctgttctgtatataaaaagcattacatctgtgttttagcaggtgggatttgaagcttttccacagtccttgtgctctgagatggctgttgagctctgctcagctgtcacagctgaattctttttttgtgctgaacactgggcagcctcaccttgttgccaacgtgcttctggggcccctgtgactgctgccggatgctgtgcacacaggcagagtgccttggcaggtttgtgcaccccttggcgagccagaactgggaaccccgcggagtgaccccaccttctcatggggggtcagggaggggagtgcctatttttaatcttgtttgttgcgcaatggaaatcactgtgatttgtacatatgccctaggaaaattttaccgctgtctaatttatgtaataatactgatgattctaggtttgtttaataaaactttatatcttttcagaagcaaggctccactctgtagccaggtgcaactcaggctgca

SEQ ID NO: 322698 - DNA, 6435 bp, Homo sapiens
ggagcgtggttttactcaacgaagttattgtaacaatcagagcttctaaggtgactgcattagccaagcaccactgagtgttgtgggggcctgtctctgtcgcccatataggacttggaccctctgtggaacacccgagtacctagcccccgaagtcattcagagcaagggccacggaagggccgtggactggtgggccctcggcatcctgatattcgagatgctttcggggtttcctccattttttgatgacaacccgtttggcatttatcagaaaattcttgcaggcaaactatatttccccagacatttggatttccatgtaaaaacggggcgaatgatgtgaaacaccatcggtggttccgctccgtggactggaaagctgttccgcagagaaaactgaagcctcccatcgtgcccacgatagctggcaacggcgacacttccaacttcgaaacttaccctgagcatgactgggacacagccgcgcccgtgccgcagaaggatttagaaatcttcaagaatttctgaggacgagctcacatctggaagaaacaggaagattggaatctgcctggaacaaagaactgcacctaagcagaccagaagcaaaatgtcttcttcacggcctgaggacatttccagttttctctgtacctgtgtgtatagaaatagatcagagcacagttgaaattcatggaactggcattatttaagcaaccagaattccacactgtaggaaggttttgaaaattgtttcgttatagattttatcttatcttttggtgttgtcttggtttttctcatagactttataagtttgaactggacttatttgattataaccacaaattgtgtgtgtgtgtgtgtgtgtatatatagaagtcattatggcagatgcacaaattgtgcagtgatgtaaatatacatacttcacagagcctattatttttatttttcaattcagtttctcaaattatcttcccttctcttggggacaacatctgaagggtatgttgcatgcatttttaaaaaaatcatctcatatgcattgtatagtttgggggaataagatatccgggggccgggggtgtctacattcagtatctttagttcttcctacctagtaacttgagactttaaaagaagaaacatggagaagatgtgggagcgaatttattgcaggaatccacaatgactttgaagttgttggagcaatgcattgtattcagaaaacctgtgtcacattaaaaaatttcatctaggctaggtgcagtggcttgttcctgtagtcccagcactctgggaacctgggttgggaggattgcttaaggccaggagtttgagaccagcttgggcaacatagtgaaccctgtctgtatggaatttacacaaattataaaaattagtcgggtgtcattgtgcatacctgtagtcccagctattcaggagctgttgtaggagagattgcctgagctcaagaggttgaggctgcagtgagccctgattgtgccagtgcactccaggctggacgacagagcaagaccctgtattaaaaaaaaaattcatcctgcacagggaaatggctacctattaaagtcccagttgaaattttttgaaaaaatacacctcccacagttcacaaataacttttaagatcagctcatctataaggctgaccttcatgcagagattttatttcacctttagttttgggaaaagcgagaaacagatgatctataggatgtgagtgggtggcagagtcaaaaggaacctcacctgttcctaatttctccttttaaatattcatgttgagtgtgcctaatactctcctcgacaagtcatgctgttttatgcagaataatccaggcgtgagagtgttctcttgggaaatgactggggagacacctgaaaggagcaacccccagatgttcttccctgggtgttgatggcatgacagccatacagtgagtttgttctgaaacatctcttgctaaatgtgggtcatgctagacacagcataaactgagggtgtggggtctggctttgtacataactcattttctcccttgctttttctctggaccatcctggctggaaacttggctgtagacatctgaagagggtgcaccttttctctttactgtgactcacctcaaatatggcattgctcaaatctgctgtgtatgaggtcacagggcccagctgtggcaggggtgagtgcattgaagaagtaggttttggagccttccaggaattccttgttgacaacaggggtacactcacacagacctccaagactttcttctccacctcttctttttctcatgccctgccttcatctgtctccttctgcacccagagtaggggtggagtatacccttgccatgtgttagtgaaaatgtgtgcagtgagaagccagttgggtcccctcggctcctaatctcttctcaaaactcagtagctcaggttctctggagccatccggtgcattccttgctattggagctgtttttccaagcaatatctgggaagagatttctccctctagcacttgctacctctcttctgcacacatatcacacatcagtactgtggagagtttctgttaggaaaagccatacatttttaaaaatgtagcaaaatgtcaagggaaatgtaatcagatttggccagagttcgcctacagataagaaggcactgggccaggctcacacctgtaatcctaagtaacactttgggaggctggggcgagaggattgcttgagcccaggagttcaatacctgtctgggaaacacctcatctctacaaaatacaaaaaagttaactgggcatggtggagcatgcctgtagtctcagctactcaggaggctgagatgagaggatcacttgagcctgaggaggtccaggccacagtgatctgagatcacaccattgccctccagcctgggtgacagagtgagaccctgttccaaaaaaaaaaaaaaacccaaaaaacctcaatggctttttgcttttgaaggtggtatgaagagaacgtccactttaaggctttaaaagacagtgaagctggttgtagggctcacttttataatcctaggatttggggaagctgaagcagaaagattgcttgagcctgggagtttgagactggcctgggcagcatagcgagaccccatctctatataaaaaaaaagatgttaaaacagtgaaattacagaaacagaacatagccaccctgtttcatcagtgaccttttcttcacgtgacggtcaactcagtaggtgagaataattagtaggttcagcagaataaactctttacaattaataactcagtggaaaatgatgttcagatggtgaaatgtggaaatgttttagacaactctattttcagcctgtgcttctcactcaccatcctgttgggattaacagttgagggccatcgctgcctaaacatttagcgtgcggtttcccatcagttttactgtgaatgtgaaaaggtgaaactgttgctgacttcggtagcaggtatactaaaattggaatgacacagaggagattagcatggccccctgcgcgaggaagatccgcagattcatgcagcattccatatttttttaaaaaaaggttacactgtgcaccgacgtggagctagaaggaaaagcatgaagtctcatgtttgctgactataaaaataaatcatagtaataatattattgaacattctactttaaaaattattaataaaaccataaatgaaacacttgagcacactttaaaaagtacataaacccatgagtccatatgtgtaattttatgttgtctgttttattatccaggatttcatactcagatgagcattagcatcaggaaagcctgaaatgccttaattgtgaactgatacgcaggaaaatgaaatatgtaagcacattggtgaccttgttctttacagacatcatgatcagcctccagccatacagaacaaatgagaaattagaagcaattccaagaacgtgtgatggtgtgaacccacttttgaccgtcacacacatttcagcatttgaagagacacaggctacctggaaactgcccatggcggggtcataatttaaatgtcccaatgtcatatagaggttaatttaatcaaaatgagctaaaacatggaacaatcactgaataatttaaaaagagtttacctggcagagtgtgtcatgcctgcaatcccagcactttgggaggccaaggcaggcagatcacctgaggtcaggagtttgagaccagcctggccaacatgatgaaacccttgtctctattaaaaacacaaaaattagccagatgtggtggcacatgcctgtaatcccagttagtcgggaggctgaggcaggagaatatggaactcaggaggcggaggctgcagtcaaccaagattgcgccactgcactccagccagggcgaaggagtgagactcccatctcaaaaaataaaaaaaaaaataaataaaaatagttgacccgggtgggcattccaaaatgttcccatagatgatcgtgaaacaatcactgtgcaaaatgtagaggaaaattcttacgataatcacaaaatttgtatcagaaaaacattacaaatttactttgctccatgtaattttatgaattggcagtattttcttaaattgggatacagtaagagaatatctttaggaaatggaaatgttaaaacaagaagtaacaagaggttgtttttctgaagggaaatgccaccggcctgctttcataggcattgataaagccaggaaggaaataaagtcacaaccgaatagtatacactgtatctactgaattcttctaattccttcacaacagaagtctaaatcctgcttagcctaaacatatctatagccagcgatgggcaaattatatttgctgtcagcatgatggaataagaaacagaaaccccccagcagtggggtaagattgcacgcttcatcccctcaaaatgcagttcagccccactccctctccatgcccatcaaacaactgcaaaatcacttgttactgaatttctcattcagcgttttgtttctttctgtccatacttaaagaccaaattatttgtttgctttgaagaaaaagcaaaagcaacaaaaacaccaaatcatttgaaatccaaccttaacccaattaaaaaaaaattccaccagtggaactaaacagttgagtggtttgggatgtgttgttcgccatttctgtgtttgacctacatggtctctagttctttggacaattgtaactgtgaaactatggcttaacactgttaaagactccaaggctccactctgtagccaggtgcaactcaggctgcacaaataccccaccagaatgtcacaatcattcattgctccagctgctgagtgaacagagtgcaagacagcactggcttgggttttatttttgcagccagttaactttgcatcaggtctacacagtccttgcagcctttgatttctccagttgtacagatttgaaatggggtgcccgggttcctctcgtttttccttcaatctacctagcatgcattttacacacattggaggagtcgatgcactgtttttctcttgctgatggaggcaagaacgccttctaattagtataacttaaatggacgggattgacttaaaagcaagaagaaaagcacatgaacaggtgtcttaatgcatttggatactttggggtgtgtgcctgtctgtgtgtgtgtcttggtgaaggtgggctgtattttcaccaagccttttcataatcaagtttgctttgcaaaccatctggccttgcccccagcagtacagtccttcctaataacggggatgctctgtcatgtttctctgtaaattgttgtgtgttgggaagttctgttgaggcttagtttgatcttccatggtggacatgtctgttctgtatataaaaagcattacatctgtgttttagcaggtgggatttgaagcttttccacagtccttgtgctctgagatggctgttgagctctgctcagctgtcacagctgaattctttttttgtgctgaacactgggcagcctcaccttgttgccaacgtgcttctggggcccctgtgactgctgccggatgctgtgcacacaggcagagtgccttggcaggtttgtgcaccccttggcgagccagaactgggaaccccgcggagtgaccccaccttctcatggggggtcagggaggggagtgcctatttttaatcttgtttgttgcgcaatggaaatcactgtgatttgtacatatgccctaggaaaattttaccgctgtctaatttatgtaataatactgatgattctaggtttgtttaataaaactttatatcttttcagaagcaaggctccactctgtagccaggtgcaactcaggctgca

SEQ ID NO: 322699 - DNA, 3521 bp, Homo sapiens
ggcccagaggttcccaattcgggcccgggtccccgacccacccggggggcccccccaaaaaaaaaaaaaaaaaaacccaaaaaacctcaatggctttttgcttttgaaggtggtatgaagagaacgtccactttaaggctttaaaagacagtgaagctggttgtagggctcacttttataatcctaggatttggggaagctgaagcagaaagattgcttgagcctgggagtttgagactggcctgggcagcatagcgagaccccatctctatataaaaaaaaagatgttaaaacagtgaaattacagaaacagaacatagccaccctgtttcatcagtgaccttttcttcacgtgacggtcaactcagtaggtgagaataattagtaggttcagcagaataaactctttacaattaataactcagtggaaaatgatgttcagatggtgaaatgtggaaatgttttagacaactctattttcagcctgtgcttctcactcaccatcctgttgggattaacagttgagggccatcgctgcctaaacatttagcgtgcggtttcccatcagttttactgtgaatgtgaaaaggtgaaactgttgctgacttcggtagcaggtatactaaaattggaatgacacagaggagattagcatggccccctgcgcgaggaagatccgcagattcatgcagcattccatatttttttaaaaaaaggttacactgtgcaccgacgtggagctagaaggaaaagcatgaagtctcatgtttgctgactataaaaataaatcatagtaataatattattgaacattctactttaaaaattattaataaaaccataaatgaaacacttgagcacactttaaaaagtacataaacccatgagtccatatgtgtaattttatgttgtctgttttattatccaggatttcatactcagatgagcattagcatcaggaaagcctgaaatgccttaattgtgaactgatacgcaggaaaatgaaatatgtaagcacattggtgaccttgttctttacagacatcatgatcagcctccagccatacagaacaaatgagaaattagaagcaattccaagaacgtgtgatggtgtgaacccacttttgaccgtcacacacatttcagcatttgaagagacacaggctacctggaaactgcccatggcggggtcataatttaaatgtcccaatgtcatatagaggttaatttaatcaaaatgagctaaaacatggaacaatcactgaataatttaaaaagagtttacctggcagagtgtgtcatgcctgcaatcccagcactttgggaggccaaggcaggcagatcacctgaggtcaggagtttgagaccagcctggccaacatgatgaaacccttgtctctattaaaaacacaaaaattagccagatgtggtggcacatgcctgtaatcccagttagtcgggaggctgaggcaggagaatatggaactcaggaggcggaggctgcagtcaaccaagattgcgccactgcactccagccagggcgaaggagtgagactcccatctcaaaaaataaaaaaaaaaataaataaaaatagttgacccgggtgggcattccaaaatgttcccatagatgatcgtgaaacaatcactgtgcaaaatgtagaggaaaattcttacgataatcacaaaatttgtatcagaaaaacattacaaatttactttgctccatgtaattttatgaattggcagtattttcttaaattgggatacagtaagagaatatctttaggaaatggaaatgttaaaacaagaagtaacaagaggttgtttttctgaagggaaatgccaccggcctgctttcataggcattgataaagccaggaaggaaataaagtcacaaccgaatagtatacactgtatctactgaattcttctaattccttcacaacagaagtctaaatcctgcttagcctaaacatatctatagccagcgatgggcaaattatatttgctgtcagcatgatggaataagaaacagaaaccccccagcagtggggtaagattgcacgcttcatcccctcaaaatgcagttcagccccactccctctccatgcccatcaaacaactgcaaaatcacttgttactgaatttctcattcagcgttttgtttctttctgtccatacttaaagaccaaattatttgtttgctttgaagaaaaagcaaaagcaacaaaaacaccaaatcatttgaaatccaaccttaacccaattaaaaaaaaattccaccagtggaactaaacagttgagtggtttgggatgtgttgttcgccatttctgtgtttgacctacatggtctctagttctttggacaattgtaactgtgaaactatggcttaacactgttaaagactccaaggctccactctgtagccaggtgcaactcaggctgcacaaataccccaccagaatgtcacaatcattcattgctccagctgctgagtgaacagagtgcaagacagcactggcttgggttttatttttgcagccagttaactttgcatcaggtctacacagtccttgcagcctttgatttctccagttgtacagatttgaaatggggtgcccgggttcctctcgtttttccttcaatctacctagcatgcattttacacacattggaggagtcgatgcactgtttttctcttgctgatggaggcaagaacgccttctaattagtataacttaaatggacgggattgacttaaaagcaagaagaaaagcacatgaacaggtgtcttaatgcatttggatactttggggtgtgtgcctgtctgtgtgtgtgtcttggtgaaggtgggctgtattttcaccaagccttttcataatcaagtttgctttgcaaaccatctggccttgcccccagcagtacagtccttcctaataacggggatgctctgtcatgtttctctgtaaattgttgtgtgttgggaagttctgttgaggcttagtttgatcttccatggtggacatgtctgttctgtatataaaaagcattacatctgtgttttagcaggtgggatttgaagcttttccacagtccttgtgctctgagatggctgttgagctctgctcagctgtcacagctgaattctttttttgtgctgaacactgggcagcctcaccttgttgccaacgtgcttctggggcccctgtgactgctgccggatgctgtgcacacaggcagagtgccttggcaggtttgtgcaccccttggcgagccagaactgggaaccccgcggagtgaccccaccttctcatggggggtcagggaggggagtgcctatttttaatcttgtttgttgcgcaatggaaatcactgtgatttgtacatatgccctaggaaaattttaccgctgtctaatttatgtaataatactgatgattctaggtttgtttaataaaactttatatcttttcagaagcaaggctccactctgtagccaggtgcaactcaggctgca

SEQ ID NO: 322700 - DNA, 1408 bp, Homo sapiens
gcacgcggccaccgagctggaggaagcggcgggcgtgagaccgggaatgcttggggcccccgccttcctcgcagccatccagcactcggtgcacgccccgcgaggccagcggctgctccctcccggggctattgctgctagtgccgtgagcaccgcccagccattgtctctgtgtctccgtcagccgtgccgagccgcgcacccagaggcgagggcgcgcatggggagcctccgttgatgctgccgcggctgccgcgccgccctccgaggctgcgtcccggggagtccggcttcccgagcgctccggcctggcccggcgccccggacctgagtgcctccccatggaggcgcccgggccggcccaggcggccgcggcggagagcaactcccgagaggtgacggaggatgccgccgactgggcgcccgcgctctgccccagccccgaggcgcggtcgccggaggcgcctgcctaccgcctgcaggactgcgacgcgctggtcaccatgggcactgggacgttcgggcgggtgcacctggtgaaggagaagacagccaagcatttcttcgccctcaaggtgatgagcattcccgacgtcatccgccggaagcaggagcagcacgtgcacaatgagaagtctgtcctgaaggaagtcagccacccgttcctcatcaggctgttctggacgtggcatgaggagcgcttcctctacatgctcatggagtatgtgccgggtggcgagctcttcagctacctgcgcaaccgggggcacttctccagcaccacggggctcttctactctgcggagatcatctgtgccattgagtacctgcactccaaggagatcgtctacagggatttgaagccggagaacatcctgctggatagggatggtcacatcaagctcacggactttgggtttgccaagaagctggtagacagacagggtctcatcctgtcacccaagctgaagtgccgttgcacaatcttgtctcactacagcctcaaactcctcggctcaagtgatcctccctcctcagcctctgaagtagctgggactacaggcatgtgccaccataccaggctaatttttttatttttaattttagagatgtgatctcactttattgctcaggctggtcttgaactcttggccccaagatatcgtcccacctcagcttcccaaagcactggaattagaagcatgtgccactgtgcctggccaattctatttttgaatttaacatttttagcaccagacagttgttaaatcagtatcattttattatttgtttatttatttagatggagtctgcactccagcctgggcaacagaatggactctgtctccaaaaaaagaaaaaataaataaagaaaagtcattctgtagttttagcctttgtgaaggca

SEQ ID NO: 322701 - DNA, 524 bp, Homo sapiens
ggagcgtggttttactcaacgaagttattgtaacaatcagagcttctaaggtgactgcattagccaagcaccactgagtgttgtgggggcctgtctctgtcgcccatataggacttggaccctctgtggaacacccgagtacctagcccccgaagtcattcagagcaagggccacggaagggccgtggactggtgggccctcggcatcctgatattcgagatgctttcgggctgtgcacacaggcagagtgccttggcaggtttgtgcaccccttggcgagccagaactgggaaccccgcggagtgaccccaccttctcatggggggtcagggaggggagtgcctatttttaatcttgtttgttgcgcaatggaaatcactgtgatttgtacatatgccctaggaaaattttaccgctgtctaatttatgtaataatactgatgattctaggtttgtttaataaaactttatatcttttcagaagcaaggctccactctgtagccaggtgcaactcaggctgca

SEQ ID NO: 322702 - DNA, 6972 bp, Homo sapiens
ctccaggcaagtccccgtccaaaaagaagaagaagttccgtaccccgtcctttctgaagaagagcaaggagaagagtgactcctgaaagccctgcgctaacactgtcctgtccggagcgaccctggctctgccagcgtccccggccacgtctgtgctctgtccttgtgtaatggaatgcaaaaaagccaagccctccgcctagaggtcaccatgggcactgggacgttcgggcgggtgcacctggtgaaggagaagacagccaagcatttcttcgccctcaaggtgatgagcattcccgacgtcatccgccggaagcaggagcagcacgtgcacaatgagaagtctgtcctgaaggaagtcagccacccgttcctcatcaggctgttctggacgtggcatgaggagcgcttcctctacatgctcatggagtatgtgccgggtggcgagctcttcagctacctgcgcaaccgggggcacttctccagcaccacggggctcttctactctgcggagatcatctgtgccattgagtacctgcactccaaggagatcgtctacagggatttgaagccggagaacatcctgctggatagggatggtcacatcaagctcacggactttgggtttgccaagaagctggtagacaggacttggaccctctgtggaacacccgagtacctagcccccgaagtcattcagagcaagggccacggaagggccgtggactggtgggccctcggcatcctgatattcgagatgctttcggggtttcctccattttttgatgacaacccgtttggcatttatcagaaaattcttgcaggcaaactatatttccccagacatttggatttccatgtaaaaacggggcgaatgatgtgaaacaccatcggtggttccgctccgtggactggaaagctgttccgcagagaaaactgaagcctcccatcgtgcccacgatagctggcaacggcgacacttccaacttcgaaacttaccctgagcatgactgggacacagccgcgcccgtgccgcagaaggatttagaaatcttcaagaatttctgaggacgagctcacatctggaagaaacaggaagattggaatctgcctggaacaaagaactgcacctaagcagaccagaagcaaaatgtcttcttcacggcctgaggacatttccagttttctctgtacctgtgtgtatagaaatagatcagagcacagttgaaattcatggaactggcattatttaagcaaccagaattccacactgtaggaaggttttgaaaattgtttcgttatagattttatcttatcttttggtgttgtcttggtttttctcatagactttataagtttgaactggacttatttgattataaccacaaattgtgtgtgtgtgtgtgtgtgtatatatagaagtcattatggcagatgcacaaattgtgcagtgatgtaaatatacatacttcacagagcctattatttttatttttcaattcagtttctcaaattatcttcccttctcttggggacaacatctgaagggtatgttgcatgcatttttaaaaaaatcatctcatatgcattgtatagtttgggggaataagatatccgggggccgggggtgtctacattcagtatctttagttcttcctacctagtaacttgagactttaaaagaagaaacatggagaagatgtgggagcgaatttattgcaggaatccacaatgactttgaagttgttggagcaatgcattgtattcagaaaacctgtgtcacattaaaaaatttcatctaggctaggtgcagtggcttgttcctgtagtcccagcactctgggaacctgggttgggaggattgcttaaggccaggagtttgagaccagcttgggcaacatagtgaaccctgtctgtatggaatttacacaaattataaaaattagtcgggtgtcattgtgcatacctgtagtcccagctattcaggagctgttgtaggagagattgcctgagctcaagaggttgaggctgcagtgagccctgattgtgccagtgcactccaggctggacgacagagcaagaccctgtattaaaaaaaaaattcatcctgcacagggaaatggctacctattaaagtcccagttgaaattttttgaaaaaatacacctcccacagttcacaaataacttttaagatcagctcatctataaggctgaccttcatgcagagattttatttcacctttagttttgggaaaagcgagaaacagatgatctataggatgtgagtgggtggcagagtcaaaaggaacctcacctgttcctaatttctccttttaaatattcatgttgagtgtgcctaatactctcctcgacaagtcatgctgttttatgcagaataatccaggcgtgagagtgttctcttgggaaatgactggggagacacctgaaaggagcaacccccagatgttcttccctgggtgttgatggcatgacagccatacagtgagtttgttctgaaacatctcttgctaaatgtgggtcatgctagacacagcataaactgagggtgtggggtctggctttgtacataactcattttctcccttgctttttctctggaccatcctggctggaaacttggctgtagacatctgaagagggtgcaccttttctctttactgtgactcacctcaaatatggcattgctcaaatctgctgtgtatgaggtcacagggcccagctgtggcaggggtgagtgcattgaagaagtaggttttggagccttccaggaattccttgttgacaacaggggtacactcacacagacctccaagactttcttctccacctcttctttttctcatgccctgccttcatctgtctccttctgcacccagagtaggggtggagtatacccttgccatgtgttagtgaaaatgtgtgcagtgagaagccagttgggtcccctcggctcctaatctcttctcaaaactcagtagctcaggttctctggagccatccggtgcattccttgctattggagctgtttttccaagcaatatctgggaagagatttctccctctagcacttgctacctctcttctgcacacatatcacacatcagtactgtggagagtttctgttaggaaaagccatacatttttaaaaatgtagcaaaatgtcaagggaaatgtaatcagatttggccagagttcgcctacagataagaaggcactgggccaggctcacacctgtaatcctaagtaacactttgggaggctggggcgagaggattgcttgagcccaggagttcaatacctgtctgggaaacacctcatctctacaaaatacaaaaaagttaactgggcatggtggagcatgcctgtagtctcagctactcaggaggctgagatgagaggatcacttgagcctgaggaggtccaggccacagtgatctgagatcacaccattgccctccagcctgggtgacagagtgagaccctgttccaaaaaaaaaaaaaaacccaaaaaacctcaatggctttttgcttttgaaggtggtatgaagagaacgtccactttaaggctttaaaagacagtgaagctggttgtagggctcacttttataatcctaggatttggggaagctgaagcagaaagattgcttgagcctgggagtttgagactggcctgggcagcatagcgagaccccatctctatataaaaaaaaagatgttaaaacagtgaaattacagaaacagaacatagccaccctgtttcatcagtgaccttttcttcacgtgacggtcaactcagtaggtgagaataattagtaggttcagcagaataaactctttacaattaataactcagtggaaaatgatgttcagatggtgaaatgtggaaatgttttagacaactctattttcagcctgtgcttctcactcaccatcctgttgggattaacagttgagggccatcgctgcctaaacatttagcgtgcggtttcccatcagttttactgtgaatgtgaaaaggtgaaactgttgctgacttcggtagcaggtatactaaaattggaatgacacagaggagattagcatggccccctgcgcgaggaagatccgcagattcatgcagcattccatatttttttaaaaaaaggttacactgtgcaccgacgtggagctagaaggaaaagcatgaagtctcatgtttgctgactataaaaataaatcatagtaataatattattgaacattctactttaaaaattattaataaaaccataaatgaaacacttgagcacactttaaaaagtacataaacccatgagtccatatgtgtaattttatgttgtctgttttattatccaggatttcatactcagatgagcattagcatcaggaaagcctgaaatgccttaattgtgaactgatacgcaggaaaatgaaatatgtaagcacattggtgaccttgttctttacagacatcatgatcagcctccagccatacagaacaaatgagaaattagaagcaattccaagaacgtgtgatggtgtgaacccacttttgaccgtcacacacatttcagcatttgaagagacacaggctacctggaaactgcccatggcggggtcataatttaaatgtcccaatgtcatatagaggttaatttaatcaaaatgagctaaaacatggaacaatcactgaataatttaaaaagagtttacctggcagagtgtgtcatgcctgcaatcccagcactttgggaggccaaggcaggcagatcacctgaggtcaggagtttgagaccagcctggccaacatgatgaaacccttgtctctattaaaaacacaaaaattagccagatgtggtggcacatgcctgtaatcccagttagtcgggaggctgaggcaggagaatatggaactcaggaggcggaggctgcagtcaaccaagattgcgccactgcactccagccagggcgaaggagtgagactcccatctcaaaaaataaaaaaaaaaataaataaaaatagttgacccgggtgggcattccaaaatgttcccatagatgatcgtgaaacaatcactgtgcaaaatgtagaggaaaattcttacgataatcacaaaatttgtatcagaaaaacattacaaatttactttgctccatgtaattttatgaattggcagtattttcttaaattgggatacagtaagagaatatctttaggaaatggaaatgttaaaacaagaagtaacaagaggttgtttttctgaagggaaatgccaccggcctgctttcataggcattgataaagccaggaaggaaataaagtcacaaccgaatagtatacactgtatctactgaattcttctaattccttcacaacagaagtctaaatcctgcttagcctaaacatatctatagccagcgatgggcaaattatatttgctgtcagcatgatggaataagaaacagaaaccccccagcagtggggtaagattgcacgcttcatcccctcaaaatgcagttcagccccactccctctccatgcccatcaaacaactgcaaaatcacttgttactgaatttctcattcagcgttttgtttctttctgtccatacttaaagaccaaattatttgtttgctttgaagaaaaagcaaaagcaacaaaaacaccaaatcatttgaaatccaaccttaacccaattaaaaaaaaattccaccagtggaactaaacagttgagtggtttgggatgtgttgttcgccatttctgtgtttgacctacatggtctctagttctttggacaattgtaactgtgaaactatggcttaacactgttaaagactccaaggctccactctgtagccaggtgcaactcaggctgcacaaataccccaccagaatgtcacaatcattcattgctccagctgctgagtgaacagagtgcaagacagcactggcttgggttttatttttgcagccagttaactttgcatcaggtctacacagtccttgcagcctttgatttctccagttgtacagatttgaaatggggtgcccgggttcctctcgtttttccttcaatctacctagcatgcattttacacacattggaggagtcgatgcactgtttttctcttgctgatggaggcaagaacgccttctaattagtataacttaaatggacgggattgacttaaaagcaagaagaaaagcacatgaacaggtgtcttaatgcatttggatactttggggtgtgtgcctgtctgtgtgtgtgtcttggtgaaggtgggctgtattttcaccaagccttttcataatcaagtttgctttgcaaaccatctggccttgcccccagcagtacagtccttcctaataacggggatgctctgtcatgtttctctgtaaattgttgtgtgttgggaagttctgttgaggcttagtttgatcttccatggtggacatgtctgttctgtatataaaaagcattacatctgtgttttagcaggtgggatttgaagcttttccacagtccttgtgctctgagatggctgttgagctctgctcagctgtcacagctgaattctttttttgtgctgaacactgggcagcctcaccttgttgccaacgtgcttctggggcccctgtgactgctgccggatgctgtgcacacaggcagagtgccttggcaggtttgtgcaccccttggcgagccagaactgggaaccccgcggagtgaccccaccttctcatggggggtcagggaggggagtgcctatttttaatcttgtttgttgcgcaatggaaatcactgtgatttgtacatatgccctaggaaaattttaccgctgtctaatttatgtaataatactgatgattctaggtttgtttaataaaactttatatcttttcagaagcaaggctccactctgtagccaggtgcaactcaggctgca

SEQ ID NO: 322703 - DNA, 6472 bp, Homo sapiens
ttatagagtcttgattaatcaaaatgagctaaaacatggaacaatcactgagtaatttaaaaagagtttaccttccaaagtgttgggattacaggtgtgagccaacgcaccaggtcttgaataacatttttgaacgtttcccagaaaggacttggaccctctgtggaacacccgagtacctagcccccgaagtcattcagagcaagggccacggaagggccgtggactggtgggccctcggcatcctgatattcgagatgctttcggggtttcctccattttttgatgacaacccgtttggcatttatcagaaaattcttgcaggcaaactatatttccccagacatttggatttccatgtaaaaacggggcgaatgatgtgaaacaccatcggtggttccgctccgtggactggaaagctgttccgcagagaaaactgaagcctcccatcgtgcccacgatagctggcaacggcgacacttccaacttcgaaacttaccctgagcatgactgggacacagccgcgcccgtgccgcagaaggatttagaaatcttcaagaatttctgaggacgagctcacatctggaagaaacaggaagattggaatctgcctggaacaaagaactgcacctaagcagaccagaagcaaaatgtcttcttcacggcctgaggacatttccagttttctctgtacctgtgtgtatagaaatagatcagagcacagttgaaattcatggaactggcattatttaagcaaccagaattccacactgtaggaaggttttgaaaattgtttcgttatagattttatcttatcttttggtgttgtcttggtttttctcatagactttataagtttgaactggacttatttgattataaccacaaattgtgtgtgtgtgtgtgtgtgtatatatagaagtcattatggcagatgcacaaattgtgcagtgatgtaaatatacatacttcacagagcctattatttttatttttcaattcagtttctcaaattatcttcccttctcttggggacaacatctgaagggtatgttgcatgcatttttaaaaaaatcatctcatatgcattgtatagtttgggggaataagatatccgggggccgggggtgtctacattcagtatctttagttcttcctacctagtaacttgagactttaaaagaagaaacatggagaagatgtgggagcgaatttattgcaggaatccacaatgactttgaagttgttggagcaatgcattgtattcagaaaacctgtgtcacattaaaaaatttcatctaggctaggtgcagtggcttgttcctgtagtcccagcactctgggaacctgggttgggaggattgcttaaggccaggagtttgagaccagcttgggcaacatagtgaaccctgtctgtatggaatttacacaaattataaaaattagtcgggtgtcattgtgcatacctgtagtcccagctattcaggagctgttgtaggagagattgcctgagctcaagaggttgaggctgcagtgagccctgattgtgccagtgcactccaggctggacgacagagcaagaccctgtattaaaaaaaaaattcatcctgcacagggaaatggctacctattaaagtcccagttgaaattttttgaaaaaatacacctcccacagttcacaaataacttttaagatcagctcatctataaggctgaccttcatgcagagattttatttcacctttagttttgggaaaagcgagaaacagatgatctataggatgtgagtgggtggcagagtcaaaaggaacctcacctgttcctaatttctccttttaaatattcatgttgagtgtgcctaatactctcctcgacaagtcatgctgttttatgcagaataatccaggcgtgagagtgttctcttgggaaatgactggggagacacctgaaaggagcaacccccagatgttcttccctgggtgttgatggcatgacagccatacagtgagtttgttctgaaacatctcttgctaaatgtgggtcatgctagacacagcataaactgagggtgtggggtctggctttgtacataactcattttctcccttgctttttctctggaccatcctggctggaaacttggctgtagacatctgaagagggtgcaccttttctctttactgtgactcacctcaaatatggcattgctcaaatctgctgtgtatgaggtcacagggcccagctgtggcaggggtgagtgcattgaagaagtaggttttggagccttccaggaattccttgttgacaacaggggtacactcacacagacctccaagactttcttctccacctcttctttttctcatgccctgccttcatctgtctccttctgcacccagagtaggggtggagtatacccttgccatgtgttagtgaaaatgtgtgcagtgagaagccagttgggtcccctcggctcctaatctcttctcaaaactcagtagctcaggttctctggagccatccggtgcattccttgctattggagctgtttttccaagcaatatctgggaagagatttctccctctagcacttgctacctctcttctgcacacatatcacacatcagtactgtggagagtttctgttaggaaaagccatacatttttaaaaatgtagcaaaatgtcaagggaaatgtaatcagatttggccagagttcgcctacagataagaaggcactgggccaggctcacacctgtaatcctaagtaacactttgggaggctggggcgagaggattgcttgagcccaggagttcaatacctgtctgggaaacacctcatctctacaaaatacaaaaaagttaactgggcatggtggagcatgcctgtagtctcagctactcaggaggctgagatgagaggatcacttgagcctgaggaggtccaggccacagtgatctgagatcacaccattgccctccagcctgggtgacagagtgagaccctgttccaaaaaaaaaaaaaaacccaaaaaacctcaatggctttttgcttttgaaggtggtatgaagagaacgtccactttaaggctttaaaagacagtgaagctggttgtagggctcacttttataatcctaggatttggggaagctgaagcagaaagattgcttgagcctgggagtttgagactggcctgggcagcatagcgagaccccatctctatataaaaaaaaagatgttaaaacagtgaaattacagaaacagaacatagccaccctgtttcatcagtgaccttttcttcacgtgacggtcaactcagtaggtgagaataattagtaggttcagcagaataaactctttacaattaataactcagtggaaaatgatgttcagatggtgaaatgtggaaatgttttagacaactctattttcagcctgtgcttctcactcaccatcctgttgggattaacagttgagggccatcgctgcctaaacatttagcgtgcggtttcccatcagttttactgtgaatgtgaaaaggtgaaactgttgctgacttcggtagcaggtatactaaaattggaatgacacagaggagattagcatggccccctgcgcgaggaagatccgcagattcatgcagcattccatatttttttaaaaaaaggttacactgtgcaccgacgtggagctagaaggaaaagcatgaagtctcatgtttgctgactataaaaataaatcatagtaataatattattgaacattctactttaaaaattattaataaaaccataaatgaaacacttgagcacactttaaaaagtacataaacccatgagtccatatgtgtaattttatgttgtctgttttattatccaggatttcatactcagatgagcattagcatcaggaaagcctgaaatgccttaattgtgaactgatacgcaggaaaatgaaatatgtaagcacattggtgaccttgttctttacagacatcatgatcagcctccagccatacagaacaaatgagaaattagaagcaattccaagaacgtgtgatggtgtgaacccacttttgaccgtcacacacatttcagcatttgaagagacacaggctacctggaaactgcccatggcggggtcataatttaaatgtcccaatgtcatatagaggttaatttaatcaaaatgagctaaaacatggaacaatcactgaataatttaaaaagagtttacctggcagagtgtgtcatgcctgcaatcccagcactttgggaggccaaggcaggcagatcacctgaggtcaggagtttgagaccagcctggccaacatgatgaaacccttgtctctattaaaaacacaaaaattagccagatgtggtggcacatgcctgtaatcccagttagtcgggaggctgaggcaggagaatatggaactcaggaggcggaggctgcagtcaaccaagattgcgccactgcactccagccagggcgaaggagtgagactcccatctcaaaaaataaaaaaaaaaataaataaaaatagttgacccgggtgggcattccaaaatgttcccatagatgatcgtgaaacaatcactgtgcaaaatgtagaggaaaattcttacgataatcacaaaatttgtatcagaaaaacattacaaatttactttgctccatgtaattttatgaattggcagtattttcttaaattgggatacagtaagagaatatctttaggaaatggaaatgttaaaacaagaagtaacaagaggttgtttttctgaagggaaatgccaccggcctgctttcataggcattgataaagccaggaaggaaataaagtcacaaccgaatagtatacactgtatctactgaattcttctaattccttcacaacagaagtctaaatcctgcttagcctaaacatatctatagccagcgatgggcaaattatatttgctgtcagcatgatggaataagaaacagaaaccccccagcagtggggtaagattgcacgcttcatcccctcaaaatgcagttcagccccactccctctccatgcccatcaaacaactgcaaaatcacttgttactgaatttctcattcagcgttttgtttctttctgtccatacttaaagaccaaattatttgtttgctttgaagaaaaagcaaaagcaacaaaaacaccaaatcatttgaaatccaaccttaacccaattaaaaaaaaattccaccagtggaactaaacagttgagtggtttgggatgtgttgttcgccatttctgtgtttgacctacatggtctctagttctttggacaattgtaactgtgaaactatggcttaacactgttaaagactccaaggctccactctgtagccaggtgcaactcaggctgcacaaataccccaccagaatgtcacaatcattcattgctccagctgctgagtgaacagagtgcaagacagcactggcttgggttttatttttgcagccagttaactttgcatcaggtctacacagtccttgcagcctttgatttctccagttgtacagatttgaaatggggtgcccgggttcctctcgtttttccttcaatctacctagcatgcattttacacacattggaggagtcgatgcactgtttttctcttgctgatggaggcaagaacgccttctaattagtataacttaaatggacgggattgacttaaaagcaagaagaaaagcacatgaacaggtgtcttaatgcatttggatactttggggtgtgtgcctgtctgtgtgtgtgtcttggtgaaggtgggctgtattttcaccaagccttttcataatcaagtttgctttgcaaaccatctggccttgcccccagcagtacagtccttcctaataacggggatgctctgtcatgtttctctgtaaattgttgtgtgttgggaagttctgttgaggcttagtttgatcttccatggtggacatgtctgttctgtatataaaaagcattacatctgtgttttagcaggtgggatttgaagcttttccacagtccttgtgctctgagatggctgttgagctctgctcagctgtcacagctgaattctttttttgtgctgaacactgggcagcctcaccttgttgccaacgtgcttctggggcccctgtgactgctgccggatgctgtgcacacaggcagagtgccttggcaggtttgtgcaccccttggcgagccagaactgggaaccccgcggagtgaccccaccttctcatggggggtcagggaggggagtgcctatttttaatcttgtttgttgcgcaatggaaatcactgtgatttgtacatatgccctaggaaaattttaccgctgtctaatttatgtaataatactgatgattctaggtttgtttaataaaactttatatcttttcagaagcaaggctccactctgtagccaggtgcaactcaggctgca

SEQ ID NO: 322704 - DNA, 418 bp, Homo sapiens
  misc_feature (40)..(40): n is a, c, g, or t
gaattccccccccccccccccccccttattattcacttgngggcgagaagtccgagctagggatcctgaaaaggagggaacaattgttgtagcaggtctaaaagttcaggtccaggaaatggaaacattgctttgcttttcctgaattgtccagtgacctatcccaggccttcctttccagtgaacaatggaccatgcaggtggaccctcctcttcacgggcctccaaatgactttctcatttttcaaatcattcctctgcactcactttctataatggtagagaaatgcatatcctggagtctaaagttaaaactttgttttattgagattaatgtttaggtagaatcacatcatccatcttctccaatcttctccaaagacctcagttttaaaatatgacaggattagagatgacc

SEQ ID NO: 322705 - DNA, 390 bp, Homo sapiens
caagggccctttacattgcgttcttaacggttcagtcaccttaaccgttattattcacttgcgggcgagaagtccgagctagggatcctgaaaaggagggaacaattgttgtagcaggtctaaaagttcaggtccaggaaatggaaacattgctttgcttttcctgaattgtccagtgacctatcccaggccttcctttccagtgaacaatggaccatgcaggtggaccctcctcttcacgggcctccaaatgactttctcatttttcaaatcattcctctgcactcactttctataatgccccggtttctctggattctgtgcttctccatggaggaaactcaaggagaactgacaagttcttgtggttctaaaaccatggccaatgta

SEQ ID NO: 322706 - DNA, 135 bp, Homo sapiens
ctggtctggatttgctgggggaagaagaggtccctcagtgaactctcttgttgtctgccacccctcaaacctaagatgctaagaggcaaacagcagtgacaagctccttgtgctagattgtatcatgtcaagtag

SEQ ID NO: 322707 - DNA, 571 bp, Homo sapiens
ttcttctgatcagagaagagccaagacatagataattgaaaatagtaattaacctcaaaccacgtgtatttggctttaaagttagtttcatgattttgagaaacagctgtactttttaaattagatatattcagaaaatcattaatatagctttattccttaagcttataacaaattttatcaaggggcttcaggcgagaattgtgagaagaggctagaatgatccactgagaatgctttcaatcaactgttttattctgtagtcttgcaattaaacactacattctgtacccacactagcatctctatgaagtttcagtgtgttttcaataagcctttctgcaattgaggcataaaacatatcccagtattgtttctggctttggtttatatttggaataagatattaaatgtccagagcaaaacctatagccatctgcgtaaaatgaatgtttatactttacttctctgaggtcactttttctctcactctctattcccaaaagatcatgattcactatattgagatgcctagaattatcaggtcagagtgcttaatttgcaaagattt

SEQ ID NO: 322708 - DNA, 154 bp, Homo sapiens
agtgagatatgactgtgccactgcactgcagactgggtgacatagtgagactctgtccctataaaaataaaaataaataataaaacaatagagagttctgaaataggaacacatatatatagtcaactgacttttaacaagagcaccacattac

SEQ ID NO: 322709 - DNA, 518 bp, Homo sapiens
ccaacacctatcctcaacgtggcagccagaatgattctgttaaagcctaaaattatgtcactcttcagctcaaaatttccaaaggcgcctcatctctgagtaaagaccaaagtcgaagccctatatgtttgggctccccgtttcctctactcgtctctagccaagccctcctggctgttccttgaccataccagctatgtcatgccctcagggttttggtactggctgcaccctctacctggagcatcttctctcagatgcctgcatgtgtgctttctcacgtctttctctactcccatcaaagtagtttcctgctatattttccggtacaccattttcaccttctaatatactatataatttatatacatatggcttttctgctcccttctgcccccatatagaatgtagattccaggaaggcaggaatttggattatttaatttatatactatatcccccacatctggaacagtacatttgaaaaatgaaaagcaaatgtttctctgatggataaa

SEQ ID NO: 322710 - DNA, 297 bp, Homo sapiens
gcaaacagggaatctaaatttgcttcatcttacaccaaacccacatacttcactaaaatcaaaattctgtttaaacacacacacacacagacacacacacacacacacgaatcatggatgggataagttgtaggaaacagtaatccattcgcttattctccatccttttcccgccctttcctccagaccagtttaccagtttaaaaggaacaaagaactagaaaggccaagtgatttttttttttttttttgtaagacaagagtctccctctgtcgcctagcctggagtgcagtggc

SEQ ID NO: 322711 - DNA, 237 bp, Homo sapiens
ttaaaatagaactgttgcctgaacacatagtccccttttgtggatcaaaattacacagcctaccaccaaaaagtgctgtgtgaaatggcgggaatttttttcccagcacttttgaatccaatacagaactagctgccagggaacttggtatattagctcagtttaaaatggcagcttaacaaattcaaaactttctttttaattaaaaaaaaatgccccaacttatgtcttgcaatg

SEQ ID NO: 322712 - DNA, 296 bp, Homo sapiens
tgtcattaacaccctgaacacattaacactgtttactttaaataaaatcccttaatagcctaagagactgaacctattttgatggctgagaatgaagaggtcatgagaaggttcaaaacagaagttcagaagtggatctgcagttggttacgaggcaccagacgggcgggttgatggttattttctctcagctttttgaagaccagattctgctctctcctggccactgtcgtcgtgttgagaagtctgctgccactgtaaatgccactgtggaggacatcattctttcctccagc

SEQ ID NO: 322713 - DNA, 745 bp, Homo sapiens
aaactccaaacacatccgaacatcagaaggaacaaactccagatgcgccaccttaagagctgtaacactcaccgcgagggtccccagcttcgtttttgaagtcagtgagaccaagaacccaccaattctggacacattaccatttaactttcttctcattgtcataatattggaactgcgcctagattctcaaaatgttcatcttgtctgcaatcacttcaacagaagcttatattaaatatcaggtcatgcctcataaatacccccaaattttgagaacaaaaagcactgtatctttctattgtcacagaacttcctccagccttgatctgagaaccccaattaggctattcaataggttggctatattgggaaaggtaattgtaagaataaaatattcttaaaataagaagaataaaatattcaagaataaatttatcaaaagttgtttcaaacttctacacttaatacaaatttgctgaaagaaagtaaagacaattgaaacaaaaggagaaatatactagatttatgggctgaaagataatatttttaagatgtcaattctcctcaaatgtatcaatatatttaatgcaattccaaccaaaattccagaaggcatgacaagctgattcaaatagtatagtgctaaaatgtgatgtagtgtagagtagtggttaatattcagattctagactcagatgcttggctctaccattttctatctgtatgtatgacctttatccaa

SEQ ID NO: 322714 - DNA, 493 bp, Homo sapiens
tctactgatttatgcaataaactttctacctctacttaaccaatttgataatttaatagctggagataattctaaattccccaaaccttaatcaagaattttggaaaaaaagagctatctagaacagttatcttcctgaaaacactgttgtgctaaactgaaacacagccttttctcaagagctaagcagctacttgggtctacattttaatgcactaaataattttataagatcatgtttgaaaccaaaaaacccaaaaaggattgtcaagctaggtcagcttacaaaaccccttctgttatgaactaggaaatcaaacaacaaaacataagctctaggaaatgagcatggaggtgctccatccatactagcttttccttgtttttttcttgagaggagtgactctctgtcacccaggctggagtgtagtgatgcaatcctggttcactccaacctccacctcctgagttcaagggattctcctgcctcagc

SEQ ID NO: 322715 - DNA, 528 bp, Homo sapiens
tggttaatataaacatttgtttattcattccacaaatattgattgaccatgaaggatgtaccagacacagttctaggctcttgggaaaaagtagagaacaaggctgacagaggtccctgctcccctagagcttacattttagccagaggcggatgatgaaaaaggaaacaatgtaattcacaaggcctgtaaattccaccagggtagagaaggtgttgcatttgtaccttgatctatcccaagtgcataagacagggcatacgagcaggcactcaatgaatgtgctgaatgactggaaggagattatttcagatagtgctgtgtgcaagaaggcaaggaaacggcccgacatgacagagcgggaaggtcggcttggctagatgcgatgtactcctgagaaagccctgctgagctaaagcagatggtgtgaaggaaccaatcatgggacagtctttgggacggctattccaggccaaagaagattccgtgcctaagctgaaggccccaaggcaaggctgtgctggacct

SEQ ID NO: 322716 - DNA, 112 bp, Homo sapiens
gattaatataaaatacatttggtgtagctcactgcagattatgcatactacatacttttatgtgaaattggcagaaatcatcagcattaaagcccttataaagttcattttc

SEQ ID NO: 322717 - DNA, 190 bp, Homo sapiens
ctgagatgtgactcatctatttttggcataagggtatattttgataacatctaatacatgaaaaacagaattataagtgaaattggagaatgattaccttttttaaatgcttggttttttcaaaataatgtacagtaggctctgcatggtcaacttcctacagatttgctttttggaatttcagttagca

SEQ ID NO: 322718 - DNA, 265 bp, Homo sapiens
agatcatacagtcccacctcctaccaaatgcagtcacccaaaatcaatgacattccacctctgctacaatggtagcataggaagtgttactttgcaaagtgactaattctgttgttcatcagtttggcccagtgtttctcaaatttttcttaccaaaacccacagtaagaaatacattttggctgggtgcagtggctcatgcctgtaatcccaacactttgggaagccaaggtgagttgattgcttgagctcaggagtttgagac

SEQ ID NO: 322719 - DNA, 658 bp, Homo sapiens
ctggcactgtgttctcttgggaaggaggctccccagagcccatctgctctcagaacttggtcctagagaggaggctccctccctggctgtgtctagaggatggaaccgggatctggggtttagtcacagccatctctctccttttggcacagttggtcgtgatctcccagcactccacttgtgtcctttgtctgcagggtcgtgctctcattccccctagaatggggctccctccctcaggaaccttgccgggacactccagggtttctgtggggaggctgtcaggttctcagcctcccctctgccctgaggtctcctgtctgtcaggtgtcagggtgtgccatcccccacatggctgcagagaggatgctcagacaggcctgcagccaccctgcacccatgggggaatttaaactccattcctgagtcatcctggccttgggagcaagacgagtgggctcagccctggcccacaccaaggcagcagcttcccatctctaaaacgggagaaatgctccctgccatccctcgatccctggggcccattaggtaaagatggccagttgcagttaggtttggtttccttaaaaggaatgtgaggttgccaggcattgctctctctgagagaaggttcattctgagctctcggccagctggg

SEQ ID NO: 322720 - DNA, 423 bp, Homo sapiens
acttgagcatcagtggatcttggtatctgcagggaatcctgggatgaatcccccatggatactgaaggaaaactgtacatatatgtgtgtatatataatgtatgtatgtgtatatatatgtgtattatacataaatatatgtgtgtgtgtgtgtgtgtgtgtgtgtatacacacacatatatggaatgtgtatgtctaaaacaaaacaacctagggcttgaagaaggtagctttcagtaaatgatggccgcatggtatatttatttttttttaagtggttgaatttcattgtattgcagagcaagggagatttgctccttacctttctctctccttgcctttttttcatctttctttctctctctctctctctttttttttttttgctctgtcgccaggctggagtgcagtggcgcaatctcc

SEQ ID NO: 322721 - DNA, 911 bp, Homo sapiens
tagccggattcggcataacggcggggctctttttccggctggaaccatggagggtgtagaagagaagaagaaggaggttcctgctgtgccagaaacccttaagaaaaagcgaaggaatttcgcagagctgaagatcaagcgcctgagaaagaagtttgcccaaaagatgcttcgaaaggcaaggaggaagcttatctatgaaaaagcaaagcactatcacaaggaatataggcagatgtacagaactgaaattcgaatggcgaggatggcaagaaaagctggcaacttctatgtacctgcagaacccaaattggcgtttgtcatcagaatcagaggtatcaatggagtgagcccaaaggttcgaaaggtgttgcagcttcttcgccttcgtcaaatcttcaatggaacctttgtgaagctcaacaaggcttcgattaacatgctgaggattgtagagccatatattgcatgggggtaccccaatctgaagtcagtaaatgaactaatctacaagcgtggttatggcaaaatcaataagaagcgaattgctttgacagataacgctttgattgctcgatctcttggtaaatacggcatcatctgcatggaggatttgattcatgagatctatactgttggaaaacgcttcaaagaggcaaataacttcctgtggcccttcaaattgtcttctccacgaggtggaatgaagaaaaagaccacccattttgtagaaggtggagatgctggcaacagggaggaccagatcaacaggcttattagaagaatgaactaaggtgtctaccatgattatttttctaagctggttggttaataaacagtacctgctctcaaagaaaaaaaaacacaaaaacaaaaaaaacccgggggcttctatgcgggggggggaaaaa

SEQ ID NO: 322722 - DNA, 1135 bp, Homo sapiens
aaactgatgaagaaagtatttggcaaagttcttcaaagccaccatggagggtgtagaagagaagaagaaggaggttcctgctgtgccagaaacccttaagaaaaagcgaaggaatttcgcagagctgaagatcaagcgcctgagaaagaagtttgcccaaaagatgcttcgaaaggcaaggaggaagcttatctatgaaaaagcaaagcactatcacaaggaatataggcagatgtacagaactgaaattcgaatggcgaggatggcaagaaaagctggcaacttctatgtacctgcagaacccaaattggcgtttgtcatcagaatcagaggtatcaatggagtgagcccaaaggttcgaaaggtgttgcagcttcttcgccttcgtcaaatcttcaatggaacctttgtgaagctcaacaaggcttcgattaacatgctgaggattgtagagccatatattgcatgggggtaccccaatctgaagtcagtaaatgaactaatctacaagcgtggttatggcaaaatcaataagaagcgaattgctttgacagataacgctttgattgctcgatctcttggtaaatacggcatcatctgcatggaggatttgattcatgagatctatactgttggaaaacgcttcaaagaggcaaataacttcctgtggcccttcaaattgtcttctccacgaggtggaatgaagaaaaagaccacccattttgtagaaggtggagatgctggcaacagggaggaccagatcaacaggcttattagaagaatgaactaaggtgtctaccatgattatttttctaagctggttggttaataaacagtacctgctctcaaacacaaaaacacagggcgggcagacaaaaatacccccgggggggcacaagagaacagcgacacagagtatgtggcacagggggcccataagacgagaggcgcaaaaaacagaccgacaggccgagcgaaaaaaactgcgagggacaacagcatcgggaatagagaagccccactcggcgtcatctcggagcacaagagatcacagcggaacatattatgagataagccaccctgcgagacgtagaacgaaagcaacagaaaagcgacaaagaagaaacaacagagg

SEQ ID NO: 322723 - DNA, 979 bp, Homo sapiens
ggctaggtacgaggcgggtgtgtgaatcggccgaggagagaagaagaaggaggttcctgctgtgccagaaacccttaagaaaaagcgaaggaatttcgcagagctgaagatcaagcgcctgagaaagaagtttgcccaaaagatgcttcgaaaggcaaggaggaagcttatctatgaaaaagcaaagcactatcacaaggaatataggcagatgtacagaactgaaattcgaatggcgaggatggcaagaaaagctggcaacttctatgtacctgcagaacccaaattggcgtttgtcatcagaatcagaggtatcaatggagtgagcccaaaggttcgaaaggtgttgcagcttcttcgccttcgtcaaatcttcaatggaacctttgtgaagctcaacaaggcttcgattaacatgctgaggattgtagagccatatattgcatgggggtaccccaatctgaagtcagtaaatgaactaatctacaagcgtggttatggcaaaatcaataagaagcgaattgctttgacagataacgctttgattgctcgatctcttggtaaatacggcatcatctgcatggaggatttgattcatgagatctatactgttggaaaacgcttcaaagaggcaaataacttcctgtggcccttcaaattgtcttctccacgaggtggaatgaagaaaaagaccacccattttgtagaaggtggagatgctggcaacagggaggaccagatcaacaggcttattagaagaatgaactaaggtgtctaccatgattatttttctaagctggttggttaataaacagtacctgctctcaaagcccggttgaaaaaaaacaacaaagggggcgcaaatccgggggcattagcggccgtttggaagggcgagggggaaaaagggggggaaccggaggaaaggggtgggccctggggatggacccaaccgaaaatgggggggtgaaaaaagatg

SEQ ID NO: 322724 - DNA, 859 bp, Homo sapiens
ttcagcaggacgaggccgggtgtcaatcggccgaggctggaccatggagggtgtagaagagaagaagaaggaggttcctgctgtgccagaaacccttaagaaaaagcgaaggaatttcgcagagctgaagatcaagcgcctgagaaagaagtttgcccaaaagatgcttcgaaaggcaaggaggaagcttatctatgaaaaagcaaagcactatcacaaggaatataggcagatgtacagaactgaaattcgaatggcgaggatggcaagaaaagctggcaacttctatgtacctgcagaacccaaattggcgtttgtcatcagaatcagaggtatcaatggagtgagcccaaaggttcgaaaggtgttgcagcttcttcgccttcgtcaaatcttcaatggaacctttgtgaagctcaacaaggcttcgattaacatgctgaggattgtagagccatatattgcatgggggtaccccaatctgaagtcagtaaatgaactaatctacaagcgtggttatggcaaaatcaataagaagcgaattgctttgacagataacgctttgattgctcgatctcttggtaaatacggcatcatctgcatggaggatttgattcatgagatctatactgttggaaaacgcttcaaagaggcaaataacttcctgtggcccttcaaattgtcttctccacgaggtggaatgaagaaaaagaccacccattttgtagaaggtggagatgctggcaacagggaggaccagatcaacaggcttattagaagaatgaactaagtgtctaccatgattattttttaacgctgcttggtaataacaactgttcactccgctccacctgcctct

SEQ ID NO: 322725 - DNA, 639 bp, Homo sapiens
tctagagtatacccctgccgaaagcgtagtacccaaattggtgttagtacatcagaatcatgaggtatcaatggagtgagcccaaaggttcgaaaggtgttgcagcttcttcgccttcgtcaaatcttcaatggaacctttgtgaagctcaacaaggcttcgattaacatgctgaggattgtagagccatatattgcatgggggtaccccaatctgaagtcagtaaatgaactaatctacaagcgtggttatggccaaagcgtagtacccaactcctctctactcttatccttttatcctctgtctctgcttatcacctctcttgcgtatttctggatctccttccctcctttctcgtccaaatcatgaaatgtttggccttagtcaatgtctatgcccgtcacataacagccgaggcaccgaggcccacagggaagcagctgggagcttggaaacctggtctcttgaatttcaaacctggtttcttacaggtggttgtctggggtgggtggagtggcgacaggatagagctgaaggactatgcaaatgaggaagtaagtcagggcgggctttgagaaggggacccatatcctacaggcaaaaagcaggctaggtgaccttgggtactacgctttggca

SEQ ID NO: 322726 - DNA, 1020 bp, Homo sapiens
tagccggattcggcataacggcggggctctttttccggctggaaccatggagggtgtagaagagaagaagaaggaggttcctgctgtgccagaaacccttaagaaaaagcgaaggaatttcgcagagctgaagatcaagcgcctgagaaagaagtttgcccaaaagatgcttcgaaaggcaaggaggaagcttatctatgaaaaagcaaagcactatcacaaggaatataggcagatgtacagaactgaaattcgaatggcgaggatggcaagaaaagctggcaacttctatgtacctgcagaacccaaattggcgtttgtcatcagaatcagaggtatcaatggagtgagcccaaaggttcgaaaggtgttgcagcttcttcgccttcgtcaaatcttcaatggaacctttgtgaagctcaacaaggcttcgattaacatgctgaggattgtagagccatatattgcatgggggtaccccaatctgaagtcagtaaatgaactaatctacaagcgtggttatggcaaaatcaataagaagcgaattgctttgacagataacgctttgattgctcgatctcttggtaaatacggcatcatctgcatggaggatttgattcatgagatctatactgttggaaaacgcttcaaagaggcaaataacttcctgtggcccttcaaattgtcttctccacgaggtggaatgaagaaaaagaccacccattttgtagaaggtggagatgctggcaacagggaggaccagatcaacaggcttattagaagaatgaactaaggtgtctaccatgattatttttctaagctggttggttaataaacagtacctgctctcaaagaaaacaaaaaatttaaaaaaaaagggggggtccatttggggggggggggagaaaaaagggtttaaaaaggggcaggggtaaaacgggtgttcgggacccctttttttgtcaaagggggaaatggggggcccaaaaaggagggggaaaaattgagaaacgggacgag

SEQ ID NO: 322727 - DNA, 1138 bp, Homo sapiens
tagccggattcggcataacggcggggctctttttccggctggaaccatggagggtgtagaagagaagaagaaggaggttcctgctgtgccagaaacccttaagaaaaagcgaaggaatttcgcagagctgaagatcaagcgcctgagaaagaagtttgcccaaaagatgcttcgaaaggcaaggaggaagcttatctatgaaaaagcaaagcactatcacaaggaatataggcagatgtacagaactgaaattcgaatggcgaggatggcaagaaaagctggcaacttctatgtacctgcagaacccaaattggcgtttgtcatcagaatcagaggtatcaatggagtgagcccaaaggttcgaaaggtgttgcagcttcttcgccttcgtcaaatcttcaatggaacctttgtgaagctcaacaaggcttcgattaacatgctgaggattgtagagccatatattgcatgggggtaccccaatctgaagtcagtaaatgaactaatctacaagcgtggttatggcaaaatcaataagaagcgaattgctttgacagataacgctttgattgctcgatctcttggtaaatacggcatcatctgcatggaggatttgattcatgagatctatactgttggaaaacgcttcaaagaggcaaataacttcctgtggcccttcaaattgtcttctccacgaggtggaatgaagaaaaagaccacccattttgtagaaggtggagatgctggcaacagggaggaccagatcaacaggcttattagaagaatgaactaaggtgtctaccatgattatttttctaagctggttggttaataaacagtacctgctctcaaacacaaaaacacagggcgggcagacaaaaatacccccgggggggcacaagagaacagcgacacagagtatgtggcacagggggcccataagacgagaggcgcaaaaaacagaccgacaggccgagcgaaaaaaactgcgagggacaacagcatcgggaatagagaagccccactcggcgtcatctcggagcacaagagatcacagcggaacatattatgagataagccaccctgcgagacgtagaacgaaagcaacagaaaagcgacaaagaagaaacaacagagg

SEQ ID NO: 322728 - DNA, 1388 bp, Homo sapiens
  misc_feature (15)..(15): n is a, c, g, or t
  misc_feature (54)..(54): n is a, c, g, or t
  misc_feature (74)..(74): n is a, c, g, or t
ggtcgcccttgcaancccattggctaaccgctgcattacatccgaaagtgactngcgccatttgtgggaaaccngccaattcggccattatggccgggggaaccatggagggtgtagaagagaagaagaaggaggttcctgctgtgccagaaacccttaagaaaaagcgaaggaatttcgcagagctgaagatcaagcgcctgagaaagaagtttgcccaaaagatgcttcgaaaggcaaggaggaagcttatctatgaaaaagcaaagcactatcacaaggaatataggcagatgtacagaactgaaattcgaatggcgaggatggcaagaaaagctggcaacttctatgtacctgcagaacccaaattggcgtttgtcatcagaatcagaggtatcaatggagtgagcccaaaggttcgaaaggtgttgcagcttcttcgccttcgtcaaatcttcaatggaacctttgtgaagctcaacaaggcttcgattaacatgctgaggattgtagagccatatattgcatgggggtaccccaatctgaagtcagtaaatgaactaatctacaagcgtggttatggcaaaatcaataagaagcgaattgctttgacagataacgctttgattgctcgatctcttggtaaatacggcatcatctgcatggaggatttgattcatgagatctatactgttggaaaacgcttcaaagaggcaaataacttcctgtggcccttcaaattgtcttctccacgaggtggaatgaagaaaaagaccacccattttgtagaaggtggagatgctggcaacagggaggaccagatcaacaggcttattagaagaatgaactaaggtgtctaccatgattatttttctaagctggttggttaataaacagtacctgctctcaaattgaaatatattgttgtatttgtgatttgttgttgttgttgttagcctgcctctgtcttcccttaactactgtggcaagtgtggtgtgtgataaaattaagccaaatcaacagcccatttcgtgcaaaatcagggtcgagtctgtgtgaaagacatctcttgggtttttaaaaggcttttctatacaaaagattttaattttttgttttttaactgtgctgagtgattcgaaatgggtttattctaagaaagcctgtttcacaagcatttgtacatgatttgtcggtaaggtaatccaactttggtttatggaaaaaattgaatttagttgctaaaatttatttctcgggccttcgcttgtttataaactgccatgtaaatgtgttgttttccttttgcattccatttttgtgttcttgttttgcatcttttgccatacttacgtgagttactaataattgttacatactgtgggta

SEQ ID NO: 322729 - DNA, 2538 bp, Homo sapiens
  misc_feature (1238)..(1238): n is a, c, g, or t
tgggggaggagccccgcagcctccacctacaggggcgtcccctaaggggacggaggccgcatgggccgccgagccgggaaatctccgcccccagctggagcggctgtgcgggctgcgtagcggtgctgggtcgggccgacgtgccacccacccggagccgggatgccagaagggccgttggtgaggaaatttcaccatttggtctccccctttgtgggtcagcaggtggtcaagacagggggcagcagtaagaagctacagcccgccagcctgcagtctctgtggctccaggacacccaggtccatggaaagaaattattccttagatttgatctagatgaagaaatggggccccctggcagcagcccaacaccagagcctccacaaaaagaagtgcagaaggaaggggctgcggacccaaagcaggtcggggagcccagcgggcagaagacccttgatggatcctcacggtctgcagagctcgtcccccagggcgaggatgattctgagtatttggagagagacgcccctgcaggagatgctgggaggtggctgcgtgtcagctttggtttgtttggcagcgtttgggtgaacgatttctccagagccaagaaagccaacaagaggggggactggagggacccttccccgaggttggtcctgcactttggtggtggtggcttcctggcattttataattgtcagttgtcttggagctcttccccagtggtcacacccacctgtgacatcctgtctgagaagttccatcgaggacaagccttagaagctctaggccaggctcagcctgtctgctatacactgctggaccagagatacttctcagggctagggaacatcattaagaatgaagccttgtacagagctgggatccatcccctttctctcggttcagtcctgagtgcctcgcgtcgggaggtcctggtggatcacgtggtggagttcagtacagcctggctgcagggcaagttccaaggcagaccgcagcacacacaggtctaccagaaagaacagtgccctgctggccaccaggtcatgaaggaggcgtttgggcccgaagatgggttacagaggctcacctggtggtgcccgcagtgccagccccagttgtcagaggagccagagcagtgccagttctcctaaggagctggtggtgctcctcatggaaccttgccgttggggaacctgacgtctaagtgtccacatcactcgagacgtanattatggctgaatcatccgctaccttcacgagagaagaagaaggaggttcctgctgtgccagaaacccttaagaaaaagcgaaggaatttcgcagagctgaagatcaagcgcctgagaaagaagtttgcccaaaagatgcttcgaaaggcaaggaggaagcttatctatgaaaaagcaaagcactatcacaaggaatataggcagatgtacagaactgaaattcgaatggcgaggatggcaagaaaagctggcaacttctatgtacctgcagaacccaaattggcgtttgtcatcagaatcagaggtatcaatggagtgagcccaaaggttcgaaaggtgttgcagcttcttcgccttcgtcaaatcttcaatggaacctttgtgaagctcaacaaggcttcgattaacatgctgaggattgtagagccatatattgcatgggggtaccccaatctgaagtcagtaaatgaactaatctacaagcgtggttatggcaaaatcaataagaagcgaattgctttgacagataacgctttgattgctcgatctcttggtaaatacggcatcatctgcatggaggatttgattcatgagatctatactgttggaaaacgcttcaaagaggcaaataacttcctgtggcccttcaaattgtcttctccacgaggtggaatgaagaaaaagaccacccattttgtagaaggtggagatgctggcaacagggaggaccagatcaacaggcttattagaagaatgaactaaggtgtctaccatgattatttttctaagctggttggttaataaacagtacctgctctcaaattgaaatatattgttgtatttgtgatttgttgttgttgttgttagcctgcctctgtcttcccttaactactgtggcaagtgtggtgtgtgataaaattaagccaaatcaacagcccatttcgtgcaaaatcagggtcgagtctgtgtgaaagacatctcttgggtttttaaaaggcttttctatacaaaagattttaattttttgttttttaactgtgctgagtgattcgaaatgggtttattctaagaaagcctgtttcacaagcatttgtacatgatttgtcggtaaggtaatccaactttggtttatggaaaaaattgaatttagttgctaaaatttatttctcgggccttcgcttgtttataaactgccatgtaaatgtgttgttttccttttgcattccatttttgtgttcttgttttgcatcttttgccatacttacgtgagttactaataattgttacatactgtgggta

SEQ ID NO: 322730 - DNA, 2700 bp, Homo sapiens
  misc_feature (1400)..(1400): n is a, c, g, or t
tgggggaggagccccgcagcctccacctacaggggcgtcccctaaggggacggaggccgcatgggccgccgagccgggaaatctccgcccccagctggagcggctgtgcgggctgcgtagcggtgctgggtcgggccgacgtgccacccacccggagccggctgttgcagaggcggcttgcttcccacctgtccatctccataaaaatccctaaacgaaacatgcccacgtgtccggagattttcaggacttggtgcatttcagatgaaggcttttccagaagcttccccgtagaagaggatcaggcatccaactggttaagggatgccagaagggccgttggtgaggaaatttcaccatttggtctccccctttgtgggtcagcaggtggtcaagacagggggcagcagtaagaagctacagcccgccagcctgcagtctctgtggctccaggacacccaggtccatggaaagaaattattccttagatttgatctagatgaagaaatggggccccctggcagcagcccaacaccagagcctccacaaaaagaagtgcagaaggaaggggctgcggacccaaagcaggtcggggagcccagcgggcagaagacccttgatggatcctcacggtctgcagagctcgtcccccagggcgaggatgattctgagtatttggagagagacgcccctgcaggagatgctgggaggtggctgcgtgtcagctttggtttgtttggcagcgtttgggtgaacgatttctccagagccaagaaagccaacaagaggggggactggagggacccttccccgaggttggtcctgcactttggtggtggtggcttcctggcattttataattgtcagttgtcttggagctcttccccagtggtcacacccacctgtgacatcctgtctgagaagttccatcgaggacaagccttagaagctctaggccaggctcagcctgtctgctatacactgctggaccagagatacttctcagggctagggaacatcattaagaatgaagccttgtacagagctgggatccatcccctttctctcggttcagtcctgagtgcctcgcgtcgggaggtcctggtggatcacgtggtggagttcagtacagcctggctgcagggcaagttccaaggcagaccgcagcacacacaggtctaccagaaagaacagtgccctgctggccaccaggtcatgaaggaggcgtttgggcccgaagatgggttacagaggctcacctggtggtgcccgcagtgccagccccagttgtcagaggagccagagcagtgccagttctcctaaggagctggtggtgctcctcatggaaccttgccgttggggaacctgacgtctaagtgtccacatcactcgagacgtanattatggctgaatcatccgctaccttcacgagagaagaagaaggaggttcctgctgtgccagaaacccttaagaaaaagcgaaggaatttcgcagagctgaagatcaagcgcctgagaaagaagtttgcccaaaagatgcttcgaaaggcaaggaggaagcttatctatgaaaaagcaaagcactatcacaaggaatataggcagatgtacagaactgaaattcgaatggcgaggatggcaagaaaagctggcaacttctatgtacctgcagaacccaaattggcgtttgtcatcagaatcagaggtatcaatggagtgagcccaaaggttcgaaaggtgttgcagcttcttcgccttcgtcaaatcttcaatggaacctttgtgaagctcaacaaggcttcgattaacatgctgaggattgtagagccatatattgcatgggggtaccccaatctgaagtcagtaaatgaactaatctacaagcgtggttatggcaaaatcaataagaagcgaattgctttgacagataacgctttgattgctcgatctcttggtaaatacggcatcatctgcatggaggatttgattcatgagatctatactgttggaaaacgcttcaaagaggcaaataacttcctgtggcccttcaaattgtcttctccacgaggtggaatgaagaaaaagaccacccattttgtagaaggtggagatgctggcaacagggaggaccagatcaacaggcttattagaagaatgaactaaggtgtctaccatgattatttttctaagctggttggttaataaacagtacctgctctcaaattgaaatatattgttgtatttgtgatttgttgttgttgttgttagcctgcctctgtcttcccttaactactgtggcaagtgtggtgtgtgataaaattaagccaaatcaacagcccatttcgtgcaaaatcagggtcgagtctgtgtgaaagacatctcttgggtttttaaaaggcttttctatacaaaagattttaattttttgttttttaactgtgctgagtgattcgaaatgggtttattctaagaaagcctgtttcacaagcatttgtacatgatttgtcggtaaggtaatccaactttggtttatggaaaaaattgaatttagttgctaaaatttatttctcgggccttcgcttgtttataaactgccatgtaaatgtgttgttttccttttgcattccatttttgtgttcttgttttgcatcttttgccatacttacgtgagttactaataattgttacatactgtgggta

SEQ ID NO: 322731 - DNA, 2199 bp, Homo sapiens
ttcagcggatcaggtccgtccgtgaggcctccttgtaggtgctgttgtccaggatgctctggaaggtcaagccatgctccggagcatactgttccttgagtggaccagagagccggaggacagcacagacatcagctccaagtctgctctgcagcgcctcggtcacgaagtccgtcccggatgtcctcttgccgctgaacagcagtaccagccgcggggcagcctcccagcggggccatgggctcgccacgcctcgcgatgcctgaagctgacacttctccctacccctaaaatcgggacaccgcgcggaatggacgcggccactaagcggagcgacgacaaggacctcgcggagcggcgaaaggggtgtagtctgcgactaccgcggcagggagccgggagggcggccaaaagtgacttcgaattgcagctagccgtttggaacgtggcccaagaggctctcattttcctggctggaaccgtcgccgcggtgcttgcctgcggtcctggtcagccgttgccctcccgccgggcgggcgaagactggtgcatgctgggatttgtagttcgtccccatgaggctcgtcctgggaacattatggggaggaacggagcctaatcctgtcagcgcagcctggggattaggacccggagttgccaaggtgtcagcactctttgctcttgaattgattaaaaagtctaatcaaatgcatatattttcttcaaacaagttttacccgaaagtttgttgaaagaggctaaatcagggagttctttgcgtctgcaaggcggctttttagttctggattcttttccggcttattctaagacacctatgagtcgtggggcttctctcgcgaagtctttaagtggacagtacgcatgcgccaacggcctctttttccggctggaaccatggagggtgtagaagagaagaagaaggaggttcctgctgtgccagaaacccttaagaaaaagcgaaggaatttcgcagagctgaagatcaagcgcctgagaaagaagtttgcccaaaagatgcttcgaaaggcaaggaggaagcttatctatgaaaaagcaaagcactatcacaaggaatataggcagatgtacagaactgaaattcgaatggcgaggatggcaagaaaagctggcaacttctatgtacctgcagaacccaaattggcgtttgtcatcagaatcagaggtatcaatggagtgagcccaaaggttcgaaaggtgttgcagcttcttcgccttcgtcaaatcttcaatggaacctttgtgaagctcaacaaggcttcgattaacatgctgaggattgtagagccatatattgcatgggggtaccccaatctgaagtcagtaaatgaactaatctacaagcgtggttatggcaaaatcaataagaagcgaattgctttgacagataacgctttgattgctcgatctcttggtaaatacggcatcatctgcatggaggatttgattcatgagatctatactgttggaaaacgcttcaaagaggcaaataacttcctgtggcccttcaaattgtcttctccacgaggtggaatgaagaaaaagaccacccattttgtagaaggtggagatgctggcaacagggaggaccagatcaacaggcttattagaagaatgaactaaggtgtctaccatgattatttttctaagctggttggttaataaacagtacctgctctcaaattgaaatatattgttgtatttgtgatttgttgttgttgttgttagcctgcctctgtcttcccttaactactgtggcaagtgtggtgtgtgataaaattaagccaaatcaacagcccatttcgtgcaaaatcagggtcgagtctgtgtgaaagacatctcttgggtttttaaaaggcttttctatacaaaagattttaattttttgttttttaactgtgctgagtgattcgaaatgggtttattctaagaaagcctgtttcacaagcatttgtacatgatttgtcggtaaggtaatccaactttggtttatggaaaaaattgaatttagttgctaaaatttatttctcgggccttcgcttgtttataaactgccatgtaaatgtgttgttttccttttgcattccatttttgtgttcttgttttgcatcttttgccatacttacgtgagttactaataattgttacatactgtgggta

SEQ ID NO: 322732 - DNA, 931 bp, Homo sapiens
  misc_feature (845)..(845): n is a, c, g, or t
tagccggattcggcataacggcggggctctttttccggctggaaccatggagggtgtagaagagaagaagaaggaggttcctgctgtgccagaaacccttaagaaaaagcgaaggaatttcgcagagctgaagatcaagcgcctgagaaagaagtttgcccaaaagatgcttcgaaaggcaaggaggaagcttatctatgaaaaagcaaagcactatcacaaggaatataggcagatgtacagaactgaaattcgaatggcgaggatggcaagaaaagctggcaacttctatgtacctgcagaacccaaattggcgtttgtcatcagaatcagaggtatcaatggagtgagcccaaaggttcgaaaggtgttgcagcttcttcgccttcgtcaaatcttcaatggaacctttgtgaagctcaacaaggcttcgattaacatgctgaggattgtagagccatatattgcatgggggtaccccaatctgaagtcagtaaatgaactaatctacaagcgtggttatggcaaaatcaataagaagcgaattgctttgacagataacgctttgattgctcgatctcttggtaaatacggcatcatctgcatggaggatttgattcatgagatctatactgttggaaaacgcttcaaagaggcaaataacttcctgtggcccttcaaattgtcttctccacgaggtggaatgaagaaaaagaccacccattttgtagaaggtggagatgctggcaacagggaggaccagatcaacaggcttattagaagaatgaactaagtctaccatgataattttctaagctggtggtaataacaggtactgcctctcnaattggaaaaaaaaaaaacccgggcatttgcgggggaaagtttaagggcagcataggtctgcctttaaaagaatggaccaagaaga

SEQ ID NO: 322733 - DNA, 1190 bp, Homo sapiens
tagccggattcggcataacggcggggctctttttccggctggaaccatggagggtgtagaagagaagaagaaggaggttcctgctgtgccagaaacccttaagaaaaagcgaaggaatttcgcagagctgaagatcaagcgcctgagaaagaagtttgcccaaaagatgcttcgaaaggcaaggaggaagcttatctatgaaaaagcaaagcactatcacaaggaatataggcagatgtacagaactgaaattcgaatggcgaggatggcaagaaaagctggcaacttctatgtacctgcagaacccaaattggcgtttgtcatcagaatcagaggtatcaatggagtgagcccaaaggttcgaaaggtgttgcagcttcttcgccttcgtcaaatcttcaatggaacctttgtgaagctcaacaaggcttcgattaacatgctgaggattgtagagccatatattgcatgggggtaccccaatctgaagtcagtaaatgaactaatctacaagcgtggttatggcaaaatcaataagaagcgaattgctttgacagataacgctttgattgctcgatctcttggtaaatacggcatcatctgcatggaggatttgattcatgagatctatactgttggaaaacgcttcaaagaggcaaataacttcctgtggcccttcaaattgtcttctccacgaggtggaatgaagaaaaagaccacccattttgtagaaggtggagatgctggcaacagggaggaccagatcaacaggcttattagaagaatgaactaaggtgagagacctcatcctgagaaaggttgagttaatgttagagtataagtggtggtaatcttgaatacttttcccattaaatattgatgggggtttgaattttaatcagtgcttttgtggggagtgggggtcaactatcttaatgattacagttggtttgtttactgcttttgaggacctttctggaggaaaggaaaagcctgttttggggagtctttaaagatggaaattgggtggtcttaaaaatgtaaactcaatcattactttataactgcctagtttatgttaattgttagctgcctaaagtgttttctaatggttttcttttttcctttcaggtgtctaccatgattatttttctaagctggttggttaataaacagtacctgctctcaaa

SEQ ID NO: 322734 - DNA, 1327 bp, Homo sapiens
aaactgatgaagaaagtatttggcaaagttcttcaaagccaccatggagggtgtagaagagaagaagaaggaggttcctgctgtgccagaaacccttaagaaaaagcgaaggaatttcgcagagctgaagatcaagcgcctgagaaagaagtttgcccaaaagatgcttcgaaaggcaaggaggaagcttatctatgaaaaagcaaagcactatcacaaggaatataggcagatgtacagaactgaaattcgaatggcgaggatggcaagaaaagctggcaacttctatgtacctgcagaacccaaattggcgtttgtcatcagaatcagaggtatcaatggagtgagcccaaaggttcgaaaggtgttgcagcttcttcgccttcgtcaaatcttcaatggaacctttgtgaagctcaacaaggcttcgattaacatgctgaggattgtagagccatatattgcatgggggtaccccaatctgaagtcagtaaatgaactaatctacaagcgtggttatggcaaaatcaataagaagcgaattgctttgacagataacgctttgattgctcgatctcttggtaaatacggcatcatctgcatggaggatttgattcatgagatctatactgttggaaaacgcttcaaagaggcaaataacttcctgtggcccttcaaattgtcttctccacgaggtggaatgaagaaaaagaccacccattttgtagaaggtggagatgctggcaacagggaggaccagatcaacaggcttattagaagaatgaactaaggtgtctaccatgattatttttctaagctggttggttaataaacagtacctgctctcaaattgaaatatattgttgtatttgtgatttgttgttgttgttgttagcctgcctctgtcttcccttaactactgtggcaagtgtggtgtgtgataaaattaagccaaatcaacagcccatttcgtgcaaaatcagggtcgagtctgtgtgaaagacatctcttgggtttttaaaaggcttttctatacaaaagattttaattttttgttttttaactgtgctgagtgattcgaaatgggtttattctaagaaagcctgtttcacaagcatttgtacatgatttgtcggtaaggtaatccaactttggtttatggaaaaaattgaatttagttgctaaaatttatttctcgggccttcgcttgtttataaactgccatgtaaatgtgttgttttccttttgcattccatttttgtgttcttgttttgcatcttttgccatacttacgtgagttactaataattgttacatactgtgggta

SEQ ID NO: 322735 - DNA, 1327 bp, Homo sapiens
ttcagcaggacgaggccgggtgtcaatcggccgaggctggaccatggagggtgtagaagagaagaagaaggaggttcctgctgtgccagaaacccttaagaaaaagcgaaggaatttcgcagagctgaagatcaagcgcctgagaaagaagtttgcccaaaagatgcttcgaaaggcaaggaggaagcttatctatgaaaaagcaaagcactatcacaaggaatataggcagatgtacagaactgaaattcgaatggcgaggatggcaagaaaagctggcaacttctatgtacctgcagaacccaaattggcgtttgtcatcagaatcagaggtatcaatggagtgagcccaaaggttcgaaaggtgttgcagcttcttcgccttcgtcaaatcttcaatggaacctttgtgaagctcaacaaggcttcgattaacatgctgaggattgtagagccatatattgcatgggggtaccccaatctgaagtcagtaaatgaactaatctacaagcgtggttatggcaaaatcaataagaagcgaattgctttgacagataacgctttgattgctcgatctcttggtaaatacggcatcatctgcatggaggatttgattcatgagatctatactgttggaaaacgcttcaaagaggcaaataacttcctgtggcccttcaaattgtcttctccacgaggtggaatgaagaaaaagaccacccattttgtagaaggtggagatgctggcaacagggaggaccagatcaacaggcttattagaagaatgaactaaggtgtctaccatgattatttttctaagctggttggttaataaacagtacctgctctcaaattgaaatatattgttgtatttgtgatttgttgttgttgttgttagcctgcctctgtcttcccttaactactgtggcaagtgtggtgtgtgataaaattaagccaaatcaacagcccatttcgtgcaaaatcagggtcgagtctgtgtgaaagacatctcttgggtttttaaaaggcttttctatacaaaagattttaattttttgttttttaactgtgctgagtgattcgaaatgggtttattctaagaaagcctgtttcacaagcatttgtacatgatttgtcggtaaggtaatccaactttggtttatggaaaaaattgaatttagttgctaaaatttatttctcgggccttcgcttgtttataaactgccatgtaaatgtgttgttttccttttgcattccatttttgtgttcttgttttgcatcttttgccatacttacgtgagttactaataattgttacatactgtgggta

SEQ ID NO: 322736 - DNA, 1306 bp, Homo sapiens
ggctaggtacgaggcgggtgtgtgaatcggccgaggagagaagaagaaggaggttcctgctgtgccagaaacccttaagaaaaagcgaaggaatttcgcagagctgaagatcaagcgcctgagaaagaagtttgcccaaaagatgcttcgaaaggcaaggaggaagcttatctatgaaaaagcaaagcactatcacaaggaatataggcagatgtacagaactgaaattcgaatggcgaggatggcaagaaaagctggcaacttctatgtacctgcagaacccaaattggcgtttgtcatcagaatcagaggtatcaatggagtgagcccaaaggttcgaaaggtgttgcagcttcttcgccttcgtcaaatcttcaatggaacctttgtgaagctcaacaaggcttcgattaacatgctgaggattgtagagccatatattgcatgggggtaccccaatctgaagtcagtaaatgaactaatctacaagcgtggttatggcaaaatcaataagaagcgaattgctttgacagataacgctttgattgctcgatctcttggtaaatacggcatcatctgcatggaggatttgattcatgagatctatactgttggaaaacgcttcaaagaggcaaataacttcctgtggcccttcaaattgtcttctccacgaggtggaatgaagaaaaagaccacccattttgtagaaggtggagatgctggcaacagggaggaccagatcaacaggcttattagaagaatgaactaaggtgtctaccatgattatttttctaagctggttggttaataaacagtacctgctctcaaattgaaatatattgttgtatttgtgatttgttgttgttgttgttagcctgcctctgtcttcccttaactactgtggcaagtgtggtgtgtgataaaattaagccaaatcaacagcccatttcgtgcaaaatcagggtcgagtctgtgtgaaagacatctcttgggtttttaaaaggcttttctatacaaaagattttaattttttgttttttaactgtgctgagtgattcgaaatgggtttattctaagaaagcctgtttcacaagcatttgtacatgatttgtcggtaaggtaatccaactttggtttatggaaaaaattgaatttagttgctaaaatttatttctcgggccttcgcttgtttataaactgccatgtaaatgtgttgttttccttttgcattccatttttgtgttcttgttttgcatcttttgccatacttacgtgagttactaataattgttacatactgtgggta

SEQ ID NO: 322737 - DNA, 1348 bp, Homo sapiens
ccgggggtttttttatataaaaagcgtggtacggcgatctggattgtcgacagcgtcgcatgagggtgtagagaaagaagagaagaagaaggaggttcctgctgtgccagaaacccttaagaaaaagcgaaggaatttcgcagagctgaagatcaagcgcctgagaaagaagtttgcccaaaagatgcttcgaaaggcaaggaggaagcttatctatgaaaaagcaaagcactatcacaaggaatataggcagatgtacagaactgaaattcgaatggcgaggatggcaagaaaagctggcaacttctatgtacctgcagaacccaaattggcgtttgtcatcagaatcagaggtatcaatggagtgagcccaaaggttcgaaaggtgttgcagcttcttcgccttcgtcaaatcttcaatggaacctttgtgaagctcaacaaggcttcgattaacatgctgaggattgtagagccatatattgcatgggggtaccccaatctgaagtcagtaaatgaactaatctacaagcgtggttatggcaaaatcaataagaagcgaattgctttgacagataacgctttgattgctcgatctcttggtaaatacggcatcatctgcatggaggatttgattcatgagatctatactgttggaaaacgcttcaaagaggcaaataacttcctgtggcccttcaaattgtcttctccacgaggtggaatgaagaaaaagaccacccattttgtagaaggtggagatgctggcaacagggaggaccagatcaacaggcttattagaagaatgaactaaggtgtctaccatgattatttttctaagctggttggttaataaacagtacctgctctcaaattgaaatatattgttgtatttgtgatttgttgttgttgttgttagcctgcctctgtcttcccttaactactgtggcaagtgtggtgtgtgataaaattaagccaaatcaacagcccatttcgtgcaaaatcagggtcgagtctgtgtgaaagacatctcttgggtttttaaaaggcttttctatacaaaagattttaattttttgttttttaactgtgctgagtgattcgaaatgggtttattctaagaaagcctgtttcacaagcatttgtacatgatttgtcggtaaggtaatccaactttggtttatggaaaaaattgaatttagttgctaaaatttatttctcgggccttcgcttgtttataaactgccatgtaaatgtgttgttttccttttgcattccatttttgtgttcttgttttgcatcttttgccatacttacgtgagttactaataattgttacatactgtgggta

SEQ ID NO: 322738 - DNA, 2061 bp, Homo sapiens
  misc_feature (1238)..(1238): n is a, c, g, or t
tgggggaggagccccgcagcctccacctacaggggcgtcccctaaggggacggaggccgcatgggccgccgagccgggaaatctccgcccccagctggagcggctgtgcgggctgcgtagcggtgctgggtcgggccgacgtgccacccacccggagccgggatgccagaagggccgttggtgaggaaatttcaccatttggtctccccctttgtgggtcagcaggtggtcaagacagggggcagcagtaagaagctacagcccgccagcctgcagtctctgtggctccaggacacccaggtccatggaaagaaattattccttagatttgatctagatgaagaaatggggccccctggcagcagcccaacaccagagcctccacaaaaagaagtgcagaaggaaggggctgcggacccaaagcaggtcggggagcccagcgggcagaagacccttgatggatcctcacggtctgcagagctcgtcccccagggcgaggatgattctgagtatttggagagagacgcccctgcaggagatgctgggaggtggctgcgtgtcagctttggtttgtttggcagcgtttgggtgaacgatttctccagagccaagaaagccaacaagaggggggactggagggacccttccccgaggttggtcctgcactttggtggtggtggcttcctggcattttataattgtcagttgtcttggagctcttccccagtggtcacacccacctgtgacatcctgtctgagaagttccatcgaggacaagccttagaagctctaggccaggctcagcctgtctgctatacactgctggaccagagatacttctcagggctagggaacatcattaagaatgaagccttgtacagagctgggatccatcccctttctctcggttcagtcctgagtgcctcgcgtcgggaggtcctggtggatcacgtggtggagttcagtacagcctggctgcagggcaagttccaaggcagaccgcagcacacacaggtctaccagaaagaacagtgccctgctggccaccaggtcatgaaggaggcgtttgggcccgaagatgggttacagaggctcacctggtggtgcccgcagtgccagccccagttgtcagaggagccagagcagtgccagttctcctaaggagctggtggtgctcctcatggaaccttgccgttggggaacctgacgtctaagtgtccacatcactcgagacgtanattatggctgaatcatccgctaccttcacgagagaagaagaaggaggttcctgctgtgccagaaacccttaagaaaaagcgaaggaatttcgcagagctgaagatcaagcgcctgagaaagaagtttgcccaaaagatgcttcgaaaggcaaggaggaagcttatctatgaaaaagcaaagcactatcacaaggaatataggcagatgtacagaactgaaattcgaatggcgaggatggcaagaaaagctggcaacttctatgtacctgcagaacccaaattggcgtttgtcatcagaatcagaggtatcaatggagtgagcccaaaggttcgaaaggtgttgcagcttcttcgccttcgtcaaatcttcaatggaacctttgtgaagctcaacaaggcttcgattaacatgctgaggattgtagagccatatattgcatgggggtaccccaatctgaagtcagtaaatgaactaatctacaagcgtggttatggcaaaatcaataagaagcgaattgctttgacagataacgctttgattgctcgatctcttggtaaatacggcatcatctgcatggaggatttgattcatgagatctatactgttggaaaacgcttcaaagaggcaaataacttcctgtggcccttcaaattgtcttctccacgaggtggaatgaagaaaaagaccacccattttgtagaaggtggagatgctggcaacagggaggaccagatcaacaggcttattagaagaatgaactaaggtgtctaccatgattatttttctaagctggttggttaataaacagtacctgctctcaaa

SEQ ID NO: 322739 - DNA, 1274 bp, Homo sapiens
gtgctgggtgatctagaggatccgagagagagaaggggaggtctgtgtgcagaaccttagaaaaggaaggattcgagagtgagatcagcgctgagaagagttgccaaaagttgcttcgaaaggcaaggaggaagcttatctatgaaaaagcaaagcactatcacaaggaatataggcagatgtacagaactgaaattcgaatggcgaggatggcaagaaaagctggcaacttctatgtacctgcagaacccaaattggcgtttgtcatcagaatcagaggtatcaatggagtgagcccaaaggttcgaaaggtgttgcagcttcttcgccttcgtcaaatcttcaatggaacctttgtgaagctcaacaaggcttcgattaacatgctgaggattgtagagccatatattgcatgggggtaccccaatctgaagtcagtaaatgaactaatctacaagcgtggttatggcaaaatcaataagaagcgaattgctttgacagataacgctttgattgctcgatctcttggtaaatacggcatcatctgcatggaggatttgattcatgagatctatactgttggaaaacgcttcaaagaggcaaataacttcctgtggcccttcaaattgtcttctccacgaggtggaatgaagaaaaagaccacccattttgtagaaggtggagatgctggcaacagggaggaccagatcaacaggcttattagaagaatgaactaaggtgtctaccatgattatttttctaagctggttggttaataaacagtacctgctctcaaattgaaatatattgttgtatttgtgatttgttgttgttgttgttagcctgcctctgtcttcccttaactactgtggcaagtgtggtgtgtgataaaattaagccaaatcaacagcccatttcgtgcaaaatcagggtcgagtctgtgtgaaagacatctcttgggtttttaaaaggcttttctatacaaaagattttaattttttgttttttaactgtgctgagtgattcgaaatgggtttattctaagaaagcctgtttcacaagcatttgtacatgatttgtcggtaaggtaatccaactttggtttatggaaaaaattgaatttagttgctaaaatttatttctcgggccttcgcttgtttataaactgccatgtaaatgtgttgttttccttttgcattccatttttgtgttcttgttttgcatcttttgccatacttacgtgagttactaataattgttacatactgtgggta

SEQ ID NO: 322740 - DNA, 1324 bp, Homo sapiens
  misc_feature (39)..(39): n is a, c, g, or t
cttgacttacgtgtaaaagcagctggtcgctcggatatntccccccccggggggatatcgtcgacacctcgactgaggtgagagagagagagtctgcttgcgaactagaaagcgagattcgcaagcgagatcaagcgcctgagaagaaattgcccaaaagatgcttcgaaaggcaaggaggaagcttatctatgaaaaagcaaagcactatcacaaggaatataggcagatgtacagaactgaaattcgaatggcgaggatggcaagaaaagctggcaacttctatgtacctgcagaacccaaattggcgtttgtcatcagaatcagaggtatcaatggagtgagcccaaaggttcgaaaggtgttgcagcttcttcgccttcgtcaaatcttcaatggaacctttgtgaagctcaacaaggcttcgattaacatgctgaggattgtagagccatatattgcatgggggtaccccaatctgaagtcagtaaatgaactaatctacaagcgtggttatggcaaaatcaataagaagcgaattgctttgacagataacgctttgattgctcgatctcttggtaaatacggcatcatctgcatggaggatttgattcatgagatctatactgttggaaaacgcttcaaagaggcaaataacttcctgtggcccttcaaattgtcttctccacgaggtggaatgaagaaaaagaccacccattttgtagaaggtggagatgctggcaacagggaggaccagatcaacaggcttattagaagaatgaactaaggtgtctaccatgattatttttctaagctggttggttaataaacagtacctgctctcaaattgaaatatattgttgtatttgtgatttgttgttgttgttgttagcctgcctctgtcttcccttaactactgtggcaagtgtggtgtgtgataaaattaagccaaatcaacagcccatttcgtgcaaaatcagggtcgagtctgtgtgaaagacatctcttgggtttttaaaaggcttttctatacaaaagattttaattttttgttttttaactgtgctgagtgattcgaaatgggtttattctaagaaagcctgtttcacaagcatttgtacatgatttgtcggtaaggtaatccaactttggtttatggaaaaaattgaatttagttgctaaaatttatttctcgggccttcgcttgtttataaactgccatgtaaatgtgttgttttccttttgcattccatttttgtgttcttgttttgcatcttttgccatacttacgtgagttactaataattgttacatactgtgggta

SEQ ID NO: 322741 - DNA, 1778 bp, Homo sapiens
  misc_feature (1692)..(1692): n is a, c, g, or t
  misc_feature (1694)..(1697): n is a, c, g, or t
  misc_feature (1700)..(1700): n is a, c, g, or t
  misc_feature (1706)..(1706): n is a, c, g, or t
  misc_feature (1708)..(1708): n is a, c, g, or t
  misc_feature (1711)..(1711): n is a, c, g, or t
  misc_feature (1718)..(1718): n is a, c, g, or t
  misc_feature (1723)..(1723): n is a, c, g, or t
ttcagcggatcaggtccgtccgtgaggcctccttgtaggtgctgttgtccaggatgctctggaaggtcaagccatgctccggagcatactgttccttgagtggaccagagagccggaggacagcacagacatcagctccaagtctgctctgcagcgcctcggtcacgaagtccgtcccggatgtcctcttgccgctgaacagcagtaccagccgcggggcagcctcccagcggggccatgggctcgccacgcctcgcgatgcctgaagctgacacttctccctacccctaaaatcgggacaccgcgcggaatggacgcggccactaagcggagcgacgacaaggacctcgcggagcggcgaaaggggtgtagtctgcgactaccgcggcagggagccgggagggcggccaaaagtgacttcgaattgcagctagccgtttggaacgtggcccaagaggctctcattttcctggctggaaccgtcgccgcggtgcttgcctgcggtcctggtcagccgttgccctcccgccgggcgggcgaagactggtgcatgctgggatttgtagttcgtccccatgaggctcgtcctgggaacattatggggaggaacggagcctaatcctgtcagcgcagcctggggattaggacccggagttgccaaggtgtcagcactctttgctcttgaattgattaaaaagtctaatcaaatgcatatattttcttcaaacaagttttacccgaaagtttgttgaaagaggctaaatcagggagttctttgcgtctgcaaggcggctttttagttctggattcttttccggcttattctaagacacctatgagtcgtggggcttctctcgcgaagtctttaagtggacagtacgcatgcgccaacggcctctttttccggctggaaccatggagggtgtagaagagaagaagaaggaggttcctgctgtgccagaaacccttaagaaaaagcgaaggaatttcgcagagctgaagatcaagcgcctgagaaagaagtttgcccaaaagatgcttcgaaaggcaaggaggaagcttatctatgaaaaagcaaagcactatcacaaggaatataggcagatgtacagaactgaaattcgaatggcgaggatggcaagaaaagctggcaacttctatgtacctgcagaacccaaattggcgtttgtcatcagaatcagaggtatcaatggagtgagcccaaaggttcgaaaggtgttgcagcttcttcgccttcgtcaaatcttcaatggaacctttgtgaagctcaacaaggcttcgattaacatgctgaggattgtagagccatatattgcatgggggtaccccaatctgaagtcagtaaatgaactaatctacaagcgtggttatggcaaaatcaataagaagcgaattgctttgacagataacgctttgattgctcgatctcttggtaaatacggcatcatctgcatggaggatttgattcatgagatctatactgttggaaaacgcttcaaagaggcaaataacttcctgtggcccttcaaattgtcttctccacgaggtggaatgaagaaaaagaccacccattttgtagaaggtggagatgctggcaacagggaggaccagatcaacaggcttttgagatgactagggtctccgattttttctaccggggggtataaacgncnnnntcnatggananaanacaaaanaaaantgggggccccaaatttaaatcgggcgcgcccaagaaaagaagtcagacgagaaag

SEQ ID NO: 322742 - DNA, 1673 bp, Homo sapiens
ttcagcggatcaggtccgtccgtgaggcctccttgtaggtgctgttgtccaggatgctctggaaggtcaagccatgctccggagcatactgttccttgagtggaccagagagccggaggacagcacagacatcagctccaagtctgctctgcagcgcctcggtcacgaagtccgtcccggatgtcctcttgccgctgaacagcagtaccagccgcggggcagcctcccagcggggccatgggctcgccacgcctcgcgatgcctgaagctgacacttctccctacccctaaaatcgggacaccgcgcggaatggacgcggccactaagcggagcgacgacaaggacctcgcggagcggcgaaaggggtgtagtctgcgactaccgcggcagggagccgggagggcggccaaaagtgacttcgaattgcagctagccgtttggaacgtggcccaagaggctctcattttcctggctggaaccgtcgccgcggtgcttgcctgcggtcctggtcagccgttgccctcccgccgggcgggcgaagactggtgcatgctgggatttgtagttcgtccccatgaggctcgtcctgggaacattatggggaggaacggagcctaatcctgtcagcgcagcctggggattaggacccggagttgccaaggtgtcagcactctttgctcttgaattgattaaaaagtctaatcaaatgcatatattttcttcaaacaagttttacccgaaagtttgttgaaagaggctaaatcagggagttctttgcgtctgcaaggcggctttttagttctggattcttttccggcttattctaagacacctatgagtcgtggggcttctctcgcgaagtctttaagtggacagtacgcatgcgccaacggcctctttttccggctggaaccatggagggtgtagaagagaagaagaaggaggttcctgctgtgccagaaacccttaagaaaaagcgaaggaatttcgcagagctgaagatcaagcgcctgagaaagaagtttgcccaaaagatgcttcgaaaggcaaggaggaagcttatctatgaaaaagcaaagcactatcacaaggaatataggcagatgtacagaactgaaattcgaatggcgaggatggcaagaaaagctggcaacttctatgtacctgcagaacccaaattggcgtttgtcatcagaatcagaggtatcaatggagtgagcccaaaggttcgaaaggtgttgcagcttcttcgccttcgtcaaatcttcaatggaacctttgtgaagctcaacaaggcttcgattaacatgctgaggattgtagagccatatattgcatgggggtaccccaatctgaagtcagtaaatgaactaatctacaagcgtggttatggcaaaatcaataagaagcgaattgctttgacagataacgctttgattgctcgatctcttggtaaatacggcatcatctgcatggaggatttgattcatgagatctatactgttggaaaacgcttcaaagaggcaaataacttcctgtggcccttcaaattgtcttctccacgaggtggaatgaagaaaaagaccacccattttgtagaaggtggagatgctggccacggggggcacaatcaacgggttttatgcgggggtcccagattattttctggggg

SEQ ID NO: 322743 - DNA, 1836 bp, Homo sapiens
  misc_feature (1238)..(1238): n is a, c, g, or t
tgggggaggagccccgcagcctccacctacaggggcgtcccctaaggggacggaggccgcatgggccgccgagccgggaaatctccgcccccagctggagcggctgtgcgggctgcgtagcggtgctgggtcgggccgacgtgccacccacccggagccgggatgccagaagggccgttggtgaggaaatttcaccatttggtctccccctttgtgggtcagcaggtggtcaagacagggggcagcagtaagaagctacagcccgccagcctgcagtctctgtggctccaggacacccaggtccatggaaagaaattattccttagatttgatctagatgaagaaatggggccccctggcagcagcccaacaccagagcctccacaaaaagaagtgcagaaggaaggggctgcggacccaaagcaggtcggggagcccagcgggcagaagacccttgatggatcctcacggtctgcagagctcgtcccccagggcgaggatgattctgagtatttggagagagacgcccctgcaggagatgctgggaggtggctgcgtgtcagctttggtttgtttggcagcgtttgggtgaacgatttctccagagccaagaaagccaacaagaggggggactggagggacccttccccgaggttggtcctgcactttggtggtggtggcttcctggcattttataattgtcagttgtcttggagctcttccccagtggtcacacccacctgtgacatcctgtctgagaagttccatcgaggacaagccttagaagctctaggccaggctcagcctgtctgctatacactgctggaccagagatacttctcagggctagggaacatcattaagaatgaagccttgtacagagctgggatccatcccctttctctcggttcagtcctgagtgcctcgcgtcgggaggtcctggtggatcacgtggtggagttcagtacagcctggctgcagggcaagttccaaggcagaccgcagcacacacaggtctaccagaaagaacagtgccctgctggccaccaggtcatgaaggaggcgtttgggcccgaagatgggttacagaggctcacctggtggtgcccgcagtgccagccccagttgtcagaggagccagagcagtgccagttctcctaaggagctggtggtgctcctcatggaaccttgccgttggggaacctgacgtctaagtgtccacatcactcgagacgtanattatggctgaatcatccgctaccttcacgagagaagaagaaggaggttcctgctgtgccagaaacccttaagaaaaagcgaaggaatttcgcagagctgaagatcaagcgcctgagaaagaagtttgcccaaaagatgcttcgaaaggcaaggaggaagcttatctatgaaaaagcaaagcactatcacaaggaatataggcagatgtacagaactgaaattcgaatggcgaggatggcaagaaaagctggcaacttctatgtacctgcagaacccaaattggcgtttgtcatcagaatcagaggtatcaatggagtgagcccaaaggttcgaaaggtgttgcagcttcttcgccttcgtcaaatcttcaatggaacctttgtgaagctcaacaaggcttcgattaacatgctgaggattgtagagccatatattgcatgggggtaccccaatctgaagtcagtaaatgaactaatctacaagcgtggttatggcaaaatcaataagaagcgaattgctttgacagataacgctttgattgctcgatctcttggtaatacgctcatctgcatggacaagtaccgcagagggtccgac

SEQ ID NO: 322744 - DNA, 1797 bp, Homo sapiens
  misc_feature (1238)..(1238): n is a, c, g, or t
tgggggaggagccccgcagcctccacctacaggggcgtcccctaaggggacggaggccgcatgggccgccgagccgggaaatctccgcccccagctggagcggctgtgcgggctgcgtagcggtgctgggtcgggccgacgtgccacccacccggagccgggatgccagaagggccgttggtgaggaaatttcaccatttggtctccccctttgtgggtcagcaggtggtcaagacagggggcagcagtaagaagctacagcccgccagcctgcagtctctgtggctccaggacacccaggtccatggaaagaaattattccttagatttgatctagatgaagaaatggggccccctggcagcagcccaacaccagagcctccacaaaaagaagtgcagaaggaaggggctgcggacccaaagcaggtcggggagcccagcgggcagaagacccttgatggatcctcacggtctgcagagctcgtcccccagggcgaggatgattctgagtatttggagagagacgcccctgcaggagatgctgggaggtggctgcgtgtcagctttggtttgtttggcagcgtttgggtgaacgatttctccagagccaagaaagccaacaagaggggggactggagggacccttccccgaggttggtcctgcactttggtggtggtggcttcctggcattttataattgtcagttgtcttggagctcttccccagtggtcacacccacctgtgacatcctgtctgagaagttccatcgaggacaagccttagaagctctaggccaggctcagcctgtctgctatacactgctggaccagagatacttctcagggctagggaacatcattaagaatgaagccttgtacagagctgggatccatcccctttctctcggttcagtcctgagtgcctcgcgtcgggaggtcctggtggatcacgtggtggagttcagtacagcctggctgcagggcaagttccaaggcagaccgcagcacacacaggtctaccagaaagaacagtgccctgctggccaccaggtcatgaaggaggcgtttgggcccgaagatgggttacagaggctcacctggtggtgcccgcagtgccagccccagttgtcagaggagccagagcagtgccagttctcctaaggagctggtggtgctcctcatggaaccttgccgttggggaacctgacgtctaagtgtccacatcactcgagacgtanattatggctgaatcatccgctaccttcacgagagaagaagaaggaggttcctgctgtgccagaaacccttaagaaaaagcgaaggaatttcgcagagctgaagatcaagcgcctgagaaagaagtttgcccaaaagatgcttcgaaaggcaaggaggaagcttatctatgaaaaagcaaagcactatcacaaggaatataggcagatgtacagaactgaaattcgaatggcgaggatggcaagaaaagctggcaacttctatgtacctgcagaacccaaattggcgtttgtcatcagaatcagaggtatcaatggagtgagcccaaaggttcgaaaggtgttgcagcttcttcgccttcgtcaaatcttcaatggaacctttgtgaagctcaacaaggcttcgattaacatgctgaggattgtagagccatatattgcatgggggtaccccaatctgaagtcagtaaatgaactaatctacaagcgtggttatggcgaaatatgttgacagataacgctttgattgctcgatctacatcatccgagatttgattcatct

SEQ ID NO: 322745 - DNA, 2094 bp, Homo sapiens
tgggggaggagccccgcagcctccacctacaggggcgtcccctaaggggacggaggccgcatgggccgccgagccgggaaatctccgcccccagctggagcggctgtgcgggctgcgtagcggtgctgggtcgggccgacgtgccacccacccggagccggtccatggaaagaaattattccttagatttgatctagatgaagaaatggggccccctggcagcagcccaacaccagagcctccacaaaaagaagtgcagaaggaaggggctgcggacccaaagcaggtcggggagcccagcgggcagaagacccttgatggatcctcacggtctgcagagctcgtcccccagggcgaggatgattctgagtatttggagagagacgcccctgcaggagatgctgggaggtggctgcgtgtcagctttggtttgtttggcagcgtttgggtgaacgatttctccagagccaagaaagccaacaagaggggggactggagggacccttccccgaggttggtcctgcactttggtggtggtggcttcctggcattttataattgtcagttgtcttggagctcttccccagtggtcacacccacctgtgacatcctgtctgagaagttccatcgaggacaagccttagaagctctaggccaggctcagcctgtctgctatacactgctggaccagagatacttctcagggctagggaacatcattaagaatgaagccttgtacagagctgggatccatcccctttctctcggttcagtcctgagtgcctcgcgtcgggaggtcctggtggatcacgtggtggagttcagtacagcctggctgcagggcaagttccaaggcagaccgcagcacacacaggtctaccagaaagaacagtgccctgctggccaccaggtcatgaaggaggcgtttgggcccgaagatgggttacagaggctcacctggtggtgcccgcagtgccagccccagttgtcagaggagccagagcagtgccagttctcctaaggagctggtggtgctcctcatggaaccttgccgttggggaacctgacgtctaagtgtccagaaaggaggatgtgggcagggacggggtacagaggatagtgtgggtcagaggtgccagtagtataatattcatctccctggagttatgttgaaggcagagttttcatagggttagattttttttatccttttctagttcagttaattcatcctgttgaattgcaccatcgtgaaagatgggaaaaatcgtgatgatgggtaaggggaaaacttcccggaaggcaatggggcaaggaaaaagaaagcctatgggaaatggctgtgctcccaacatagctttgcagatgatgtgggttttttttttttttttttggttgtttgttttgagagagagtcttgctctgtctccctggctagggtgtggtggtgtgatcttggctcacggcagccttgccctccctggctcaagcagtcttcatctcagcctccagagtagctgggactacaggcatgtgatatgatgctcggctgatttttgtttactttttagagagatggggtcttgccatatttgccaggctggtttgaactcctacaactcaagcattcctcccaccttggtctcccaaaatgttgggaccacgggtgtgagccaccgcgcccagctagctcctgtgttttgtttttgttttgtaactttggttgatgttaaggccctccattttggaaagcaggaaaacaggatttttttttttttatcttgttccctggaggatccagggatgaggatagagtggcctgagagcagtgcttggattcagcctcctgctgggtccttctgctggatacaggcaccaagaggcgggggtggagcagggagctgcgccttcctggggtgcccggtggtgtgtagagaaaagctgcttgtttactccttaagtcaatgtattggtgactgttgatttgttggacaattcaggaatcaagggctgtggagaaactccctcatgttgttggcaacaggtgaatgaacctagagcggtgacatgaaaataaagctcactgttactcgc

SEQ ID NO: 322746 - DNA, 986 bp, Homo sapiens
  misc_feature (101)..(101): n is a, c, g, or t
gagctcggtacccgcgtgggttccatgcaggggtgtgtgtgcgtaggggtgtgtgtgcaggggtgtgtgcgtgggttccttgcagaaccccaattggcgtntgtcatcagaatcagaggtatcaatggagtgagcccaaaggttcgaaaggtgttgcagcttcttcgccttcgtcaaatcttcaatggaacctttgtgaagctcaacaaggcttcgattaacatgctgaggattgtagagccatatattgcatgggggtaccccaatctgaagtcagtaaatgaactaatctacaagcgtggttatggcaaaatcaataagaagcgaattgctttgacagataacgctttgattgctcgatctcttggtaaatacggcatcatctgcatggaggatttgattcatgagatctatactgttggaaaacgcttcaaagaggcaaataacttcgtgtctaccatgattatttttctaagctggttggttaataaacagtacctgctctcaaattgaaatatattgttgtatttgtgatttgttgttgttgttgttagcctgcctctgtcttcccttaactactgtggcaagtgtggtgtgtgataaaattaagccaaatcaacagcccatttcgtgcaaaatcagggtcgagtctgtgtgaaagacatctcttgggtttttaaaaggcttttctatacaaaagattttaattttttgttttttaactgtgctgagtgattcgaaatgggtttattctaagaaagcctgtttcacaagcatttgtacatgatttgtcggtaaggtaatccaactttggtttatggaaaaaattgaatttagttgctaaaatttatttctcgggccttcgcttgtttataaactgccatgtaaatgtgttgttttccttttgcattccatttttgtgttcttgttttgcatcttttgccatacttacgtgagttactaataattgttacatactgtgggta

SEQ ID NO: 322747 - DNA, 1037 bp, Homo sapiens
tagccggattcggcataacggcggggctctttttccggctggaaccatggagggtgtagaagagaagaagaaggaggttcctgctgtgccagaaacccttaagaaaaagcgaaggaatttcgcagagctgaagatcaagcgcctgagaaagaagtttgcccaaaagatgcttcgaaaggcaaggaggaagcttatctatgaaaaagcaaagcactatcacaaggaatataggcaaaatcaataagaagcgaattgctttgacagataacgctttgattgctcgatctcttggtaaatacggcatcatctgcatggaggatttgattcatgagatctatactgttggaaaacgcttcaaagaggcaaataacttcctgtggcccttcaaattgtcttctccacgaggtggaatgaagaaaaagaccacccattttgtagaaggtggagatgctggcaacagggaggaccagatcaacaggcttattagaagaatgaactaaggtgtctaccatgattatttttctaagctggttggttaataaacagtacctgctctcaaattgaaatatattgttgtatttgtgatttgttgttgttgttgttagcctgcctctgtcttcccttaactactgtggcaagtgtggtgtgtgataaaattaagccaaatcaacagcccatttcgtgcaaaatcagggtcgagtctgtgtgaaagacatctcttgggtttttaaaaggcttttctatacaaaagattttaattttttgttttttaactgtgctgagtgattcgaaatgggtttattctaagaaagcctgtttcacaagcatttgtacatgatttgtcggtaaggtaatccaactttggtttatggaaaaaattgaatttagttgctaaaatttatttctcgggccttcgcttgtttataaactgccatgtaaatgtgttgttttccttttgcattccatttttgtgttcttgttttgcatcttttgccatacttacgtgagttactaataattgttacatactgtgggta

SEQ ID NO: 322748 - DNA, 1143 bp, Homo sapiens
ttcagcggatcaggtccgtccgtgaggcctccttgtaggtgctgttgtccaggatgctctggaaggtcaagccatgctccggagcatactgttccttgagtggaccagagagccggaggacagcacagacatcagctccaagtctgctctgcagcgcctcggtcacgaagtccgtcccggatgtcctcttgccgctgaacagcagtaccagccgcggggcagcctcccagcggggccatgggctcgccacgcctcgcgatgcctgaagctgacacttctccctacccctaaaatcgggacaccgcgcggaatggacgcggccactaagcggagcgacgacaaggacctcgcggagcggcgaaaggggtgtagtctgcgactaccgcggcagggagccgggagggcggccaaaagtgacttcgaattgcagctagccgtttggaacgtggcccaagaggctctcattttcctggctggaaccgtcgccgcggtgcttgcctgcggtcctggtcagccgttgccctcccgccgggcgggcgaagactggtgcatgctgggatttgtagttcgtccccatgaggctcgtcctgggaacattatggggaggaacggagcctaatcctgtcagcgcagcctggggattaggacccggagttgccaaggtgtcagcactctttgctcttgaattgattaaaaagtctaatcaaatgcatatattttcttcaaacaagttttacccgaaagtttgttgaaagaggctaaatcagggagttctttgcgtctgcaaggcggctttttagttctggattcttttccggcttattctaagacacctatgagtcgtggggcttctctcgcgaagtctttaagtggacagtacgcatgcgccaacggcctctttttccggctggaaccatggagggtgtagaagagaagaagaaggaggttcctgctgtgccagaaacccttaagaaaaagcgaaggaatttcgcagagctgaagatcaagcgcctgagaaagaagtttgcccaaaagatgcttcgaaaggcaaggaggaagctgatctatgaaattagaaaagcacccggaacagagtgggcaccccattaagactgctgcagtcagtgaactgccaagtattct

SEQ ID NO: 322749 - DNA, 853 bp, Homo sapiens
tagccggattcggcataacggcggggctctttttccggctggaaccatggagggtgtagaagagaagaagaaggaggttcctgctgtgccagaaacccttaagaaaaagcgaaggaatttcgcagagctgaagatcaagcgcctgagaaagaagtttgcccaaaagatgcttcgaaaggcaaggaggaagcttatctatgaaaaagcaaagcactatcacaaggaatataggcagatgtacagaactgaaattcgaatggcgaggatggcaagaaaagctggcaacttctatgtacctgcagaacccaaattggcgtttgtcatcagaatcagaggtatcaatggagtgagcccaaaggttcgaaaggtgttgcagcttcttcgccttcgtcaaatcttcaatggaacctttgtgaagctcaacaaggcttcgattaacatgctgaggattgtagagccatatattgcatgggggtaccccaatctgaagtcagtaaatgaactaatctacaagcgtggttatggcaaaatcaataagaagcgaattgctttgacagataacgctttgattgctcgatctcttggtaaatacggcatcatctgcatggaggatttgattcatgagatctatactgttggaaaacgcttcaaagaggcaaataacttcctgtggcccttcaaattgtcttctccacgaggtggaatgaagaaaaagaccacccattttgtagaaggtggagatgctggcaacagggaggaccagatcaacaggcttattagaagaatgaactaaggtgtctaccatgattatttttctaagctggttggttaataaacagtacctgctctcaaa

SEQ ID NO: 322750 - DNA, 2234 bp, Homo sapiens
tgggggaggagccccgcagcctccacctacaggggcgtcccctaaggggacggaggccgcatgggccgccgagccgggaaatctccgcccccagctggagcggctgtgcgggctgcgtagcggtgctgggtcgggccgacgtgccacccacccggagccgggatgccagaagggccgttggtgaggaaatttcaccatttggtctccccctttgtgggtcagcaggtggtcaagacagggggcagcagtaagaagctacagcccgccagcctgcagtctctgtggctccaggacacccaggtccatggaaagaaattattccttagatttgatctagatgaagaaatggggccccctggcagcagcccaacaccagagcctccacaaaaagaagtgcagaaggaaggggctgcggacccaaagcaggtcggggagcccagcgggcagaagacccttgatggatcctcacggtctgcagagctcgtcccccagggcgaggatgattctgagtatttggagagagacgcccctgcaggagatgctgggaggtggctgcgtgtcagctttggtttgtttggcagcgtttgggtgaacgatttctccagagccaagaaagccaacaagaggggggactggagggacccttccccgaggttggtcctgcactttggtggtggtggcttcctggcattttataattgtcagttgtcttggagctcttccccagtggtcacacccacctgtgacatcctgtctgagaagttccatcgaggacaagccttagaagctctaggccaggctcagcctgtctgctatacactgctggaccagagatacttctcagggctagggaacatcattaagaatgaagccttgtacagagctgggatccatcccctttctctcggttcagtcctgagtgcctcgcgtcgggaggtcctggtggatcacgtggtggagttcagtacagcctggctgcagggcaagttccaaggcagaccgcagcacacacaggtctaccagaaagaacagtgccctgctggccaccaggtcatgaaggaggcgtttgggcccgaagatgggttacagaggctcacctggtggtgcccgcagtgccagccccagttgtcagaggagccagagcagtgccagttctcctaaggagctggtggtgctcctcatggaaccttgccgttggggaacctgacgtctaagtgtccagaaaggaggatgtgggcagggacggggtacagaggatagtgtgggtcagaggtgccagtagtataatattcatctccctggagttatgttgaaggcagagttttcatagggttagattttttttatccttttctagttcagttaattcatcctgttgaattgcaccatcgtgaaagatgggaaaaatcgtgatgatgggtaaggggaaaacttcccggaaggcaatggggcaaggaaaaagaaagcctatgggaaatggctgtgctcccaacatagctttgcagatgatgtgggttttttttttttttttttggttgtttgttttgagagagagtcttgctctgtctccctggctagggtgtggtggtgtgatcttggctcacggcagccttgccctccctggctcaagcagtcttcatctcagcctccagagtagctgggactacaggcatgtgatatgatgctcggctgatttttgtttactttttagagagatggggtcttgccatatttgccaggctggtttgaactcctacaactcaagcattcctcccaccttggtctcccaaaatgttgggaccacgggtgtgagccaccgcgcccagctagctcctgtgttttgtttttgttttgtaactttggttgatgttaaggccctccattttggaaagcaggaaaacaggatttttttttttttatcttgttccctggaggatccagggatgaggatagagtggcctgagagcagtgcttggattcagcctcctgctgggtccttctgctggatacaggcaccaagaggcgggggtggagcagggagctgcgccttcctggggtgcccggtggtgtgtagagaaaagctgcttgtttactccttaagtcaatgtattggtgactgttgatttgttggacaattcaggaatcaagggctgtggagaaactccctcatgttgttggcaacaggtgaatgaacctagagcggtgacatgaaaataaagctcactgttactcgc

SEQ ID NO: 322751 - DNA, 1330 bp, Homo sapiens
tagccggattcggcataacggcggggctctttttccggctggaaccatggagggtgtagaagagaagaagaaggaggttcctgctgtgccagaaacccttaagaaaaagcgaaggaatttcgcagagctgaagatcaagcgcctgagaaagaagtttgcccaaaagatgcttcgaaaggcaaggaggaagcttatctatgaaaaagcaaagcactatcacaaggaatataggcagatgtacagaactgaaattcgaatggcgaggatggcaagaaaagctggcaacttctatgtacctgcagaacccaaattggcgtttgtcatcagaatcagaggtatcaatggagtgagcccaaaggttcgaaaggtgttgcagcttcttcgccttcgtcaaatcttcaatggaacctttgtgaagctcaacaaggcttcgattaacatgctgaggattgtagagccatatattgcatgggggtaccccaatctgaagtcagtaaatgaactaatctacaagcgtggttatggcaaaatcaataagaagcgaattgctttgacagataacgctttgattgctcgatctcttggtaaatacggcatcatctgcatggaggatttgattcatgagatctatactgttggaaaacgcttcaaagaggcaaataacttcctgtggcccttcaaattgtcttctccacgaggtggaatgaagaaaaagaccacccattttgtagaaggtggagatgctggcaacagggaggaccagatcaacaggcttattagaagaatgaactaaggtgtctaccatgattatttttctaagctggttggttaataaacagtacctgctctcaaattgaaatatattgttgtatttgtgatttgttgttgttgttgttagcctgcctctgtcttcccttaactactgtggcaagtgtggtgtgtgataaaattaagccaaatcaacagcccatttcgtgcaaaatcagggtcgagtctgtgtgaaagacatctcttgggtttttaaaaggcttttctatacaaaagattttaattttttgttttttaactgtgctgagtgattcgaaatgggtttattctaagaaagcctgtttcacaagcatttgtacatgatttgtcggtaaggtaatccaactttggtttatggaaaaaattgaatttagttgctaaaatttatttctcgggccttcgcttgtttataaactgccatgtaaatgtgttgttttccttttgcattccatttttgtgttcttgttttgcatcttttgccatacttacgtgagttactaataattgttacatactgtgggta

SEQ ID NO: 322752 - DNA, 1035 bp, Homo sapiens
tagccggattcggcataacggcggggctctttttccggctggaaccatggagggtgtagaagagaagaagaaggaggttcctgctgtgccagaaacccttaagaaaaagcgaaggaatttcgcagagctgaagatcaagcgcctgagaaagaagtttgcccaaaagatgcttcgaaaggcaaggaggaagcttatctatgaaaaagcaaagcactatcacaaggaatataggcagatgtacagaactgaaattcgaatggcgaggatggcaagaaaagctggcaacttctatgtacctgcagaacccaaattggcgtttgtcatcagaatcagaggtatcaatggagtgagcccaaaggttcgaaaggtgttgcagcttcttcgccttcgtcaaatcttcaatggaacctttgtgaagctcaacaaggcttcgattaacatgctgaggattgtagagccatatattgcatgggggtaccccaatctgaagtcagtaaatgaactaatctacaagcgtggttatggcaaaatcaataagaagcgaattgctttgacagataacgctttgattgctcgatctcttggtaaatacggcatcatctgcatggaggatttgattcatgagatctatactgttggaaaacgcttcaaagaggcaaataacttcctgtggcccttcaaattgtcttctccacgaggtggaatgaagaaaaagaccacccattttgtagaaggtggagatgctggcaacagggaggaccagatcaacaggcttattagaagaatgaactaaggtgtctaccatgattatttttctaagctggttggttaataaacagtacctgctctcaaaggttaaaaacaaaaagaaaaaaaaaaaatgttggggggggggaccaggaaaaagttttaaaacactggtggggcggggcccggtgggtatgtaaatggcatagggttcaaagaaacgggctgagaaggggggttccacaaaaaagccggggacgggttgaaaaacagagggttcggaaaggc

SEQ ID NO: 322753 - DNA, 1003 bp, Homo sapiens
tagccggattcggcataacggcggggctctttttccggctggaaccatggagggtgtagaagagaagaagaaggaggttcctgctgtgccagaaacccttaagaaaaagcgaaggaatttcgcagagctgaagatcaagcgcctgagaaagaagtttgcccaaaagatgcttcgaaaggcaaggaggaagcttatctatgaaaaagcaaagcactatcacaaggaatataggcagatgtacagaactgaaattcgaatggcgaggatggcaagaaaagctggcaacttctatgtacctgcagaacccaaattggcgtttgtcatcagaatcagaggtatcaatggagtgagcccaaaggttcgaaaggtgttgcagcttcttcgccttcgtcaaatcttcaatggaacctttgtgaagctcaacaaggcttcgattaacatgctgaggattgtagagccatatattgcatgggggtaccccaatctgaagtcagtaaatgaactaatctacaagcgtggttatggcaaaatcaataagaagcgaattgctttgacagataacgctttgattgctcgatctcttggtaaatacggcatcatctgcatggaggatttgattcatgagatctatactgttggaaaacgcttcaaagaggcaaataacttcctgtggcccttcaaattgtcttctccacgaggtggaatgaagaaaaagaccacccattttgtagaaggtggagatgctggcaacagggaggaccagatcaacaggcttattagaagaatgaactaaggtgtctaccatgattatttttctaagctggttggttaataaacagtacctgctctcaaagcccggttgaaaaaaaacaacaaagggggcgcaaatccgggggcattagcggccgtttggaagggcgagggggaaaaagggggggaaccggaggaaaggggtgggccctggggatggacccaaccgaaaatgggggggtgaaaaaagatg

SEQ ID NO: 322754 - DNA, 3083 bp, Homo sapiens
  misc_feature (1783)..(1783): n is a, c, g, or t
tgggggaggagccccgcagcctccacctacaggggcgtcccctaaggggacggaggccgcatgggccgccgagccgggaaatctccgcccccagctggagcggctgtgcgggctgcgtagcggtgctgggtcgggccgacgtgccacccacccggagccggtgagtgcagccgcccgccctccggtagatctgcggcctggcggagaagtcgggaggggacaggaagggaggggcgggccccgggccctcctccgtctcagccgcctgcggaggtgctgcccacgcctggaggcccccactgaccctcagacccgcgtctgcgcccctctccccgcaccccgaggcagagttgggaaagcagtggtcttagaccccccacctcgggcactcggaagagaacggcggagacaacccctcctcttccctggctggcgcagcgccagcctcgagctcctcggtagcccccgggcagggagggccggagggtgggcgcggcatcttcagcgactcttcgaagtcccttccgcgtctcatctttcaaggctgttgcagaggcggcttgcttcccacctgtccatctccataaaaatccctaaacgaaacatgcccacgtgtccggagattttcaggacttggtgcatttcagatgaaggcttttccagaagcttccccgtagaagaggatcaggcatccaactggttaagggatgccagaagggccgttggtgaggaaatttcaccatttggtctccccctttgtgggtcagcaggtggtcaagacagggggcagcagtaagaagctacagcccgccagcctgcagtctctgtggctccaggacacccaggtccatggaaagaaattattccttagatttgatctagatgaagaaatggggccccctggcagcagcccaacaccagagcctccacaaaaagaagtgcagaaggaaggggctgcggacccaaagcaggtcggggagcccagcgggcagaagacccttgatggatcctcacggtctgcagagctcgtcccccagggcgaggatgattctgagtatttggagagagacgcccctgcaggagatgctgggaggtggctgcgtgtcagctttggtttgtttggcagcgtttgggtgaacgatttctccagagccaagaaagccaacaagaggggggactggagggacccttccccgaggttggtcctgcactttggtggtggtggcttcctggcattttataattgtcagttgtcttggagctcttccccagtggtcacacccacctgtgacatcctgtctgagaagttccatcgaggacaagccttagaagctctaggccaggctcagcctgtctgctatacactgctggaccagagatacttctcagggctagggaacatcattaagaatgaagccttgtacagagctgggatccatcccctttctctcggttcagtcctgagtgcctcgcgtcgggaggtcctggtggatcacgtggtggagttcagtacagcctggctgcagggcaagttccaaggcagaccgcagcacacacaggtctaccagaaagaacagtgccctgctggccaccaggtcatgaaggaggcgtttgggcccgaagatgggttacagaggctcacctggtggtgcccgcagtgccagccccagttgtcagaggagccagagcagtgccagttctcctaaggagctggtggtgctcctcatggaaccttgccgttggggaacctgacgtctaagtgtccacatcactcgagacgtanattatggctgaatcatccgctaccttcacgagagaagaagaaggaggttcctgctgtgccagaaacccttaagaaaaagcgaaggaatttcgcagagctgaagatcaagcgcctgagaaagaagtttgcccaaaagatgcttcgaaaggcaaggaggaagcttatctatgaaaaagcaaagcactatcacaaggaatataggcagatgtacagaactgaaattcgaatggcgaggatggcaagaaaagctggcaacttctatgtacctgcagaacccaaattggcgtttgtcatcagaatcagaggtatcaatggagtgagcccaaaggttcgaaaggtgttgcagcttcttcgccttcgtcaaatcttcaatggaacctttgtgaagctcaacaaggcttcgattaacatgctgaggattgtagagccatatattgcatgggggtaccccaatctgaagtcagtaaatgaactaatctacaagcgtggttatggcaaaatcaataagaagcgaattgctttgacagataacgctttgattgctcgatctcttggtaaatacggcatcatctgcatggaggatttgattcatgagatctatactgttggaaaacgcttcaaagaggcaaataacttcctgtggcccttcaaattgtcttctccacgaggtggaatgaagaaaaagaccacccattttgtagaaggtggagatgctggcaacagggaggaccagatcaacaggcttattagaagaatgaactaaggtgtctaccatgattatttttctaagctggttggttaataaacagtacctgctctcaaattgaaatatattgttgtatttgtgatttgttgttgttgttgttagcctgcctctgtcttcccttaactactgtggcaagtgtggtgtgtgataaaattaagccaaatcaacagcccatttcgtgcaaaatcagggtcgagtctgtgtgaaagacatctcttgggtttttaaaaggcttttctatacaaaagattttaattttttgttttttaactgtgctgagtgattcgaaatgggtttattctaagaaagcctgtttcacaagcatttgtacatgatttgtcggtaaggtaatccaactttggtttatggaaaaaattgaatttagttgctaaaatttatttctcgggccttcgcttgtttataaactgccatgtaaatgtgttgttttccttttgcattccatttttgtgttcttgttttgcatcttttgccatacttacgtgagttactaataattgttacatactgtgggta

SEQ ID NO: 322755 - DNA, 2398 bp, Homo sapiens
  misc_feature (1098)..(1098): n is a, c, g, or t
tgggggaggagccccgcagcctccacctacaggggcgtcccctaaggggacggaggccgcatgggccgccgagccgggaaatctccgcccccagctggagcggctgtgcgggctgcgtagcggtgctgggtcgggccgacgtgccacccacccggagccggtccatggaaagaaattattccttagatttgatctagatgaagaaatggggccccctggcagcagcccaacaccagagcctccacaaaaagaagtgcagaaggaaggggctgcggacccaaagcaggtcggggagcccagcgggcagaagacccttgatggatcctcacggtctgcagagctcgtcccccagggcgaggatgattctgagtatttggagagagacgcccctgcaggagatgctgggaggtggctgcgtgtcagctttggtttgtttggcagcgtttgggtgaacgatttctccagagccaagaaagccaacaagaggggggactggagggacccttccccgaggttggtcctgcactttggtggtggtggcttcctggcattttataattgtcagttgtcttggagctcttccccagtggtcacacccacctgtgacatcctgtctgagaagttccatcgaggacaagccttagaagctctaggccaggctcagcctgtctgctatacactgctggaccagagatacttctcagggctagggaacatcattaagaatgaagccttgtacagagctgggatccatcccctttctctcggttcagtcctgagtgcctcgcgtcgggaggtcctggtggatcacgtggtggagttcagtacagcctggctgcagggcaagttccaaggcagaccgcagcacacacaggtctaccagaaagaacagtgccctgctggccaccaggtcatgaaggaggcgtttgggcccgaagatgggttacagaggctcacctggtggtgcccgcagtgccagccccagttgtcagaggagccagagcagtgccagttctcctaaggagctggtggtgctcctcatggaaccttgccgttggggaacctgacgtctaagtgtccacatcactcgagacgtanattatggctgaatcatccgctaccttcacgagagaagaagaaggaggttcctgctgtgccagaaacccttaagaaaaagcgaaggaatttcgcagagctgaagatcaagcgcctgagaaagaagtttgcccaaaagatgcttcgaaaggcaaggaggaagcttatctatgaaaaagcaaagcactatcacaaggaatataggcagatgtacagaactgaaattcgaatggcgaggatggcaagaaaagctggcaacttctatgtacctgcagaacccaaattggcgtttgtcatcagaatcagaggtatcaatggagtgagcccaaaggttcgaaaggtgttgcagcttcttcgccttcgtcaaatcttcaatggaacctttgtgaagctcaacaaggcttcgattaacatgctgaggattgtagagccatatattgcatgggggtaccccaatctgaagtcagtaaatgaactaatctacaagcgtggttatggcaaaatcaataagaagcgaattgctttgacagataacgctttgattgctcgatctcttggtaaatacggcatcatctgcatggaggatttgattcatgagatctatactgttggaaaacgcttcaaagaggcaaataacttcctgtggcccttcaaattgtcttctccacgaggtggaatgaagaaaaagaccacccattttgtagaaggtggagatgctggcaacagggaggaccagatcaacaggcttattagaagaatgaactaaggtgtctaccatgattatttttctaagctggttggttaataaacagtacctgctctcaaattgaaatatattgttgtatttgtgatttgttgttgttgttgttagcctgcctctgtcttcccttaactactgtggcaagtgtggtgtgtgataaaattaagccaaatcaacagcccatttcgtgcaaaatcagggtcgagtctgtgtgaaagacatctcttgggtttttaaaaggcttttctatacaaaagattttaattttttgttttttaactgtgctgagtgattcgaaatgggtttattctaagaaagcctgtttcacaagcatttgtacatgatttgtcggtaaggtaatccaactttggtttatggaaaaaattgaatttagttgctaaaatttatttctcgggccttcgcttgtttataaactgccatgtaaatgtgttgttttccttttgcattccatttttgtgttcttgttttgcatcttttgccatacttacgtgagttactaataattgttacatactgtgggta

SEQ ID NO: 322756 - DNA, 2090 bp, Homo sapiens
  misc_feature (790)..(790): n is a, c, g, or t
tggtgaattctcatttaatgctcacaaaaaccaggtaagccatccctgccttacagataaggaaactgcagctaattgaggctgaggagcttgtcagggtcacgtgggtaggatctgcttgagctgcgattcaagtgcaggcagtcagatgcccgatccgtttttgatagcctgtttgccatgacgggccatgcatgagtttcatttcatcttcacagcaaccttaaaggtaggaattgtcaactccattttacagacagagaaatggagtcagagatcgcagacccgtctagggtcccccaggacatggaagagctgatttctgccttgttaactttgtgggtggtttcatcatgccatgtgtcctttgtccttcccttaccttcccccgctttatttcagggaacatcattaagaatgaagccttgtacagagctgggatccatcccctttctctcggttcagtcctgagtgcctcgcgtcgggaggtcctggtggatcacgtggtggagttcagtacagcctggctgcagggcaagttccaaggcagaccgcagcacacacaggtctaccagaaagaacagtgccctgctggccaccaggtcatgaaggaggcgtttgggcccgaagatgggttacagaggctcacctggtggtgcccgcagtgccagccccagttgtcagaggagccagagcagtgccagttctcctaaggagctggtggtgctcctcatggaaccttgccgttggggaacctgacgtctaagtgtccacatcactcgagacgtanattatggctgaatcatccgctaccttcacgagagaagaagaaggaggttcctgctgtgccagaaacccttaagaaaaagcgaaggaatttcgcagagctgaagatcaagcgcctgagaaagaagtttgcccaaaagatgcttcgaaaggcaaggaggaagcttatctatgaaaaagcaaagcactatcacaaggaatataggcagatgtacagaactgaaattcgaatggcgaggatggcaagaaaagctggcaacttctatgtacctgcagaacccaaattggcgtttgtcatcagaatcagaggtatcaatggagtgagcccaaaggttcgaaaggtgttgcagcttcttcgccttcgtcaaatcttcaatggaacctttgtgaagctcaacaaggcttcgattaacatgctgaggattgtagagccatatattgcatgggggtaccccaatctgaagtcagtaaatgaactaatctacaagcgtggttatggcaaaatcaataagaagcgaattgctttgacagataacgctttgattgctcgatctcttggtaaatacggcatcatctgcatggaggatttgattcatgagatctatactgttggaaaacgcttcaaagaggcaaataacttcctgtggcccttcaaattgtcttctccacgaggtggaatgaagaaaaagaccacccattttgtagaaggtggagatgctggcaacagggaggaccagatcaacaggcttattagaagaatgaactaaggtgtctaccatgattatttttctaagctggttggttaataaacagtacctgctctcaaattgaaatatattgttgtatttgtgatttgttgttgttgttgttagcctgcctctgtcttcccttaactactgtggcaagtgtggtgtgtgataaaattaagccaaatcaacagcccatttcgtgcaaaatcagggtcgagtctgtgtgaaagacatctcttgggtttttaaaaggcttttctatacaaaagattttaattttttgttttttaactgtgctgagtgattcgaaatgggtttattctaagaaagcctgtttcacaagcatttgtacatgatttgtcggtaaggtaatccaactttggtttatggaaaaaattgaatttagttgctaaaatttatttctcgggccttcgcttgtttataaactgccatgtaaatgtgttgttttccttttgcattccatttttgtgttcttgttttgcatcttttgccatacttacgtgagttactaataattgttacatactgtgggta

SEQ ID NO: 322757 - DNA, 853 bp, Homo sapiens
  misc_feature (807)..(807): n is a, c, g, or t
tagccggattcggcataacggcggggctctttttccggctggaaccatggagggtgtagaagagaagaagaaggaggttcctgctgtgccagaaacccttaagaaaaagcgaaggaatttcgcagagctgaagatcaagcgcctgagaaagaagtttgcccaaaagatgcttcgaaaggcaaggaggaagcttatctatgaaaaagcaaagcactatcacaaggaatataggcagatgtacagaactgaaattcgaatggcgaggatggcaagaaaagctggcaacttctatgtacctgcagaacccaaattggcgtttgtcatcagaatcagaggtatcaatggagtgagcccaaaggttcgaaaggtgttgcagcttcttcgccttcgtcaaatcttcaatggaacctttgtgaagctcaacaaggcttcgattaacatgctgaggattgtagagccatatattgcatgggggtaccccaatctgaagtcagtaaatgaactaatctacaagcgtggttatggcaaaatcaataagaagcgaattgctttgacagataacgctttgattgctcgatctcttggtaaatacggcatcatctgcatggaggatttgattcatgagatctatactgttggaaaacgcttcaaagaggcaaataacttcctgtggcccttcaaattgtcttctccacgaggtggaatgaagaaaaagaccacccattttgtagaaggtggagatgctggcaacagggaggaccagatcaacaggcttattagaagaatgaactaagttccggtatttcnaaggggggggaaataacagccgggtccatttaaacaacacaacgtc

SEQ ID NO: 322758 - DNA, 862 bp, Homo sapiens
tagccggattcggcataacggcggggctctttttccggctggaaccatggagggtgtagaagagaagaagaaggaggttcctgctgtgccagaaacccttaagaaaaagcgaaggaatttcgcagagctgaagatcaagcgcctgagaaagaagtttgcccaaaagatgcttcgaaaggcaaggaggaagcttatctatgaaaaagcaaagcactatcacaaggaatataggcagatgtacagaactgaaattcgaatggcgaggatggcaagaaaagctggcaacttctatgtacctgcagaacccaaattggcgtttgtcatcagaatcagaggtatcaatggagtgagcccaaaggttcgaaaggtgttgcagcttcttcgccttcgtcaaatcttcaatggaacctttgtgaagctcaacaaggcttcgattaacatgctgaggattgtagagccatatattgcatgggggtaccccaatctgaagtcagtaaatgaactaatctacaagcgtggttatggcaaaatcaataagaagcgaattgctttgacagataacgctttgattgctcgatctcttggtaaatacggcatcatctgcatggaggatttgattcatgagatctatactgttggaaaacgcttcaaagaggcaaataacttcctgtggcccttcaaattgtcttctccacgaggtggaatgaagaaaaagaccacccattttgtagaaggtggagatgctggcaacagggaggaccagatcaacaggcttattagaagaatgaactaagtgtctaccatgattattttttaacgctgcttggtaataacaactgttcactccgctccacctgcctct

SEQ ID NO: 322759 - DNA, 1843 bp, Homo sapiens
ccctctcacacggccgtggccgcaacctcagccctcctcgcacctcccttcgcagctcacgccccctcccgtggggtgtcctggcctccgcctgccgagctcggcagtcagcagagccccggccatcctcctccggccgtccggtccccactggtccctggctagccacttttcgtaagctagagcactccagaccgccccgcctgcgatcaggcgctgcggaagacagccctgtgggctggagcgacgacaaggacctcgcggagcggcgaaaggggtgtagtctgcgactaccgcggcagggagccgggagggcggccaaaagtgacttcgaattgcagctagccgtttggaacgtggcccaagaggctctcattttcctggctggaaccgtcgccgcggtgcttgcctgcggtcctggtcagccgttgccctcccgccgggcgggcgaagactggtgcatgctgggatttgtagttcgtccccatgaggctcgtcctgggaacattatggggaggaacggagcctaatcctgtcagcgcagcctggggattaggacccggagttgccaagagagaagaagaaggaggttcctgctgtgccagaaacccttaagaaaaagcgaaggaatttcgcagagctgaagatcaagcgcctgagaaagaagtttgcccaaaagatgcttcgaaaggcaaggaggaagcttatctatgaaaaagcaaagcactatcacaaggaatataggcagatgtacagaactgaaattcgaatggcgaggatggcaagaaaagctggcaacttctatgtacctgcagaacccaaattggcgtttgtcatcagaatcagaggtatcaatggagtgagcccaaaggttcgaaaggtgttgcagcttcttcgccttcgtcaaatcttcaatggaacctttgtgaagctcaacaaggcttcgattaacatgctgaggattgtagagccatatattgcatgggggtaccccaatctgaagtcagtaaatgaactaatctacaagcgtggttatggcaaaatcaataagaagcgaattgctttgacagataacgctttgattgctcgatctcttggtaaatacggcatcatctgcatggaggatttgattcatgagatctatactgttggaaaacgcttcaaagaggcaaataacttcctgtggcccttcaaattgtcttctccacgaggtggaatgaagaaaaagaccacccattttgtagaaggtggagatgctggcaacagggaggaccagatcaacaggcttattagaagaatgaactaaggtgtctaccatgattatttttctaagctggttggttaataaacagtacctgctctcaaattgaaatatattgttgtatttgtgatttgttgttgttgttgttagcctgcctctgtcttcccttaactactgtggcaagtgtggtgtgtgataaaattaagccaaatcaacagcccatttcgtgcaaaatcagggtcgagtctgtgtgaaagacatctcttgggtttttaaaaggcttttctatacaaaagattttaattttttgttttttaactgtgctgagtgattcgaaatgggtttattctaagaaagcctgtttcacaagcatttgtacatgatttgtcggtaaggtaatccaactttggtttatggaaaaaattgaatttagttgctaaaatttatttctcgggccttcgcttgtttataaactgccatgtaaatgtgttgttttccttttgcattccatttttgtgttcttgttttgcatcttttgccatacttacgtgagttactaataattgttacatactgtgggta

SEQ ID NO: 322760 - DNA, 1324 bp, Homo sapiens
aattatgtatacgtacgaggcctgggttgttatgtaacattggagggtgtgaatagagaagaagaaggaggttcctgctgtgccagaaacccttaagaaaaagcgaaggaatttcgcagagctgaagatcaagcgcctgagaaagaagtttgcccaaaagatgcttcgaaaggcaaggaggaagcttatctatgaaaaagcaaagcactatcacaaggaatataggcagatgtacagaactgaaattcgaatggcgaggatggcaagaaaagctggcaacttctatgtacctgcagaacccaaattggcgtttgtcatcagaatcagaggtatcaatggagtgagcccaaaggttcgaaaggtgttgcagcttcttcgccttcgtcaaatcttcaatggaacctttgtgaagctcaacaaggcttcgattaacatgctgaggattgtagagccatatattgcatgggggtaccccaatctgaagtcagtaaatgaactaatctacaagcgtggttatggcaaaatcaataagaagcgaattgctttgacagataacgctttgattgctcgatctcttggtaaatacggcatcatctgcatggaggatttgattcatgagatctatactgttggaaaacgcttcaaagaggcaaataacttcctgtggcccttcaaattgtcttctccacgaggtggaatgaagaaaaagaccacccattttgtagaaggtggagatgctggcaacagggaggaccagatcaacaggcttattagaagaatgaactaaggtgtctaccatgattatttttctaagctggttggttaataaacagtacctgctctcaaattgaaatatattgttgtatttgtgatttgttgttgttgttgttagcctgcctctgtcttcccttaactactgtggcaagtgtggtgtgtgataaaattaagccaaatcaacagcccatttcgtgcaaaatcagggtcgagtctgtgtgaaagacatctcttgggtttttaaaaggcttttctatacaaaagattttaattttttgttttttaactgtgctgagtgattcgaaatgggtttattctaagaaagcctgtttcacaagcatttgtacatgatttgtcggtaaggtaatccaactttggtttatggaaaaaattgaatttagttgctaaaatttatttctcgggccttcgcttgtttataaactgccatgtaaatgtgttgttttccttttgcattccatttttgtgttcttgttttgcatcttttgccatacttacgtgagttactaataattgttacatactgtgggta

SEQ ID NO: 322761 - DNA, 909 bp, Homo sapiens
  misc_feature (823)..(823): n is a, c, g, or t
  misc_feature (825)..(828): n is a, c, g, or t
  misc_feature (831)..(831): n is a, c, g, or t
  misc_feature (837)..(837): n is a, c, g, or t
  misc_feature (839)..(839): n is a, c, g, or t
  misc_feature (842)..(842): n is a, c, g, or t
  misc_feature (849)..(849): n is a, c, g, or t
  misc_feature (854)..(854): n is a, c, g, or t
tagccggattcggcataacggcggggctctttttccggctggaaccatggagggtgtagaagagaagaagaaggaggttcctgctgtgccagaaacccttaagaaaaagcgaaggaatttcgcagagctgaagatcaagcgcctgagaaagaagtttgcccaaaagatgcttcgaaaggcaaggaggaagcttatctatgaaaaagcaaagcactatcacaaggaatataggcagatgtacagaactgaaattcgaatggcgaggatggcaagaaaagctggcaacttctatgtacctgcagaacccaaattggcgtttgtcatcagaatcagaggtatcaatggagtgagcccaaaggttcgaaaggtgttgcagcttcttcgccttcgtcaaatcttcaatggaacctttgtgaagctcaacaaggcttcgattaacatgctgaggattgtagagccatatattgcatgggggtaccccaatctgaagtcagtaaatgaactaatctacaagcgtggttatggcaaaatcaataagaagcgaattgctttgacagataacgctttgattgctcgatctcttggtaaatacggcatcatctgcatggaggatttgattcatgagatctatactgttggaaaacgcttcaaagaggcaaataacttcctgtggcccttcaaattgtcttctccacgaggtggaatgaagaaaaagaccacccattttgtagaaggtggagatgctggcaacagggaggaccagatcaacaggcttttgagatgactagggtctccgattttttctaccggggggtataaacgncnnnntcnatggananaanacaaaanaaaantgggggccccaaatttaaatcgggcgcgcccaagaaaagaagtcagacgagaaag

SEQ ID NO: 322762 - DNA, 855 bp, Homo sapiens
  misc_feature (752)..(753): n is a, c, g, or t
  misc_feature (757)..(757): n is a, c, g, or t
  misc_feature (763)..(763): n is a, c, g, or t
  misc_feature (765)..(767): n is a, c, g, or t
  misc_feature (781)..(781): n is a, c, g, or t
  misc_feature (785)..(785): n is a, c, g, or t
  misc_feature (789)..(789): n is a, c, g, or t
  misc_feature (791)..(791): n is a, c, g, or t
  misc_feature (798)..(798): n is a, c, g, or t
  misc_feature (801)..(801): n is a, c, g, or t
  misc_feature (806)..(806): n is a, c, g, or t
tagccggattcggcataacggcggggctctttttccggctggaaccatggagggtgtagaagagaagaagaaggaggttcctgctgtgccagaaacccttaagaaaaagcgaaggaatttcgcagagctgaagatcaagcgcctgagaaagaagtttgcccaaaagatgcttcgaaaggcaaggaggaagcttatctatgaaaaagcaaagcactatcacaaggaatataggcagatgtacagaactgaaattcgaatggcgaggatggcaagaaaagctggcaacttctatgtacctgcagaacccaaattggcgtttgtcatcagaatcagaggtatcaatggagtgagcccaaaggttcgaaaggtgttgcagcttcttcgccttcgtcaaatcttcaatggaacctttgtgaagctcaacaaggcttcgattaacatgctgaggattgtagagccatatattgcatgggggtaccccaatctgaagtcagtaaatgaactaatctacaagcgtggttatggcaaaatcaataagaagcgaattgctttgacagataacgctttgattgctcgatctcttggtaaatacggcatcatctgcatggaggatttgattcatgagatctatactgttggaaaacgcttcaaagaggcaaataacttcctgtggcccttcaaattgtcttctccacgaggtggaatgaagaaaaagaccacccattttgtagaaggtggagatgctggccggnngacnatcacngnnntagaaatgctaggntccngatntnctagcgnggnaaacngcgcccattgaaaaaaaaaccgggtttgggggggaggggaaggaggaag

SEQ ID NO: 322763 - DNA, 1164 bp, Homo sapiens
ggccggatcgtatagtggttagtactctgcgtggaaaaagcaaagcactatcacaaggaatataggcagatgtacagaactgaaattcgaatggcgaggatggcaagaaaagctggcaacttctatgtacctgcagaacccaaattggcgtttgtcatcagaatcagaggtatcaatggagtgagcccaaaggttcgaaaggtgttgcagcttcttcgccttcgtcaaatcttcaatggaacctttgtgaagctcaacaaggcttcgattaacatgctgaggattgtagagccatatattgcatgggggtaccccaatctgaagtcagtaaatgaactaatctacaagcgtggttatggcaaaatcaataagaagcgaattgctttgacagataacgctttgattgctcgatctcttggtaaatacggcatcatctgcatggaggatttgattcatgagatctatactgttggaaaacgcttcaaagaggcaaataacttcctgtggcccttcaaattgtcttctccacgaggtggaatgaagaaaaagaccacccattttgtagaaggtggagatgctggcaacagggaggaccagatcaacaggcttattagaagaatgaactaaggtgtctaccatgattatttttctaagctggttggttaataaacagtacctgctctcaaattgaaatatattgttgtatttgtgatttgttgttgttgttgttagcctgcctctgtcttcccttaactactgtggcaagtgtggtgtgtgataaaattaagccaaatcaacagcccatttcgtgcaaaatcagggtcgagtctgtgtgaaagacatctcttgggtttttaaaaggcttttctatacaaaagattttaattttttgttttttaactgtgctgagtgattcgaaatgggtttattctaagaaagcctgtttcacaagcatttgtacatgatttgtcggtaaggtaatccaactttggtttatggaaaaaattgaatttagttgctaaaatttatttctcgggccttcgcttgtttataaactgccatgtaaatgtgttgttttccttttgcattccatttttgtgttcttgttttgcatcttttgccatacttacgtgagttactaataattgttacatactgtgggta

SEQ ID NO: 322764 - DNA, 1800 bp, Homo sapiens
  misc_feature (1714)..(1714): n is a, c, g, or t
ttcagcggatcaggtccgtccgtgaggcctccttgtaggtgctgttgtccaggatgctctggaaggtcaagccatgctccggagcatactgttccttgagtggaccagagagccggaggacagcacagacatcagctccaagtctgctctgcagcgcctcggtcacgaagtccgtcccggatgtcctcttgccgctgaacagcagtaccagccgcggggcagcctcccagcggggccatgggctcgccacgcctcgcgatgcctgaagctgacacttctccctacccctaaaatcgggacaccgcgcggaatggacgcggccactaagcggagcgacgacaaggacctcgcggagcggcgaaaggggtgtagtctgcgactaccgcggcagggagccgggagggcggccaaaagtgacttcgaattgcagctagccgtttggaacgtggcccaagaggctctcattttcctggctggaaccgtcgccgcggtgcttgcctgcggtcctggtcagccgttgccctcccgccgggcgggcgaagactggtgcatgctgggatttgtagttcgtccccatgaggctcgtcctgggaacattatggggaggaacggagcctaatcctgtcagcgcagcctggggattaggacccggagttgccaaggtgtcagcactctttgctcttgaattgattaaaaagtctaatcaaatgcatatattttcttcaaacaagttttacccgaaagtttgttgaaagaggctaaatcagggagttctttgcgtctgcaaggcggctttttagttctggattcttttccggcttattctaagacacctatgagtcgtggggcttctctcgcgaagtctttaagtggacagtacgcatgcgccaacggcctctttttccggctggaaccatggagggtgtagaagagaagaagaaggaggttcctgctgtgccagaaacccttaagaaaaagcgaaggaatttcgcagagctgaagatcaagcgcctgagaaagaagtttgcccaaaagatgcttcgaaaggcaaggaggaagcttatctatgaaaaagcaaagcactatcacaaggaatataggcagatgtacagaactgaaattcgaatggcgaggatggcaagaaaagctggcaacttctatgtacctgcagaacccaaattggcgtttgtcatcagaatcagaggtatcaatggagtgagcccaaaggttcgaaaggtgttgcagcttcttcgccttcgtcaaatcttcaatggaacctttgtgaagctcaacaaggcttcgattaacatgctgaggattgtagagccatatattgcatgggggtaccccaatctgaagtcagtaaatgaactaatctacaagcgtggttatggcaaaatcaataagaagcgaattgctttgacagataacgctttgattgctcgatctcttggtaaatacggcatcatctgcatggaggatttgattcatgagatctatactgttggaaaacgcttcaaagaggcaaataacttcctgtggcccttcaaattgtcttctccacgaggtggaatgaagaaaaagaccacccattttgtagaaggtggagatgctggcaacagggaggaccagatcaacaggcttattagaagaatgaactaagtctaccatgataattttctaagctggtggtaataacaggtactgcctctcnaattggaaaaaaaaaaaacccgggcatttgcgggggaaagtttaagggcagcataggtctgcctttaaaagaatggaccaagaaga

SEQ ID NO: 322765 - DNA, 1379 bp, Homo sapiens
tagccggattcggcataacggcggggctctttttccggctggaaccatggagggtgtagaagagcccaagaacgcggtcctgtctgtgcccacgaacaccctctaaggaaagacgcgactgaatctcgcatagcttgaagatcccgcgcctgctacctgacttctgcccgaatctgtatgcttcgatgacggcatggtaggacgcttatctattgcaaaaggcccagcaacctaagtcatctacatggcatattactaggagcaaaaattggtcacatggaagacgtgatgaattcagagaatgggcggaagggatggcaagaaaagctggcaacttctatgtacctgcagaacccaaattggcgtttgtcatcagaatcagaggtatcaatggagtgagcccaaaggttcgaaaggtgttgcagcttcttcgccttcgtcaaatcttcaatggaacctttgtgaagctcaacaaggcttcgattaacatgctgaggattgtagagccatatattgcatgggggtaccccaatctgaagtcagtaaatgaactaatctacaagcgtggttatggcaaaatcaataagaagcgaattgctttgacagataacgctttgattgctcgatctcttggtaaatacggcatcatctgcatggaggatttgattcatgagatctatactgttggaaaacgcttcaaagaggcaaataacttcctgtggcccttcaaattgtcttctccacgaggtggaatgaagaaaaagaccacccattttgtagaaggtggagatgctggcaacagggaggaccagatcaacaggcttattagaagaatgaactaaggtgtctaccatgattatttttctaagctggttggttaataaacagtacctgctctcaaattgaaatatattgttgtatttgtgatttgttgttgttgttgttagcctgcctctgtcttcccttaactactgtggcaagtgtggtgtgtgataaaattaagccaaatcaacagcccatttcgtgcaaaatcagggtcgagtctgtgtgaaagacatctcttgggtttttaaaaggcttttctatacaaaagattttaattttttgttttttaactgtgctgagtgattcgaaatgggtttattctaagaaagcctgtttcacaagcatttgtacatgatttgtcggtaaggtaatccaactttggtttatggaaaaaattgaatttagttgctaaaatttatttctcgggccttcgcttgtttataaactgccatgtaaatgtgttgttttccttttgcattccatttttgtgttcttgttttgcatcttttgccatacttacgtgagttactaataattgttacatactgtgggta

SEQ ID NO: 322766 - DNA, 1217 bp, Homo sapiens
  misc_feature (205)..(205): n is a, c, g, or t
agagcaggtactgtttattaaccaaccagcttagaaaaataatcatggtagacaccttagttcattcttctaataagcctgttgatctggtcctccctgttgccagcatctccaccttctacaaaatgggtggtctttttctatcattccacctcgtggagaagacatttgaagcggccacaggaagttatttgccattggcgtntgtcatcagaatcagaggtatcaatggagtgagcccaaaggttcgaaaggtgttgcagcttcttcgccttcgtcaaatcttcaatggaacctttgtgaagctcaacaaggcttcgattaacatgctgaggattgtagagccatatattgcatgggggtaccccaatctgaagtcagtaaatgaactaatctacaagcgtggttatggcaaaatcaataagaagcgaattgctttgacagataacgctttgattgctcgatctcttggtaaatacggcatcatctgcatggaggatttgattcatgagatctatactgttggaaaacgcttcaaagaggcaaataacttcctgtggcccttcaaattgtcttctccacgaggtggaatgaagaaaaagaccacccattttgtagaaggtggagatgctggcaacagggaggaccagatcaacaggcttattagaagaatgaactaaggtgtctaccatgattatttttctaagctggttggttaataaacagtacctgctctcaaattgaaatatattgttgtatttgtgatttgttgttgttgttgttagcctgcctctgtcttcccttaactactgtggcaagtgtggtgtgtgataaaattaagccaaatcaacagcccatttcgtgcaaaatcagggtcgagtctgtgtgaaagacatctcttgggtttttaaaaggcttttctatacaaaagattttaattttttgttttttaactgtgctgagtgattcgaaatgggtttattctaagaaagcctgtttcacaagcatttgtacatgatttgtcggtaaggtaatccaactttggtttatggaaaaaattgaatttagttgctaaaatttatttctcgggccttcgcttgtttataaactgccatgtaaatgtgttgttttccttttgcattccatttttgtgttcttgttttgcatcttttgccatacttacgtgagttactaataattgttacatactgtgggta

SEQ ID NO: 322767 - DNA, 1113 bp, Homo sapiens
  misc_feature (101)..(101): n is a, c, g, or t
gagctcggtacccgcgtgggttccatgcaggggtgtgtgtgcgtaggggtgtgtgtgcaggggtgtgtgcgtgggttccttgcagaaccccaattggcgtntgtcatcagaatcagaggtatcaatggagtgagcccaaaggttcgaaaggtgttgcagcttcttcgccttcgtcaaatcttcaatggaacctttgtgaagctcaacaaggcttcgattaacatgctgaggattgtagagccatatattgcatgggggtaccccaatctgaagtcagtaaatgaactaatctacaagcgtggttatggcaaaatcaataagaagcgaattgctttgacagataacgctttgattgctcgatctcttggtaaatacggcatcatctgcatggaggatttgattcatgagatctatactgttggaaaacgcttcaaagaggcaaataacttcctgtggcccttcaaattgtcttctccacgaggtggaatgaagaaaaagaccacccattttgtagaaggtggagatgctggcaacagggaggaccagatcaacaggcttattagaagaatgaactaaggtgtctaccatgattatttttctaagctggttggttaataaacagtacctgctctcaaattgaaatatattgttgtatttgtgatttgttgttgttgttgttagcctgcctctgtcttcccttaactactgtggcaagtgtggtgtgtgataaaattaagccaaatcaacagcccatttcgtgcaaaatcagggtcgagtctgtgtgaaagacatctcttgggtttttaaaaggcttttctatacaaaagattttaattttttgttttttaactgtgctgagtgattcgaaatgggtttattctaagaaagcctgtttcacaagcatttgtacatgatttgtcggtaaggtaatccaactttggtttatggaaaaaattgaatttagttgctaaaatttatttctcgggccttcgcttgtttataaactgccatgtaaatgtgttgttttccttttgcattccatttttgtgttcttgttttgcatcttttgccatacttacgtgagttactaataattgttacatactgtgggta

SEQ ID NO: 322768 - DNA, 2837 bp, Homo sapiens
  misc_feature (1238)..(1238): n is a, c, g, or t
tgggggaggagccccgcagcctccacctacaggggcgtcccctaaggggacggaggccgcatgggccgccgagccgggaaatctccgcccccagctggagcggctgtgcgggctgcgtagcggtgctgggtcgggccgacgtgccacccacccggagccgggatgccagaagggccgttggtgaggaaatttcaccatttggtctccccctttgtgggtcagcaggtggtcaagacagggggcagcagtaagaagctacagcccgccagcctgcagtctctgtggctccaggacacccaggtccatggaaagaaattattccttagatttgatctagatgaagaaatggggccccctggcagcagcccaacaccagagcctccacaaaaagaagtgcagaaggaaggggctgcggacccaaagcaggtcggggagcccagcgggcagaagacccttgatggatcctcacggtctgcagagctcgtcccccagggcgaggatgattctgagtatttggagagagacgcccctgcaggagatgctgggaggtggctgcgtgtcagctttggtttgtttggcagcgtttgggtgaacgatttctccagagccaagaaagccaacaagaggggggactggagggacccttccccgaggttggtcctgcactttggtggtggtggcttcctggcattttataattgtcagttgtcttggagctcttccccagtggtcacacccacctgtgacatcctgtctgagaagttccatcgaggacaagccttagaagctctaggccaggctcagcctgtctgctatacactgctggaccagagatacttctcagggctagggaacatcattaagaatgaagccttgtacagagctgggatccatcccctttctctcggttcagtcctgagtgcctcgcgtcgggaggtcctggtggatcacgtggtggagttcagtacagcctggctgcagggcaagttccaaggcagaccgcagcacacacaggtctaccagaaagaacagtgccctgctggccaccaggtcatgaaggaggcgtttgggcccgaagatgggttacagaggctcacctggtggtgcccgcagtgccagccccagttgtcagaggagccagagcagtgccagttctcctaaggagctggtggtgctcctcatggaaccttgccgttggggaacctgacgtctaagtgtccacatcactcgagacgtanattatggctgaatcatccgctaccttcacgagagaagaagaaggaggttcctgctgtgccagaaacccttaagaaaaagcgaaggaatttcgcagagctgaagatcaagcgcctgagaaagaagtttgcccaaaagatgcttcgaaaggcaaggaggaagcttatctatgaaaaagcaaagcactatcacaaggaatataggcagatgtacagaactgaaattcgaatggcgaggatggcaagaaaagctggcaacttctatgtacctgcagaacccaaattggcgtttgtcatcagaatcagaggtatcaatggagtgagcccaaaggttcgaaaggtgttgcagcttcttcgccttcgtcaaatcttcaatggaacctttgtgaagctcaacaaggcttcgattaacatgctgaggattgtagagccatatattgcatgggggtaccccaatctgaagtcagtaaatgaactaatctacaagcgtggttatggcaaaatcaataagaagcgaattgctttgacagataacgctttgattgctcgatctcttggtaggttctatttgggggaaaatttggtattagaccatgcgataatttcttaccctcttgtggccgtacatttctcactattgtgaatcttcatgtgttccctatgattcttgatttagcttaaaagaaaacgtaagacatggtttcattagcttgaaccttatctttgtaaagccatgcatttaccttgtttattcctggttatgtttttatctcacagcctattcaaaaagattttgaataattatttcaaaactttttgcaactttaataatcttaaataaccttaaaatatttaggtaaatacggcatcatctgcatggaggatttgattcatgagatctatactgttggaaaacgcttcaaagaggcaaataacttcctgtggcccttcaaattgtcttctccacgaggtggaatgaagaaaaagaccacccattttgtagaaggtggagatgctggcaacagggaggaccagatcaacaggcttattagaagaatgaactaaggtgtctaccatgattatttttctaagctggttggttaataaacagtacctgctctcaaattgaaatatattgttgtatttgtgatttgttgttgttgttgttagcctgcctctgtcttcccttaactactgtggcaagtgtggtgtgtgataaaattaagccaaatcaacagcccatttcgtgcaaaatcagggtcgagtctgtgtgaaagacatctcttgggtttttaaaaggcttttctatacaaaagattttaattttttgttttttaactgtgctgagtgattcgaaatgggtttattctaagaaagcctgtttcacaagcatttgtacatgatttgtcggtaaggtaatccaactttggtttatggaaaaaattgaatttagttgctaaaatttatttctcgggccttcgcttgtttataaactgccatgtaaatgtgttgttttccttttgcattccatttttgtgttcttgttttgcatcttttgccatacttacgtgagttactaataattgttacatactgtgggta

SEQ ID NO: 322769 - DNA, 932 bp, Homo sapiens
tcccccgggctcgcaggaattcggcacgagcttcgattaacatgctgaggattgtagagccatatattgcatgggggtaccccaatctgaagtcagtaaatgaactaatctacaagcgtggttatggcaaaatcaataagaagcgaattgctttgacagataacgctttgattgctcgatctcttggtaaatacggcatcatctgcatggaggatttgattcatgagatctatactgttggaaaacgcttcaaagaggcaaataacttcctgtggcccttcaaattgtcttctccacgaggtggaatgaagaaaaagaccacccattttgtagaaggtggagatgctggcaacagggaggaccagatcaacaggcttattagaagaatgaactaaggtgtctaccatgattatttttctaagctggttggttaataaacagtacctgctctcaaattgaaatatattgttgtatttgtgatttgttgttgttgttgttagcctgcctctgtcttcccttaactactgtggcaagtgtggtgtgtgataaaattaagccaaatcaacagcccatttcgtgcaaaatcagggtcgagtctgtgtgaaagacatctcttgggtttttaaaaggcttttctatacaaaagattttaattttttgttttttaactgtgctgagtgattcgaaatgggtttattctaagaaagcctgtttcacaagcatttgtacatgatttgtcggtaaggtaatccaactttggtttatggaaaaaattgaatttagttgctaaaatttatttctcgggccttcgcttgtttataaactgccatgtaaatgtgttgttttccttttgcattccatttttgtgttcttgttttgcatcttttgccatacttacgtgagttactaataattgttacatactgtgggta

SEQ ID NO: 322770 - DNA, 2338 bp, Homo sapiens
tgggggaggagccccgcagcctccacctacaggggcgtcccctaaggggacggaggccgcatgggccgccgagccgggaaatctccgcccccagctggagcggctgtgcgggctgcgtagcggtgctgggtcgggccgacgtgccacccacccggagccgggatgccagaagggccgttggtgaggaaatttcaccatttggtctccccctttgtgggtcagcaggtggtcaagacagggggcagcagtaagaagctacagcccgccagcctgcagtctctgtggctccaggacacccaggtccatggaaagaaattattccttagatttgatctagatgaagaaatggggccccctggcagcagcccaacaccagagcctccacaaaaagaagtgcagaaggaaggggctgcggacccaaagcaggtcggggagcccagcgggcagaagacccttgatggatcctcacggtctgcagagctcgtcccccagggcgaggatgattctgagtatttggagagagacgcccctgcaggagatgctgggaggtggctgcgtgtcagctttggtttgtttggcagcgtttgggtgaacgatttctccagagccaagaaagccaacaagaggggggactggagggacccttccccgaggttggtcctgcactttggtggtggtggcttcctggcattttataattgtcagttgtcttggagctcttccccagtggtcacacccacctgtgacatcctgtctgagaagttccatcgaggacaagccttagaagctctaggccaggctcagcctgtctgctatacactgctggaccagagatacttctcagggctagggaacatcattaagaatgaagccttgtacagagctgggatccatcccctttctctcggttcagtcctgagtgcctcgcgtcgggaggtcctggtggatcacgtggtggagttcagtacagcctggctgcagggcaagttccaaggcagaccgcagcacacacaggtctaccagaaagaacagtgccctgctggccaccaggtcatgaaggaggcgtttgggcccgaagatgggttacagaggctcacctggtggtgcccgcagtgccagccccagttgtcagaggagccagagcagtgccagttctcctaaggagctggtggtgctcctcatggaaccttgccgttggggaacctgacgtctaagtgtccagaaaggaggatgtgggcagggacggggtacagaggatagtgtgggtcagaggtgccagtagtataatattcatctccctggagttatgttgaaggcagagttttcatagggttagattttttttatccttttctagttcagttaattcatcctgttgaattgcaccatcgtgaaagatgggaaaaatcgtgatgatgggtaaggggaaaacttcccggaaggcaatggggcaaggaaaaagaaagcctatgggaaatggctgtgctcccaacatagctttgcagatgatgtgggttttttttttttttttttggttgtttgttttgagagagagtcttgctctgtctccctggctagggtgtggtggtgtgatcttggctcacggcagccttgccctccctggctcaagcagtcttcatctcagcctccagagtagctgggactacaggcatgtgatatgatgctcggctgatttttgtttactttttagagagatggggtcttgccatatttgccaggctggtttgaactcctacaactcaagcattcctcccaccttggtctcccaaaatgttgggaccacgggtgtgagccaccgcgcccagctagctcctgtgttttgtttttgttttgtaactttggttgatgttaaggccctccattttggaaagcaggaaaacaggatttttttttttttatcttgttccctggaggatccagggatgaggatagagtggcctgagagcagtgcttggattcagcctcctgctgggtccttctgctggatacaggcaccaagaggcgggggtggagcagggagctgcgccttcctggggtgcccggtggtgtgtagagaaaagctgcttgtttactccttaagtcaatgtattggtgactgttgatttgttggacaattcaggaatcaagggctgtggagaaactccctcatgttgttggcaacaggtgaatgaacctagagcggtgacatgaaaataaagctcactgttactcgctgtttttgtctttatttggtagtaaaaggtctttaaatacccaactattcatggaggtggcctccagggcttactgggttagctgaggaatctacataaaagta

SEQ ID NO: 322771 - DNA, 2761 bp, Homo sapiens
  misc_feature (1238)..(1238): n is a, c, g, or t
  misc_feature (1611)..(1611): n is a, c, g, or t
tgggggaggagccccgcagcctccacctacaggggcgtcccctaaggggacggaggccgcatgggccgccgagccgggaaatctccgcccccagctggagcggctgtgcgggctgcgtagcggtgctgggtcgggccgacgtgccacccacccggagccgggatgccagaagggccgttggtgaggaaatttcaccatttggtctccccctttgtgggtcagcaggtggtcaagacagggggcagcagtaagaagctacagcccgccagcctgcagtctctgtggctccaggacacccaggtccatggaaagaaattattccttagatttgatctagatgaagaaatggggccccctggcagcagcccaacaccagagcctccacaaaaagaagtgcagaaggaaggggctgcggacccaaagcaggtcggggagcccagcgggcagaagacccttgatggatcctcacggtctgcagagctcgtcccccagggcgaggatgattctgagtatttggagagagacgcccctgcaggagatgctgggaggtggctgcgtgtcagctttggtttgtttggcagcgtttgggtgaacgatttctccagagccaagaaagccaacaagaggggggactggagggacccttccccgaggttggtcctgcactttggtggtggtggcttcctggcattttataattgtcagttgtcttggagctcttccccagtggtcacacccacctgtgacatcctgtctgagaagttccatcgaggacaagccttagaagctctaggccaggctcagcctgtctgctatacactgctggaccagagatacttctcagggctagggaacatcattaagaatgaagccttgtacagagctgggatccatcccctttctctcggttcagtcctgagtgcctcgcgtcgggaggtcctggtggatcacgtggtggagttcagtacagcctggctgcagggcaagttccaaggcagaccgcagcacacacaggtctaccagaaagaacagtgccctgctggccaccaggtcatgaaggaggcgtttgggcccgaagatgggttacagaggctcacctggtggtgcccgcagtgccagccccagttgtcagaggagccagagcagtgccagttctcctaaggagctggtggtgctcctcatggaaccttgccgttggggaacctgacgtctaagtgtccacatcactcgagacgtanattatggctgaatcatccgctaccttcacgagagaagaagaaggaggttcctgctgtgccagaaacccttaagaaaaagcgaaggaatttcgcagagctgaagatcaagcgcctgagaaagaagtttgcccaaaagatgctctctgcacaaggccaaggcaggcacagcttcatctcatgcacacacacagcaacagccactcatcgaccacaggcacatcatcagtgccagcatgtcaccagcacactgcacaattctgacatgggcgcaggcatgtgcaagcaacaagcttggcaacttctcatgtcacgctgcgagcaaccacaacattaggcagttttagtccatccagcacatccagcagtgtcatcnacatggcatgtgcagctcccaacagggttctgcaagcaggtgattgacagactatcttacgcacttctgtccaacatctttccacattggcacacccatttggtgcacagctccaacaaatgtgcttctgcattcaaccaatgcatgcagagcatatgtcagcagcgccatcatcattttgccatcggagggataaccgcccacatcgttgcacagctccacgtcacacactgcacacgtcagaatcttcacgaaagctgctgggcttcaatggtgccaacagatcccacatacagcaacagcggcacattggctctgtgccacccagccatcacaccgcctttatgcaatttgcgtccgcactcatcatttgcgctcacacaataccacagggcacatcatacgttgaccatcgcgagcgaatttatcgaatatccatgcagcatcttatcagctaggtgagcgacacaacaggcttataccacaaagcagtgccacacattacacgttcccgtgttgggcaccatcttcaacaatctggtcctttcatacaccaccagacaggtggcgacactcggcaccgcacaacacaggaacccaacccacgattcaatgggtaagacaacggtcgggcagcattggcatagggacacaccaggggcaagtggcacccaagcatccaaccacaggccttcatctacgcacacgaaattgaacgtcaaccgttgtcctcacccaattgcattcacagttggagcaatcacaggccaggagttgcgaacaaacgaacagacacacgggacaccatggctccctccgaatacattgtggcaacaaccaaaacgaaaagaaaccacaacaacaaacccaccaggccaggagaccagaacacaacaaacatagcagagagatcaacgcgcagaacaacagagcaagaagcaaccgacaacacaagggagcaccaagtgcaacacaaagaacacgagaaacaacgagctgacaacccagagagacactgaaatgcaacaacagaagcgtgggccaccaaccccgccgacggaaccaccaacaacaagagagaggacgacactcaacaccactgcaacacaacacgagcgtcaacagtcatgcacagaaaggcgacgcaaca

SEQ ID NO: 322772 - DNA, 572 bp, Homo sapiens
taggaaagaaaaacacacacaaaaatggatggagaatgtttgagggtaatttggacgttaaatttcttgattttgttaagtgtgctatgtattaaacaatgttcttattctttggaatacatttaggggtgatgggtttttatcttcaactaactctcaaatgattaaaaaaatataggtttactattttatacaatgtccctcagtttgggtttgtctgatgattcctcctgattgaatttgggttgtgcatttgagacaggcgtgccacagaagcgatgtcatgtcatttccagagcatcatgtcaggaggccctggatacttactcgtcccagtcctagggacgttcactttattcacttggttaaggtaatcatcactaggtttttccactgtaaagttgctattcttccatttgtaatttaaaaattggtgggctggctggttacagtggctcgtgcctgtaattgcagcactttgggatgctgaggcagaaggatcacttgagcccaggagttcgagaccaggctaggcaacatagcaagacctcatccctattttaaaaaataaa

SEQ ID NO: 322773 - DNA, 3452 bp, Homo sapiens
  misc_feature (741)..(741): n is a, c, g, or t
  misc_feature (744)..(744): n is a, c, g, or t
ctctcagtggtgcggccggcaggcagcgatggcggccgtacggggcctgcgggtgtcggtgaaggcggaggccccggcggggccggccctggggctcccgtcccctgaggcggagtccggtgttgaccgtggcgagccggagcccatggaggtggaggagggcgagctggaaatcgtgcctgtgcggcgctcgctcaaggaactgatcccggacacgagcagaagatatgaaaacaaggctggcagcttcatcactggaattgatgtcacctccaaggaagcaattgaaaagaaagagcagcgagccaagcgcttccattttcgatcggaagtaaatcttgcccaaagaaatgtagccttggaccgagacatgatgaagaaagcaatccccaaggtgagactggagacaatctatatttgcggagtagatgagatgagcacccaagatgtcttttcctattttaaagaatatcctccagctcacatcgaatggttggatgatacctcctgtaatgtagtttggctggatgaaatgacagccacacgagcacttatcaatatgagctccctgcctgcacaggataagatcagaagcagggatgccagtgaggacaagtcagctgagaaaaggaaaaaagacaagcaggaagacagttcagatgatgatgaagctgaagaaggagaggttgaagatgagaactcaagtgatgtagagttggatacgttgtctcaggtagaagnggngtctttgttaagaaacgatcttcgtccagctaacaaacttgctaaaggaaataggttattcatgagatttgctacaaaagccccaggtctaggatccatccaggactgagtgtatgacaaaaaggaacttggagcagccagaagaagtcagtattacatgaaatatgggaatccaaattatggaggcatgaaaggaattcttagcaattcatggaagcgaagatatcattcccgtcgtattcagcgggacgtgatcaagaagagagccctgattggggatgacgttggcttgacgtcgtataaacatcgacattctgggctagtgaatgttcccgaggaacccattgaagaggaggaagaggaggaggaggaggaagaggaagaggaagaagaagaccaggacatggatgcagatgacagagtggtggtagagtaccacgaggagctcccggctctcaagcagccccgggagcggagcgcgtctagacgatccagtgccagcagctcagactcagatgaaatggactatgatctagaactgaaaatgatttccacgccttcaccaaagaaaagcatgaaaatgactatgtatgctgacgaagtggaatctcagttgaaaaatattaggaactccatgagggcagatagtgtatcttcaagcaatatcaaaaaccgaattggtaacaaattaccacctgagaaatttgcagatgtccgacatctattagatgagaaacgtcagcactcccgtccacggccaccagtcagcagtactaaatcagatatacgccagcggttaggaaaaagaccacattctccggaaaaggcttttagtagtaaccccgtcgttcggagagagccctcttctgatgtgcatagtaggctaggtgttcccaggcaggatagtaaaggcctctacgccgatactcgggagaagaaatcaggtaatttatggactcgcctaggatctgcacccaagaccaaagaaaagaatacgaagaaagtggatcacagggcgcctggcgctgaggaagacgactctgagctgcaaagggcatggggggctctgattaaggagaaagagcagtctcgccaaaagaagagccggttagataacttaccatctctccagattgaagttagtcgggaaagcagctctggttcagaggcagagtcctgatgcccctggggcctatggcagctgccctaaagcctgacattcttgcacagggtggggcgcgcagtaggaacctcccccgcaggagctggcgccctctcgctcctgctcacacagtcaccctccgctcttgctacttcggcaagacatcttaagaatgtgacacattttcaagggcatctctatctttcgctgcagagttgtagttctgggccctcgattcctttcccaccaccccacaggctttaccctttgagaaaaaggcagccctccagattttgtagacatttttcttaatatttttaacattgtgtcttttaaaagaaatgttttacacagttcatccaaagagcagagaactgaacttctcactattgccttggccctgacagctgttaccagcacccttttcccaagaaaagtcaattcccaggtgcttattggacatccttcgagggggaagaggagggaagcggccagctcacccttccgggaccctagtgtggggcgaatctcacggacctgacctcagaggtgcaccagtgccgcccaggtagataagagctgcagcattgactgtgcttccgttcttccctcggggattgctcatggcatgggcctcttacgtgctgtcagcttgatgtgaagatcaagttcagtgctgtgggatttttaggaacaaaaaactgtgacgtctggatttggggttgatttttgtgctggggtgggattatgggtcaatgttgaagaatttttaagtctgtattatgtttaaaacatgaatgatttgaaagtttaaatttttaatttttatatgtggaaattcttcctgttggctaaaggggaagctcaagtggtgtcgtcttttgtgctgttaaatatatattctattctttggaagaaggcagagagaggagtcttattatttttaaatgctcctagttgtatagtctgtctgttgtacatagagttcagcttgttttttggctccagtaggaaaaaaaatccatccatctgagatggggtcctgttgtttattatcactctagaagttatacattgatatttattctttctgtccccacgttgtggcacctgaagacatcttcaaaattggcagaaaagataatagttataaaaattttagttcatttatttttaaactcctttcagattattttaccattaggaggaggtagattgtttcgtcttcctgtctgatttttgttttgtagtatttaattttgtattcctctgcagttttaagaaacagtgtttttcttcggtttgctggaacatgggcgttagagatggtaataaaccgtggtcctttttgcgatgtcacgactcttcacctgcctgggctgttgtgcacacagtgcagcctggatcctgtcgatctttacttgtggcggagctaatggtcacattgatagttgattacactgtggcacgaattaatgcagaacactgttattaataaaggaagtaaagggctgcaagatttgagagctgcaacaaaaaaaatatt

SEQ ID NO: 322774 - DNA, 3666 bp, Homo sapiens
  misc_feature (741)..(741): n is a, c, g, or t
  misc_feature (744)..(744): n is a, c, g, or t
ctctcagtggtgcggccggcaggcagcgatggcggccgtacggggcctgcgggtgtcggtgaaggcggaggccccggcggggccggccctggggctcccgtcccctgaggcggagtccggtgttgaccgtggcgagccggagcccatggaggtggaggagggcgagctggaaatcgtgcctgtgcggcgctcgctcaaggaactgatcccggacacgagcagaagatatgaaaacaaggctggcagcttcatcactggaattgatgtcacctccaaggaagcaattgaaaagaaagagcagcgagccaagcgcttccattttcgatcggaagtaaatcttgcccaaagaaatgtagccttggaccgagacatgatgaagaaagcaatccccaaggtgagactggagacaatctatatttgcggagtagatgagatgagcacccaagatgtcttttcctattttaaagaatatcctccagctcacatcgaatggttggatgatacctcctgtaatgtagtttggctggatgaaatgacagccacacgagcacttatcaatatgagctccctgcctgcacaggataagatcagaagcagggatgccagtgaggacaagtcagctgagaaaaggaaaaaagacaagcaggaagacagttcagatgatgatgaagctgaagaaggagaggttgaagatgagaactcaagtgatgtagagttggatacgttgtctcaggtagaagnggngtctttgttaagaaacgatcttcgtccagctaacaaacttgctaaaggaaataggttattcatgagatttgctacaaaagccccaggtctaggatccatccaggactgagtgtactcattttgcatcttacctgctccacatctggaatcagccatttctccaaggagctggtgggcatggtttgaggggttcgggggttgggggctatacatactggtttgtgttgtcacgtttacctacagccctggatatatttacagtggtgtttgttctttacagtcagagtgtccaagaactgtggaaggtctttgtattactacttttgacaaaaatttatgatgactgaccacctttctttcctgttaactgacatttcaacttgacaaatgtgatctttaccacattgactcatttgagtggctgagtacattctacatgtatagtattatgctgttttctttaagccattttgaggagcacaataaactggaaaaatgatttaccaaatatatggaattatatgtagtctgtttccttaatcctgatgctgtgttgttggcatgtgatccttcagaagtgaatatcatctttcatggggtggcaaaaatgccactattttgagaaagtctttttgattcctgggtacctgtaatgacctaaagctcttttatgccttttggaaccttgtatcttgtattgtttatttttgttttctccattaagtcatctggctccaaacagcagttttaacctcattcgtctctgtattttgctttatcccctctacactgcattgctgtagtgggcactcagagtgtgaatgttggtagtggatttttactttttgttggcaaattgcgctgatctgattccagctatggaaaacattaaaaaaaaaattcaacattgtctttacactcacaggaaatcctaggtaactattgtcattaatttttagatgacaaaaaggaacttggagcagccagaagaagtcagtattacatgaaatatgggaatccaaattatggaggcatgaaaggaattcttagcaattcatggaagcgaagatatcattcccgtcgtattcagcgggacgtgatcaagaagagagccctgattggggatgacgttggcttgacgtcgtataaacatcgacattctgggctagtgaatgttcccgaggaacccattgaagaggaggaagaggaggaggaggaggaagaggaagaggaagaagaagaccaggacatggatgcagatgacagagtggtggtagagtaccacgaggagctcccggctctcaagcagccccgggagcggagcgcgtctagacgatccagtgccagcagctcagactcagatgaaatggactatgatctagaactgaaaatgatttccacgccttcaccaaagaaaagcatgaaaatgactatgtatgctgacgaagtggaatctcagttgaaaaatattaggaactccatgagggcagatagtgtatcttcaagcaatatcaaaaaccgaattggtaacaaattaccacctgagaaatttgcagatgtccgacatctattagatgagaaacgtcagcactcccgtccacggccaccagtcagcagtactaaatcagatatacgccagcggttaggaaaaagaccacattctccggaaaaggcttttagtagtaaccccgtcgttcggagagagccctcttctgatgtgcatagtaggctaggtgttcccaggcaggatagtaaaggcctctacgccgatactcgggagaagaaatcaggtaatttatggactcgcctaggatctgcacccaagaccaaagaaaagaatacgaagaaagtggatcacagggcgcctggcgctgaggaagacgactctgagctgcaaagggcatggggggctctgattaaggagaaagagcagtctcgccaaaagaagagccggttagataacttaccatctctccagattgaagttagtcgggaaagcagctctggttcagaggcagagtcctgatgcccctggggcctatggcagctgccctaaagcctgacattcttgcacagggtggggcgcgcagtaggaacctcccccgcaggagctggcgccctctcgctcctgctcacacagtcaccctccgctcttgctacttcggcaagacatcttaagaatgtgacacattttcaagggcatctctatctttcgctgcagagttgtagttctgggccctcgattcctttcccaccaccccacaggctttaccctttgagaaaaaggcagccctccagattttgtagacatttttcttaatatttttaacattgtgtcttttaaaagaaatgttttacacagttcatccaaagagcagagaactgaacttctcactattgccttggccctgacagctgttaccagcacccttttcccaagaaaagtcaattcccaggtgcttattggacatccttcgagggggaagaggagggaagcggccagctcacccttccgggaccctagtgtggggcgaatctcacggacctgacctcagaggtgcaccagtgccgcccaggtagataagagctgcagcattgactgtgcttccgttcttccctcggggattgctcatggcatgggcctcttacgtgctgtcagcttgatgtgaagatcaagttcagtgctgtgggatttttaggaacaaaaaactgtgacgtctggatttggggttgatttttgtgctggggtgggattatgggtcaatgttgaagaatttttaagtctgtattatgtttaaaacatgaatgatttgaaagtttaaatttttaatttttatatgtggaaattcttcctgttggctaaaggggaagctcaagtggtgtcgtcttttgtgctgttaaatatatattctattctttgga

SEQ ID NO: 322775 - DNA, 3836 bp, Homo sapiens
  misc_feature (741)..(741): n is a, c, g, or t
  misc_feature (744)..(744): n is a, c, g, or t
ctctcagtggtgcggccggcaggcagcgatggcggccgtacggggcctgcgggtgtcggtgaaggcggaggccccggcggggccggccctggggctcccgtcccctgaggcggagtccggtgttgaccgtggcgagccggagcccatggaggtggaggagggcgagctggaaatcgtgcctgtgcggcgctcgctcaaggaactgatcccggacacgagcagaagatatgaaaacaaggctggcagcttcatcactggaattgatgtcacctccaaggaagcaattgaaaagaaagagcagcgagccaagcgcttccattttcgatcggaagtaaatcttgcccaaagaaatgtagccttggaccgagacatgatgaagaaagcaatccccaaggtgagactggagacaatctatatttgcggagtagatgagatgagcacccaagatgtcttttcctattttaaagaatatcctccagctcacatcgaatggttggatgatacctcctgtaatgtagtttggctggatgaaatgacagccacacgagcacttatcaatatgagctccctgcctgcacaggataagatcagaagcagggatgccagtgaggacaagtcagctgagaaaaggaaaaaagacaagcaggaagacagttcagatgatgatgaagctgaagaaggagaggttgaagatgagaactcaagtgatgtagagttggatacgttgtctcaggtagaagnggngtctttgttaagaaacgatcttcgtccagctaacaaacttgctaaaggaaataggttattcatgagatttgctacaaaagccccaggtctaggatccatccaggactgagtgtactcattttgcatcttacctgctccacatctggaatcagccatttctccaaggagctggtgggcatggtttgaggggttcgggggttgggggctatacatactggtttgtgttgtcacgtttacctacagccctggatatatttacagtggtgtttgttctttacagtcagagtgtccaagaactgtggaaggtctttgtattactacttttgacaaaaatttatgatgactgaccacctttctttcctgttaactgacatttcaacttgacaaatgtgatctttaccacattgactcatttgagtggctgagtacattctacatgtatagtattatgctgttttctttaagccattttgaggagcacaataaactggaaaaatgatttaccaaatatatggaattatatgtagtctgtttccttaatcctgatgctgtgttgttggcatgtgatccttcagaagtgaatatcatctttcatggggtggcaaaaatgccactattttgagaaagtctttttgattcctgggtacctgtaatgacctaaagctcttttatgccttttggaaccttgtatcttgtattgtttatttttgttttctccattaagtcatctggctccaaacagcagttttaacctcattcgtctctgtattttgctttatcccctctacactgcattgctgtagtgggcactcagagtgtgaatgttggtagtggatttttactttttgttggcaaattgcgctgatctgattccagctatggaaaacattaaaaaaaaaattcaacattgtctttacactcacaggaaatcctaggtaactattgtcattaatttttagatgacaaaaaggaacttggagcagccagaagaagtcagtattacatgaaatatgggaatccaaattatggaggcatgaaaggaattcttagcaattcatggaagcgaagatatcattcccgtcgtattcagcgggacgtgatcaagaagagagccctgattggggatgacgttggcttgacgtcgtataaacatcgacattctgggctagtgaatgttcccgaggaacccattgaagaggaggaagaggaggaggaggaggaagaggaagaggaagaagaagaccaggacatggatgcagatgacagagtggtggtagagtaccacgaggagctcccggctctcaagcagccccgggagcggagcgcgtctagacgatccagtgccagcagctcagactcagatgaaatggactatgatctagaactgaaaatgatttccacgccttcaccaaagaaaagcatgaaaatgactatgtatgctgacgaagtggaatctcagttgaaaaatattaggaactccatgagggcagatagtgtatcttcaagcaatatcaaaaaccgaattggtaacaaattaccacctgagaaatttgcagatgtccgacatctattagatgagaaacgtcagcactcccgtccacggccaccagtcagcagtactaaatcagatatacgccagcggttaggaaaaagaccacattctccggaaaaggcttttagtagtaaccccgtcgttcggagagagccctcttctgatgtgcatagtaggctaggtgttcccaggcaggatagtaaaggcctctacgccgatactcgggagaagaaatcaggtaatttatggactcgcctaggatctgcacccaagaccaaagaaaagaatacgaagaaagtggatcacagggcgcctggcgctgaggaagacgactctgagctgcaaagggcatggggggctctgattaaggagaaagagcagtctcgccaaaagaagagccgctgttaccagcacccttttcccaagaaaagtcaattcccaggtgcttattggacatccttcgagggggaagaggagggaagcggccagctcacccttccgggaccctagtgtggggcgaatctcacggacctgacctcagaggtgcaccagtgccgcccaggtagataagagctgcagcattgactgtgcttccgttcttccctcggggattgctcatggcatgggcctcttacgtgctgtcagcttgatgtgaagatcaagttcagtgctgtgggatttttaggaacaaaaaactgtgacgtctggatttggggttgatttttgtgctggggtgggattatgggtcaatgttgaagaatttttaagtctgtattatgtttaaaacatgaatgatttgaaagtttaaatttttaatttttatatgtggaaattcttcctgttggctaaaggggaagctcaagtggtgtcgtcttttgtgctgttaaatatatattctattctttggaagaaggcagagagaggagtcttattatttttaaatgctcctagttgtatagtctgtctgttgtacatagagttcagcttgttttttggctccagtaggaaaaaaaatccatccatctgagatggggtcctgttgtttattatcactctagaagttatacattgatatttattctttctgtccccacgttgtggcacctgaagacatcttcaaaattggcagaaaagataatagttataaaaattttagttcatttatttttaaactcctttcagattattttaccattaggaggaggtagattgtttcgtcttcctgtctgatttttgttttgtagtatttaattttgtattcctctgcagttttaagaaacagtgtttttcttcggtttgctggaacatgggcgttagagatggtaataaaccgtggtcctttttgcgatgtcacgactcttcacctgcctgggctgttgtgcacacagtgcagcctggatcctgtcgatctttacttgtggcggagctaatggtcacattgatagttgattacactgtggcacgaattaatgcagaacactgttattaataaaggaagtaaagggctgcaagatttgagagctgcaacaaaaaaaatatt

SEQ ID NO: 322776 - DNA, 1604 bp, Homo sapiens
ccactgatttaccgaaatttcgagcctcgggtaccccttcgattgtgggctcagaggttcagaggcagagtcctgatgcccctggggcctatggcagctgccctaaagcctgacattcttgcacagggtggggcgcgcagtaggaacctcccccgcaggagctggcgccctctcgctcctgctcacacagtcaccctccgctcttgctacttcggcaagacatcttaagaatgtgacacattttcaagggcatctctatctttcgctgcagagttgtagttctgggccctcgattcctttcccaccaccccacaggctttaccctttgagaaaaaggcagccctccagattttgtagacatttttcttaatatttttaacattgtgtcttttaaaagaaatgttttacacagttcatccaaagagcagagaactgaacttctcactattgccttggccctgacagctgttaccagcacccttttcccaagaaaagtcaattcccaggtgcttattggacatccttcgagggggaagaggagggaagcggccagctcacccttccgggaccctagtgtggggcgaatctcacggacctgacctcagaggtgcaccagtgccgcccaggtagataagagctgcagcattgactgtgcttccgttcttccctcggggattgctcatggcatgggcctcttacgtgctgtcagcttgatgtgaagatcaagttcagtgctgtgggatttttaggaacaaaaaactgtgacgtctggatttggggttgatttttgtgctggggtgggattatgggtcaatgttgaagaatttttaagtctgtattatgtttaaaacatgaatgatttgaaagtttaaatttttaatttttatatgtggaaattcttcctgttggctaaaggggaagctcaagtggtgtcgtcttttgtgctgttaaatatatattctattctttggaagaaggcagagagaggagtcttattatttttaaatgctcctagttgtatagtctgtctgttgtacatagagttcagcttgttttttggctccagtaggaaaaaaaatccatccatctgagatggggtcctgttgtttattatcactctagaagttatacattgatatttattctttctgtccccacgttgtggcacctgaagacatcttcaaaattggcagaaaagataatagttataaaaattttagttcatttatttttaaactcctttcagattattttaccattaggaggaggtagattgtttcgtcttcctgtctgatttttgttttgtagtatttaattttgtattcctctgcagttttaagaaacagtgtttttcttcggtttgctggaacatgggcgttagagatggtaataaaccgtggtcctttttgcgatgtcacgactcttcacctgcctgggctgttgtgcacacagtgcagcctggatcctgtcgatctttacttgtggcggagctaatggtcacattgatagttgattacactgtggcacgaattaatgcagaacactgttattaataaaggaagtaaagggctgcaagatttgagagctgcaacaaaaaaaatatt

SEQ ID NO: 322777 - DNA, 1249 bp, Homo sapiens
  misc_feature (741)..(741): n is a, c, g, or t
  misc_feature (744)..(744): n is a, c, g, or t
ctctcagtggtgcggccggcaggcagcgatggcggccgtacggggcctgcgggtgtcggtgaaggcggaggccccggcggggccggccctggggctcccgtcccctgaggcggagtccggtgttgaccgtggcgagccggagcccatggaggtggaggagggcgagctggaaatcgtgcctgtgcggcgctcgctcaaggaactgatcccggacacgagcagaagatatgaaaacaaggctggcagcttcatcactggaattgatgtcacctccaaggaagcaattgaaaagaaagagcagcgagccaagcgcttccattttcgatcggaagtaaatcttgcccaaagaaatgtagccttggaccgagacatgatgaagaaagcaatccccaaggtgagactggagacaatctatatttgcggagtagatgagatgagcacccaagatgtcttttcctattttaaagaatatcctccagctcacatcgaatggttggatgatacctcctgtaatgtagtttggctggatgaaatgacagccacacgagcacttatcaatatgagctccctgcctgcacaggataagatcagaagcagggatgccagtgaggacaagtcagctgagaaaaggaaaaaagacaagcaggaagacagttcagatgatgatgaagctgaagaaggagaggttgaagatgagaactcaagtgatgtagagttggatacgttgtctcaggtagaagnggngtctttgttaagaaacgatcttcgtccagctaacaaacttgctaaaggaaataggttattcatgagatttgctacaaaagccccaggtctaggatccatccaggactgagtgtactcattttgcatcttacctgctccacatctggaatcagccatttctccaaggagctggtgggcatggtttgaggggttcgggggttgggggctatacatactggtttgtgttgtcacgtttacctacagccctggatatatttacagtggtgtttgttctttacagtcagagtgtccaagaactgtggaaggtctttgtattactacttttgacaaaaatttatgatgactgaccacctttctttcctgttaactgacatttcaacttgacaaatgtgatctttaccacattgactcatttgagtggctgagtacattctacatgtatagtattatgctgttttctttaagccattttgaggagcacaataaactggaaaaatgatttacc

SEQ ID NO: 322778 - DNA, 1326 bp, Homo sapiens
  misc_feature (741)..(741): n is a, c, g, or t
  misc_feature (744)..(744): n is a, c, g, or t
ctctcagtggtgcggccggcaggcagcgatggcggccgtacggggcctgcgggtgtcggtgaaggcggaggccccggcggggccggccctggggctcccgtcccctgaggcggagtccggtgttgaccgtggcgagccggagcccatggaggtggaggagggcgagctggaaatcgtgcctgtgcggcgctcgctcaaggaactgatcccggacacgagcagaagatatgaaaacaaggctggcagcttcatcactggaattgatgtcacctccaaggaagcaattgaaaagaaagagcagcgagccaagcgcttccattttcgatcggaagtaaatcttgcccaaagaaatgtagccttggaccgagacatgatgaagaaagcaatccccaaggtgagactggagacaatctatatttgcggagtagatgagatgagcacccaagatgtcttttcctattttaaagaatatcctccagctcacatcgaatggttggatgatacctcctgtaatgtagtttggctggatgaaatgacagccacacgagcacttatcaatatgagctccctgcctgcacaggataagatcagaagcagggatgccagtgaggacaagtcagctgagaaaaggaaaaaagacaagcaggaagacagttcagatgatgatgaagctgaagaaggagaggttgaagatgagaactcaagtgatgtagagttggatacgttgtctcaggtagaagnggngtctttgttaagaaacgatcttcgtccagctaacaaacttgctaaaggaaataggttattcatgagatttgctacaaaagccccaggtctaggatccatccaggactgagtgtgtaagtatgtaatgtttccttagtcccccttaagctgaaactacttctatcctcccatgttttccaagaatataggtttactattttatacaatgtccctcagtttgggtttgtctgatgattcctcctgattgaatttgggttgtgcatttgagacaggcgtgccacagaagcgatgtcatgtcatttccagagcatcatgtcaggaggccctggatacttactcgtcccagtcctagggacgttcactttattcacttggttaaggtaatcatcactaggtttttccactgtaaagttgctattcttccatttgtaatttaaaaattggtgggctggctggttacagtggctcgtgcctgtaattgcagcactttgggatgctgaggcagaaggatcacttgagcccaggagttcgagaccaggctaggcaacatagcaagacctcatccctattttaaaaaataaa

SEQ ID NO: 322779 - DNA, 399 bp, Homo sapiens
gacttgtagttgtatgctgtgtaatagcacatacacatgtggaaaccaccttcgaaaacctgctcaccagaaccagtctctttagagcaggcagatcatggtttccataagcaaataattataagtttatggatttgtaagtgaatgttggccatgtaagacaggatttcttaaattgtttcctccaaagtatgagattgttgtttgggccttgtctcacagttgaagttggttaactgtgccccatcctaccccctttttaaaggaactccatgagggcagatagtgtatcttcaagcaatatcaaaaaccgaattggtaacaaattaccacctgagaaatttgcagatgtccgacatctattagatgagaaacgtcagcactcccgtccacggccac

SEQ ID NO: 322780 - DNA, 529 bp, Homo sapiens
cagttgttccaataatgtcctttatatattccccgcccagccccaggtctaggatccatccaggactgagtgtgtaagtatgtaatgtttccttagtcccccttaagctgaaactacttctatcctcccatgttttccaagaatataggtttactattttatacaatgtccctcagtttgggtttgtctgatgattcctcctgattgaatttgggttgtgcatttgagacaggcgtgccacagaagcgatgtcatgtcatttccagagcatcatgtcaggaggccctggatacttactcgtcccagtcctagggacgttcactttattcacttggttaaggtaatcatcactaggtttttccactgtaaagttgctattcttccatttgtaatttaaaaattggtgggctggctggttacagtggctcgtgcctgtaattgcagcactttgggatgctgaggcagaaggatcacttgagcccaggagttcgagaccaggctaggcaacatagcaagacctcatccctat

SEQ ID NO: 322781 - DNA, 3051 bp, Homo sapiens
tggggttcaccatgttggccaggatggtctcgatctcttgaccttgtgatccgcccgcctcagcctcccaaagtactgggattacaggcgtgagccatcgcgcccagcctaatatcagtattttaatttacaaattgtcttggatttggccagtagagccccttcaagctgttttgacatactccatgattctttaagcactttctttctttatggcacaacaaaacatcttgcttttccagactcattttgcatcttacctgctccacatctggaatcagccatttctccaaggagctggtgggcatggtttgaggggttcgggggttgggggctatacatactggtttgtgttgtcacgtttacctacagccctggatatatttacagtggtgtttgttctttacagtcagagtgtccaagaactgtggaaggtctttgtattactacttttgacaaaaatttatgatgactgaccacctttctttcctgttaactgacatttcaacttgacaaatgtgatctttaccacattgactcatttgagtggctgagtacattctacatgtatagtattatgctgttttctttaagccattttgaggagcacaataaactggaaaaatgatttaccaaatatatggaattatatgtagtctgtttccttaatcctgatgctgtgttgttggcatgtgatccttcagaagtgaatatcatctttcatggggtggcaaaaatgccactattttgagaaagtctttttgattcctgggtacctgtaatgacctaaagctcttttatgccttttggaaccttgtatcttgtattgtttatttttgttttctccattaagtcatctggctccaaacagcagttttaacctcattcgtctctgtattttgctttatcccctctacactgcattgctgtagtgggcactcagagtgtgaatgttggtagtggatttttactttttgttggcaaattgcgctgatctgattccagctatggaaaacattaaaaaaaaaattcaacattgtctttacactcacaggaaatcctaggtaactattgtcattaatttttagatgacaaaaaggaacttggagcagccagaagaagtcagtattacatgaaatatgggaatccaaattatggaggcatgaaaggaattcttagcaattcatggaagcgaagatatcattcccgtcgtattcagcgggacgtgatcaagaagagagccctgattggggatgacgttggcttgacgtcgtataaacatcgacattctgggctagtgaatgttcccgaggaacccattgaagaggaggaagaggaggaggaggaggaagaggaagaggaagaagaagaccaggacatggatgcagatgacagagtggtggtagagtaccacgaggagctcccggctctcaagcagccccgggagcggagcgcgtctagacgatccagtgccagcagctcagactcagatgaaatggactatgatctagaactgaaaatgatttccacgccttcaccaaagaaaagcatgaaaatgactatgtatgctgacgaagtggaatctcagttgaaaaatattaggaactccatgagggcagatagtgtatcttcaagcaatatcaaaaaccgaattggtaacaaattaccacctgagaaatttgcagatgtccgacatctattagatgagaaacgtcagcactcccgtccacggccaccagtcagcagtactaaatcagatatacgccagcggttaggaaaaagaccacattctccggaaaaggcttttagtagtaaccccgtcgttcggagagagccctcttctgatgtgcatagtaggctaggtgttcccaggcaggatagtaaaggcctctacgccgatactcgggagaagaaatcaggtaatttatggactcgcctaggatctgcacccaagaccaaagaaaagaatacgaagaaagtggatcacagggcgcctggcgctgaggaagacgactctgagctgcaaagggcatggggggctctgattaaggagaaagagcagtctcgccaaaagaagagccggttagataacttaccatctctccagattgaagttagtcgggaaagcagctctggttcagaggcagagtcctgatgcccctggggcctatggcagctgccctaaagcctgacattcttgcacagggtggggcgcgcagtaggaacctcccccgcaggagctggcgccctctcgctcctgctcacacagtcaccctccgctcttgctacttcggcaagacatcttaagaatgtgacacattttcaagggcatctctatctttcgctgcagagttgtagttctgggccctcgattcctttcccaccaccccacaggctttaccctttgagaaaaaggcagccctccagattttgtagacatttttcttaatatttttaacattgtgtcttttaaaagaaatgttttacacagttcatccaaagagcagagaactgaacttctcactattgccttggccctgacagctgttaccagcacccttttcccaagaaaagtcaattcccaggtgcttattggacatccttcgagggggaagaggagggaagcggccagctcacccttccgggaccctagtgtggggcgaatctcacggacctgacctcagaggtgcaccagtgccgcccaggtagataagagctgcagcattgactgtgcttccgttcttccctcggggattgctcatggcatgggcctcttacgtgctgtcagcttgatgtgaagatcaagttcagtgctgtgggatttttaggaacaaaaaactgtgacgtctggatttggggttgatttttgtgctggggtgggattatgggtcaatgttgaagaatttttaagtctgtattatgtttaaaacatgaatgatttgaaagtttaaatttttaatttttatatgtggaaattcttcctgttggctaaaggggaagctcaagtggtgtcgtcttttgtgctgttaaatatatattctattctttgga

SEQ ID NO: 322782 - DNA, 3581 bp, Homo sapiens
  misc_feature (741)..(741): n is a, c, g, or t
  misc_feature (744)..(744): n is a, c, g, or t
ctctcagtggtgcggccggcaggcagcgatggcggccgtacggggcctgcgggtgtcggtgaaggcggaggccccggcggggccggccctggggctcccgtcccctgaggcggagtccggtgttgaccgtggcgagccggagcccatggaggtggaggagggcgagctggaaatcgtgcctgtgcggcgctcgctcaaggaactgatcccggacacgagcagaagatatgaaaacaaggctggcagcttcatcactggaattgatgtcacctccaaggaagcaattgaaaagaaagagcagcgagccaagcgcttccattttcgatcggaagtaaatcttgcccaaagaaatgtagccttggaccgagacatgatgaagaaagcaatccccaaggtgagactggagacaatctatatttgcggagtagatgagatgagcacccaagatgtcttttcctattttaaagaatatcctccagctcacatcgaatggttggatgatacctcctgtaatgtagtttggctggatgaaatgacagccacacgagcacttatcaatatgagctccctgcctgcacaggataagatcagaagcagggatgccagtgaggacaagtcagctgagaaaaggaaaaaagacaagcaggaagacagttcagatgatgatgaagctgaagaaggagaggttgaagatgagaactcaagtgatgtagagttggatacgttgtctcaggtagaagnggngtctttgttaagaaacgatcttcgtccagctaacaaacttgctaaaggaaataggttattcatgagatttgctacaaaagccccaggtctaggatccatccaggactgagtgtactcattttgcatcttacctgctccacatctggaatcagccatttctccaaggagctggtgggcatggtttgaggggttcgggggttgggggctatacatactggtttgtgttgtcacgtttacctacagccctggatatatttacagtggtgtttgttctttacagtcagagtgtccaagaactgtggaaggtctttgtattactacttttgacaaaaatttatgatgactgaccacctttctttcctgttaactgacatttcaacttgacaaatgtgatctttaccacattgactcatttgagtggctgagtacattctacatgtatagtattatgctgttttctttaagccattttgaggagcacaataaactggaaaaatgatttaccaaatatatggaattatatgtagtctgtttccttaatcctgatgctgtgttgttggcatgtgatccttcagaagtgaatatcatctttcatggggtggcaaaaatgccactattttgagaaagtctttttgattcctgggtacctgtaatgacctaaagctcttttatgccttttggaaccttgtatcttgtattgtttatttttgttttctccattaagtcatctggctccaaacagcagttttaacctcattcgtctctgtattttgctttatcccctctacactgcattgctgtagtgggcactcagagtgtgaatgttggtagtggatttttactttttgttggcaaattgcgctgatctgattccagctatggaaaacattaaaaaaaaaattcaacattgtctttacactcacaggaaatcctaggtaactattgtcattaatttttagatgacaaaaaggaacttggagcagccagaagaagtcagtattacatgaaatatgggaatccaaattatggaggcatgaaaggaattcttagcaattcatggaagcgaagatatcattcccgtcgtattcagcgggacgtgatcaagaagagagccctgattggggatgacgttggcttgacgtcgtataaacatcgacattctgggctagtgaatgttcccgaggaacccattgaagaggaggaagaggaggaggaggaggaagaggaagaggaagaagaagaccaggacatggatgcagatgacagagtggtggtagagtaccacgaggagctcccggctctcaagcagccccgggagcggagcgcgtctagacgatccagtgccagcagctcagactcagatgaaatggactatgatctagaactgaaaatgatttccacgccttcaccaaagaaaagcatgaaaatgactatgtatgctgacgaagtggaatctcagttgaaaaatattaggaactccatgagggcagatagtgtatcttcaagcaatatcaaaaaccgaattggtaacaaattaccacctgagaaatttgcagatgtccgacatctattagatgagaaacgtcagcactcccgtccacggccaccagtcagcagtactaaatcagatatacgccagcggttaggaaaaagaccacattctccggaaaaggcttttagtagtaaccccgtcgttcggagagagccctcttctgatgtgcatagtaggctaggtgttcccaggcaggatagtaaaggcctctacgccgatactcgggagaagaaatcaggtaatttatggactcgcctaggatctgcacccaagaccaaagaaaagaatacgaagaaagtggatcacagggcgcctggcgctgaggaagacgactctgagctgcaaagggcatggggggctctgattaaggagaaagagcagtctcgccaaaagaagagccggttagataacttaccatctctccagattgaagttagtcgggaaagcagctctggttcagaggcagagtcctgatgcccctggggcctatggcagctgccctaaagcctgacattcttgcacagggtggggcgcgcagtaggaacctcccccgcaggagctggcgccctctcgctcctgctcacacagtcaccctccgctcttgctacttcggcaagacatcttaagaatgtgacacattttcaagggcatctctatctttcgctgcagagttgtagttctgggccctcgattcctttcccaccaccccacaggctttaccctttgagaaaaaggcagccctccagattttgtagacatttttcttaatatttttaacattgtgtcttttaaaagaaatgttttacacagttcatccaaagagcagagaactgaacttctcactattgccttggccctgacagctgttaccagcacccttttcccaagaaaagtcaattcccaggtgcttattggacatccttcgagggggaagaggagggaagcggccagctcacccttccgggaccctagtgtggggcgaatctcacggacctgacctcagaggtgcaccagtgccgcccaggtagataagagctgcagcattgactgtgcttccgttcttccctcggggattgctcatggcatgggcctcttacgtgctgtcagcttgatgtgaagatcaagttcagtgctgtgggatttttaggaacaaaaaactgtgacgtctggatttggggttgatttttgtgctggggtgggattatgggtcaatgttgaagaatttttaagtctgtattatgtttaaaacatggcgccggctggcccagcacattagattgagcag

SEQ ID NO: 322783 - DNA, 1680 bp, Homo sapiens
  misc_feature (741)..(741): n is a, c, g, or t
  misc_feature (744)..(744): n is a, c, g, or t
ctctcagtggtgcggccggcaggcagcgatggcggccgtacggggcctgcgggtgtcggtgaaggcggaggccccggcggggccggccctggggctcccgtcccctgaggcggagtccggtgttgaccgtggcgagccggagcccatggaggtggaggagggcgagctggaaatcgtgcctgtgcggcgctcgctcaaggaactgatcccggacacgagcagaagatatgaaaacaaggctggcagcttcatcactggaattgatgtcacctccaaggaagcaattgaaaagaaagagcagcgagccaagcgcttccattttcgatcggaagtaaatcttgcccaaagaaatgtagccttggaccgagacatgatgaagaaagcaatccccaaggtgagactggagacaatctatatttgcggagtagatgagatgagcacccaagatgtcttttcctattttaaagaatatcctccagctcacatcgaatggttggatgatacctcctgtaatgtagtttggctggatgaaatgacagccacacgagcacttatcaatatgagctccctgcctgcacaggataagatcagaagcagggatgccagtgaggacaagtcagctgagaaaaggaaaaaagacaagcaggaagacagttcagatgatgatgaagctgaagaaggagaggttgaagatgagaactcaagtgatgtagagttggatacgttgtctcaggtagaagnggngtctttgttaagaaacgatcttcgtccagctaacaaacttgctaaaggaaataggttattcatgagatttgctacaaaagccccaggtctaggatccatccaggactgagtgtactcattttgcatcttacctgctccacatctggaatcagccatttctccaaggagctggtgggcatggtttgaggggttcgggggttgggggctatacatactggtttgtgttgtcacgtttacctacagccctggatatatttacagtggtgtttgttctttacagtcagagtgtccaagaactgtggaaggtctttgtattactacttttgacaaaaatttatgatgactgaccacctttctttcctgttaactgacatttcaacttgacaaatgtgatctttaccacattgactcatttgagtggctgagtacattctacatgtatagtattatgctgttttctttaagccattttgaggagcacaataaactggaaaaatgatttaccaaatatatggaattatatgtagtctgtttccttaatcctgatgctgtgttgttggcatgtgatccttcagaagtgaatatcatctttcatggggtggcaaaaatgccactattttgagaaagtctttttgattcctgggtacctgtaatgacctaaagctcttttatgccttttggaaccttgtatcttgtattgtttatttttgttttctccattaagtcatctggctccaaacagcagttttaacctcattcgtctctgtattttgctttatcccctctacactgcattgctgtagtgggcactcagagtgtgaatgttggtagtggatttttactttttgttggcaaattgcgctgatctgattccagctatggaaaacattaaaaaaagtcgacgcggccgcgaatttagtagtagtaggcggccgc

SEQ ID NO: 322784 - DNA, 641 bp, Homo sapiens
ttgcggacaggaaaattctatcatcttttctgtgtcttgtctttctagcaatccccaaggtgagactggagacaatctatatttgcggagtagatgagatgagcacccaagatgtcttttcctattttaaagaatatcctccagctcacatcgaatggttggatgatacctcctgtaagtacacccgagtttcctgtgaatatgcttttgttgatgatttttcaagagttcttgccatcagagatggtgaatggttctggcccatactacttgtttatgccgaacttctgctgttagtccaggagagaaaaaattgtcgagcagtgaaacgcagcatgcccttgccagtctgccagctcataccccatagtgtcccacgtcagctgagaggtggtggccagggctctaggaggtgggttactggcctctgaatctgccgtagttgattgaggcctctttaacactcaccttttcccaacaaaggagaggatccaactgcgtagacttggggctgcattttcagagccttggactttgtcattactgccttctgtactgttactcagagggctgactctgcctgtgtctctgacctagagatagaccagaatagacactggacagagtgtcattctgaatag

SEQ ID NO: 322785 - DNA, 1210 bp, Homo sapiens
agcggagctctccagttcgcccgttcctggcctgacccccaccaaggcccataccgcagtaggctcctcgggctgcccctcggttgacaatggtctccaggatggtctctaccatgctatctggcctactgttttggctggcatctggatggactccagcatttgcttacagcccccggacccctgaccgggtctcagaagcagatatccagaggctgcttcatggtgttatggagcaattgggcattgccaggccccgagtggaatatccagctcaccaggccatgaatcttgtgggcccccagagcattgaaggtggagctcatgaaggacttcagcatttgggtccttttggcaacatccccaacatcgtggcagagttgactggagacaacattcctaaggactttagtgaggatcaggggtacccagaccctccaaatccctgtcctgttggaaaaacagcagatgatggatgtctagaaaacacccctgacactgcagagttcagtcgagagttccagttgcaccagcatctctttgatccggaacatgactatccaggcttgggcaagtggaacaagaaactcctttacgagaagatgaagggaggagagagacgaaagcggaggagtgtcaatccatatctacaaggacagagactggataatgttgttgcaaagaagtctgtcccccatttttcagatgaggataaggatccagagtaaagagaagatgctagacgaaaacccacattacctgttaggcctcagcatggcttatgtgcacgtgtaaatggagtccctgtgaatgacagcatgtttcttacatagataattatggatacaaagcagctgtatgtagatagtgtattgtcttcacaccgatgattctgctttttgctaaattagaataagagcttttttgtttcttgggtttttaaaatgtgaatctgcaatgatcataaaaattaaaatgtgaatgtcaacaataaaaagcaagactatgaaaggctcagatttcttgcagtttaaaatggtgtctgaggttgtactattttggccaagtctgtagaaagctgtcatttgattttgattatgtagttcatccagcccttgggcattgttatacaccagtaaagaaggctgtactcaagaggaggagctgacacatttcacttggctgcgtcttaataaacatgaatgcaagc

SEQ ID NO: 322786 - DNA, 1545 bp, Homo sapiens
agcggagctctccagttcgcccgttcctggcctgacccccaccaaggcccataccgcagtaggctcctcgggctgcccctcggttgacaatggtctccaggatggtctctaccatgctatctggcctactgttttggctggcatctggatggactccagcatttgcttacagcccccggacccctgaccgggtctcagaagcagatatccagaggctgcttcatggtgttatggagcaattgggcattgccaggccccgagtggaatatccagctcaccaggccatgaatcttgtgggcccccagagcattgaaggtggagctcatgaaggacttcagcatttgggtccttttggcaacatccccaacatcgtggcagagttgactggagacaacattcctaaggactttagtgaggatcaggggtacccagaccctccaaatccctgtcctgttggaaaaacagcagatgatggatgtctagaaaacacccctgacactgcagagttcagtcgagagttccagttgcaccagcatctctttgatccggaacatgactatccaggcttgggcaagtggaacaagaaactcctttacgagaagatgaagggaggagagagacgaaagcggaggagtgtcaatccatatctacaaggacagagactggataatgttgttgcaaagaagtctgtcccccatttttcagatgaggataaggatccagagtaaagagaagatgctagacgaaaacccacattacctgttaggcctcagcatggcttatgtgcacgtgtaaatggagtccctgtgaatgacagcatgtttcttacatagataattatggatacaaagcagctgtatgtagatagtgtattgtcttcacaccgatgattctgctttttgctaaattagaataagagcttttttgtttcttgggtttttaaaatgtgaatctgcaatgatcataaaaattaaaatgtgaatgtcaacaataaaaagcaagactatgaaaggctcagatttcttgcagtttaaaatggtgtctgaggttgtactattttggccaagtctgtagaaagctgtcatttgattttgattatgtagttcatccagcccttgggcattgttatacaccagtaaagaaggctgtactcaagaggaggagctgacacatttcacttggctgcgtcttaataaacatgaatgcaagcattggcatatggagttttctttttaaagcattataaagaacaatttctttgtttaatagaacaacctgatctacatatatgatagtatatgatccaaacaataatgctgtgaacttaatgggtctggtattatccccattttacagatggtagaactgagatgcattcaacacactgagatacgttcaacacaccattgggaatcatcagcaaaatccagcatgaagagtctctacaggataagtagcctagatttttccaacaaataaatgataggagggaaaaatggtggggtactatcatagattttaaaaggcttaagagacatacgagcc

SEQ ID NO: 322787 - DNA, 1242 bp, Homo sapiens
agcggagctctccagttcgcccgttcctggcctgacccccaccaaggcccataccgcagtaggctcctcgggctgcccctcggttgacaatggtctccaggatggtctctaccatgctatctggcctactgttttggctggcatctggatggactccagcatttgcttacagcccccggacccctgaccgggtctcagaagcagatatccagaggctgcttcatggtgttatggagcaattgggcattgccaggccccgagtggaatatccagctcaccaggccatgaatcttgtgggcccccagagcattgaaggtggagctcatgaaggacttcagcatttgggtccttttggcaacatccccaacatcgtggcagagttgactggagacaacattcctaaggactttagtgaggatcaggggtacccagaccctccaaatccctgtcctgttggaaaaacagcagatgatggatgtctagaaaacacccctgacactgcagagttcagtcgagagttccagttgcaccagcatctctttgatccggaacatgactatccaggcttgggcaagtggaacaagaaactcctttacgagaagatgaagggaggagagagacgaaagcggaggagtgtcaatccatatctacaaggacagagactggataatgttgttgcaaagaagtctgtcccccatttttcagatgaggataaggatccagagtaaagagaagatgctagacgaaaacccacattacctgttaggcctcagcatggcttatgtgcacgtgtaaatggagtccctgtgaatgacagcatgtttcttacatagataattatggatacaaagcagctgtatgtagatagtgtattgtcttcacaccgatgattctgctttttgctaaattagaataagagcttttttgtttcttgggtttttaaaatgtgaatctgcaatgatcataaaaattaaaatgtgaatgtcaacaataaaaagcaagactatgaaaggctcagatttcttgcagtttaaaatggtgtctgaggttgtactattttggccaagtctgtagaaagctgtcatttgattttgattatgtagttcatccagcccttgggcattgttatacaccagtaaagaaggctgtactcaagaggaggagctgacacatttcacttggctgcgtcttaataaacatgaatgcaagccaaaaaaaaatagtaaagataaaaaaaaaaaa

SEQ ID NO: 322788 - DNA, 1014 bp, Homo sapiens
agcggagctctccagttcgcccgttcctggcctgacccccaccaaggcccataccgcagtaggctcctcgggctgcccctcggttgacaatggtctccaggatggtctctaccatgctatctggcctactgttttggctggcatctggatggactccagcatttgcttacagcccccggacccctgaccgggtctcagaagcagatatccagaggctgcttcatggtgttatggagcaattgggcattgccaggccccgagtggaatatccagctcaccaggccatgaatcttgtgggcccccagagcattgaaggtggagctcatgaaggacttcagcatttgggtccttttggcaacatccccaacatcgtggcagagttgactggagacaacattcctaaggactttagtgaggatcaggggtacccagaccctccaaatccctgtcctgttggaaaaacagcagatgatggatgtctagaaaacacccctgacactgcagagttcagtcgagagttccagttgcaccagcatctctttgatccggaacatgactatccaggcttgggcaagtggaacaagaaactcctttacgagaagatgaagggaggagagagacgaaagcggaggagtgtcaatccatatctacaaggacagagactggataatgttgttgcaaagaagtctgtcccccatttttcagatgaggataaggatccagagtaaagagaagatgctagacgaaaacccacattacctgttaggcctcagcatggcttatgtgcacgtgtaaatggagtccctgtgaatgacagcatgtttcttacatagataattatggatacaaagcagctgtatgtagatagtgtattgtcttcacaccgatgattctgctttttgctaaattagaataagagcttttttgtttcttgggtttttaaaatgtgaatctgcaatgatcataaaaattaaaatgtgaatgtcaacaataaaaagcaagactatgaaaggc

SEQ ID NO: 322789 - DNA, 1082 bp, Homo sapiens
tgtggcaggatcctccttcatgagaagatggaagcatggtgttgtttttgcctggttttgctcaaatgtcatgcacaccaaggcaccttttgattgtaaaccagcctttcctgtattggtctgcgtacaccatgattgtcccttaggggaactgtgagtgtggggctcctctgtcctcatggagttggtggagctcatgaaggacttcagcatttgggtccttttggcaacatccccaacatcgtggcagagttgactggagacaacattcctaaggactttagtgaggatcaggggtacccagaccctccaaatccctgtcctgttggaaaaacagcagatgatggatgtctagaaaacacccctgacactgcagagttcagtcgagagttccagttgcaccagcatctctttgatccggaacatgactatccaggcttgggcaagtggaacaagaaactcctttacgagaagatgaagggaggagagagacgaaagcggaggagtgtcaatccatatctacaaggacagagactggataatgttgttgcaaagaagtctgtcccccatttttcagatgaggataaggatccagagtaaagagaagatgctagacgaaaacccacattacctgttaggcctcagcatggcttatgtgcacgtgtaaatggagtccctgtgaatgacagcatgtttcttacatagataattatggatacaaagcagctgtatgtagatagtgtattgtcttcacaccgatgattctgctttttgctaaattagaataagagcttttttgtttcttgggtttttaaaatgtgaatctgcaatgatcataaaaattaaaatgtgaatgtcaacaataaaaagcaagactatgaaaggctcagatttcttgcagtttaaaatggtgtctgaggttgtactattttggccaagtctgtagaaagctgtcatttgattttgattatgtagttcatccagcccttgggcattgttatacaccagtaaagaaggctgtactcaagaggaggagctgacacatttcacttggctgcgtcttaataaacatgaatgcaagc

SEQ ID NO: 322790 - DNA, 1140 bp, Homo sapiens
agcggagctctccagttcgcccgttcctggcctgacccccaccaaggcccataccgcagtaggctcctcgggctgcccctcggttgacaatggtctccaggatggtctctaccatgctatctggcctactgttttggctggcatctggatggactccagcatttgcttacagcccccggacccctgaccgggtctcagaagcagatatccagaggctgcttcatggtgttatggagcaattgggcattgccaggccccgagtggaatatccagctcaccaggccatgaatcttgtgggcccccagagcattgaaggtggagctcatgaaggacttcagcatttgggtccttttggcaacatccccaacatcgtggcagagttgactggagacaacattcctaaggactttagtgaggatcaggggtacccagaccctccaaatccctgtcctgttggaaaaacagcagatgatggatgtctagaaaacacccctgacactgcagagttcagtcgagagttccagttgcaccagcatctctttgatccggaacatgactatccaggcttgggcaagtggaacaagaaactcctttacgagaagatgaagggaggagagagacgaaagcggaggagtgtcaatccatatctacaaggacagagactggataatgttgttgcaaagaagtctgtcccccatttttcagatgaggataaggatccagagtaaagagaagatgctagacgaaaacccacattacctgttaggcctcagcatggcttatgtgcacgtgtaaatggagtccctgtgaatgacagcatgtttcttacatagataattatggatacaaagcagctgtatgtagatagtgtattgtcttcacaccgatgattctgctttttgctaaattagaataagagcttttttgtttcttgggtttttaaaatgtgaatctgcaatgatcataaaaattaaaatgtgaatgtcaacaataaaaagcaagactatgaaaggctcagatttcttgcagtttaaaatggtgtctgaggttgtactattttggccaagtctgtagaaagctgtcatttgattttgattatgtagttcatccagcctggtctctctcagcctgggtctgcct

SEQ ID NO: 322791 - DNA, 1156 bp, Homo sapiens
agcggagctctccagttcgcccgttcctggcctgacccccaccaaggcccataccgcagtaggctcctcgggctgcccctcggttgacaatggtctccaggatggtctctaccatgctatctggcctactgttttggctggcatctggatggactccagcatttgcttacagcccccggacccctgaccgggtctcagaagcagatatccagaggctgcttcatggtgttatggagcaattgggcattgccaggccccgagtggaatatccagctcaccaggccatgaatcttgtgggcccccagagcattgaaggtggagctcatgaaggacttcagcatttgggtccttttggcaacatccccaacatcgtggcagagttgactggagacaacattcctaaggactttagtgaggatcaggggtacccagaccctccaaatccctgtcctgttggaaaaacagcagatgatggatgtctagaaaacacccctgacactgcagagttcagtcgagagttccagttgcaccagcatctctttgatccggaacatgactatccaggcttgggcaagtggagtgtcaatccatatctacaaggacagagactggataatgttgttgcaaagaagtctgtcccccatttttcagatgaggataaggatccagagtaaagagaagatgctagacgaaaacccacattacctgttaggcctcagcatggcttatgtgcacgtgtaaatggagtccctgtgaatgacagcatgtttcttacatagataattatggatacaaagcagctgtatgtagatagtgtattgtcttcacaccgatgattctgctttttgctaaattagaataagagcttttttgtttcttgggtttttaaaatgtgaatctgcaatgatcataaaaattaaaatgtgaatgtcaacaataaaaagcaagactatgaaaggctcagatttcttgcagtttaaaatggtgtctgaggttgtactattttggccaagtctgtagaaagctgtcatttgattttgattatgtagttcatccagcccttgggcattgttatacaccagtaaagaaggctgtactcaagaggaggagctgacacatttcacttggctgcgtcttaataaacatgaatgcaagc

SEQ ID NO: 322792 - DNA, 1212 bp, Homo sapiens
agcgaagtgaacgccgtttgctgagcctgatgcccagcgagaggcgatacacgataaataagctcctcataactgtctctcaatatgacgatgtatcacccggatggtctctaccatgctatctggcctactgttttggctggcatctggatggactccagcatttgcttacagcccccggacccctgaccgggtctcagaagcagatatccagaggctgcttcatggtgttatggagcaattgggcattgccaggccccgagtggaatatccagctcaccaggccatgaatcttgtgggcccccagagcattgaaggtggagctcatgaaggacttcagcatttgggtccttttggcaacatccccaacatcgtggcagagttgactggagacaacattcctaaggactttagtgaggatcaggggtacccagaccctccaaatccctgtcctgttggaaaaacagcagatgatggatgtctagaaaacacccctgacactgcagagttcagtcgagagttccagttgcaccagcatctctttgatccggaacatgactatccaggcttgggcaagtggaacaagaaactcctttacgagaagatgaagggaggagagagacgaaagcggaggagtgtcaatccatatctacaaggacagagactggataatgttgttgcaaagaagtctgtcccccatttttcagatgaggataaggatccagagtaaagagaagatgctagacgaaaacccacattacctgttaggcctcagcatggcttatgtgcacgtgtaaatggagtccctgtgaatgacagcatgtttcttacatagataattatggatacaaagcagctgtatgtagatagtgtattgtcttcacaccgatgattctgctttttgctaaattagaataagagcttttttgtttcttgggtttttaaaatgtgaatctgcaatgatcataaaaattaaaatgtgaatgtcaacaataaaaagcaagactatgaaaggctcagatttcttgcagtttaaaatggtgtctgaggttgtactattttggccaagtctgtagaaagctgtcatttgattttgattatgtagttcatccagcccttgggcattgttatacaccagtaaagaaggctgtactcaagaggaggagctgacacatttcacttggctgcgtcttaataaacatgaatgcaagc

SEQ ID NO: 322793 - DNA, 922 bp, Homo sapiens
agcggagctctccagttcgcccgttcctggcctgacccccaccaaggcccataccgcagtaggctcctcgggctgcccctcggttgacaatggtctccaggatggtctctaccatgctatctggcctactgttttggctggcatctggatggactccagcatttgcttacagcccccggacccctgaccgggtctcagaagcagatatccagaggctgcttcatggtgttatggagcaattgggcattgccaggccccgagtggaatatccagctcaccaggccatgaatcttgtgggcccccagagcattgaaggtggagctcatgaaggacttcagcatttgggtccttttggcaacatccccaacatcgtggcagagttgactggagacaacattcctaaggactttagtgaggatcaggggtacccagaccctccaaatccctgtcctgttggaaaaacagcagatgatggatgtctagaaaacacccctgacactgcagagttcagtcgagagttccagttgcaccagcatctctttgatccggaacatgactatccaggcttgggcaagtggaacaagaaactcctttacgagaagatgaagggaggagagagacgaaagcggaggagtgtcaatccatatctacaaggacagagactggataatgttgttgcaaagaagtctgtcccccatttttcagatgaggataaggatccagagtaaagagaagatgctagacgaaaacccacattacctgttaggcctcagcatggcttatgtgcacgtgtaaatggagtccctgtgaatgacagcatgtttcttacatagataattatggatacaaagcagctgtatgtagatagtgtattgtcttcacaccgatgattctaatttagcaaaaagcttcgtgccgctcg

SEQ ID NO: 322794 - DNA, 1176 bp, Homo sapiens
agcggagctctccagttcgcccgttcctggcctgacccccaccaaggcccataccgcagtaggctcctcgggctgcccctcggttgacaatggtctccaggatggtctctaccatgctatctggcctactgttttggctggcatctggatggactccagcatttgcttacagcccccggacccctgaccgggtctcagaagcagatatccagaggctgcttcatggtgttatggagcaattgggcattgccaggccccgagtggaatatccagctcaccaggccatgaatcttgtgggcccccagagcattgaaggtggagctcatgaaggacttcagcatttgggtccttttggcaacatccccaacatcgtggcagagttgactggagacaacattcctaaggactttagtgaggatcaggggtacccagaccctccaaatccctgtcctgttggaaaaacagcagatgatggatgtctagaaaacacccctgacactgcagagttcagtcgagagttccagttgcaccagcatctctttgatccggaacatgactatccaggcttgggcaagtggaacaagaaactcctttacgagaagatgaagggaggagagagacgaaagcggagggtaacacgtgcctggctggattgttgcggggatgcttggagctttctgagtggggcagtgaacaggctgaaaccctcgcttgttgggaagtcacagaatcctcccttgtgtagtcctgagaaacactggtccatgtgacaagggccacacccagaaagtctgtccttggtttctgcgatggcttccccaggctttagcagatgatttttagtggaacgcgcagtctgtagcaattctagcaactccattccgttcaggaaatgtgtattgcttcccccatcagtgtgggacatatctggggggacatgagggtctgtctgccctcccagggtctgtaggccagtggggaaaaactgatcacacatctgcatcaattctataaaaacacaggacagaaacagggaagtgctgaactgcatgctccaggaaataactttgaaggaattcgggagcaaaagatgagatgaacaaacttaatttctcctatgtatctttttttcttggcctagccagactgatgtaaaatctactagatctgtaatat

SEQ ID NO: 322795 - DNA, 972 bp, Homo sapiens
  misc_feature (5)..(5): n is a, c, g, or t
  misc_feature (910)..(911): n is a, c, g, or t
  misc_feature (914)..(914): n is a, c, g, or t
  misc_feature (921)..(921): n is a, c, g, or t
agagncggcggcacgaaaataggctaggtacgaggcgggtgtgcggtgcgcttccggctccagtccccgggctcggcctcggcgaggtgtaattcgcagcgcgggccggccccggaggctctcggcgagcgcggcgcggtaacaagtgggcgaggatgccgtacgagatcaagaaggtgttcgccagcctcccgcaggtggagaggggcgtctccaagatcatcggcggcgaccctaagggcaacaattttctgtacaccaatggaaagtgcgtcatcctaaggaacatcgacaacccagcccttgctgacatctacacagagcacgcccatcaggtggtggtggccaagtatgcgcccagcggattctacattgcctccggagatgtgtctgggaagctgaggatctgggataccacgcagaaggagcacctgttgaagtatgagtaccagcctttcgctgggaagatcaaagacattgcttggactgaagacagtaagaggatcgccgtggtcggggaaggaagggagaagtttggagcagtcttcctctgggatagtggctcttctgtgggcgagattacaggacacaacaaagtcatcaacagcgtggacatcaagcagagccggccataccggctggccacgggaagcgatgataactgcgcggcattctttgagggacccccattcaagttcaagttcacagttggcgaccacagccgctttgtcaactgtgtgcgattctctcctgatgggaacagatttgccacagccagtgctgacggccagatatacatctatgacgggaagactggggagaaggtgtgcgcgctgggcggaagcaaggcccgcggggggggtttcgcccttgtgtgggtcccgcaggccctttggtttggtttggggcnnctnccggatngggggcgcgcgacgcccgggggggccttccctgggcccggttgggcaccgg

SEQ ID NO: 322796 - DNA, 762 bp, Homo sapiens
tcctccaccagccagcttgagggcctcatgagaccagcggtgccccgaggtaccaacagctgttttcatagagctgcgtaggtttcaggcccatccacgggaagagccatgcccagctcctggcatgggcccagcagagcagcagtcagtgggaacggcacagtttcttaagccctcgacccccccttcacaaaggatgggtgtggtgtgtgtgttcaggggtggctcacttcctctctgtccctgccgtaggacggcaacgtccgcctgtattccatcctgggcaccacgctgaaggatgagggcaagctcctagaggccaagggccccgtgaccgacgtggcctactcccacgacggcgccttcctcgcggtgtgcgaccgccacctccagatcagatggggacacacaacccctggatatgtttcattgtcagattttgtgcttgattttaagaatggaattgtgggtatctttcctttttttttaatgtatcttaactgttgcctgtcagtgtttacaaactagtgcgttgacggcaccgtgtccaagtttttagaacccttgttagccagaccgaggtgtcctggtcaccgtttcaccatcatgctttgatgttcccctgtctttccctcttctgctctcaagagcaaaggttaatttaaggacaaagatgaagtcactgtaaactaatctgtcattgtttttaccttccttttctttttcagtgcagaaattaaaagtaagtataaagcaccgtga

SEQ ID NO: 322797 - DNA, 257 bp, Homo sapiens
  misc_feature (19)..(19): n is a, c, g, or t
gggttttttaaccaaaaanctatagtggcggtgtgtacgtgtccaagtttttagaacccttgttagccagaccgaggtgtcctggtcaccgtttcaccatcatgctttgatgttcccctgtctttccctcttctgctctcaagagcaaaggttaatttaaggacaaagatgaagtcactgtaaactaatctgtcattgtttttaccttccttttctttttcagtgcagaaattaaaagtaagtataaagcaccgtga

SEQ ID NO: 322798 - DNA, 214 bp, Homo sapiens
aattcgcggccgcgtcgactacggctgcgagaagacgaagaagggtgcagaaattaaaagtaagtataaagcaccgtgattgggagtgtttttgcgtgtgtcggaatcactggtaaatgttggctgagaacaatccctccccttgcacttgtgaaaacactttgagcgctttaagagattagcctgagaaataattaaatatcttttctcttca

SEQ ID NO: 322799 - DNA, 297 bp, Homo sapiens
tggggcttgagctctttcagagcccagagggaagagggcagctgctgggggcacctcactggggggggcataactggaggtggtctgccttcgctcgggctaatcagctttcccagcaggtagagcggtcagcatggcaggcaggctggagcagactcctgcccctccactaagggactgcccaggatgtttttttaagctctgaaattttccagtggactaacagttcacactgatgaacagctggagctgcaagctgtgtttcatagagagcattcttgaacctagagtcaggcc

SEQ ID NO: 322800 - DNA, 3233 bp, Homo sapiens
acgtcacttccggggcggggcgagcaaggcggaggcggggccggggccggcgggggaggggagcgccaggtccgcgcaggctcgccgggaccgcagccgccgagccgagcgcttgactatatatggtcaaagctgggggcgagccgcgcgcgggaccgcgcttccgggttcggggcgtccgcaaccacagcgcgcagggcaggcgcgagctggcctctgagccccggcctcggaccgcccactccactcccggcacgcccggtgccgccttccggctccagtccccgggctcggcctcggcgaggtgtaattcgcagcgcgggccggccccggaggctctcggcgagcgcggcgcggtaacaagtgggcgaggatgccgtacgagatcaagaaggtgttcgccagcctcccgcaggtggagaggggcgtctccaagatcatcggcggcgaccctaagggcaacaattttctgtacaccaatggaaagtgcgtcatcctaaggaacatcgacaacccagcccttgctgacatctacacagagcacgcccatcaggtggtggtggccaagtatgcgcccagcggattctacattgcctccggagatgtgtctgggaagctgaggatctgggataccacgcagaaggagcacctgttgaagtatgagtaccagcctttcgctgggaagatcaaagacattgcttggactgaagacagtaagaggatcgccgtggtcggggaaggaagggagaagtttggagcagtcttcctctgggatagtggctcttctgtgggcgagattacaggacacaacaaagtcatcaacagcgtggacatcaagcagagccggccataccggctggccacgggaagcgatgataactgcgcggcattctttgagggacccccattcaagttcaagttcacagttggcgaccacagccgctttgtcaactgtgtgcgattctctcctgatgggaacagatttgccacagccagtgctgacggccagatatacatctatgacgggaagactggggagaaggtgtgcgcgctgggcggaagcaaggcccacgacggtgggatttacgcaattagttggagtcccgacagcacccatttgctttctgcttctggggacaaaacttccaagatttgggacgtcagcgtgaactccgtggtcagcacatttcccatgggctccacggttctggaccagcagctgggctgcctatggcagaaggaccacctgctcagtgtctccctgtccgggtacatcaactatctggacagaaacaaccccagcaagcccctgcacgtcatcaagggtcacagtaaatcgatccagtgtctgacggtgcataaaaacggcggcaagtcctacatttactctgggagccacgacggacacattaattactgggattcagagacgggggagaacgactccttcgctgggaaaggccacacgaaccaggtgtccaggatgaccgtggatgagtcggggcagctcatcagctgcagcatggacgacaccgtgcggtacaccagcctcatgctgcgggactacagcggacaaggagttgtgaaactggacgttcagccaaagtgcgtagccgtcggccccgggggatacgccgtggtcgtgtgcattggacagattgtcctgctgaaggatcagaggaagtgcttcagcatcgacaaccccggctacgagcccgaagttgtggcagtgcaccccggcggggacacggtggcaattgggggtgtggacggcaacgtccgcctgtattccatcctgggcaccacgctgaaggatgagggcaagctcctagaggccaagggccccgtgaccgacgtggcctactcccacgacggcgccttcctcgcggtgtgcgacgccagcaaggtggtcacagtgttcagcgttgctgacggctactcggagaacaatgttttttatggacaccatgcaaaaatcgtctgcctggcctggtccccagacaatgaacactttgcctccggtggcatggacatgatggtgtatgtttggaccctgagtgacccggaaaccagagtcaagatccaagatgcacaccggctgcaccatgtcagcagcctggcctggctggacgagcacacgctggtcacgacctcccatgatgcctctgtcaaggagtggacaatcacctactgaggagccccacccccgcctctggatggaccgaatcagggactagagtttaactgcagcggaacatgtcatttctctatttctgtgacgcgcccccatgcccccaccccaccacaagaggcaggagggcccagtcatgaccctcgtctctgcagggtgtctgtacacgttcttctgaaagctttagacagtaacagtttgcacatgaaaaataaagcgagcacctaaacaatgtgtggagcataactaaaacccacagcccaaccaaaccttgagaatgcgaaacattccagaggcagtagcctccaaagcacacagagcccctggccccgccgcggctctcactatctgtcaggggaggttgtacaggtgaatgagccggggggctcatgttcctgcctgcagaacatttctgtactagtgagaagagggaatatgcattgcagttcagcaaagccggaattctgtgttgaacagatgtctgtctccctagtgtgtgactcacaccttgtggctgccttcagagcgccacctccagatcagatggggacacacaacccctggatatgtttcattgtcagattttgtgcttgattttaagaatggaattgtgggtatctttcctttttttttaatgtatcttaactgttgcctgtcagtgtttacaaactagtgcgttgacggcaccgtgtccaagtttttagaacccttgttagccagaccgaggtgtcctggtcaccgtttcaccatcatgctttgatgttcccctgtctttccctcttctgctctcaagagcaaaggttaatttaaggacaaagatgaagtcactgtaaactaatctgtcattgtttttaccttccttttctttttcagtgcagaaattaaaagtaagtataaagcaccgtgattgggagtgtttttgcgtgtgtcggaatcactggtaaatgttggctgagaacaatccctccccttgcacttgtgaaaacactttgagcgctttaagagattagcctgagaaataattaaatatcttttctcttca

SEQ ID NO: 322801 - DNA, 3283 bp, Homo sapiens
acgtcacttccggggcggggcgagcaaggcggaggcggggccggggccggcgggggaggggagcgccaggtccgcgcaggctcgccgggaccgcagccgccgagccgagcgcttgactatatatggtcaaagctgggggcgagccgcgcgcgggaccgcgcttccgggttcggggcgtccgcaaccacagcgcgcagggcaggcgcgagctggcctctgagccccggcctcggaccgcccactccactcccggcacgcccggtgccgccttccggctccagtccccgggctcggcctcggcgaggtgtaattcgcagcgcgggccggccccggaggctctcggcgagcgcggcgcggtaacaagtgggcgaggatgccgtacgagatcaagaaggtgttcgccagcctcccgcaggtggagaggggcgtctccaagatcatcggcggcgaccctaagggcaacaattttctgtacaccaatggaaagtgcgtcatcctaaggaacatcgacaacccagcccttgctgacatctacacagagcacgcccatcaggtggtggtggccaagtatgcgcccagcggattctacattgcctccggagatgtgtctgggaagctgaggatctgggataccacgcagaaggagcacctgttgaagtatgagtaccagcctttcgctgggaagatcaaagacattgcttggactgaagacagtaagaggatcgccgtggtcggggaaggaagggagaagtttggagcagtcttcctctgggatagtggctcttctgtgggcgagattacaggacacaacaaagtcatcaacagcgtggacatcaagcagagccggccataccggctggccacgggaagcgatgataactgcgcggcattctttgagggacccccattcaagttcaagttcacagttggcgaccacagccgctttgtcaactgtgtgcgattctctcctgatgggaacagatttgccacagccagtgctgacggccagatatacatctatgacgggaagactggggagaaggtgtgcgcgctgggcggaagcaaggcccacgacggtgggatttacgcaattagttggagtcccgacagcacccatttgctttctgcttctggggacaaaacttccaagatttgggacgtcagcgtgaactccgtggtcagcacatttcccatgggctccacggttctggaccagcagctgggctgcctatggcagaaggaccacctgctcagtgtctccctgtccgggtacatcaactatctggacagaaacaaccccagcaagcccctgcacgtcatcaagggtcacagtaaatcgatccagtgtctgacggtgcataaaaacggcggcaagtcctacatttactctgggagccacgacggacacattaattactgggattcagagacgggggagaacgactccttcgctgggaaaggccacacgaaccaggtgtccaggatgaccgtggatgagtcggggcagctcatcagctgcagcatggacgacaccgtgcggtacaccagcctcatgctgcgggactacagcggacaaggagttgtgaaactggacgttcagccaaagtgcgtagccgtcggccccgggggatacgccgtggtcgtgtgcattggacagattgtcctgctgaaggatcagaggaagtgcttcagcatcgacaaccccggctacgagcccgaagttgtggcagtgcaccccggcggggacacggtggcaattgggggtgtggacggcaacgtccgcctgtattccatcctgggcaccacgctgaaggatgagggcaagctcctagaggccaagggccccgtgaccgacgtggcctactcccacgacggcgccttcctcgcggtgtgcgacgccagcaaggtggtcacagtgttcagcgttgctgacggctactcggagaacaatgttttttatggacaccatgcaaaaatcgtctgcctggcctggtccccagacaatgaacactttgcctccggtggcatggacatgatggtgtatgtttggaccctgagtgacccggaaaccagagtcaagatccaagatgcacaccggctgcaccatgtcagcagcctggcctggctggacgagcacacgctggtcacgacctcccatgatgcctctgtcaaggagtggacaatcacctactgaggagccccacccccgcctctggatggaccgaatcagggactagagtttaactgcagcggaacatgtcatttctctatttctgtgacgcgcccccatgcccccaccccaccacaagaggcaggagggcccagtcatgaccctcgtctctgcagggtgtctgtacacgttcttctgaaagctttagacagtaacagtttgcacatgaaaaataaagcgagcacctaaacaatgtgtggagcataactaaaacccacagcccaaccaaaccttgagaatgcgaaacattccagaggcagtagcctccaaagcacacagagcccctggccccgccgcggctctcactatctgtcaggggaggttgtacaggtgaatgagccggggggctcatgttcctgcctgcagaacatttctgtactagtgagaagagggaatatgcattgcagttcagcaaagccggaattctgtgttgaacagatgtctgtctccctagtgtgtgactcacaccttgtggctgccttcagagcgccacctccagatcagatggggacacacaacccctggatatgtttcattgtcagattttgtgcttgattttaagaatggaattgtgggtatctttcctttttttttaatgtatcttaactgttgcctgtcagtgtttacaaactagtgcgttgacggcaccgtgtccaagtttttagaacccttgttagccagaccgaggtgtcctggtcaccgtttcaccatcatgctttgatgttcccctgtctttccctcttctgctctcaagagcaaaggttaatttaaggacaaagatgaagtcactgtaaactaatctgtcattgtttttaccttccttttctttttcagtgcagaaattaaaagtaagtataaagcaccgtgattgggagtgtttttgcgtgtgtcggaatcactggtaaatgttggctgagaacaatccctccccttgcacttgtgaaaacactttgagcgctttaagagattagcctgagaaataattaaatatcttttctcttcaaaaaaaaaaaaccgatcgaccaacccacacaaaagaacaacacagacgag

SEQ ID NO: 322802 - DNA, 3573 bp, Homo sapiens
acgtcacttccggggcggggcgagcaaggcggaggcggggccggggccggcgggggaggggagcgccaggtccgcgcaggctcgccgggaccgcagccgccgagccgagcgcttgactatatatggtcaaagctgggggcgagccgcgcgcgggaccgcgcttccgggttcggggcgtccgcaaccacagcgcgcagggcaggcgcgagctggcctctgagccccggcctcggaccgcccactccactcccggcacgcccggtgccgccttccggctccagtccccgggctcggcctcggcgaggtgtaattcgcagcgcgggccggccccggaggctctcggcgagcgcggcgcggtaacaagtgggcgaggatgccgtacgagatcaagaaggtgttcgccagcctcccgcaggtggagaggggcgtctccaagatcatcggcggcgaccctaagggcaacaattttctgtacaccaatggaaagtgcgtcatcctaaggaacatcgacaacccagcccttgctgacatctacacagagcacgcccatcaggtggtggtggccaagtatgcgcccagcggattctacattgcctccggagatgtgtctgggaagctgaggatctgggataccacgcagaaggagcacctgttgaagtatgagtaccagcctttcgctgggaagatcaaagacattgcttggactgaagacagtaagaggatcgccgtggtcggggaaggaagggagaagtttggagcagtcttcctctgggatagtggctcttctgtgggcgagattacaggacacaacaaagtcatcaacagcgtggacatcaagcagagccggccataccggctggccacgggaagcgatgataactgcgcggcattctttgagggacccccattcaagttcaagttcacagttggcgaccacagccgctttgtcaactgtgtgcgattctctcctgatgggaacagatttgccacagccagtgctgacggccagatatacatctatgacgggaagactggggagaaggtgtgcgcgctgggcggaagcaaggcccacgacggtgggatttacgcaattagttggagtcccgacagcacccatttgctttctgcttctggggacaaaacttccaagatttgggacgtcagcgtgaactccgtggtcagcacatttcccatgggctccacggttctggaccagcagctgggctgcctatggcagaaggaccacctgctcagtgtctccctgtccgggtacatcaactatctggacagaaacaaccccagcaagcccctgcacgtcatcaagggtcacagtaaatcgatccagtgtctgacggtgcataaaaacggcggcaagtcctacatttactctgggagccacgacggacacattaattactgggattcagagacgggggagaacgactccttcgctgggaaaggccacacgaaccaggtgtccaggatgaccgtggatgagtcggggcagctcatcagctgcagcatggacgacaccgtgcggtacaccagcctcatgctgcgggactacagcggacaaggagttgtgaaactggacgttcagccaaagtgcgtagccgtcggccccgggggatacgccgtggtcgtgtgcattggacagattgtcctgctgaaggatcagaggaagtgcttcagcatcgacaaccccggctacgagcccgaagttgtggcagtgcaccccggcggggacacggtggcaattgggggtgtggacggcaacgtccgcctgtattccatcctgggcaccacgctgaaggatgagggcaagctcctagaggccaagggccccgtgaccgacgtggcctactcccacgacggcgccttcctcgcggtgtgcgacgccagcaaggtggtcacagtgttcagcgttgctgacggctactcggagaacaatgttttttatggacaccatgcaaaaatcgtctgcctggcctggtccccagacaatgaacactttgcctccggtggcatggacatgatggtgtatgtttggaccctgagtgacccggaaaccagagtcaagatccaagatgcacaccggctgcaccatgtcagcagcctggcctggctggacgagcacacgctggtcacgacctcccatgatgcctctgtcaaggagtggacaatcacctactgaggagccccacccccgcctctggatggaccgaatcagggactagagtttaactgcagcggaacatgtcatttctctatttctgtgacgcgcccccatgcccccaccccaccacaagaggcaggagggcccagtcatgaccctcgtctctgcagggtgtctgtacacgttcttctgaaagctttagacagtaacagtttgcacatgaaaaataaagcgagcacctaaacaatgtgtggagcataactaaaacccacagcccaaccaaaccttgagaatgcgaaacattccagaggcagtagcctccaaagcacacagagcccctggccccgccgcggctctcactatctgtcaggggaggttgtacaggtgaatgagccggggggctcatgttcctgcctgcagaacatttctgtactagtgagaagagggaatatgcattgcagttcagcaaagccggaattctgtgttgaacagatgtctgtctccctagtgtgtgactcacaccttgtggctgccttcagagcgccacctccagatcagatggggacacacaacccctggatatgtttcattgtcagattttgtgcttgattttaagaatggaattgtgggtatctttcctttttttttaatgtatcttaactgttgcctgtcagtgtttacaaactagtgcgttgacggcaccgtgtccaagtttttagaacccttgttagccagaccgaggtgtcctggtcaccgtttcaccatcatgctttgatgttcccctgtctttccctcttctgctctcaagagcaaaggttaatttaaggacaaagatgaagtcactgtaaactaatctgtcattgtttttaccttccttttctttttcagtgcagaaattaaaagtaagtataaagcaccgtgattgggagtgtttttgcgtgtgtcggaatcactggtaaatgttggctgagaacaatccccctggtgtgaaaacttgggggttaaaaatacgggaaaaataaatttttttcaaaaaaaaaaaaaaaacaacaaaaaaaaaacaaaaaaaaaagcgggggggggcccagtccacaaccacccccctggggggcccatccgcccccccccccctttatgttgtaaaaaagagggagccagctcaagatgaagactagacttattctttaactcctaagcagacgggagggcaggaccgacttaaaaaacagcacacgcgcgaacgagcgaaccacctgatagacgagtagcacattctatgagagacaaacacaccctctctattactgcgggaggaacaaaaaagataggaacaaccccaactaaacaagtaacatgagtttaagagaaacaataaaaagaatcacgcactgatttaa

SEQ ID NO: 322803 - DNA, 2813 bp, Homo sapiens
aggctaggtaggaggcgggggcgtaatcggccgagggggcaacaattttctgtacaccaatggaaagtgcgtcatcctaaggaacatcgacaacccagcccttgctgacatctacacagagcacgcccatcaggtggtggtggccaagtatgcgcccagcggattctacattgcctccggagatgtgtctgggaagctgaggatctgggataccacgcagaaggagcacctgttgaagtatgagtaccagcctttcgctgggaagatcaaagacattgcttggactgaagacagtaagaggatcgccgtggtcggggaaggaagggagaagtttggagcagtcttcctctgggatagtggctcttctgtgggcgagattacaggacacaacaaagtcatcaacagcgtggacatcaagcagagccggccataccggctggccacgggaagcgatgataactgcgcggcattctttgagggacccccattcaagttcaagttcacagttggcgaccacagccgctttgtcaactgtgtgcgattctctcctgatgggaacagatttgccacagccagtgctgacggccagatatacatctatgacgggaagactggggagaaggtgtgcgcgctgggcggaagcaaggcccacgacggtgggatttacgcaattagttggagtcccgacagcacccatttgctttctgcttctggggacaaaacttccaagatttgggacgtcagcgtgaactccgtggtcagcacatttcccatgggctccacggttctggaccagcagctgggctgcctatggcagaaggaccacctgctcagtgtctccctgtccgggtacatcaactatctggacagaaacaaccccagcaagcccctgcacgtcatcaagggtcacagtaaatcgatccagtgtctgacggtgcataaaaacggcggcaagtcctacatttactctgggagccacgacggacacattaattactgggattcagagacgggggagaacgactccttcgctgggaaaggccacacgaaccaggtgtccaggatgaccgtggatgagtcggggcagctcatcagctgcagcatggacgacaccgtgcggtacaccagcctcatgctgcgggactacagcggacaaggagttgtgaaactggacgttcagccaaagtgcgtagccgtcggccccgggggatacgccgtggtcgtgtgcattggacagattgtcctgctgaaggatcagaggaagtgcttcagcatcgacaaccccggctacgagcccgaagttgtggcagtgcaccccggcggggacacggtggcaattgggggtgtggacggcaacgtccgcctgtattccatcctgggcaccacgctgaaggatgagggcaagctcctagaggccaagggccccgtgaccgacgtggcctactcccacgacggcgccttcctcgcggtgtgcgacgccagcaaggtggtcacagtgttcagcgttgctgacggctactcggagaacaatgttttttatggacaccatgcaaaaatcgtctgcctggcctggtccccagacaatgaacactttgcctccggtggcatggacatgatggtgtatgtttggaccctgagtgacccggaaaccagagtcaagatccaagatgcacaccggctgcaccatgtcagcagcctggcctggctggacgagcacacgctggtcacgacctcccatgatgcctctgtcaaggagtggacaatcacctactgaggagccccacccccgcctctggatggaccgaatcagggactagagtttaactgcagcggaacatgtcatttctctatttctgtgacgcgcccccatgcccccaccccaccacaagaggcaggagggcccagtcatgaccctcgtctctgcagggtgtctgtacacgttcttctgaaagctttagacagtaacagtttgcacatgaaaaataaagcgagcacctaaacaatgtgtggagcataactaaaacccacagcccaaccaaaccttgagaatgcgaaacattccagaggcagtagcctccaaagcacacagagcccctggccccgccgcggctctcactatctgtcaggggaggttgtacaggtgaatgagccggggggctcatgttcctgcctgcagaacatttctgtactagtgagaagagggaatatgcattgcagttcagcaaagccggaattctgtgttgaacagatgtctgtctccctagtgtgtgactcacaccttgtggctgccttcagagcgccacctccagatcagatggggacacacaacccctggatatgtttcattgtcagattttgtgcttgattttaagaatggaattgtgggtatctttcctttttttttaatgtatcttaactgttgcctgtcagtgtttacaaactagtgcgttgacggcaccgtgtccaagtttttagaacccttgttagccagaccgaggtgtcctggtcaccgtttcaccatcatgctttgatgttcccctgtctttccctcttctgctctcaagagcaaaggttaatttaaggacaaagatgaagtcactgtaaactaatctgtcattgtttttaccttccttttctttttcagtgcagaaattaaaagtaagtataaagcaccgtgattgggagtgtttttgcgtgtgtcggaatcactggtaaatgttggctgagaacaatccctccccttgcacttgtgaaaacactttgagcgctttaagagattagcctgagaaataattaaatatcttttctcttca

SEQ ID NO: 322804 - DNA, 3044 bp, Homo sapiens
acgtcacttccggggcggggcgagcaaggcggaggcggggccggggccggcgggggaggggagcgccaggtccgcgcaggctcgccgggaccgcagccgccgagccgagcgcttgactatatatggtcaaagctgggggcgagccgcgcgcgggaccgcgcttccgggttcggggcgtccgcaaccacagcgcgcagggcaggcgcgagctggcctctgagccccggcctcggaccgcccactccactcccggcacgcccggtgccgccttccggctccagtccccgggctcggcctcggcgaggtgtaattcgcagcgcgggccggccccggaggctctcggcgagcgcggcgcggtaacaagtgggcgaggatgccgtacgagatcaagaaggtgttcgccagcctcccgcaggtggagaggggcgtctccaagatcatcggcggcgaccctaagggcaacaattttctgtacaccaatggaaagtgcgtcatcctaaggaacatcgacaacccagcccttgctgacatctacacagagcacgcccatcaggtggtggtggccaagtatgcgcccagcggattctacattgcctccggagatgtgtctgggaagctgaggatctgggataccacgcagaaggagcacctgttgaagtatgagtaccagcctttcgctgggaagatcaaagacattgcttggactgaagacagtaagaggatcgccgtggtcggggaaggaagggagaagtttggagcagtcttcctctgggatagtggctcttctgtgggcgagattacaggacacaacaaagtcatcaacagcgtggacatcaagcagagccggccataccggctggccacgggaagcgatgataactgcgcggcattctttgagggacccccattcaagttcaagttcacagttggcgaccacagccgctttgtcaactgtgtgcgattctctcctgatgggaacagatttgccacagccagtgctgacggccagatatacatctatgacgggaagactggggagaaggtgtgcgcgctgggcggaagcaaggcccacgacggtgggatttacgcaattagttggagtcccgacagcacccatttgctttctgcttctggggacaaaacttccaagatttgggacgtcagcgtgaactccgtggtcagcacatttcccatgggctccacggttctggaccagcagctgggctgcctatggcagaaggaccacctgctcagtgtctccctgtccgggtacatcaactatctggacagaaacaaccccagcaagcccctgcacgtcatcaagggtcacagtaaatcgatccagtgtctgacggtgcataaaaacggcggcaagtcctacatttactctgggagccacgacggacacattaattactgggattcagagacgggggagaacgactccttcgctgggaaaggccacacgaaccaggtgtccaggatgaccgtggatgagtcggggcagctcatcagctgcagcatggacgacaccgtgcggtacaccagcctcatgctgcgggactacagcggacaaggagttgtgaaactggacgttcagccaaagtgcgtagccgtcggccccgggggatacgccgtggtcgtgtgcattggacagattgtcctgctgaaggatcagaggaagtgcttcagcatcgacaaccccggctacgagcccgaagttgtggcagtgcaccccggcggggacacggtggcaattgggggtgtggacggcaacgtccgcctgtattccatcctgggcaccacgctgaaggatgagggcaagctcctagaggccaagggccccgtgaccgacgtggcctactcccacgacggcgccttcctcgcggtgtgcgacgccagcaaggtggtcacagtgttcagcgttgctgacggctactcggagaacaatgttttttatggacaccatgcaaaaatcgtctgcctggcctggtccccagacaatgaacactttgcctccggtggcatggacatgatggtgtatgtttggaccctgagtgacccggaaaccagagtcaagatccaagatgcacaccggctgcaccatgtcagcagcctggcctggctggacgagcacacgctggtcacgacctcccatgatgcctctgtcaaggagtggacaatcacctactgaggagccccacccccgcctctggatggaccgaatcagggactagagtttaactgcagcggaacatgtcatttctctatttctgtgacgcgcccccatgcccccaccccaccacaagaggcaggagggcccagtcatgaccctcgtctctgcagggtgtctgtacacgttcttctgaaagctttagacagtaacagtttgcacatgaaaaataaagcgagcacctaaacaatgtgtggagcataactcctccaaagcacacagagcccctggccccgccgcggctctcactatctgtcaggggaggttgtacaggtgaatgagccggggggctcatgttcctgcctgcagaacatttctgtactagtgagaagagggaatatgcattgcagttcagcaaagccggaattctgtgttgaacagatgtctgtctccctagtgtgtgactcacaccttgtggctgccttcagagcgccacctccagatcagatggggacacacaacccctggatatgtttcattgtcagattttgtgcttgattttaagaatggaattgtgggtatctttcctttttttttaatgtatcttaactgttgcctgtcagtgtttacaaactagtgcgttgacggcaccgtgtccaagtttttagaacccttgttagccagaccgaggtgtcctggtcaccgtttcaccatcatgctttgatgttcccctgtctttccctcttctgctctcaagagcaaaggttaatttaaggacaaagatgaagtcactgtaaactaatctgtcattgtttttaccttccttttctttttcagtgcagaaattaaaagtaagtataaagcaccgtga

SEQ ID NO: 322805 - DNA, 2833 bp, Homo sapiens
ggctccttcttgatgaggaaactgagtcttagttcgtttctgtctacggtcatagcaccctgaaagcgccggatcgcctctgatcttggaagctaagcacggtcaggcctgaacccagcccttgctgacatctacacagagcacgcccatcaggtggtggtggccaagtatgcgcccagcggattctacattgcctccggagatgtgtctgggaagctgaggatctgggataccacgcagaaggagcacctgttgaagtatgagtaccagcctttcgctgggaagatcaaagacattgcttggactgaagacagtaagaggatcgccgtggtcggggaaggaagggagaagtttggagcagtcttcctctgggatagtggctcttctgtgggcgagattacaggacacaacaaagtcatcaacagcgtggacatcaagcagagccggccataccggctggccacgggaagcgatgataactgcgcggcattctttgagggacccccattcaagttcaagttcacagttggcgaccacagccgctttgtcaactgtgtgcgattctctcctgatgggaacagatttgccacagccagtgctgacggccagatatacatctatgacgggaagactggggagaaggtgtgcgcgctgggcggaagcaaggcccacgacggtgggatttacgcaattagttggagtcccgacagcacccatttgctttctgcttctggggacaaaacttccaagatttgggacgtcagcgtgaactccgtggtcagcacatttcccatgggctccacggttctggaccagcagctgggctgcctatggcagaaggaccacctgctcagtgtctccctgtccgggtacatcaactatctggacagaaacaaccccagcaagcccctgcacgtcatcaagggtcacagtaaatcgatccagtgtctgacggtgcataaaaacggcggcaagtcctacatttactctgggagccacgacggacacattaattactgggattcagagacgggggagaacgactccttcgctgggaaaggccacacgaaccaggtgtccaggatgaccgtggatgagtcggggcagctcatcagctgcagcatggacgacaccgtgcggtacaccagcctcatgctgcgggactacagcggacaaggagttgtgaaactggacgttcagccaaagtgcgtagccgtcggccccgggggatacgccgtggtcgtgtgcattggacagattgtcctgctgaaggatcagaggaagtgcttcagcatcgacaaccccggctacgagcccgaagttgtggcagtgcaccccggcggggacacggtggcaattgggggtgtggacggcaacgtccgcctgtattccatcctgggcaccacgctgaaggatgagggcaagctcctagaggccaagggccccgtgaccgacgtggcctactcccacgacggcgccttcctcgcggtgtgcgacgccagcaaggtggtcacagtgttcagcgttgctgacggctactcggagaacaatgttttttatggacaccatgcaaaaatcgtctgcctggcctggtccccagacaatgaacactttgcctccggtggcatggacatgatggtgtatgtttggaccctgagtgacccggaaaccagagtcaagatccaagatgcacaccggctgcaccatgtcagcagcctggcctggctggacgagcacacgctggtcacgacctcccatgatgcctctgtcaaggagtggacaatcacctactgaggagccccacccccgcctctggatggaccgaatcagggactagagtttaactgcagcggaacatgtcatttctctatttctgtgacgcgcccccatgcccccaccccaccacaagaggcaggagggcccagtcatgaccctcgtctctgcagggtgtctgtacacgttcttctgaaagctttagacagtaacagtttgcacatgaaaaataaagcgagcacctaaacaatgtgtggagcataactaaaacccacagcccaaccaaaccttgagaatgcgaaacattccagaggcagtagcctccaaagcacacagagcccctggccccgccgcggctctcactatctgtcaggggaggttgtacaggtgaatgagccggggggctcatgttcctgcctgcagaacatttctgtactagtgagaagagggaatatgcattgcagttcagcaaagccggaattctgtgttgaacagatgtctgtctccctagtgtgtgactcacaccttgtggctgccttcagagcgccacctccagatcagatggggacacacaacccctggatatgtttcattgtcagattttgtgcttgattttaagaatggaattgtgggtatctttcctttttttttaatgtatcttaactgttgcctgtcagtgtttacaaactagtgcgttgacggcaccgtgtccaagtttttagaacccttgttagccagaccgaggtgtcctggtcaccgtttcaccatcatgctttgatgttcccctgtctttccctcttctgctctcaagagcaaaggttaatttaaggacaaagatgaagtcactgtaaactaatctgtcattgtttttaccttccttttctttttcagtgcagaaattaaaagtaagtataaagcaccgtgattgggagtgtttttgcgtgtgtcggaatcactggtaaatgttggctgagaacaatccctccccttgcacttgtgaaaacactttgagcgctttaagagattagcctgagaaataattaaatatcttttctcttca

SEQ ID NO: 322806 - DNA, 2755 bp, Homo sapiens
  misc_feature (32)..(32): n is a, c, g, or t
gccatctgtctggcgggatgggcaggtgcccntaacccagcccttgctgacatctacacagagcacgcccatcaggtggtggtggccaagtatgcgcccagcggattctacattgcctccggagatgtgtctgggaagctgaggatctgggataccacgcagaaggagcacctgttgaagtatgagtaccagcctttcgctgggaagatcaaagacattgcttggactgaagacagtaagaggatcgccgtggtcggggaaggaagggagaagtttggagcagtcttcctctgggatagtggctcttctgtgggcgagattacaggacacaacaaagtcatcaacagcgtggacatcaagcagagccggccataccggctggccacgggaagcgatgataactgcgcggcattctttgagggacccccattcaagttcaagttcacagttggcgaccacagccgctttgtcaactgtgtgcgattctctcctgatgggaacagatttgccacagccagtgctgacggccagatatacatctatgacgggaagactggggagaaggtgtgcgcgctgggcggaagcaaggcccacgacggtgggatttacgcaattagttggagtcccgacagcacccatttgctttctgcttctggggacaaaacttccaagatttgggacgtcagcgtgaactccgtggtcagcacatttcccatgggctccacggttctggaccagcagctgggctgcctatggcagaaggaccacctgctcagtgtctccctgtccgggtacatcaactatctggacagaaacaaccccagcaagcccctgcacgtcatcaagggtcacagtaaatcgatccagtgtctgacggtgcataaaaacggcggcaagtcctacatttactctgggagccacgacggacacattaattactgggattcagagacgggggagaacgactccttcgctgggaaaggccacacgaaccaggtgtccaggatgaccgtggatgagtcggggcagctcatcagctgcagcatggacgacaccgtgcggtacaccagcctcatgctgcgggactacagcggacaaggagttgtgaaactggacgttcagccaaagtgcgtagccgtcggccccgggggatacgccgtggtcgtgtgcattggacagattgtcctgctgaaggatcagaggaagtgcttcagcatcgacaaccccggctacgagcccgaagttgtggcagtgcaccccggcggggacacggtggcaattgggggtgtggacggcaacgtccgcctgtattccatcctgggcaccacgctgaaggatgagggcaagctcctagaggccaagggccccgtgaccgacgtggcctactcccacgacggcgccttcctcgcggtgtgcgacgccagcaaggtggtcacagtgttcagcgttgctgacggctactcggagaacaatgttttttatggacaccatgcaaaaatcgtctgcctggcctggtccccagacaatgaacactttgcctccggtggcatggacatgatggtgtatgtttggaccctgagtgacccggaaaccagagtcaagatccaagatgcacaccggctgcaccatgtcagcagcctggcctggctggacgagcacacgctggtcacgacctcccatgatgcctctgtcaaggagtggacaatcacctactgaggagccccacccccgcctctggatggaccgaatcagggactagagtttaactgcagcggaacatgtcatttctctatttctgtgacgcgcccccatgcccccaccccaccacaagaggcaggagggcccagtcatgaccctcgtctctgcagggtgtctgtacacgttcttctgaaagctttagacagtaacagtttgcacatgaaaaataaagcgagcacctaaacaatgtgtggagcataactaaaacccacagcccaaccaaaccttgagaatgcgaaacattccagaggcagtagcctccaaagcacacagagcccctggccccgccgcggctctcactatctgtcaggggaggttgtacaggtgaatgagccggggggctcatgttcctgcctgcagaacatttctgtactagtgagaagagggaatatgcattgcagttcagcaaagccggaattctgtgttgaacagatgtctgtctccctagtgtgtgactcacaccttgtggctgccttcagagcgccacctccagatcagatggggacacacaacccctggatatgtttcattgtcagattttgtgcttgattttaagaatggaattgtgggtatctttcctttttttttaatgtatcttaactgttgcctgtcagtgtttacaaactagtgcgttgacggcaccgtgtccaagtttttagaacccttgttagccagaccgaggtgtcctggtcaccgtttcaccatcatgctttgatgttcccctgtctttccctcttctgctctcaagagcaaaggttaatttaaggacaaagatgaagtcactgtaaactaatctgtcattgtttttaccttccttttctttttcagtgcagaaattaaaagtaagtataaagcaccgtgattgggagtgtttttgcgtgtgtcggaatcactggtaaatgttggctgagaacaatccctccccttgcacttgtgaaaacactttgagcgctttaagagattagcctgagaaataattaaatatcttttctcttca

SEQ ID NO: 322807 - DNA, 2821 bp, Homo sapiens
acgtcacttccggggcggggcgagcaaggcggaggcggggccggggccggcgggggaggggagcgccaggtccgcgcaggctcgccgggaccgcagccgccgagccgagcgcttgactatatatggtcaaagctgggggcgagccgcgcgcgggaccgcgcttccgggttcggggcgtccgcaaccacagcgcgcagggcaggcgcgagctggcctctgagccccggcctcggaccgcccactccactcccggcacgcccggtgccgccttccggctccagtccccgggctcggcctcggcgaggtgtaattcgcagcgcgggccggccccggaggctctcggcgagcgcggcgcggtaacaagtgggcgaggatgccgtacgagatcaagaaggtgttcgccagcctcccgcaggtggagaggggcgtctccaagatcatcggcggcgaccctaagggcaacaattttctgtacaccaatggaaagtgcgtcatcctaaggaacatcgacaacccagcccttgctgacatctacacagagcacgcccatcaggtggtggtggccaagtatgcgcccagcggattctacattgcctccggagatgtgtctgggaagctgaggatctgggataccacgcagaaggagcacctgttgaagtatgagtaccagcctttcgctgggaagatcaaagacattgcttggactgaagacagtaagaggatcgccgtggtcggggaaggaagggagaagtttggagcagtcttcctctgggatagtggctcttctgtgggcgagattacaggacacaacaaagtcatcaacagcgtggacatcaagcagagccggccataccggctggccacgggaagcgatgataactgcgcggcattctttgagggacccccattcaagttcaagttcacagttggcgaccacagccgctttgtcaactgtgtgcgattctctcctgatgggaacagatttgccacagccagtgctgacggccagatatacatctatgacgggaagactggggagaaggtgtgcgcgctgggcggaagcaaggcccacgacggtgggatttacgcaattagttggagtcccgacagcacccatttgctttctgcttctggggacaaaacttccaagatttgggacgtcagcgtgaactccgtggtcagcacatttcccatgggctccacggttctggaccagcagctgggctgcctatggcagaaggaccacctgctcagtgtctccctgtccgggtacatcaactatctggacagaaacaaccccagcaagcccctgcacgtcatcaagggtcacagtaaatcgatccagtgtctgacggtgcataaaaacggcggcaagtcctacatttactctgggagccacgacggacacattaattactgggattcagagacgggggagaacgactccttcgctgggaaaggccacacgaaccaggtgtccaggatgaccgtggatgagtcggggcagctcatcagctgcagcatggacgacaccgtgcggtacaccagcctcatgctgcgggactacagcggacaaggagttgtgaaactggacgttcagccaaagtgcgtagccgtcggccccgggggatacgccgtggtcgtgtgcattggacagattgtcctgctgaaggatcagaggaagtgcttcagcatcgacaaccccggctacgagcccgaagttgtggcagtgcaccccggcggggacacggtggcaattgggggtgtggacggcaacgtccgcctgtattccatcctgggcaccacgctgaaggatgagggcaagctcctagaggccaagggccccgtgaccgacgtggcctactcccacgacggcgccttcctcgcggtgtgcgacgccagcaaggtggtcacagtgttcagcgttgctgacggctactcggagaacaatgttttttatggacaccatgcaaaaatcgtctgcctggcctggtccccagacaatgaacactttgcctccggtggcatggacatgatggtgtatgtttggaccctgagtgacccggaaaccagagtcaagatccaagatgcacaccggctgcaccatgtcagcagcctggcctggctggacgagcacacgctggtcacgacctcccatgatgcctctgtcaaggagtggacaatcacctactgaggagccccacccccgcctctggatggaccgaatcagggactagagtttaactgcagcggaacatgtcatttctctatttctgtgacgcgcccccatgcccccaccccaccacaagaggcaggagggcccagtcatgaccctcgtctctgcagggtgtctgtacacgttcttctgaaagctttagacagtaacagtttgcacatgaaaaataaagcgagcacctaaacaatgtgtggagcataactaaaacccacagcccaaccaaaccttgagaatgcgaaacattccagaggcagtagcctccaaagcacacagagcccctggccccgccgcggctctcactatctgtcaggggaggttgtacaggtgaatgagccggggggctcatgttcctgcctgcagaacatttctgtactagtgagaagagggaatatgcattgcagttcagcaaagccggaattctgtgttgaacagatgtctgtctccctagtgtgtgactcacaccttgtggctgccttcagagcgccacctccagatcagatggggacacacaacccctggatatgtcattctcaaggtttggtagggctgtgggtataagttatgctccacacattgcttaaaggc

SEQ ID NO: 322808 - DNA, 2906 bp, Homo sapiens
acgtcacttccggggcggggcgagcaaggcggaggcggggccggggccggcgggggaggggagcgccaggtccgcgcaggctcgccgggaccgcagccgccgagccgagcgcttgactatatatggtcaaagctgggggcgagccgcgcgcgggaccgcgcttccgggttcggggcgtccgcaaccacagcgcgcagggcaggcgcgagctggcctctgagccccggcctcggaccgcccactccactcccggcacgcccggtgccgccttccggctccagtccccgggctcggcctcggcgaggtgtaattcgcagcgcgggccggccccggaggctctcggcgagcgcggcgcggtaacaagtgggcgaggatgccgtacgagatcaagaaggtgttcgccagcctcccgcaggtggagaggggcgtctccaagatcatcggcggcgaccctaagggcaacaattttctgtacaccaatggaaagtgcgtcatcctaaggaacatcgacaacccagcccttgctgacatctacacagagcacgcccatcaggtggtggtggccaagtatgcgcccagcggattctacattgcctccggagatgtgtctgggaagctgaggatctgggataccacgcagaaggagcacctgttgaagtatgagtaccagcctttcgctgggaagatcaaagacattgcttggactgaagacagtaagaggatcgccgtggtcggggaaggaagggagaagtttggagcagtcttcctctgggatagtggctcttctgtgggcgagattacaggacacaacaaagtcatcaacagcgtggacatcaagcagagccggccataccggctggccacgggaagcgatgataactgcgcggcattctttgagggacccccattcaagttcaagttcacagttggcgaccacagccgctttgtcaactgtgtgcgattctctcctgatgggaacagatttgccacagccagtgctgacggccagatatacatctatgacgggaagactggggagaaggtgtgcgcgctgggcggaagcaaggcccacgacggtgggatttacgcaattagttggagtcccgacagcacccatttgctttctgcttctggggacaaaacttccaagatttgggacgtcagcgtgaactccgtggtcagcacatttcccatgggctccacggttctggaccagcagctgggctgcctatggcagaaggaccacctgctcagtgtctccctgtccgggtacatcaactatctggacagaaacaaccccagcaagcccctgcacgtcatcaagggtcacagtaaatcgatccagtgtctgacggtgcataaaaacggcggcaagtcctacatttactctgggagccacgacggacacattaatatcctttgactcaaagaggggggatacgccgtggtcgtgtgcattggacagattgtcctgctgaaggatcagaggaagtgcttcagcatcgacaaccccggctacgagcccgaagttgtggcagtgcaccccggcggggacacggtggcaattgggggtgtggacggcaacgtccgcctgtattccatcctgggcaccacgctgaaggatgagggcaagctcctagaggccaagggccccgtgaccgacgtggcctactcccacgacggcgccttcctcgcggtgtgcgacgccagcaaggtggtcacagtgttcagcgttgctgacggctactcggagaacaatgttttttatggacaccatgcaaaaatcgtctgcctggcctggtccccagacaatgaacactttgcctccggtggcatggacatgatggtgtatgtttggaccctgagtgacccggaaaccagagtcaagatccaagatgcacaccggctgcaccatgtcagcagcctggcctggctggacgagcacacgctggtcacgacctcccatgatgcctctgtcaaggagtggacaatcacctactgaggagccccacccccgcctctggatggaccgaatcagggactagagtttaactgcagcggaacatgtcatttctctatttctgtgacgcgcccccatgcccccaccccaccacaagaggcaggagggcccagtcatgaccctcgtctctgcagggtgtctgtacacgttcttctgaaagctttagacagtaacagtttgcacatgaaaaataaagcgagcacctaaacaatgtgtggagcataactaaaacccacagcccaaccaaaccttgagaatgcgaaacattccagaggcagtagcctccaaagcacacagagcccctggccccgccgcggctctcactatctgtcaggggaggttgtacaggtgaatgagccggggggctcatgttcctgcctgcagaacatttctgtactagtgagaagagggaatatgcattgcagttcagcaaagccggaattctgtgttgaacagatgtctgtctccctagtgtgtgactcacaccttgtggctgccttcagagcgccacctccagatcagatggggacacacaacccctggatatgtttcattgtcagattttgtgcttgattttaagaatggaattgtgggtatctttcctttttttttaatgtatcttaactgttgcctgtcagtgtttacaaactagtgcgttgacggcaccgtgtccaagtttttagaacccttgttagccagaccgaggtgtcctggtcaccgtttcaccatcatgctttgatgttcccctgtctttccctcttctgctctcaagagcaaaggttaatttaaggacaaagatgaagtcactgtaaactaatctgtcattgtttttaccttccttttctttttcagtgcagaaattaaaagtaagtataaagcaccgtga

SEQ ID NO: 322809 - DNA, 2654 bp, Homo sapiens
acgtcacttccggggcggggcgagcaaggcggaggcggggccggggccggcgggggaggggagcgccaggtccgcgcaggctcgccgggaccgcagccgccgagccgagcgcttgactatatatggtcaaagctgggggcgagccgcgcgcgggaccgcgcttccgggttcggggcgtccgcaaccacagcgcgcagggcaggcgcgagctggcctctgagccccggcctcggaccgcccactccactcccggcacgcccggtgccgccttccggctccagtccccgggctcggcctcggcgaggtgtaattcgcagcgcgggccggccccggaggctctcggcgagcgcggcgcggtaacaagtgggcgaggatgccgtacgagatcaagaaggtgttcgccagcctcccgcaggtggagaggggcgtctccaagatcatcggcggcgaccctaagggcaacaattttctgtacaccaatggaaagtgcgtcatcctaaggaacatcgacaacccagcccttgctgacatctacacagagcacgcccatcaggtggtggtggccaagtatgcgcccagcggattctacattgcctccggagatgtgtctgggaagctgaggatctgggataccacgcagaaggagcacctgttgaagtatgagtaccagcctttcgctgggaagatcaaagacattgcttggactgaagacagtaagaggatcgccgtggtcggggaaggaagggagaagtttggagcagtcttcctctgggatagtggctcttctgtgggcgagattacaggacacaacaaagtcatcaacagcgtggacatcaagcagagccggccataccggctggccacgggaagcgatgataactgcgcggcattctttgagggacccccattcaagttcaagttcacagttggcgaccacagccgctttgtcaactgtgtgcgattctctcctgatgggaacagatttgccacagccagtgctgacggccagatatacatctatgacgggaagactggggagaaggtgtgcgcgctgggcggaagcaaggcccacgacggtgggatttacgcaattagttggagtcccgacagcacccatttgctttctgcttctggggacaaaacttccaagatttgggacgtcagcgtgaactccgtggtcagcacatttcccatgggctccacggttctggaccagcagctgggctgcctatggcagaaggaccacctgctcagtgtctccctgtccgggtacatcaactatctggacagaaacaaccccagcaagcccctgcacgtcatcaagggtcacagtaaatcgatccagtgtctgacggtgcataaaaacggcggcaagtcctacatttactctgggagccacgacggacacattaattactgggattcagagacgggggagaacgactccttcgctgggaaaggccacacgaaccaggtgtccaggatgaccgtggatgagtcggggcagctcatcagctgcagcatggacgacaccgtgcggtacaccagcctcatgctgcgggactacagcggacaaggagttgtgaaactggacgttcagccaaagtgcgtagccgtcggccccgggggatacgccgtggtcgtgtgcattggacagattgtcctgctgaaggatcagaggaagtgcttcagcatcgacaaccccggctacgagcccgaagttgtggcagtgcaccccggcggggacacggtggcaattgggggtgtggacggcaacgtccgcctgtattccatcctgggcaccacgctgaaggatgagggcaagctcctagaggccaagggccccgtgaccgacgtggcctactcccacgacggcgccttcctcgcggtgtgcgacgccagcaaggtggtcacagtgttcagcgttgctgacggctactcgagtttgcacatgaaaaataaagcgagcacctaaacaatgtgtggagcataactaaaacccacagcccaaccaaaccttgagaatgcgaaacattccagaggcagtagcctccaaagcacacagagcccctggccccgccgcggctctcactatctgtcaggggaggttgtacaggtgaatgagccggggggctcatgttcctgcctgcagaacatttctgtactagtgagaagagggaatatgcattgcagttcagcaaagccggaattctgtgttgaacagatgtctgtctccctagtgtgtgactcacaccttgtggctgccttcagagcgccacctccagatcagatggggacacacaacccctggatatgtttcattgtcagattttgtgcttgattttaagaatggaattgtgggtatctttcctttttttttaatgtatcttaactgttgcctgtcagtgtttacaaactagtgcgttgacggcaccgtgtccaagtttttagaacccttgttagccagaccgaggtgtcctggtcaccgtttcaccatcatgctttgatgttcccctgtctttccctcttctgctctcaagagcaaaggttaatttaaggacaaagatgaagtcactgtaaactaatctgtcattgtttttaccttccttttctttttcagtgcagaaattaaaagtaagtataaagcaccgtga

SEQ ID NO: 322810 - DNA, 3206 bp, Homo sapiens
acgtcacttccggggcggggcgagcaaggcggaggcggggccggggccggcgggggaggggagcgccaggtccgcgcaggctcgccgggaccgcagccgccgagccgagcgcttgactatatatggtcaaagctgggggcgagccgcgcgcgggaccgcgcttccgggttcggggcgtccgcaaccacagcgcgcagggcaggcgcgagctggcctctgagccccggcctcggaccgcccactccactcccggcacgcccggtgccgccttccggctccagtccccgggctcggcctcggcgaggtgtaattcgcagcgcgggccggccccggaggctctcggcgagcgcggcgcggtaacaagtgggcgaggatgccgtacgagatcaagaaggtgttcgccagcctcccgcaggtggagaggggcgtctccaagatcatcggcggcgaccctaagggcaacaattttctgtacaccaatggaaagtgcgtcatcctaaggaacatcgacaacccagcccttgctgacatctacacagagcacgcccatcaggtggtggtggccaagtatgcgcccagcggattctacattgcctccggagatgtgtctgggaagctgaggatctgggataccacgcagaaggagcacctgttgaagtatgagtaccagcctttcgctgggaagatcaaagacattgcttggactgaagacagtaagaggatgtttggagcagtcttcctctgggatagtggctcttctgtgggcgagattacaggacacaacaaagtcatcaacagcgtggacatcaagcagagccggccataccggctggccacgggaagcgatgataactgcgcggcattctttgagggacccccattcaagttcaagttcacagttggcgaccacagccgctttgtcaactgtgtgcgattctctcctgatgggaacagatttgccacagccagtgctgacggccagatatacatctatgacgggaagactggggagaaggtgtgcgcgctgggcggaagcaaggcccacgacggtgggatttacgcaattagttggagtcccgacagcacccatttgctttctgcttctggggacaaaacttccaagatttgggacgtcagcgtgaactccgtggtcagcacatttcccatgggctccacggttctggaccagcagctgggctgcctatggcagaaggaccacctgctcagtgtctccctgtccgggtacatcaactatctggacagaaacaaccccagcaagcccctgcacgtcatcaagggtcacagtaaatcgatccagtgtctgacggtgcataaaaacggcggcaagtcctacatttactctgggagccacgacggacacattaattactgggattcagagacgggggagaacgactccttcgctgggaaaggccacacgaaccaggtgtccaggatgaccgtggatgagtcggggcagctcatcagctgcagcatggacgacaccgtgcggtacaccagcctcatgctgcgggactacagcggacaaggagttgtgaaactggacgttcagccaaagtgcgtagccgtcggccccgggggatacgccgtggtcgtgtgcattggacagattgtcctgctgaaggatcagaggaagtgcttcagcatcgacaaccccggctacgagcccgaagttgtggcagtgcaccccggcggggacacggtggcaattgggggtgtggacggcaacgtccgcctgtattccatcctgggcaccacgctgaaggatgagggcaagctcctagaggccaagggccccgtgaccgacgtggcctactcccacgacggcgccttcctcgcggtgtgcgacgccagcaaggtggtcacagtgttcagcgttgctgacggctactcggagaacaatgttttttatggacaccatgcaaaaatcgtctgcctggcctggtccccagacaatgaacactttgcctccggtggcatggacatgatggtgtatgtttggaccctgagtgacccggaaaccagagtcaagatccaagatgcacaccggctgcaccatgtcagcagcctggcctggctggacgagcacacgctggtcacgacctcccatgatgcctctgtcaaggagtggacaatcacctactgaggagccccacccccgcctctggatggaccgaatcagggactagagtttaactgcagcggaacatgtcatttctctatttctgtgacgcgcccccatgcccccaccccaccacaagaggcaggagggcccagtcatgaccctcgtctctgcagggtgtctgtacacgttcttctgaaagctttagacagtaacagtttgcacatgaaaaataaagcgagcacctaaacaatgtgtggagcataactaaaacccacagcccaaccaaaccttgagaatgcgaaacattccagaggcagtagcctccaaagcacacagagcccctggccccgccgcggctctcactatctgtcaggggaggttgtacaggtgaatgagccggggggctcatgttcctgcctgcagaacatttctgtactagtgagaagagggaatatgcattgcagttcagcaaagccggaattctgtgttgaacagatgtctgtctccctagtgtgtgactcacaccttgtggctgccttcagagcgccacctccagatcagatggggacacacaacccctggatatgtttcattgtcagattttgtgcttgattttaagaatggaattgtgggtatctttcctttttttttaatgtatcttaactgttgcctgtcagtgtttacaaactagtgcgttgacggcaccgtgtccaagtttttagaacccttgttagccagaccgaggtgtcctggtcaccgtttcaccatcatgctttgatgttcccctgtctttccctcttctgctctcaagagcaaaggttaatttaaggacaaagatgaagtcactgtaaactaatctgtcattgtttttaccttccttttctttttcagtgcagaaattaaaagtaagtataaagcaccgtgattgggagtgtttttgcgtgtgtcggaatcactggtaaatgttggctgagaacaatccctccccttgcacttgtgaaaacactttgagcgctttaagagattagcctgagaaataattaaatatcttttctcttca

SEQ ID NO: 322811 - DNA, 2364 bp, Homo sapiens
acgtcacttccggggcggggcgagcaaggcggaggcggggccggggccggcgggggaggggagcgccaggtccgcgcaggctcgccgggaccgcagccgccgagccgagcgcttgactatatatggtcaaagctgggggcgagccgcgcgcgggaccgcgcttccgggttcggggcgtccgcaaccacagcgcgcagggcaggcgcgagctggcctctgagccccggcctcggaccgcccactccactcccggcacgcccggtgccgccttccggctccagtccccgggctcggcctcggcgaggtgtaattcgcagcgcgggccggccccggaggctctcggcgagcgcggcgcggtaacaagtgggcgaggatgccgtacgagatcaagaaggtgttcgccagcctcccgcaggtggagaggggcgtctccaagatcatcggcggcgaccctaagggcaacaattttctgtacaccaatggaaagtgcgtcatcctaaggaacatcgacaacccagcccttgctgacatctacacagagcacgcccatcaggtggtggtggccaagtatgcgcccagcggattctacattgcctccggagatgtgtctgggaagctgaggatctgggataccacgcagaaggagcacctgttgaagtatgagtaccagcctttcgctgggaagatcaaagacattgcttggactgaagacagtaagaggatcgccgtggtcggggaaggaagggagaagtttggagcagtcttcctctgggatagtggctcttctgtgggcgagattacaggacacaacaaagtcatcaacagcgtggacatcaagcagagccggccataccggctggccacgggaagcgatgataactgcgcggcattctttgagggacccccattcaagttcaagttcacagttggcgaccacagccgctttgtcaactgtgtgcgattctctcctgatgggaacagatttgccacagccagtgctgacggccagatatacatctatgacgggaagactggggagaaggtgtgcgcgctgggcggaagcaaggcccacgacggtgggatttacgcaattagttggagtcccgacagcacccatttgctttctgcttctggggacaaaacttccaagatttgggacgtcagcgtgaactccgtggtcagcacatttcccatgggctccacggttctggaccagcagctgggctgcctatggcagaaggaccacctgctcagtgtctccctgtccgggtacatcaactatctggacagaaacaaccccagcaagcccctgcacgtcatcaagggtcacagtaaatcgatccagtgtctgacggtgcataaaaacggcggcaagtcctacatttactctgggagccacgacggacacattaattactgggattcagagacgggggagaacgactccttcgctgggaaaggccacacgaaccaggtgtccaggatgaccgtggatgagtcggggcagctcatcagctgcagcatggacgacaccgtgcggtacaccagcctcatgctgcgggactacagcggacaaggagttgtgaaactggacgttcagccaaagtgcgtagccgtcggccccgggggatacgccgtggtcgtgtgcattggacagattgtcctgctgaaggatcagaggaagtgcttcagcatcgacaaccccggctacgagcccgaagttgtggcagtgcaccccggcggggacacggtggcaattgggggtgtggacggcaacgtccgcctgtattccatcctgggcaccacgctgaaggatgagggcaagctcctagaggccaagggccccgtgaccgacgtggcctactcccacgacggcgccttcctcgcggtgtgcgacgccagcaaggtggtcacagtgttcagcgttgctgacggctactcggagaacaatgttttttatggacaccatgcaaaaatcgtctgcctggcctggtccccagacaatgaacactttgcctccggtggcatggacatgatggtgtatgtttggaccctgagtgacccggaaaccagagtcaagatccaagacaggtggcccggaagagttgtgggtctccttccatccagcaaacaccagctgcgctgctggccgtactgagggaccacgggggccccatgcacaggacacctgctgagctgagtgaaggcctcacttttgacatcttcacttcccccactcaccccttaaatcccacctgggaccagggtctccccctccctaagacagccacgtccagtgtataatgtgagcctcatgtggcgttgaaatttcctggtagccacatttaaaaaagaaacaggtga

SEQ ID NO: 322812 - DNA, 2333 bp, Homo sapiens
ggactgtggggaggggggctcgttgatacaggaccacagccgctttgtcaactgtgtgcgattctctcctgatgggaacagatttgccacagccagtgctgacggccagatatacatctatgacgggaagactggggagaaggtgtgcgcgctgggcggaagcaaggcccacgacggtgggatttacgcaattagttggagtcccgacagcacccatttgctttctgcttctggggacaaaacttccaagatttgggacgtcagcgtgaactccgtggtcagcacatttcccatgggctccacggttctggaccagcagctgggctgcctatggcagaaggaccacctgctcagtgtctccctgtccgggtacatcaactatctggacagaaacaaccccagcaagcccctgcacgtcatcaagggtcacagtaaatcgatccagtgtctgacggtgcataaaaacggcggcaagtcctacatttactctgggagccacgacggacacattaattactgggattcagagacgggggagaacgactccttcgctgggaaaggccacacgaaccaggtgtccaggatgaccgtggatgagtcggggcagctcatcagctgcagcatggacgacaccgtgcggtacaccagcctcatgctgcgggactacagcggacaaggagttgtgaaactggacgttcagccaaagtgcgtagccgtcggccccgggggatacgccgtggtcgtgtgcattggacagattgtcctgctgaaggatcagaggaagtgcttcagcatcgacaaccccggctacgagcccgaagttgtggcagtgcaccccggcggggacacggtggcaattgggggtgtggacggcaacgtccgcctgtattccatcctgggcaccacgctgaaggatgagggcaagctcctagaggccaagggccccgtgaccgacgtggcctactcccacgacggcgccttcctcgcggtgtgcgacgccagcaaggtggtcacagtgttcagcgttgctgacggctactcggagaacaatgttttttatggacaccatgcaaaaatcgtctgcctggcctggtccccagacaatgaacactttgcctccggtggcatggacatgatggtgtatgtttggaccctgagtgacccggaaaccagagtcaagatccaagatgcacaccggctgcaccatgtcagcagcctggcctggctggacgagcacacgctggtcacgacctcccatgatgcctctgtcaaggagtggacaatcacctactgaggagccccacccccgcctctggatggaccgaatcagggactagagtttaactgcagcggaacatgtcatttctctatttctgtgacgcgcccccatgcccccaccccaccacaagaggcaggagggcccagtcatgaccctcgtctctgcagggtgtctgtacacgttcttctgaaagctttagacagtaacagtttgcacatgaaaaataaagcgagcacctaaacaatgtgtggagcataactaaaacccacagcccaaccaaaccttgagaatgcgaaacattccagaggcagtagcctccaaagcacacagagcccctggccccgccgcggctctcactatctgtcaggggaggttgtacaggtgaatgagccggggggctcatgttcctgcctgcagaacatttctgtactagtgagaagagggaatatgcattgcagttcagcaaagccggaattctgtgttgaacagatgtctgtctccctagtgtgtgactcacaccttgtggctgccttcagagcgccacctccagatcagatggggacacacaacccctggatatgtttcattgtcagattttgtgcttgattttaagaatggaattgtgggtatctttcctttttttttaatgtatcttaactgttgcctgtcagtgtttacaaactagtgcgttgacggcaccgtgtccaagtttttagaacccttgttagccagaccgaggtgtcctggtcaccgtttcaccatcatgctttgatgttcccctgtctttccctcttctgctctcaagagcaaaggttaatttaaggacaaagatgaagtcactgtaaactaatctgtcattgtttttaccttccttttctttttcagtgcagaaattaaaagtaagtataaagcaccgtgattgggagtgtttttgcgtgtgtcggaatcactggtaaatgttggctgagaacaatccctccccttgcacttgtgaaaacactttgagcgctttaagagattagcctgagaaataattaaatatcttttctcttca

SEQ ID NO: 322813 - DNA, 1828 bp, Homo sapiens
ccgttcgtacgagaatcgctgtcctctccttgctcgagatccattgtgctctaaagccacacgaaccaggtgtccaggatgaccgtggatgagtcggggcagctcatcagctgcagcatggacgacaccgtgcggtacaccagcctcatgctgcgggactacagcggacaaggagttgtgaaactggacgttcagccaaagtgcgtagccgtcggccccgggggatacgccgtggtcgtgtgcattggacagattgtcctgctgaaggatcagaggaagtgcttcagcatcgacaaccccggctacgagcccgaagttgtggcagtgcaccccggcggggacacggtggcaattgggggtgtggacggcaacgtccgcctgtattccatcctgggcaccacgctgaaggatgagggcaagctcctagaggccaagggccccgtgaccgacgtggcctactcccacgacggcgccttcctcgcggtgtgcgacgccagcaaggtggtcacagtgttcagcgttgctgacggctactcggagaacaatgttttttatggacaccatgcaaaaatcgtctgcctggcctggtccccagacaatgaacactttgcctccggtggcatggacatgatggtgtatgtttggaccctgagtgacccggaaaccagagtcaagatccaagatgcacaccggctgcaccatgtcagcagcctggcctggctggacgagcacacgctggtcacgacctcccatgatgcctctgtcaaggagtggacaatcacctactgaggagccccacccccgcctctggatggaccgaatcagggactagagtttaactgcagcggaacatgtcatttctctatttctgtgacgcgcccccatgcccccaccccaccacaagaggcaggagggcccagtcatgaccctcgtctctgcagggtgtctgtacacgttcttctgaaagctttagacagtaacagtttgcacatgaaaaataaagcgagcacctaaacaatgtgtggagcataactaaaacccacagcccaaccaaaccttgagaatgcgaaacattccagaggcagtagcctccaaagcacacagagcccctggccccgccgcggctctcactatctgtcaggggaggttgtacaggtgaatgagccggggggctcatgttcctgcctgcagaacatttctgtactagtgagaagagggaatatgcattgcagttcagcaaagccggaattctgtgttgaacagatgtctgtctccctagtgtgtgactcacaccttgtggctgccttcagagcgccacctccagatcagatggggacacacaacccctggatatgtttcattgtcagattttgtgcttgattttaagaatggaattgtgggtatctttcctttttttttaatgtatcttaactgttgcctgtcagtgtttacaaactagtgcgttgacggcaccgtgtccaagtttttagaacccttgttagccagaccgaggtgtcctggtcaccgtttcaccatcatgctttgatgttcccctgtctttccctcttctgctctcaagagcaaaggttaatttaaggacaaagatgaagtcactgtaaactaatctgtcattgtttttaccttccttttctttttcagtgcagaaattaaaagtaagtataaagcaccgtgattgggagtgtttttgcgtgtgtcggaatcactggtaaatgttggctgagaacaatccctccccttgcacttgtgaaaacactttgagcgctttaagagattagcctgagaaataattaaatatcttttctcttca

SEQ ID NO: 322814 - DNA, 1485 bp, Homo sapiens
acgtcacttccggggcggggcgagcaaggcggaggcggggccggggccggcgggggaggggagcgccaggtccgcgcaggctcgccgggaccgcagccgccgagccgagcgcttgactatatatggtcaaagctgggggcgagccgcgcgcgggaccgcgcttccgggttcggggcgtccgcaaccacagcgcgcagggcaggcgcgagctggcctctgagccccggcctcggaccgcccactccactcccggcacgcccggtgccgccttccggctccagtccccgggctcggcctcggcgaggtgtaattcgcagcgcgggccggccccggaggctctcggcgagcgcggcgcggtaacaagtgggcgaggatgccgtacgagatcaagaaggtgttcgccagcctcccgcaggtggagaggggcgtctccaagatcatcggcggcgaccctaagggcaacaattttctgtacaccaatggaaagtgcgtcatcctaaggaacatcgacaacccagcccttgctgacatctacacagagcacgcccatcaggtggtggtggccaagtatgcgcccagcggattctacattgcctccggagatgtgtctgggaagctgaggatctgggataccacgcagaaggagcacctgttgaagtatgagtaccagcctttcgctgggaagatcaaagacattgcttggactgaagacagtaagaggatcgccgtggtcggggaaggaagggagaagtttggagcagtcttcctctgggatagtggctcttctgtgggcgagattacaggacacaacaaagtcatcaacagcgtggacatcaagcagagccggccataccggctggccacgggaagcgatgataactgcgcggcattctttgagggacccccattcaagttcaagttcacagttggcgaccacagccgctttgtcaactgtgtgcgattctctcctgatgggaacagatttgccacagccagtgctgacggccagatatacatctatgacgggaagactggggagaaggtgtgcgcgctgggcggaagcaaggcccacgacggtgggatttacgcaattagttggagtcccgacagcacccatttgctttctgcttctggggacaaaacttccaagatttgggacgtcagcgtgaactccgtggtcaccgtttcaccatcatgctttgatgttcccctgtctttccctcttctgctctcaagagcaaaggttaatttaaggacaaagatgaagtcactgtaaactaatctgtcattgtttttaccttccttttctttttcagtgcagaaattaaaagtaagtataaagcaccgtgattgggagtgtttttgcgtgtgtcggaatcactggtaaatgttggctgagaacaatccctccccttgcacttgtgaaaacactttgagcgctttaagagattagcctgagaaataattaaatatcttttctcttca

SEQ ID NO: 322815 - DNA, 1480 bp, Homo sapiens
ctgtctaaagctttcagaagaacgtgtacagacaccctgcagagacaagggtcatgactgggccctcctgcctcttgtggtggggtgggggcatgggggcgcgtcacagaaatagagaaatgacatgttccgctgcagttaaactctagtccctgattcggtccatccagaggcgggggtggggctcgtagccgggatgagggcaagctcctagaggccaagggccccgtgaccgacgtggcctactcccacgacggcgccttcctcgcggtgtgcgacgccagcaaggtggtcacagtgttcagcgttgctgacggctactcggagaacaatgttttttatggacaccatgcaaaaatcgtctgcctggcctggtccccagacaatgaacactttgcctccggtggcatggacatgatggtgtatgtttggaccctgagtgacccggaaaccagagtcaagatccaagatgcacaccggctgcaccatgtcagcagcctggcctggctggacgagcacacgctggtcacgacctcccatgatgcctctgtcaaggagtggacaatcacctactgaggagccccacccccgcctctggatggaccgaatcagggactagagtttaactgcagcggaacatgtcatttctctatttctgtgacgcgcccccatgcccccaccccaccacaagaggcaggagggcccagtcatgaccctcgtctctgcagggtgtctgtacacgttcttctgaaagctttagacagtaacagtttgcacatgaaaaataaagcgagcacctaaacaatgtgtggagcataactaaaacccacagcccaaccaaaccttgagaatgcgaaacattccagaggcagtagcctccaaagcacacagagcccctggccccgccgcggctctcactatctgtcaggggaggttgtacaggtgaatgagccggggggctcatgttcctgcctgcagaacatttctgtactagtgagaagagggaatatgcattgcagttcagcaaagccggaattctgtgttgaacagatgtctgtctccctagtgtgtgactcacaccttgtggctgccttcagagcgccacctccagatcagatggggacacacaacccctggatatgtttcattgtcagattttgtgcttgattttaagaatggaattgtgggtatctttcctttttttttaatgtatcttaactgttgcctgtcagtgtttacaaactagtgcgttgacggcaccgtgtccaagtttttagaacccttgttagccagaccgaggtgtcctggtcaccgtttcaccatcatgctttgatgttcccctgtctttccctcttctgctctcaagagcaaaggttaatttaaggacaaagatgaagtcactgtaaactaatctgtcattgtttttaccttccttttctttttcagtgcagaaattaaaagtaagtataaagcaccgtga

SEQ ID NO: 322816 - DNA, 1245 bp, Homo sapiens
ctcggtacccgttgtggaacgctgccttcctcgcggtgtgcgacgccagcaaggtggtcacagtgttcagcgttgctgacggctactcggagaacaatgttttttatggacaccatgcaaaaatcgtctgcctggcctggtccccagacaatgaacactttgcctccggtggcatggacatgatggtgtatgtttggaccctgagtgacccggaaaccagagtcaagatccaagatgcacaccggctgcaccatgtcagcagcctggcctggctggacgagcacacgctggtcacgacctcccatgatgcctctgtcaaggagtggacaatcacctactgaggagccccacccccgcctctggatggaccgaatcagggactagagtttaactgcagcggaacatgtcatttctctatttctgtgacgcgcccccatgcccccaccccaccacaagaggcaggagggcccagtcatgaccctcgtctctgcagggtgtctgtacacgttcttctgaaagctttagacagtaacagtttgcacatgaaaaataaagcgagcacctaaacaatgtgtggagcataactaaaacccacagcccaaccaaaccttgagaatgcgaaacattccagaggcagtagcctccaaagcacacagagcccctggccccgccgcggctctcactatctgtcaggggaggttgtacaggtgaatgagccggggggctcatgttcctgcctgcagaacatttctgtactagtgagaagagggaatatgcattgcagttcagcaaagccggaattctgtgttgaacagatgtctgtctccctagtgtgtgactcacaccttgtggctgccttcagagcgccacctccagatcagatggggacacacaacccctggatatgtttcattgtcagattttgtgcttgattttaagaatggaattgtgggtatctttcctttttttttaatgtatcttaactgttgcctgtcagtgtttacaaactagtgcgttgacggcaccgtgtccaagtttttagaacccttgttagccagaccgaggtgtcctggtcaccgtttcaccatcatgctttgatgttcccctgtctttccctcttctgctctcaagagcaaaggttaatttaaggacaaagatgaagtcactgtaaactaatctgtcattgtttttaccttccttttctttttcagtgcagaaattaaaagtaagtataaagcaccgtga

SEQ ID NO: 322817 - DNA, 1723 bp, Homo sapiens
tcggctaggtcagccggtgttaatcggccgaggcagaaacaaccccagcaagcccctgcacgtcatcaagggtcacagtaaatcgatccagtgtctgacggtgcataaaaacggcggcaagtcctacatttactctgggagccacgacggacacattaattactgggattcagagacgggggagaacgactccttcgctgggaaaggccacacgaaccaggtgtccaggatgaccgtggatgagtcggggcagctcatcagctgcagcatggacgacaccgtgcggtacaccagcctcatgctgcgggactacagcggacaaggagttgtgaaactggacgttcagccaaagtgcgtagccgtcggccccgggggatacgccgtggtcgtgtgcattggacagattgtcctgctgaaggatcagaggaagtgcttcagcatcgacaaccccggctacgagcccgaagttgtggcagtgcaccccggcggggacacggtggcaattgggggtgtggacggcaacgtccgcctgtattccatcctgggcaccacgctgaaggatgagggcaagctcctagaggccaagggccccgtgaccgacgtggcctactcccacgacggcgccttcctcgcggtgtgcgacgccagcaaggtggtcacagtgttcagcgttgctgacggctactcggagaacaatgttttttatggacacatgcacaccggctgcaccatgtcagcagcctggcctggctggacgagcacacgctggtcacgacctcccatgatgcctctgtcaaggagtggacaatcacctactgaggagccccacccccgcctctggatggaccgaatcagggactagagtttaactgcagcggaacatgtcatttctctatttctgtgacgcgcccccatgcccccaccccaccacaagaggcaggagggcccagtcatgaccctcgtctctgcagggtgtctgtacacgttcttctgaaagctttagacagtaacagtttgcacatgaaaaataaagcgagcacctaaacaatgtgtggagcataactaaaacccacagcccaaccaaaccttgagaatgcgaaacattccagaggcagtagcctccaaagcacacagagcccctggccccgccgcggctctcactatctgtcaggggaggttgtacaggtgaatgagccggggggctcatgttcctgcctgcagaacatttctgtactagtgagaagagggaatatgcattgcagttcagcaaagccggaattctgtgttgaacagatgtctgtctccctagtgtgtgactcacaccttgtggctgccttcagagcgccacctccagatcagatggggacacacaacccctggatatgtttcattgtcagattttgtgcttgattttaagaatggaattgtgggtatctttcctttttttttaatgtatcttaactgttgcctgtcagtgtttacaaactagtgcgttgacggcaccgtgtccaagtttttagaacccttgttagccagaccgaggtgtcctggtcaccgtttcaccatcatgctttgatgttcccctgtctttccctcttctgctctcaagagcaaaggttaatttaaggacaaagatgaagtcactgtaaactaatctgtcattgtttttaccttccttttctttttcagtgcagaaattaaaagtaagtataaagcaccgtga

SEQ ID NO: 322818 - DNA, 1088 bp, Homo sapiens
acggcgaactatactctgaagcatgatggtgtatgtttggaccctgagtgacccggaaaccagagtcaagatccaagatgcacaccggctgcaccatgtcagcagcctggcctggctggacgagcacacgctggtcacgacctcccatgatgcctctgtcaaggagtggacaatcacctactgaggagccccacccccgcctctggatggaccgaatcagggactagagtttaactgcagcggaacatgtcatttctctatttctgtgacgcgcccccatgcccccaccccaccacaagaggcaggagggcccagtcatgaccctcgtctctgcagggtgtctgtacacgttcttctgaaagctttagacagtaacagtttgcacatgaaaaataaagcgagcacctaaacaatgtgtggagcataactaaaacccacagcccaaccaaaccttgagaatgcgaaacattccagaggcagtagcctccaaagcacacagagcccctggccccgccgcggctctcactatctgtcaggggaggttgtacaggtgaatgagccggggggctcatgttcctgcctgcagaacatttctgtactagtgagaagagggaatatgcattgcagttcagcaaagccggaattctgtgttgaacagatgtctgtctccctagtgtgtgactcacaccttgtggctgccttcagagcgccacctccagatcagatggggacacacaacccctggatatgtttcattgtcagattttgtgcttgattttaagaatggaattgtgggtatctttcctttttttttaatgtatcttaactgttgcctgtcagtgtttacaaactagtgcgttgacggcaccgtgtccaagtttttagaacccttgttagccagaccgaggtgtcctggtcaccgtttcaccatcatgctttgatgttcccctgtctttccctcttctgctctcaagagcaaaggttaatttaaggacaaagatgaagtcactgtaaactaatctgtcattgtttttaccttccttttctttttcagtgcagaaattaaaagtaagtataaagcaccgtga

SEQ ID NO: 322819 - DNA, 1190 bp, Homo sapiens
  misc_feature (1128)..(1129): n is a, c, g, or t
  misc_feature (1132)..(1132): n is a, c, g, or t
  misc_feature (1139)..(1139): n is a, c, g, or t
acgtcacttccggggcggggcgagcaaggcggaggcggggccggggccggcgggggaggggagcgccaggtccgcgcaggctcgccgggaccgcagccgccgagccgagcgcttgactatatatggtcaaagctgggggcgagccgcgcgcgggaccgcgcttccgggttcggggcgtccgcaaccacagcgcgcagggcaggcgcgagctggcctctgagccccggcctcggaccgcccactccactcccggcacgcccggtgccgccttccggctccagtccccgggctcggcctcggcgaggtgtaattcgcagcgcgggccggccccggaggctctcggcgagcgcggcgcggtaacaagtgggcgaggatgccgtacgagatcaagaaggtgttcgccagcctcccgcaggtggagaggggcgtctccaagatcatcggcggcgaccctaagggcaacaattttctgtacaccaatggaaagtgcgtcatcctaaggaacatcgacaacccagcccttgctgacatctacacagagcacgcccatcaggtggtggtggccaagtatgcgcccagcggattctacattgcctccggagatgtgtctgggaagctgaggatctgggataccacgcagaaggagcacctgttgaagtatgagtaccagcctttcgctgggaagatcaaagacattgcttggactgaagacagtaagaggatcgccgtggtcggggaaggaagggagaagtttggagcagtcttcctctgggatagtggctcttctgtgggcgagattacaggacacaacaaagtcatcaacagcgtggacatcaagcagagccggccataccggctggccacgggaagcgatgataactgcgcggcattctttgagggacccccattcaagttcaagttcacagttggcgaccacagccgctttgtcaactgtgtgcgattctctcctgatgggaacagatttgccacagccagtgctgacggccagatatacatctatgacgggaagactggggagaaggtgtgcgcgctgggcggaagcaaggcccgcggggggggtttcgcccttgtgtgggtcccgcaggccctttggtttggtttggggcnnctnccggatngggggcgcgcgacgcccgggggggccttccctgggcccggttgggcaccgg

SEQ ID NO: 322820 - DNA, 1079 bp, Homo sapiens
acgtcacttccggggcggggcgagcaaggcggaggcggggccggggccggcgggggaggggagcgccaggtccgcgcaggctcgccgggaccgcagccgccgagccgagcgcttgactatatatggtcaaagctgggggcgagccgcgcgcgggaccgcgcttccgggttcggggcgtccgcaaccacagcgcgcagggcaggcgcgagctggcctctgagccccggcctcggaccgcccactccactcccggcacgcccggtgccgccttccggctccagtccccgggctcggcctcggcgaggtgtaattcgcagcgcgggccggccccggaggctctcggcgagcgcggcgcggtaacaagtgggcgaggatgccgtacgagatcaagaaggtgttcgccagcctcccgcaggtggagaggggcgtctccaagatcatcggcggcgaccctaagggcaacaattttctgtacaccaatggaaagtgcgtcatcctaaggaacatcgacaacccagcccttgctgacatctacacagagcacgcccatcaggtggtggtggccaagtatgcgcccagcggattctacattgcctccggagatgtgtctgggaagctgaggatctgggataccacgcagaaggagcacctgttgaagtatgagtaccagcctttcgctgggaagatcaaagacattgcttggactgaagacagtaagaggatcgccgtggtcggggaaggaagggagaagtttggagcagtcttcctctgggatagtggctcttctgtgggcgagattacaggacacaacaaagtcatcaacagcgtggacatcaagcagagccggccataccggctggccacgggaagcgatgataactgcgcggcattctttgagggacccccattcaagttcaagttcacagttggcgaccacagccgctttgtcaactgtgtgcgattctctcctgatgggaacagatttgccacagccagtgctgacggccagatatacatctatgacgggaagactggggattaggtgttcggtcgagcggagctgttcggttgagcggaga

SEQ ID NO: 322821 - DNA, 897 bp, Homo sapiens
tcctccaccagccagcttgagggcctcatgagaccagcggtgccccgaggtaccaacagctgttttcatagagctgcgtaggtttcaggcccatccacgggaagagccatgcccagctcctggcatgggcccagcagagcagcagtcagtgggaacggcacagtttcttaagccctcgacccccccttcacaaaggatgggtgtggtgtgtgtgttcaggggtggctcacttcctctctgtccctgccgtaggacggcaacgtccgcctgtattccatcctgggcaccacgctgaaggatgagggcaagctcctagaggccaagggccccgtgaccgacgtggcctactcccacgacggcgccttcctcgcggtgtgcgaccgccacctccagatcagatggggacacacaacccctggatatgtttcattgtcagattttgtgcttgattttaagaatggaattgtgggtatctttcctttttttttaatgtatcttaactgttgcctgtcagtgtttacaaactagtgcgttgacggcaccgtgtccaagtttttagaacccttgttagccagaccgaggtgtcctggtcaccgtttcaccatcatgctttgatgttcccctgtctttccctcttctgctctcaagagcaaaggttaatttaaggacaaagatgaagtcactgtaaactaatctgtcattgtttttaccttccttttctttttcagtgcagaaattaaaagtaagtataaagcaccgtgattgggagtgtttttgcgtgtgtcggaatcactggtaaatgttggctgagaacaatccctccccttgcacttgtgaaaacactttgagcgctttaagagattagcctgagaaataattaaatatcttttctcttca

SEQ ID NO: 322822 - DNA, 884 bp, Homo sapiens
  misc_feature (758)..(758): n is a, c, g, or t
acgtcacttccggggcggggcgagcaaggcggaggcggggccggggccggcgggggaggggagcgccaggtccgcgcaggctcgccgggaccgcagccgccgagccgagcgcttgactatatatggtcaaagctgggggcgagccgcgcgcgggaccgcgcttccgggttcggggcgtccgcaaccacagcgcgcagggcaggcgcgagctggcctctgagccccggcctcggaccgcccactccactcccggcacgcccggtgccgccttccggctccagtccccgggctcggcctcggcgaggtgtaattcgcagcgcgggccggccccggaggctctcggcgagcgcggcgcggtaacaagtgggcgaggatgccgtacgagatcaagaaggtgttcgccagcctcccgcaggtggagaggggcgtctccaagatcatcggcggcgaccctaagggcaacaattttctgtacaccaatggaaagtgcgtcatcctaaggaacatcgacaacccagcccttgctgacatctacacagagcacgcccatcaggtggtggtggccaagtatgcgcccagcggattctacattgcctccggagatgtgtctgggaagctgaggatctgggataccacgcagaaggagcacctgttgaagtatgagtaccagcctttcgctgggaagatcaaagacattgcttggactgaagacagtaagaggatcgccgtggtcggggaaggaagggagaatttgacantttttcttttttataaagggtatttatatgtgggtagaatttaggtattataagagtgataaaaaattgttggcattaagggataaacgtgtttttactttttttggcattggtatgccgattatt

SEQ ID NO: 322823 - DNA, 448 bp, Homo sapiens
tcctgcccctccactaagggactgcccaggatgtttttttaagctctgaaattttccagtggactaacagttcacactgatgaacagctggagctgcaagctgtgtttcatagagagcattcttgaacctagagtcaggcctgcggcccctcatcaggcaggtaattgttttcctgcaggaccacagccgctttgtcaactgtgtgcgattctctcctgatgggaacagatttgccacagccagtgctgacggccaggtaagaactgggatgggttttggggtggggaatggcttgtctgcctgctcccgtgactgctcagagccgcaggctgcctaatgctagtcctgacatgcagaacttagacatcgccctccccacatctgcagactcgtcgtcagagcccagtaaatgcatgtctgcttttaaaccacactgggagcttagtc

SEQ ID NO: 322824 - DNA, 3098 bp, Homo sapiens
acgtcacttccggggcggggcgagcaaggcggaggcggggccggggccggcgggggaggggagcgccaggtccgcgcaggctcgccgggaccgcagccgccgagccgagcgcttgactatatatggtcaaagctgggggcgagccgcgcgcgggaccgcgcttccgggttcggggcgtccgcaaccacagcgcgcagggcaggcgcgagctggcctctgagccccggcctcggaccgcccactccactcccggcacgcccggtgccgccttccggctccagtccccgggctcggcctcggcgaggtgtaattcgcagcgcgggccggccccggaggctctcggcgagcgcggcgcggtaacaagtgggcgaggatgccgtacgagatcaagaaggtgttcgccagcctcccgcaggtggagaggggcgtctccaagatcatcggcggcgaccctaagggcaacaattttctgtacaccaatggaaagtgcgtcatcctaaggaacatcgacaacccagcccttgctgacatctacacagagcacgcccatcaggtggtggtggccaagtatgcgcccagcggattctacattgcctccggagatgtgtctgggaagctgaggatctgggataccacgcagaaggagcacctgttgaagtatgagtaccagcctttcgctgggaagatcaaagacattgcttggactgaagacagtaagaggatcgccgtggtcggggaaggaagggagaagtttggagcagtcttcctctgggatagtggctcttctgtgggcgagattacaggacacaacaaagtcatcaacagcgtggacatcaagcagagccggccataccggctggccacgggaagcgatgataactgcgcggcattctttgagggacccccattcaagttcaagttcacagttggcgaccacagccgctttgtcaactgtgtgcgattctctcctgatgggaacagatttgccacagccagtgctgacggccagatatacatctatgacgggaagactggggagaaggtgtgcgcgctgggcggaagcaaggcccacgacggtgggatttacgcaattagttggagtcccgacagcacccatttgctttctgcttctggggacaaaacttccaagatttgggacgtcagcgtgaactccgtggtcagcacatttcccatgggctccacggttctggaccagcagctgggctgcctatggcagaaggaccacctgctcagtgtctccctgtccgggtacatcaactatctggacagaaacaaccccagcaagcccctgcacgtcatcaagggtcacagtaaatcgatccagtgtctgacggtgcataaaaacggcggcaagtcctacatttactctgggagccacgacggacacattaattactgggattcagagacgggggagaacgactccttcgctgggaaaggccacacgaaccaggtgtccaggatgaccgtggatgagtcggggcagctcatcagctgcagcatggacgacaccgtgcggtacaccagcctcatgctgcgggactacagcggacaaggagttgtgaaactggacgttcagccaaagtgcgtagccgtcggccccgggggatacgccgtggtcgtgtgcattggacagattgtcctgctgaaggatcagaggaagtgcttcagcatcgacaaccccggctacgagcccgaagttgtggcagtgcaccccggcggggacacggtggcaattgggggtgtggacggcaacgtccgcctgtattccatcctgggcaccacgctgaaggatgagggcaagctcctagaggccaagggccccgtgaccgacgtggcctactcccacgacggcgccttcctcgcggtgtgcgacgccagcaaggtggtcacagtgttcagcgttgctgacggctactcggagaacaatgttttttatggacaccatgcaaaaatcgtctgcctggcctggtccccagacaatgaacactttgcctccggtggcatggacatgatggtgtatgtttggaccctgagtgacccggaaaccagagtcaagatccaagatgcacaccggctgcaccatgtcagcagcctggcctggctggacgagcacacgctggtcacgacctcccatgatgcctctgtcaaggagtggacaatcacctactgaggagccccacccccgcctctggatggaccgaatcagggactagagtttaactgcagcggaacatgtcatttctctatttctgtgacgcgcccccatgcccccaccccaccacaagaggcaggagggcccagtcatgaccctcgtctctgcagggtgtctgtacacgttcttctgaaagctttagacagtaacagtttgcacatgaaaaataaagcgagcacctaaacaatgtgtggagcataactaaaacccacagcccaaccaaaccttgagaatgcgaaacattccagaggcagtagcctccaaagcacacagagcccctggccccgccgcggctctcactatctgtcaggggaggttgtacaggtgaatgagccggggggctcatgttcctgcctgcagaacatttctgtactagtgagaagagggaatatgcattgcagttcagcaaagccggaattctgtgttgaacagatgtctgtctccctagtgtgtgactcacaccttgtggctgccttcagagcgccacctccagatcagatggggacacacaacccctggatatgtttcattgtcagattttgtgcttgattttaagaatggaattgtgggtatctttcctttttttttaatgtatcttaactgttgcctgtcagtgtttacaaactagtgcgttgacggcaccgtgtccaagtttttagaacccttgttagccagaccgaggtgtcctggtcaccgtttcaccatcatgctttgatgttcccctgtctttccctcttctgctctcaagagcaaaggttaatttaaggacaaagatgaagtcactgtaaactaatctgtcattgtttttaccttccttttctttttcagtgcagaaattaaaagtaagtataaagcaccgtga

SEQ ID NO: 322825 - DNA, 2439 bp, Homo sapiens
acgtcacttccggggcggggcgagcaaggcggaggcggggccggggccggcgggggaggggagcgccaggtccgcgcaggctcgccgggaccgcagccgccgagccgagcgcttgactatatatggtcaaagctgggggcgagccgcgcgcgggaccgcgcttccgggttcggggcgtccgcaaccacagcgcgcagggcaggcgcgagctggcctctgagccccggcctcggaccgcccactccactcccggcacgcccggtgccgccttccggctccagtccccgggctcggcctcggcgaggtgtaattcgcagcgcgggccggccccggaggctctcggcgagcgcggcgcggtaacaagtgggcgaggatgccgtacgagatcaagaaggtgttcgccagcctcccgcaggtggagaggggcgtctccaagatcatcggcggcgaccctaagggcaacaattttctgtacaccaatggaaagtgcgtcatcctaaggaacatcgacaacccagcccttgctgacatctacacagagcacgcccatcaggtggtggtggccaagtatgcgcccagcggattctacattgcctccggagatgtgtctgggaagctgaggatctgggataccacgcagaaggagcacctgttgaagtatgagtaccagcctttcgctgggaagatcaaagacattgcttggactgaagacagtaagaggatcgccgtggtcggggaaggaagggagaagtttggagcagtcttcctctgggatagtggctcttctgtgggcgagattacaggacacaacaaagtcatcaacagcgtggacatcaagcagagccggccataccggctggccacgggaagcgatgataactgcgcggcattctttgagggacccccattcaagttcaagttcacagttggcgaccacagccgctttgtcaactgtgtgcgattctctcctgatgggaacagatttgccacagccagtgctgacggccagatatacatctatgacgggaagactggggagaaggtgtgcgcgctgggcggaagcaaggcccacgacggtgggatttacgcaattagttggagtcccgacagcacccatttgctttctgcttctggggacaaaacttccaagatttgggacgtcagcgtgaactccgtggtcagcacatttcccatgggctccacggttctggaccagcagctgggctgcctatggcagaaggaccacctgctcagtgtctccctgtccgggtacatcaactatctggacagaaacaaccccagcaagcccctgcacgtcatcaagggtcacagtaaatcgatccagtgtctgacggtgcataaaaacggcggcaagtcctacatttactctgggagccacgacggacacattaattactgggattcagagacgggggagaacgactccttcgctgggaaaggccacacgaaccaggtgtccaggatgaccgtggatgagtcggggcagctcatcagctgcagcatggacgacaccgtgcggtacaccagcctcatgctgcgggactacagcggacaaggagttgtgaaactggacgttcagccaaagtgcgtagccgtcggccccgggggatacgccgtggtcgtgtgcattggacagattgtcctgctgaaggatcagaggaagtgcttcagcatcgacaaccccggctacgagcccgaagttgtggcagtgcaccccggcggggacacggtggcaattgggggtgtggacggcaacgtccgcctgtattccatcctgggcaccacgctgaaggatgagggcaagctcctagaggccaagggccccgtgaccgacgtggcctactcccacgacggcgccttcctcgcggtgtgcgacgccagcaaggtggtcacagtgttcagcgttgctgacggctactcggagaacaatgttttttatggacaccatgcaaaaatcgtctgcctggcctggtccccagacaatgaacactttgcctccggtggcatggacatgatggtgtatgtttggaccctgagtgacccggaaaccagagtcaagatccaagatgcacaccggctgcaccatgtcagcagcctggcctggctggacgagcacacgctggtcacgacctcccatgatgcctctgtcaaggagtggacaatcacctactgaggagccccacccccgcctctggatggaccgaatcagggactagagtttaactgcagcggaacatgtcatttctctatttctgtgacgcgcccccatgcccccaccccaccacaagaggcaggagggcccagtcatgaccctcgtctctgcagggtgtctgtacacgttcttctgaaagctttagacagtaacagtttgcacatgaaaaataaagcgagcacctaaacaatgtgtggagcataact

SEQ ID NO: 322826 - DNA, 2679 bp, Homo sapiens
acgtcacttccggggcggggcgagcaaggcggaggcggggccggggccggcgggggaggggagcgccaggtccgcgcaggctcgccgggaccgcagccgccgagccgagcgcttgactatatatggtcaaagctgggggcgagccgcgcgcgggaccgcgcttccgggttcggggcgtccgcaaccacagcgcgcagggcaggcgcgagctggcctctgagccccggcctcggaccgcccactccactcccggcacgcccggtgccgccttccggctccagtccccgggctcggcctcggcgaggtgtaattcgcagcgcgggccggccccggaggctctcggcgagcgcggcgcggtaacaagtgggcgaggatgccgtacgagatcaagaaggtgttcgccagcctcccgcaggtggagaggggcgtctccaagatcatcggcggcgaccctaagggcaacaattttctgtacaccaatggaaagtgcgtcatcctaaggaacatcgacaacccagcccttgctgacatctacacagagcacgcccatcaggtggtggtggccaagtatgcgcccagcggattctacattgcctccggagatgtgtctgggaagctgaggatctgggataccacgcagaaggagcacctgttgaagtatgagtaccagcctttcgctgggaagatcaaagacattgcttggactgaagacagtaagaggatcgccgtggtcggggaaggaagggagaagtttggagcagtcttcctctgggatagtggctcttctgtgggcgagattacaggacacaacaaagtcatcaacagcgtggacatcaagcagagccggccataccggctggccacgggaagcgatgataactgcgcggcattctttgagggacccccattcaagttcaagttcacagttggcgaccacagccgctttgtcaactgtgtgcgattctctcctgatgggaacagatttgccacagccagtgctgacggccagatatacatctatgacgggaagactggggagaaggtgtgcgcgctgggcggaagcaaggcccacgacggtgggatttacgcaattagttggagtcccgacagcacccatttgctttctgcttctggggacaaaacttccaagatttgggacgtcagcgtgaactccgtggtcagcacatttcccatgggctccacggttctggaccagcagctgggctgcctatggcagaaggaccacctgctcagtgtctccctgtccgggtacatcaactatctggacagaaacaaccccagcaagcccctgcacgtcatcaagggtcacagtaaatcgatccagtgtctgacggtgcataaaaacggcggcaagtcctacatttactctgggagccacgacggacacattaattactgggattcagagacgggggagaacgactccttcgctgggaaaggccacacgaaccaggtgtccaggatgaccgtggatgagtcggggcagctcatcagctgcagcatggacgacaccgtgcggtacaccagcctcatgctgcgggactacagcggacaaggagttgtgaaactggacgttcagccaaagtgcgtagccgtcggccccgggggatacgccgtggtcgtgtgcattggacagattgtcctgctgaaggatcagaggaagtgcttcagcatcgacaaccccggctacgagcccgaagttgtggcagtgcaccccggcggggacacggtggcaattgggggtgtggacggcaacgtccgcctgtattccatcctgggcaccacgctgaaggatgagggcaagctcctagaggccaagggccccgtgaccgacgtggcctactcccacgacggcgccttcctcgcggtgtgcgacgccagcaaggtggtcacagtgttcagcgttgctgacggctactcggagaacaatgttttttatggacaccagtttgcacatgaaaaataaagcgagcacctaaacaatgtgtggagcataactaaaacccacagcccaaccaaaccttgagaatgcgaaacattccagaggcagtagcctccaaagcacacagagcccctggccccgccgcggctctcactatctgtcaggggaggttgtacaggtgaatgagccggggggctcatgttcctgcctgcagaacatttctgtactagtgagaagagggaatatgcattgcagttcagcaaagccggaattctgtgttgaacagatgtctgtctccctagtgtgtgactcacaccttgtggctgccttcagagcgccacctccagatcagatggggacacacaacccctggatatgtttcattgtcagattttgtgcttgattttaagaatggaattgtgggtatctttcctttttttttaatgtatcttaactgttgcctgtcagtgtttacaaactagtgcgttgacggcaccgtgtccaagtttttagaacccttgttagccagaccgaggtgtcctggtcaccgtttcaccatcatgctttgatgttcccctgtctttccctcttctgctctcaagagcaaaggttaatttaaggacaaagatgaagtcactgtaaactaatctgtcattgtttttaccttccttttctttttcagtgcagaaattaaaagtaagtataaagcaccgtga

SEQ ID NO: 322827 - DNA, 867 bp, Homo sapiens
gttcacgctgacgtcccaaatcttggaagttttgtccccatttgctttctgcttctggggacaaaacttccaagatttgggacgtcagcgtgaactccgtggtcagcacatttcccatgggctccacggttctggaccagcagctgggctgcttatggcagaaggaccacctgctcagtgtctccctgtccgggtacatcaactatctggacagaaacaaccccagcaagcccctgcacgtcatcaagatgtgtctgggaagctgaggatctgggataccacgcagaaggagcacctgttgaagtatgagtaccagcctttcgctgggaagatcaaagacattgcttggactgaagacagtaagaggatcgccgtggtcggggaaggaagggagaagtttggagcagtcttcctctgggatagtggctcttctgtgggcgagattacaggacacaacaaagtcatcaacagcgtggacatcaagcagagccggccataccggctggccacgggaagcgatgataactgcgcggcattctttgagggacccccattcaagttcaagttcacagttggcgaccacagccgctttgtcaactgtgtgcgattcttctcaagagcaaaggttaatttaaggacaaagatgaagtcactgtaaactaatctgtcattgtttttaccttccttttctttttcagtgcagaaattaaaagtaagtataaagcaccgtgattgggagtgtttttgcgtgtgtcggaatcactggtaaatgttggctgagaacaatccctccccttgcacttgtgaaaacactttgagcgctttaagagattagcctgagaaataattaaatatcttttctcttca

SEQ ID NO: 322828 - DNA, 3640 bp, Homo sapiens
acgtcacttccggggcggggcgagcaaggcggaggcggggccggggccggcgggggaggggagcgccaggtccgcgcaggctcgccgggaccgcagccgccgagccgagcgcttgactatatatggtcaaagctgggggcgagccgcgcgcgggaccgcgcttccgggttcggggcgtccgcaaccacagcgcgcagggcaggcgcgagctggcctctgagccccggcctcggaccgcccactccactcccggcacgcccggtgccgccttccggctccagtccccgggctcggcctcggcgaggtgtaattcgcagcgcgggccggccccggaggctctcggcgagcgcggcgcggtaacaagtgggcgaggatgccgtacgagatcaagaaggtgttcgccagcctcccgcaggtggagaggggcgtctccaagatcatcggcggcgaccctaagggcaacaattttctgtacaccaatggaaagtgcgtcatcctaaggaacatcgacaacccagcccttgctgacatctacacagagcacgcccatcaggtggtggtggccaagtatgcgcccagcggattctacattgcctccggagatgtgtctgggaagctgaggatctgggataccacgcagaaggagcacctgttgaagtatgagtaccagcctttcgctgggaagatcaaagacattgcttggactgaagacagtaagaggatcgccgtggtcggggaaggaagggagaagtttggagcagtcttcctctgggatagtggctcttctgtgggcgagattacaggacacaacaaagtcatcaacagcgtggacatcaagcagagccggccataccggctggccacgggaagcgatgataactgcgcggcattctttgagggacccccattcaagttcaagttcacagttggcgaccacagccgctttgtcaactgtgtgcgattctctcctgatgggaacagatttgccacagccagtgctgacggccagatatacatctatgacgggaagactggggagaaggtgtgcgcgctgggcggaagcaaggcccacgacggtgggatttacgcaattagttggagtcccgacagcacccatttgctttctgcttctggggacaaaacttccaagatttgggacgtcagcgtgaactccgtggtcagcacatttcccatgggctccacggttctggaccagcagctgggctgcctatggcagaaggaccacctgctcagtgtctccctgtccgggtacatcaactatctggacagaaacaaccccagcaagcccctgcacgtcatcaagggtcacagtaaatcgatccagtgtctgacggtgcataaaaacggcggcaagtcctacatttactctgggagccacgacggacacattaattactgggattcagagacgggggagaacgactccttcgctgggaaaggccacacgaaccaggtgtccaggatgaccgtggatgagtcggggcagctcatcagctgcagcatggacgacaccgtgcggtacaccagcctcatgctgcgggactacagcggacaaggagttgtgaaactggacgttcagccaaagtgcgtagccgtcggccccgggggatacgccgtggtcgtgtgcattggacagattgtcctgctgaaggatcagaggaagtgcttcagcatcgacaaccccggctacgagcccgaagttgtggcagtgcaccccggcggggacacggtggcaattgggggtgtggacggcaacgtccgcctgtattccatcctgggcaccacgctgaaggatgagggcaagctcctagaggccaagggccccgtgaccgacgtggcctactcccacgacggcgccttcctcgcggtgtgcgacgccagcaaggtggtcacagtgttcagcgttgctgacggctactcggagaacaatgttttttatggacaccatgcaaaaatcgtctgcctggcctggtccccagacaatgaacactttgcctccggtggcatggacatgatggtgtatgtttggaccctgagtgacccggaaaccagagtcaagatccaagatgcacaccggctgcaccatgtcagcagcctggcctggctggacgagcacacgctggtcacgacctcccatgatgcctctgtcaaggagtggacaatcacctactgaggagccccacccccgcctctggatggaccgaatcagggactagagtttaactgcagcggaacatgtcatttctctatttctgtgacgcgcccccatgcccccaccccaccacaagaggcaggagggcccagtcatgaccctcgtctctgcagggtgtctgtacacgttcttctgaaagctttagacagtaacagtttgcacatgaaaaataaagcgagcacctaaacaatgtgtggagcataactaaaacccacagcccaaccaaaccttgagaatgcgaaacattccagaggcagtagcctccaaagcacacagagcccctggccccgccgcggctctcactatctgtcaggggaggttgtacaggtgaatgagccggggggctcatgttcctgcctgcagaacatttctgtactagtgagaagagggaatatgcattgcagttcagcaaagccggaattctgtgttgaacagatgtctgtctccctagtgtgtgactcacaccttgtggctgccttcagagcgccacctccagatcagatggggacacacaacccctggatatgtttcattgtcagattttgtgcttgattttaagaatggaattgtgggtatctttcctttttttttaatgtatcttaactgttgcctgtcagtgtttacaaactagtgcgttgacggcaccgtgtccaagtttttagaacccttgttagccagaccgaggtgtcctggtcaccgtttcaccatcatgctttgatgttcccctgtctttccctcttctgctctcaagagcaaaggttaatttaaggacaaagatgaagtcactgtaaactaatctgtcattgtttttaccttccttttctttttcagtgcagaaattaaaagtaagtataaagcaccgtgattgggagtgtttttgcgtgtgtcggaatcactggtaaatgttggctgagaacaatccctccccttgcacttgtgaaaacactttgagcgctttaagagattagcctgagaaataattaaatatcttttctcttcaaaaaaaaaaacaaaaaacaaaaaaaaaaaaaaaaaaaaaacaaaaaaaaaaaaaaaacaacaaaaaaaaaacaaaaaaaaaagcgggggggggcccagtccacaaccacccccctggggggcccatccgcccccccccccctttatgttgtaaaaaagagggagccagctcaagatgaagactagacttattctttaactcctaagcagacgggagggcaggaccgacttaaaaaacagcacacgcgcgaacgagcgaaccacctgatagacgagtagcacattctatgagagacaaacacaccctctctattactgcgggaggaacaaaaaagataggaacaaccccaactaaacaagtaacatgagtttaagagaaacaataaaaagaatcacgcactgatttaa

SEQ ID NO: 322829 - DNA, 2864 bp, Homo sapiens
ctacaacgccaaggcgatcaagaaggtgttcgccagcctcccgcaggtggagaggggcgtctccaagatcatcggcggcgaccctaagggcaacaattttctgtacaccaatggaaagtgcgtcatcctaaggaacatcgacaacccagcccttgctgacatctacacagagcacgcccatcaggtggtggtggccaagtatgcgcccagcggattctacattgcctccggagatgtgtctgggaagctgaggatctgggataccacgcagaaggagcacctgttgaagtatgagtaccagcctttcgctgggaagatcaaagacattgcttggactgaagacagtaagaggatcgccgtggtcggggaaggaagggagaagtttggagcagtcttcctctgggatagtggctcttctgtgggcgagattacaggacacaacaaagtcatcaacagcgtggacatcaagcagagccggccataccggctggccacgggaagcgatgataactgcgcggcattctttgagggacccccattcaagttcaagttcacagttggcgaccacagccgctttgtcaactgtgtgcgattctctcctgatgggaacagatttgccacagccagtgctgacggccagatatacatctatgacgggaagactggggagaaggtgtgcgcgctgggcggaagcaaggcccacgacggtgggatttacgcaattagttggagtcccgacagcacccatttgctttctgcttctggggacaaaacttccaagatttgggacgtcagcgtgaactccgtggtcagcacatttcccatgggctccacggttctggaccagcagctgggctgcctatggcagaaggaccacctgctcagtgtctccctgtccgggtacatcaactatctggacagaaacaaccccagcaagcccctgcacgtcatcaagggtcacagtaaatcgatccagtgtctgacggtgcataaaaacggcggcaagtcctacatttactctgggagccacgacggacacattaattactgggattcagagacgggggagaacgactccttcgctgggaaaggccacacgaaccaggtgtccaggatgaccgtggatgagtcggggcagctcatcagctgcagcatggacgacaccgtgcggtacaccagcctcatgctgcgggactacagcggacaaggagttgtgaaactggacgttcagccaaagtgcgtagccgtcggccccgggggatacgccgtggtcgtgtgcattggacagattgtcctgctgaaggatcagaggaagtgcttcagcatcgacaaccccggctacgagcccgaagttgtggcagtgcaccccggcggggacacggtggcaattgggggtgtggacggcaacgtccgcctgtattccatcctgggcaccacgctgaaggatgagggcaagctcctagaggccaagggccccgtgaccgacgtggcctactcccacgacggcgccttcctcgcggtgtgcgacgccagcaaggtggtcacagtgttcagcgttgctgacggctactcggagaacaatgttttttatggacaccatgcaaaaatcgtctgcctggcctggtccccagacaatgaacactttgcctccggtggcatggacatgatggtgtatgtttggaccctgagtgacccggaaaccagagtcaagatccaagatgcacaccggctgcaccatgtcagcagcctggcctggctggacgagcacacgctggtcacgacctcccatgatgcctctgtcaaggagtggacaatcacctactgaggagccccacccccgcctctggatggaccgaatcagggactagagtttaactgcagcggaacatgtcatttctctatttctgtgacgcgcccccatgcccccaccccaccacaagaggcaggagggcccagtcatgaccctcgtctctgcagggtgtctgtacacgttcttctgaaagctttagacagtaacagtttgcacatgaaaaataaagcgagcacctaaacaatgtgtggagcataactaaaacccacagcccaaccaaaccttgagaatgcgaaacattccagaggcagtagcctccaaagcacacagagcccctggccccgccgcggctctcactatctgtcaggggaggttgtacaggtgaatgagccggggggctcatgttcctgcctgcagaacatttctgtactagtgagaagagggaatatgcattgcagttcagcaaagccggaattctgtgttgaacagatgtctgtctccctagtgtgtgactcacaccttgtggctgccttcagagcgccacctccagatcagatggggacacacaacccctggatatgtttcattgtcagattttgtgcttgattttaagaatggaattgtgggtatctttcctttttttttaatgtatcttaactgttgcctgtcagtgtttacaaactagtgcgttgacggcaccgtgtccaagtttttagaacccttgttagccagaccgaggtgtcctggtcaccgtttcaccatcatgctttgatgttcccctgtctttccctcttctgctctcaagagcaaaggttaatttaaggacaaagatgaagtcactgtaaactaatctgtcattgtttttaccttccttttctttttcagtgcagaaattaaaagtaagtataaagcaccgtgattgggagtgtttttgcgtgtgtcggaatcactggtaaatgttggctgagaacaatccctccccttgcacttgtgaaaacactttgagcgctttaagagattagcctgagaaataattaaatatcttttctcttca

SEQ ID NO: 322830 - DNA, 3182 bp, Homo sapiens
acgtcacttccggggcggggcgagcaaggcggaggcggggccggggccggcgggggaggggagcgccaggtccgcgcaggctcgccgggaccgcagccgccgagccgagcgcttgactatatatggtcaaagctgggggcgagccgcgcgcgggaccgcgcttccgggttcggggcgtccgcaaccacagcgcgcagggcaggcgcgagctggcctctgagccccggcctcggaccgcccactccactcccggcacgcccggtgccgccttccggctccagtccccgggctcggcctcggcgaggtgtaattcgcagcgcgggccggccccggaggctctcggcgagcgcggcgcggtaacaagtgggcgaggatgccgtacgagatcaagaaggtgttcgccagcctcccgcaggtggagaggggcgtctccaagatcatcggcggcgaccctaagggcaacaattttctgtacaccaatggaaagtgcgtcatcctaaggaacatcgacaacccagcccttgctgacatctacacagagcacgcccatcaggtggtggtggccaagtatgcgcccagcggattctacattgcctccggagatgtgtctgggaagctgaggatctgggataccacgcagaaggagcacctgttgaagtatgagtaccagcctttcgctgggaagatcaaagacattgcttggactgaagacagtaagaggatcgccgtggtcggggaaggaagggagaagtttggagcagtcttcctctgggatagtggctcttctgtgggcgagattacaggacacaacaaagtcatcaacagcgtggacatcaagcagagccggccataccggctggccacgggaagcgatgataactgcgcggcattctttgagggacccccattcaagttcaagttcacagttggcgaccacagccgctttgtcaactgtgtgcgattctctcctgatgggaacagatttgccacagccagtgctgacggccagatatacatctatgacgggaagactggggagaaggtgtgcgcgctgggcggaagcaaggcccacgacggtgggatttacgcaattagttggagtcccgacagcacccatttgctttctgcttctggggacaaaacttccaagatttgggacgtcagcgtgaactccgtggtcagcacatttcccatgggctccacggttctggaccagcagctgggctgcctatggcagaaggaccacctgctcagtgtctccctgtccgggtacatcaactatctggacagaaacaaccccagcaagcccctgcacgtcatcaagggtcacagtaaatcgatccagtgtctgacggtgcataaaaacggcggcaagtcctacatttactctgggagccacgacggacacattaattactgggattcagagacgggggagaacgactccttcgctgggaaaggccacacgaaccaggtgtccaggatgaccgtggatgagtcggggcagctcatcagctgcagcatggacgacaccgtgcggtacaccagcctcatgctgcgggactacagcggacaaggagttgtgaaactggacgttcagccaaagtgcgtagccgtcggccccgggggatacgccgtggtcgtgtgcattggacagattgtcctgctgaaggatcagaggaagtgcttcagcatcgacaaccccggctacgagcccgaagttgtggcagtgcaccccggcggggacacggtggcaattgggggtgtggacggcaacgtccgcctgtattccatcctgggcaccacgctgaaggatgagggcaagctcctagaggccaagggccccgtgaccgacgtggcctactcccacgacggcgccttcctcgcggtgtgcgacgccagcaaggtggtcacagtgttcagcgttgctgacggctactcggagaacaatgttttttatggacaccatgcaaaaatcgtctgcctggcctggtccccagacaatgaacactttgcctccggtggcatggacatgatggtgtatgtttggaccctgagtgacccggaaaccagagtcaagatccaagatgcacaccggctgcaccatgtcagcagcctggcctggctggacgagcacacgctggtcacgacctcccatgatgcctctgtcaaggagtggacaatcacctactgaggagccccacccccgcctctggatggaccgaatcagggactagagtttaactgcagcggaacatgtcatttctctatttctgtgacgcgcccccatgcccccaccccaccacaagaggcaggagggcccagtcatgaccctcgtctctgcagggtgtctgtacacgttcttctgaaagctttagacagtaacagtttgcacatgaaaaataaagcgagcacctaaacaatgtgtggagcataactaaaacccacagcccaaccaaaccttgagaatgcgaaacattccagaggcagtagcctccaaagcacacagagcccctggccccgccgcggctctcactatctgtcaggggaggttgtacaggtgaatgagccggggggctcatgttcctgcctgcagaacatttctgtactagtgagaagagggaatatgcattgcagttcagcaaagccggaattctgtgttgaacagatgtctgtctccctagtgtgtgactcacaccttgtggctgccttcagagcgccacctccagatcagatggggacacacaacccctggatatgttcctttttttttaatgtatcttaactgttgcctgtcagtgtttacaaactagtgcgttgacggcaccgtgtccaagtttttagaacccttgttagccagaccgaggtgtcctggtcaccgtttcaccatcatgctttgatgttcccctgtctttccctcttctgctctcaagagcaaaggttaatttaaggacaaagatgaagtcactgtaaactaatctgtcattgtttttaccttccttttctttttcagtgcagaaattaaaagtaagtataaagcaccgtgattgggagtgtttttgcgtgtgtcggaatcactggtaaatgttggctgagaacaatccctccccttgcacttgtgaaaacactttgagcgctttaagagattagcctgagaaataattaaatatcttttctcttca

SEQ ID NO: 322831 - DNA, 3179 bp, Homo sapiens
acgtcacttccggggcggggcgagcaaggcggaggcggggccggggccggcgggggaggggagcgccaggtccgcgcaggctcgccgggaccgcagccgccgagccgagcgcttgactatatatggtcaaagctgggggcgagccgcgcgcgggaccgcgcttccgggttcggggcgtccgcaaccacagcgcgcagggcaggcgcgagctggcctctgagccccggcctcggaccgcccactccactcccggcacgcccggtgccgccttccggctccagtccccgggctcggcctcggcgaggtgtaattcgcagcgcgggccggccccggaggctctcggcgagcgcggcgcggtaacaagtgggcgaggatgccgtacgagatcaagaaggtgttcgccagcctcccgcaggtggagaggggcgtctccaagatcatcggcggcgaccctaagggcaacaattttctgtacaccaatggaaagtgcgtcatcctaaggaacatcgacaacccagcccttgctgacatctacacagagcacgcccatcaggtggtggtggccaagtatgcgcccagcggattctacattgcctccggagatgtgtctgggaagctgaggatctgggataccacgcagaaggagcacctgttgaagtatgagtaccagcctttcgctgggaagatcaaagacattgcttggactgaagacagtaagaggatcgccgtggtcggggaaggaagggagaagtttggagcagtcttcctctgggatagtggctcttctgtgggcgagattacaggacacaacaaagtcatcaacagcgtggacatcaagcagagccggccataccggctggccacgggaagcgatgataactgcgcggcattctttgagggacccccattcaagttcaagttcacagttggcgaccacagccgctttgtcaactgtgtgcgattctctcctgatgggaacagatttgccacagccagtgctgacggccagatatacatctatgacgggaagactggggagaaggtgtgcgcgctgggcggaagcaaggcccacgacggtgggatttacgcaattagttggagtcccgacagcacccatttgctttctgcttctggggacaaaacttccaagatttgggacgtcagcgtgaactccgtggtcagcacatttcccatgggctccacggttctggaccagcagctgggctgcctatggcagaaggaccacctgctcagtgtctccctgtccgggtacatcaactatctggacagaaacaaccccagcaagcccctgcacgtcatcaagggtcacagtaaatcgatccagtgtctgacggtgcattactgggattcagagacgggggagaacgactccttcgctgggaaaggccacacgaaccaggtgtccaggatgaccgtggatgagtcggggcagctcatcagctgcagcatggacgacaccgtgcggtacaccagcctcatgctgcgggactacagcggacaaggagttgtgaaactggacgttcagccaaagtgcgtagccgtcggccccgggggatacgccgtggtcgtgtgcattggacagattgtcctgctgaaggatcagaggaagtgcttcagcatcgacaaccccggctacgagcccgaagttgtggcagtgcaccccggcggggacacggtggcaattgggggtgtggacggcaacgtccgcctgtattccatcctgggcaccacgctgaaggatgagggcaagctcctagaggccaagggccccgtgaccgacgtggcctactcccacgacggcgccttcctcgcggtgtgcgacgccagcaaggtggtcacagtgttcagcgttgctgacggctactcggagaacaatgttttttatggacaccatgcaaaaatcgtctgcctggcctggtccccagacaatgaacactttgcctccggtggcatggacatgatggtgtatgtttggaccctgagtgacccggaaaccagagtcaagatccaagatgcacaccggctgcaccatgtcagcagcctggcctggctggacgagcacacgctggtcacgacctcccatgatgcctctgtcaaggagtggacaatcacctactgaggagccccacccccgcctctggatggaccgaatcagggactagagtttaactgcagcggaacatgtcatttctctatttctgtgacgcgcccccatgcccccaccccaccacaagaggcaggagggcccagtcatgaccctcgtctctgcagggtgtctgtacacgttcttctgaaagctttagacagtaacagtttgcacatgaaaaataaagcgagcacctaaacaatgtgtggagcataactaaaacccacagcccaaccaaaccttgagaatgcgaaacattccagaggcagtagcctccaaagcacacagagcccctggccccgccgcggctctcactatctgtcaggggaggttgtacaggtgaatgagccggggggctcatgttcctgcctgcagaacatttctgtactagtgagaagagggaatatgcattgcagttcagcaaagccggaattctgtgttgaacagatgtctgtctccctagtgtgtgactcacaccttgtggctgccttcagagcgccacctccagatcagatggggacacacaacccctggatatgtttcattgtcagattttgtgcttgattttaagaatggaattgtgggtatctttcctttttttttaatgtatcttaactgttgcctgtcagtgtttacaaactagtgcgttgacggcaccgtgtccaagtttttagaacccttgttagccagaccgaggtgtcctggtcaccgtttcaccatcatgctttgatgttcccctgtctttccctcttctgctctcaagagcaaaggttaatttaaggacaaagatgaagtcactgtaaactaatctgtcattgtttttaccttccttttctttttcagtgcagaaattaaaagtaagtataaagcaccgtgattgggagtgtttttgcgtgtgtcggaatcactggtaaatgttggctgagaacaatccctccccttgcacttgtgaaaacactttgagcgctttaagagattagcctgagaaataattaaatatcttttctcttca

SEQ ID NO: 322832 - DNA, 3089 bp, Homo sapiens
acgtcacttccggggcggggcgagcaaggcggaggcggggccggggccggcgggggaggggagcgccaggtccgcgcaggctcgccgggaccgcagccgccgagccgagcgcttgactatatatggtcaaagctgggggcgagccgcgcgcgggaccgcgcttccgggttcggggcgtccgcaaccacagcgcgcagggcaggcgcgagctggcctctgagccccggcctcggaccgcccactccactcccggcacgcccggtgccgccttccggctccagtccccgggctcggcctcggcgaggtgtaattcgcagcgcgggccggccccggaggctctcggcgagcgcggcgcggtaacaagtgggcgaggatgccgtacgagatcaagaaggtgttcgccagcctcccgcaggtggagaggggcgtctccaagatcatcggcggcgaccctaagggcaacaattttctgtacaccaatggaaagtgcgtcatcctaaggaacatcgacaacccagcccttgctgacatctacacagagcacgcccatcaggtggtggtggccaagtatgcgcccagcggattctacattgcctccggagatgtgtctgggaagctgaggatctgggataccacgcagaaggagcacctgttgaagtatgagtaccagcctttcgctgggaagatcaaagacattgcttggactgaagacagtaagaggatcgccgtggtcggggaaggaagggagaagtttggagcagtcttcctctgggatagtggctcttctgtgggcgagattacaggacacaacaaagtcatcaacagcgtggacatcaagcagagccggccataccggctggccacgggaagcgatgataactgcgcggcattctttgagggacccccattcaagttcaagttcacagttggcgaccacagccgctttgtcaactgtgtgcgattctctcctgatgggaacagatttgccacagccagtgctgacggccagatatacatctatgacgggaagactggggagaaggtgtgcgcgctgggcggaagcaaggcccacgacggtgggatttacgcaattagttggagtcccgacagcacccatttgctttctgcttctggggacaaaacttccaagatttgggacgtcagcgtgaactccgtggtcagcacatttcccatgggctccacggttctggaccagcagctgggctgcctatggcagaaggaccacctgctcagtgtctccctgtccgggtacatcaactatctggacagaaacaaccccagcaagcccctgcacgtcatcaagggtcacagtaaatcgatccagtgtctgacggtgcataaaaacggcggcaagtcctacatttactctgggagccacgacggacacattaattactgggattcagagacgggggagaacgactccttcgctgggaaaggccacacgaaccaggtgtccaggatgaccgtggatgagtcggggcagctcatcagctgcagcatggacgacaccgtgcggtacaccagcctcatgctgcgggactacagcggacaaggagttgtgaaactggacgttcagccaaagtgcgtagccgtcggccccgggggatacgccgtggtcgtgtgcattggacagattgtcctgctgaaggatcagaggaagtgcttcagcatcgacaaccccggctacgagcccgaagttgtggcagtgcaccccggcggggacacggtggcaattgggggtgtggacggcaacgtccgcctgtattccatcctgggcaccacgctgaaggatgagggcaagctcctagaggccaagggccccgtgaccgacgtggcctactcccacgacggcgccttcctcgcggtgtgcgacgccagcaaggtggtcacagtgttcagcgttgctgacggctactcggagaacaatgttttttatggacaccatgcaaaaatcgtctgcctggcctggtccccagacaatgaacactttgcctccggtggcatggacatgatggtgtatgtttggaccctgagtgacccggaaaccagagtcaagatccaagatgcacaccggctgcaccatgtcagcagcctggcctggctggacgagcacacgctggtcacgacctcccatgatgcctctgtcaaggagtggacaatcacctactgaggagccccacccccgcctctggatggaccgaatcagggactagagtttaactgcagcggaacatgtcatttctctatttctgtgacgcgcccccatgcccccaccccaccacaagaggcaggagggcccagtcatgaccctcgtctctgcagggtgtctgtacacgttcttctgaaagctttagacagtaacagtttgcacatgaaaaataaagcgagcacctaaacaatgtgtggagcataactaaaacccacagcccaaccaaaccttgagaatgcgaaacattccagaggcagtagcctccaaagcacacagagcccctggccccgccgcggctctcactatctgtcaggggaggttgtacaggtgaatgagccggggggctcatgttcctgcctgcagaacatttctgtactagtgagaagagggaatatgcattgcagttcagcaaagccggaattctgtgttgaacagatgtctgtctccctagtgtgtgactcacaccttgtggctgccttcagagcgccacctccagatcagatggggacacacaacccctggatatgtgaatgttcatgaacattcgtgtccaacagcccattttcagaaaatccagagccatcgattagagcgtggaaagggagaattaaagttatgttcgtatttcttctcttaaccagattatgagtcagatgttgactatatctgcagaacatttgccaagtattttcagacacctgttttgctaaaatcacagagtgacagcctcttcgtgttgcctgtggcacagaagcatattgtgtgccgcatatctgaacctggggctaaaacactcccagttctaatgcatagtctcctactttagggtggacacgaatgttacaggtagccgagg

SEQ ID NO: 322833 - DNA, 2734 bp, Homo sapiens
caacgcatgtgccgctcccaacgcatgtgccgctcccaacgcatgtgccgctcccaacgcatgtgccgctcccaacgcatgtgccgctccattgcctccggagatgtgtctgggaagctgaggatctgggataccacgcagaaggagcacctgttgaagtatgagtaccagcctttcgctgggaagatcaaagacattgcttggactgaagacagtaagaggatcgccgtggtcggggaaggaagggagaagtttggagcagtcttcctctgggatagtggctcttctgtgggcgagattacaggacacaacaaagtcatcaacagcgtggacatcaagcagagccggccataccggctggccacgggaagcgatgataactgcgcggcattctttgagggacccccattcaagttcaagttcacagttggcgaccacagccgctttgtcaactgtgtgcgattctctcctgatgggaacagatttgccacagccagtgctgacggccagatatacatctatgacgggaagactggggagaaggtgtgcgcgctgggcggaagcaaggcccacgacggtgggatttacgcaattagttggagtcccgacagcacccatttgctttctgcttctggggacaaaacttccaagatttgggacgtcagcgtgaactccgtggtcagcacatttcccatgggctccacggttctggaccagcagctgggctgcctatggcagaaggaccacctgctcagtgtctccctgtccgggtacatcaactatctggacagaaacaaccccagcaagcccctgcacgtcatcaagggtcacagtaaatcgatccagtgtctgacggtgcataaaaacggcggcaagtcctacatttactctgggagccacgacggacacattaattactgggattcagagacgggggagaacgactccttcgctgggaaaggccacacgaaccaggtgtccaggatgaccgtggatgagtcggggcagctcatcagctgcagcatggacgacaccgtgcggtacaccagcctcatgctgcgggactacagcggacaaggagttgtgaaactggacgttcagccaaagtgcgtagccgtcggccccgggggatacgccgtggtcgtgtgcattggacagattgtcctgctgaaggatcagaggaagtgcttcagcatcgacaaccccggctacgagcccgaagttgtggcagtgcaccccggcggggacacggtggcaattgggggtgtggacggcaacgtccgcctgtattccatcctgggcaccacgctgaaggatgagggcaagctcctagaggccaagggccccgtgaccgacgtggcctactcccacgacggcgccttcctcgcggtgtgcgacgccagcaaggtggtcacagtgttcagcgttgctgacggctactcggagaacaatgttttttatggacaccatgcaaaaatcgtctgcctggcctggtccccagacaatgaacactttgcctccggtggcatggacatgatggtgtatgtttggaccctgagtgacccggaaaccagagtcaagatccaagatgcacaccggctgcaccatgtcagcagcctggcctggctggacgagcacacgctggtcacgacctcccatgatgcctctgtcaaggagtggacaatcacctactgaggagccccacccccgcctctggatggaccgaatcagggactagagtttaactgcagcggaacatgtcatttctctatttctgtgacgcgcccccatgcccccaccccaccacaagaggcaggagggcccagtcatgaccctcgtctctgcagggtgtctgtacacgttcttctgaaagctttagacagtaacagtttgcacatgaaaaataaagcgagcacctaaacaatgtgtggagcataactaaaacccacagcccaaccaaaccttgagaatgcgaaacattccagaggcagtagcctccaaagcacacagagcccctggccccgccgcggctctcactatctgtcaggggaggttgtacaggtgaatgagccggggggctcatgttcctgcctgcagaacatttctgtactagtgagaagagggaatatgcattgcagttcagcaaagccggaattctgtgttgaacagatgtctgtctccctagtgtgtgactcacaccttgtggctgccttcagagcgccacctccagatcagatggggacacacaacccctggatatgtttcattgtcagattttgtgcttgattttaagaatggaattgtgggtatctttcctttttttttaatgtatcttaactgttgcctgtcagtgtttacaaactagtgcgttgacggcaccgtgtccaagtttttagaacccttgttagccagaccgaggtgtcctggtcaccgtttcaccatcatgctttgatgttcccctgtctttccctcttctgctctcaagagcaaaggttaatttaaggacaaagatgaagtcactgtaaactaatctgtcattgtttttaccttccttttctttttcagtgcagaaattaaaagtaagtataaagcaccgtgattgggagtgtttttgcgtgtgtcggaatcactggtaaatgttggctgagaacaatccctccccttgcacttgtgaaaacactttgagcgctttaagagattagcctgagaaataattaaatatcttttctcttca

SEQ ID NO: 322834 - DNA, 2813 bp, Homo sapiens
acgtcacttccggggcggggcgagcaaggcggaggcggggccggggccggcgggggaggggagcgccaggtccgcgcaggctcgccgggaccgcagccgccgagccgagcgcttgactatatatggtcaaagctgggggcgagccgcgcgcgggaccgcgcttccgggttcggggcgtccgcaaccacagcgcgcagggcaggcgcgagctggcctctgagccccggcctcggaccgcccactccactcccggcacgcccggtgccgccttccggctccagtccccgggctcggcctcggcgaggtgtaattcgcagcgcgggccggccccggaggctctcggcgagcgcggcgcggtaacaagtgggcgaggatgccgtacgagatcaagaaggtgttcgccagcctcccgcaggtggagaggggcgtctccaagatcatcggcggcgaccctaagggcaacaattttctgtacaccaatggaaagtgcgtcatcctaaggaacatcgacgaccacagccgctttgtcaactgtgtgcgattctctcctgatgggaacagatttgccacagccagtgctgacggccagatatacatctatgacgggaagactggggagaaggtgtgcgcgctgggcggaagcaaggcccacgacggtgggatttacgcaattagttggagtcccgacagcacccatttgctttctgcttctggggacaaaacttccaagatttgggacgtcagcgtgaactccgtggtcagcacatttcccatgggctccacggttctggaccagcagctgggctgcctatggcagaaggaccacctgctcagtgtctccctgtccgggtacatcaactatctggacagaaacaaccccagcaagcccctgcacgtcatcaagggtcacagtaaatcgatccagtgtctgacggtgcataaaaacggcggcaagtcctacatttactctgggagccacgacggacacattaattactgggattcagagacgggggagaacgactccttcgctgggaaaggccacacgaaccaggtgtccaggatgaccgtggatgagtcggggcagctcatcagctgcagcatggacgacaccgtgcggtacaccagcctcatgctgcgggactacagcggacaaggagttgtgaaactggacgttcagccaaagtgcgtagccgtcggccccgggggatacgccgtggtcgtgtgcattggacagattgtcctgctgaaggatcagaggaagtgcttcagcatcgacaaccccggctacgagcccgaagttgtggcagtgcaccccggcggggacacggtggcaattgggggtgtggacggcaacgtccgcctgtattccatcctgggcaccacgctgaaggatgagggcaagctcctagaggccaagggccccgtgaccgacgtggcctactcccacgacggcgccttcctcgcggtgtgcgacgccagcaaggtggtcacagtgttcagcgttgctgacggctactcggagaacaatgttttttatggacaccatgcaaaaatcgtctgcctggcctggtccccagacaatgaacactttgcctccggtggcatggacatgatggtgtatgtttggaccctgagtgacccggaaaccagagtcaagatccaagatgcacaccggctgcaccatgtcagcagcctggcctggctggacgagcacacgctggtcacgacctcccatgatgcctctgtcaaggagtggacaatcacctactgaggagccccacccccgcctctggatggaccgaatcagggactagagtttaactgcagcggaacatgtcatttctctatttctgtgacgcgcccccatgcccccaccccaccacaagaggcaggagggcccagtcatgaccctcgtctctgcagggtgtctgtacacgttcttctgaaagctttagacagtaacagtttgcacatgaaaaataaagcgagcacctaaacaatgtgtggagcataactaaaacccacagcccaaccaaaccttgagaatgcgaaacattccagaggcagtagcctccaaagcacacagagcccctggccccgccgcggctctcactatctgtcaggggaggttgtacaggtgaatgagccggggggctcatgttcctgcctgcagaacatttctgtactagtgagaagagggaatatgcattgcagttcagcaaagccggaattctgtgttgaacagatgtctgtctccctagtgtgtgactcacaccttgtggctgccttcagagcgccacctccagatcagatggggacacacaacccctggatatgtttcattgtcagattttgtgcttgattttaagaatggaattgtgggtatctttcctttttttttaatgtatcttaactgttgcctgtcagtgtttacaaactagtgcgttgacggcaccgtgtccaagtttttagaacccttgttagccagaccgaggtgtcctggtcaccgtttcaccatcatgctttgatgttcccctgtctttccctcttctgctctcaagagcaaaggttaatttaaggacaaagatgaagtcactgtaaactaatctgtcattgtttttaccttccttttctttttcagtgcagaaattaaaagtaagtataaagcaccgtgattgggagtgtttttgcgtgtgtcggaatcactggtaaatgttggctgagaacaatccctccccttgcacttgtgaaaacactttgagcgctttaagagattagcctgagaaataattaaatatcttttctcttca

SEQ ID NO: 322835 - DNA, 2819 bp, Homo sapiens
gttcttaactcattcgtcagaaggacccaggggtcagccaggcccagccatctccctggcccactgcacttcaaggaagctcaggctggcttggaggagccagtgcgaagtcagcggcaaggcgaggctgtgctggccaaggaagcggagttcggcagcgagagaactcgatgtgctggtcagaggtctaggattcgagctgtggttatgtcatggtcaaggttgtgtggcctcatctggaaggagtagtggtgcatacacccctgtccaccccccgcccaacagggggtctagaagtgctttgcctcaggccctcccaccactgccttcactgcagccggctccttcctgcagctctctcgggaactgccctgtgaggccctttgacacagggaatgtggaccctatggactgacatggacaagggaccgtgggccatgttgacacagataggaggtggaccccatcggctaaccccgacgggaacaggccctcagtgcatgacggctccctcatggaccacagccgctttgtcaactgtgtgcgattctctcctgatgggaacagatttgccacagccagtgctgacggccagatatacatctatgacgggaagactggggagaaggtgtgcgcgctgggcggaagcaaggcccacgacggtgggatttacgcaattagttggagtcccgacagcacccatttgctttctgcttctggggacaaaacttccaagatttgggacgtcagcgtgaactccgtggtcagcacatttcccatgggctccacggttctggaccagcagctgggctgcctatggcagaaggaccacctgctcagtgtctccctgtccgggtacatcaactatctggacagaaacaaccccagcaagcccctgcacgtcatcaagggtcacagtaaatcgatccagtgtctgacggtgcataaaaacggcggcaagtcctacatttactctgggagccacgacggacacattaattactgggattcagagacgggggagaacgactccttcgctgggaaaggccacacgaaccaggtgtccaggatgaccgtggatgagtcggggcagctcatcagctgcagcatggacgacaccgtgcggtacaccagcctcatgctgcgggactacagcggacaaggagttgtgaaactggacgttcagccaaagtgcgtagccgtcggccccgggggatacgccgtggtcgtgtgcattggacagattgtcctgctgaaggatcagaggaagtgcttcagcatcgacaaccccggctacgagcccgaagttgtggcagtgcaccccggcggggacacggtggcaattgggggtgtggacggcaacgtccgcctgtattccatcctgggcaccacgctgaaggatgagggcaagctcctagaggccaagggccccgtgaccgacgtggcctactcccacgacggcgccttcctcgcggtgtgcgacgccagcaaggtggtcacagtgttcagcgttgctgacggctactcggagaacaatgttttttatggacaccatgcaaaaatcgtctgcctggcctggtccccagacaatgaacactttgcctccggtggcatggacatgatggtgtatgtttggaccctgagtgacccggaaaccagagtcaagatccaagatgcacaccggctgcaccatgtcagcagcctggcctggctggacgagcacacgctggtcacgacctcccatgatgcctctgtcaaggagtggacaatcacctactgaggagccccacccccgcctctggatggaccgaatcagggactagagtttaactgcagcggaacatgtcatttctctatttctgtgacgcgcccccatgcccccaccccaccacaagaggcaggagggcccagtcatgaccctcgtctctgcagggtgtctgtacacgttcttctgaaagctttagacagtaacagtttgcacatgaaaaataaagcgagcacctaaacaatgtgtggagcataactaaaacccacagcccaaccaaaccttgagaatgcgaaacattccagaggcagtagcctccaaagcacacagagcccctggccccgccgcggctctcactatctgtcaggggaggttgtacaggtgaatgagccggggggctcatgttcctgcctgcagaacatttctgtactagtgagaagagggaatatgcattgcagttcagcaaagccggaattctgtgttgaacagatgtctgtctccctagtgtgtgactcacaccttgtggctgccttcagagcgccacctccagatcagatggggacacacaacccctggatatgtttcattgtcagattttgtgcttgattttaagaatggaattgtgggtatctttcctttttttttaatgtatcttaactgttgcctgtcagtgtttacaaactagtgcgttgacggcaccgtgtccaagtttttagaacccttgttagccagaccgaggtgtcctggtcaccgtttcaccatcatgctttgatgttcccctgtctttccctcttctgctctcaagagcaaaggttaatttaaggacaaagatgaagtcactgtaaactaatctgtcattgtttttaccttccttttctttttcagtgcagaaattaaaagtaagtataaagcaccgtgattgggagtgtttttgcgtgtgtcggaatcactggtaaatgttggctgagaacaatccctccccttgcacttgtgaaaacactttgagcgctttaagagattagcctgagaaataattaaatatcttttctcttca

SEQ ID NO: 322836 - DNA, 2318 bp, Homo sapiens
acgtcacttccggggcggggcgagcaaggcggaggcggggccggggccggcgggggaggggagcgccaggtccgcgcaggctcgccgggaccgcagccgccgagccgagcgcttgactatatatggtcaaagctgggggcgagccgcgcgcgggaccgcgcttccgggttcggggcgtccgcaaccacagcgcgcagggcaggcgcgagctggcctctgagccccggcctcggaccgcccactccactcccggcacgcccggtgccgccttccggctccagtccccgggctcggcctcggcgaggtgtaattcgcagcgcgggccggccccggaggctctcggcgagcgcggcgcggtaacaagtgggcgaggatgccgtacgagatcaagaaggtgttcgccagcctcccgcaggtggagaggggcgtctccaagatcatcggcggcgaccctaagggcaacaattttctgtacaccaatggaaagtgcgtcatcctaaggaacatcgacaacccagcccttgctgacatctacacagagcacgcccatcaggtggtggtggccaagtatgcgcccagcggattctacattgcctccggagatgtgtctgggaagctgaggatctgggataccacgcagaaggagcacctgttgaagtatgagtaccagcctttcgctgggaagatcaaagacattgcttggactgaagacagtaagaggatcgccgtggtcggggaaggaagggagaagtttggagcagtcttcctctgggatagtggctcttctgtgggcgagattacaggacacaacaaagtcatcaacagcgtggacatcaagcagagccggccataccggctggccacgggaagcgatgataactgcgcggcattctttgagggacccccattcaagttcaagttcacagttggcgaccacagccgctttgtcaactgtgtgcgattctctcctgatgggaacagatttgccacagccagtgctgacggccagatatacatctatgacgggaagactggggagaaggtgtgcgcgctgggcggaagcaaggcccacgacggtgggatttacgcaattagttggagtcccgacagcacccatttgctttctgcttctggggacaaaacttccaagatttgggacgtcagcgtgaactccgtggtcagcacatttcccatgggctccacggttctggaccagcagctgggctgcctatggcagaaggaccacctgctcagtgtctccctgtccgggtacatcaactatctggacagaaacaaccccagcaagcccctgcacgtcatcaagggtcacagtaaatcgatccagtgtctgacggtgcataaaaacggcggcaagtcctacatttactctgggagccacgacggacacattaattactgggattcagagacgggggagaacgactccttcgctgggaaaggccacacgaaccaggtgtccaggatgaccgtggatgagtcggggcagctcatcagctgcagcatggacgacaccgtgcggtacaccagcctcatgctgcgggactacagcggacaaggagttgtgaaactggacgttcagccaaagtgcgtagccgtcggccccgggggatacgccgtggtcgtgtgcattggacagattgtcctgctgaaggatcagaggaagtgcttcagcatcgacaaccccggctacgagcccgaagttgtggcagtgcaccccggcggggacacggtggcaattgggggtgtggacggcaacgtccgcctgtattccatcctgggcaccacgctgaaggatgagggcaagctcctagaggccaagggccccgtgaccgacgtggcctactcccacgacggcgccttcctcgcggtgtgcgacgccagcaaggtggtcacagtgttcagcgttgctgacggctactcggagaacaatgttttttatggacacatgcacaccggctgcaccatgtcagcagcctggcctggctggacgagcacacgctggtcacgacctcccatgatgcctctgtcaaggagtggacaatcacctactgaggagccccacccccgcctctggatggaccgaatcagggactagagtttaactgcagcggaacatgtcatttctctatttctgtgacgcgcccccatgcccccaccccaccacaagaggcaggagggcccagtcatgaccctcgtctctgcagggtgtctgtacacgttcttctgaaagctttagacagtaacagtttgcacatgaaaaataaagcgagcacctaaacaatgtgtggagcataact

SEQ ID NO: 322837 - DNA, 1824 bp, Homo sapiens
acgtcacttccggggcggggcgagcaaggcggaggcggggccggggccggcgggggaggggagcgccaggtccgcgcaggctcgccgggaccgcagccgccgagccgagcgcttgactatatatggtcaaagctgggggcgagccgcgcgcgggaccgcgcttccgggttcggggcgtccgcaaccacagcgcgcagggcaggcgcgagctggcctctgagccccggcctcggaccgcccactccactcccggcacgcccggtgccgccttccggctccagtccccgggctcggcctcggcgaggtgtaattcgcagcgcgggccggccccggaggctctcggcgagcgcggcgcggtaacaagtgggcgaggatgccgtacgagatcaagaaggtgttcgccagcctcccgcaggtggagaggggcgtctccaagatcatcggcggcgaccctaagggcaacaattttctgtacaccaatggaaagtgcgtcatcctaaggaacatcgacaacccagcccttgctgacatctacacagagcacgcccatcaggtggtggtggccaagtatgcgcccagcggattctacattgcctccggagatgtgtctgggaagctgaggatctgggataccacgcagaaggagcacctgttgaagtatgagtaccagcctttcgctgggaagatcaaagacattgcttggactgaagacagtaagaggatcgccgtggtcggggaaggaagggagaagtttggagcagtcttcctctgggatagtggctcttctgtgggcgagattacaggacacaacaaagtcatcaacagcgtggacatcaagcagagccggccataccggctggccacgggaagcgatgataactgcgcggcattctttgagggacccccattcaagttcaagttcacagttggcgaccacagccgctttgtcaactgtgtgcgattctctcctgatgggaacagatttgccacagccagtgctgacggccagatatacatctatgacgggaagactggggagaaggtgtgcgcgctgggcggaagcaaggcccacgacggtgggatttacgcaattagttggagtcccgacagcacccatttgctttctgcttctggggacaaaacttccaagatttgggacgtcagcgtgaactccgtggtcagcacatttcccatgggctccacggttctggaccagcagctgggctgcctatggcagaaggaccacctgctcagtgtctccctgtccgggtacatcaactatctggacagaaacaaccccagcaagcccctgcacgtcatcaagggtcacagtaaatcgatccagtgtctgacggtgcataaaaacggcggcaagtcctacatttactctgggagccacgacggacacattaattactgggattcagagacgggggagaacgactccttcgctgggaaaggccacacgaaccaggtgtccaggatgaccgtggatgagtcggggcagctcatcagctgcagcatggacgacaccgtgcggtacaccagcctcatgctgcgggactacagcggacaaggagttgtgaaactggacgttcagccaaagtgcgtagccgtcggccccgggggatacgccgtggtcgtgtgcattggacagattgtcctgctgaaggatcagaggaagtgcttcagcatcgacaaccccggctacgagcccgaagttgtggcagtgcaccccggcggggacacggtggcaattgggggtgtgcgcatccggtgtgtcttcgcctggaccggccggcgcggcaggcgggccaggggacc

SEQ ID NO: 322838 - DNA, 1379 bp, Homo sapiens
acgtcacttccggggcggggcgagcaaggcggaggcggggccggggccggcgggggaggggagcgccaggtccgcgcaggctcgccgggaccgcagccgccgagccgagcgcttgactatatatggtcaaagctgggggcgagccgcgcgcgggaccgcgcttccgggttcggggcgtccgcaaccacagcgcgcagggcaggcgcgagctggcctctgagccccggcctcggaccgcccactccactcccggcacgcccggtgccgccttccggctccagtccccgggctcggcctcggcgaggtgtaattcgcagcgcgggccggccccggaggctctcggcgagcgcggcgcggtaacaagtgggcgaggatgccgtacgagatcaagaaggtgttcgccagcctcccgcaggtggagaggggcgtctccaagatcatcggcggcgaccctaagggcaacaattttctgtacaccaatggaaagtgcgtcatcctaaggaacatcgacaacccagcccttgctgacatctacacagagcacgcccatcaggtggtggtggccaagtatgcgcccagcggattctacattgcctccggagatgtgtctgggaagctgaggatctgggataccacgcagaaggagcacctgttgaagtatgagtaccagcctttcgctgggaagatcaaagacattgcttggactgaagacagtaagaggatcgccgtggtcggggaaggaagggagaagtttggagcagtcttcctctgggatagtggctcttctgtgggcgagattacaggacacaacaaagtcatcaacagcgtggacatcaagcagagccggccataccggctggccacgggaagcgatgataactgcgcggcattctttgagggacccccattcaagttcaagttcacagttggcgaccacagccgctttgtcaactgtgtgcgattctctcctgatgggaacagatttgccacagccagtgctgacggccagatatacatctatgacgggaagactggggagaaggtgtgcgcgctgggcggaagcaaggcccacgacggtgggatttacgcaattagttggagtcccgacagcacccatttgctttctgcttctggggacaaaacttccaagatttgggacgtcagcgtgaactccgtggtcagcacatttcccatgggctccacggttctggaccagcagctgggctgcctatggcagaaggaccacctgctcagtgtctcccgtcatagatgtatatctggccgtcagcactggctgtggcaaatctgttcccatcaggagagaatcgcacacagttgacaaagcggctgtggacgccaactgtgaacttgaacttgaa

SEQ ID NO: 322839 - DNA, 1226 bp, Homo sapiens
  misc_feature (1087)..(1087): n is a, c, g, or t
  misc_feature (1096)..(1096): n is a, c, g, or t
acgtcacttccggggcggggcgagcaaggcggaggcggggccggggccggcgggggaggggagcgccaggtccgcgcaggctcgccgggaccgcagccgccgagccgagcgcttgactatatatggtcaaagctgggggcgagccgcgcgcgggaccgcgcttccgggttcggggcgtccgcaaccacagcgcgcagggcaggcgcgagctggcctctgagccccggcctcggaccgcccactccactcccggcacgcccggtgccgccttccggctccagtccccgggctcggcctcggcgaggtgtaattcgcagcgcgggccggccccggaggctctcggcgagcgcggcgcggtaacaagtgggcgaggatgccgtacgagatcaagaaggtgttcgccagcctcccgcaggtggagaggggcgtctccaagatcatcggcggcgaccctaagggcaacaattttctgtacaccaatggaaagtgcgtcatcctaaggaacatcgacaacccagcccttgctgacatctacacagagcacgcccatcaggtggtggtggccaagtatgcgcccagcggattctacattgcctccggagatgtgtctgggaagctgaggatctgggataccacgcagaaggagcacctgttgaagtatgagtaccagcctttcgctgggaagatcaaagacattgcttggactgaagacagtaagaggatcgccgtggtcggggaaggaagggagaagtttggagcagtcttcctctgggatagtggctcttctgtgggcgagattacaggacacaacaaagtcatcaacagcgtggacatcaagcagagccggccataccggctggccacgggaagcgatgataactgcgcggcattctttgagggacccccattcaagttcaagttcacagttggcgaccacagccgctttgtcaactgtgtgcgattctctcctgatgggaacagatttgccacagccagtgctgacggccagatatacatctatgacgggagacactgagcaggcaggccttctgccataggcagcccagctgctggtccagaaccgtgntgcccatgngaaatgtgctgaccacggagttcacgctgacgtcccaaatcttggaagttttgtccccagaagcagaaagcaaaatggtgctgtcggcgactcaactaattgcgtaaattccaccggcgggggccttgct

SEQ ID NO: 322840 - DNA, 1221 bp, Homo sapiens
acgtcacttccggggcggggcgagcaaggcggaggcggggccggggccggcgggggaggggagcgccaggtccgcgcaggctcgccgggaccgcagccgccgagccgagcgcttgactatatatggtcaaagctgggggcgagccgcgcgcgggaccgcgcttccgggttcggggcgtccgcaaccacagcgcgcagggcaggcgcgagctggcctctgagccccggcctcggaccgcccactccactcccggcacgcccggtgccgccttccggctccagtccccgggctcggcctcggcgaggtgtaattcgcagcgcgggccggccccggaggctctcggcgagcgcggcgcggtaacaagtgggcgaggatgccgtacgagatcaagaaggtgttcgccagcctcccgcaggtggagaggggcgtctccaagatcatcggcggcgaccctaagggcaacaattttctgtacaccaatggaaagtgcgtcatcctaaggaacatcgacaacccagcccttgctgacatctacacagagcacgcccatcaggtggtggtggccaagtatgcgcccagcggattctacattgcctccggagatgtgtctgggaagctgaggatctgggataccacgcagaaggagcacctgttgaagtatgagtaccagcctttcgctgggaagatcaaagacattgcttggactgaagacagtaagaggatcgccgtggtcggggaaggaagggagaagtttggagcagtcttcctctgggatagtggctcttctgtgggcgagattacaggacacaacaaagtcatcaacagcgtggacatcaagcagagccggccataccggctggccacgggaagcgatgataactgcgcggcattctttgagggacccccattcaagttcaagttcacagttggcgaccacagccgctttgtcaactgtgtgcgattcttctcaagagcaaaggttaatttaaggacaaagatgaagtcactgtaaactaatctgtcattgtttttaccttccttttctttttcagtgcagaaattaaaagtaagtataaagcaccgtgattgggagtgtttttgcgtgtgtcggaatcactggtaaatgttggctgagaacaatccctccccttgcacttgtgaaaacactttgagcgctttaagagattagcctgagaaataattaaatatcttttctcttca

SEQ ID NO: 322841 - DNA, 816 bp, Homo sapiens
caaggtggtgacggtgttaactcctgctcgaaggacaggtggtctcttcgttgggacgtcccctttgccagcagccttcttctcggcccgggccaacagtctctgcttcttctcttgctttgtctctggtctgtacttgtgggccagcttaagcagctgagtagctgtttggcggtccagggcctgggtgaactggttaatcgcaggaggcactttcagccgcttatagaggatggctctctgccgctgcaacctgatatagcggggccatttcacaaagcgggtgaggtctcttttgggctggatgtcctgtccaatgccaaaattcttaggccttttctcaaacaggggattcaccactttcttagcctcctgcttcttcacgacagctggggccggagccaccttctttcccttggccttctttcctttcgccctcttctgctctcaagagcaaaggttatgtccaagtttttagaacccttgttagccagaccgaggtgtcctggtcaccgtttcaccatcatgctttgatgttcccctgtctttccctcttctgctctcaagagcaaaggttaatttaaggacaaagatgaagtcactgtaaactaatctgtcattgtttttaccttccttttctttttcagtgcagaaattaaaagtaagtataaagcaccgtgattgggagtgtttttgcgtgtgtcggaatcactggtaaatgttggctgagaacaatccctccccttgcacttgtgaaaacactttgagcgctttaagagattagcctgagaaataattaaatatcttttctcttca

SEQ ID NO: 322842 - DNA, 849 bp, Homo sapiens
acgtcacttccggggcggggcgagcaaggcggaggcggggccggggccggcgggggaggggagcgccaggtccgcgcaggctcgccgggaccgcagccgccgagccgagcgcttgactatatatggtcaaagctgggggcgagccgcgcgcgggaccgcgcttccgggttcggggcgtccgcaaccacagcgcgcagggcaggcgcgagctggcctctgagccccggcctcggaccgcccactccactcccggcacgcccggtgccgccttccggctccagtccccgggctcggcctcggcgaggtgtaattcgcagcgcgggccggccccggaggctctcggcgagcgcggcgcggtaacaagtgggcgaggatgccgtacgagatcaagaaggtgttcgccagcctcccgcaggtggagaggggcgtctccaagatcatcggcggcgaccctaagggcaacaattttctgtacaccaatggaaagtgcgtcatcctaaggaacatcgacaacccagcccttgctgacatctacacagagcacgcccatcaggtggtggtggccaagtatgcgcccagcggattctacattgcctccggagatgtgtctgggaagctgaggatctgggataccacgcagaaggagcacctgttgaagtatgagtaccagcctttcgctgggaagatcaaagacattgcttggactgaagacagtaagaggatcgccgtggtcggggaaggaagggagaaattctttttcttggtaaacctaggaatcttgcttccaacccctactctgtaatgtgcatctactctgtctaatacacttgggagttcaaacggaaactt

SEQ ID NO: 322843 - DNA, 182 bp, Homo sapiens
tcagcgtgaactccgtggtcagcacatttcccatgggctccacggttctggaccagcagctgggctgcctatggcagaaggaccacctgctcagtgtctccctgtccgggtacatcaactatctggacagaaacaaccccagcaagcccctgcacgtcatcaaggtaaggcctgccctgggg

SEQ ID NO: 322844 - DNA, 598 bp, Homo sapiens
gcaggaattcggcacgaggggtgtttgttcatggagagccaccggaatgccaacgcagagccagctgttcagcgtactcttttagagaaatagaagattgtcggcagaaacagcccaggcgttggcagcagggttagaacagctgcctgaggctcctccctgaaggacacctgcctgagagcagagatggaggccttctgttcacggcggattctttgttttaatcttgcgatgtgctttgcttgttgctgggcggatgatgtttactaacgatgaattttacatccaaagggggataggcacttggacccccattctccaaggcccgggggggcggtttcccatgggatgtgaaaggctggccattattaagtccctgtaactcaaatgtcaaccccaccgaggcacccccccgtcccccagaatcttggctgtttacaaatcacgtgtccatcgagcacgtctgaaacccctggtagccccgacttctttttaattaaaataaggtaagcccttcaatttgtttcttcaatatttctttcatttgtagggatatttgtttttcatatcagactaataaaaagaaattagaaaccaa

SEQ ID NO: 322845 - DNA, 915 bp, Homo sapiens
cgacgagccgggatgttaatcggccgaggaacagacacccactgcaatccccaagaaacccagtgctggggatgactttgacttaggagatgctgttgttgatggagaaaatgacgacccacgaccaccgaacccacccaaaccgatgccaaatccaaaccccaaccaccctagttcctccggtagcttttcagatgctgaccttgcggatggcgtttcaggtggagaaggaaaaggaggcagtgatggtggaggcagccacaggaaagaaggggaagaggccgacgccccaggcgtgatccccgggattgtgggggctgtcgtggtcgccgtggctggagccatctctagcttcattgcttaccagaaaaagaagctatgcttcaaagaaaatgcagaacaaggggaggtggacatggagagccaccggaatgccaacgcagagccagctgttcagcgtactcttttagagaaatagaagattgtcggcagaaacagcccaggcgttggcagcagggttagaacagctgcctgaggctcctccctgaaggacacctgcctgagagcagagatggaggccttctgttcacggcggattctttgttttaatcttgcgatgtgctttgcttgttgctgggcggatgatgtttactaacgatgaattttacatccaaagggggataggcacttggacccccattctccaaggcccgggggggcggtttcccatgggatgtgaaaggctggccattattaagtccctgtaactcaaatgtcaaccccaccgaggcacccccccgtcccccagaatcttggctgtttacaaatcacgtgtccatcgagcacgtctgaacctggaagcccaatctctttattccaaaggagacccactggttaaaactcacaggggaaacg

SEQ ID NO: 322846 - DNA, 603 bp, Homo sapiens
tgctgcggtcgtctagaggatcccagacgaccttgacaatgaaaacaagaaacccactgcaatccccaagaaacccagtgctggggatgactttgacttaggagatgctgttgttgatggagaaaatgacgacccacgaccaccgaacccacccaaaccgatgccaaatccaaaccccaaccaccctagttcctccggtagcttttcagatgctgaccttgcggatggcgtttcaggtggagaaggaaaaggaggcagtgatggtggaggcagccacaggaaagaaggggaagaggccgacgccccaggcgtgatccccgggattgtgggggctgtcgtggtcgccgtggctggagccatctctagcttcattgcttaccagaaaaagaagctatgcttcaaagaaaatgcagaacaaggggaggtggacatggagagccaccggaatgccaacgcagagccagctgttcagcgtactcttttagagaaatagaagattgtcggcagaaacagcccaggcgttggcagcagggttagaacagctgcctgaggctcctccctgaagtcgtctcacggggaatcctctgagagtcaccccagcaa

SEQ ID NO: 322847 - DNA, 479 bp, Homo sapiens
gctgccgcctactactactaaattaacggccggtcgacccctgaaggacacctgcctgagagcagagatggaggccttctgttcacggcggattctttgttttaatcttgcgatgtgctttgcttgttgctgggcggatgatgtttactaacgatgaattttacatccaaagggggataggcacttggacccccattctccaaggcccgggggggcggtttcccatgggatgtgaaaggctggccattattaagtccctgtaactcaaatgtcaaccccaccgaggcacccccccgtcccccagaatcttggctgtttacaaatcacgtgtccatcgagcacgtctgaaacccctggtagccccgacttctttttaattaaaataaggtaagcccttcaatttgtttcttcaatatttctttcatttgtagggatatttgtttttcatatcagactaataaaaagaaattagaaaccaa

SEQ ID NO: 322848 - DNA, 519 bp, Homo sapiens
gcaggaattcggcacgaggggtgtttgttcatggagagccaccggaatgccaacgcagagccagctgttcagcgtactcttttagagaaatagaagattgtcggcagaaacagcccaggcgttggcagcagggttagaacagctgcctgaggctcctccctgaaggacacctgcctgagagcagagatggaggccttctgttcacggcggattctttgttttaatcttgcgatgtgctttgcttgttgctgggcggatgatgtttactaacgatgaattttacatccaaagggggataggcacttggacccccattctccaaggcccgggggggcggtttcccatgggatgtgaaaggctggccattattaagtccctgtaactcaaatgtcaaccccaccgaggcacccccccgtcccccagaatcttggctgtttacaaatcacgtgtccatcgagcacgtctgaaacccctggtagccccgacttctttttaattaaaataaggtaagcccttcaa

SEQ ID NO: 322849 - DNA, 493 bp, Homo sapiens
acctgaaatagaaccactgcatcccagaaccatgtgggatgacttgacttagagatgctgttgtgatggagaaatgagaccacgacacgaaccaccaaacgatgcaaatcaaaccccaacacctagttctccggtagcttttcagatgctgaccttgcggatggcgtttcaggtggagaaggaaaaggaggcagtgatggtggaggcagccacaggaaagaaggggaagaggccgacgccccaggcgtgatccccgggattgtgggggctgtcgtggtcgccgtggctggagccatctctagcttcattgcttaccagaatcttggctgtttacaaatcacgtgtccatcgagcacgtctgaaacccctggtagccccgacttctttttaattaaaataaggtaagcccttcaatttgtttcttcaatatttctttcatttgtagggatatttgtttttcatatcagactaataaaaagaaattagaaaccaa

SEQ ID NO: 322850 - DNA, 432 bp, Homo sapiens
cctactttaggccgagcacggtgactcaggcctgtaaatcccagcactttgagaggccgagggccggtgggtcacatgaggccaagagttcgagaccagcctggccaacatggcaaaaccccgactctactaaaaatacaaaaattagccgggcgtggtggtgagcgcctataatcccagctactcaggaggctgaggcaggaaaatcacttcagcccgggaagcagaggttgcagtgagctgagatcggtttcccatgggatgtgaaaggctggccattattaagtccctgtaactcaaatgtcaaccccaccgaggcacccccccgtcccccagaatcttggctgtttacaaatcacgtgtccatcgagcacgtctgaaacccctggtagccccgacttctttttaattaaaataaggtaagcccttcaa

SEQ ID NO: 322851 - DNA, 233 bp, Homo sapiens
ggacgcgtgggtcgaccgcttcggtcgtgcgtacgtacccacagcgttcggtttcccatgggatgtgaaaggctggccattattaagtccctgtaactcaaatgtcaaccccaccgaggcacccccccgtcccccagaatcttggctgtttacaaatcacgtgtccatcgagcacgtctgaaacccctggtagccccgacttctttttaattaaaataaggtaagcccttcaa

SEQ ID NO: 322852 - DNA, 209 bp, Homo sapiens
tcaagcttctaacgatgtacggggaggtttcccatgggatgtgaaaggctggccattattaagtccctgtaactcaaatgtcaaccccaccgaggcacccccccgtcccccagaatcttggctgtttacaaatcacgtgtccatcgagcacgtctgaaacccctggtagccccgacttctttttaattaaaataaggtaagcccttcaa

SEQ ID NO: 322853 - DNA, 127 bp, Homo sapiens
atttgagtgctccggctggagtctggttaatagttaatactggaattgtgttatgatgttacatttcatgtagtgattccagtaaaagaatggttgctgatgtgaaatgtttcggggccatttggac

SEQ ID NO: 322854 - DNA, 1684 bp, Homo sapiens
ttctgtgcgcgcgtggaggcccggggcggggcgggcgcagccggcgctgagcttgcagggccgctcccctcacccgcccccttcgagtccccgggcttcgccccacccggcccgtgggggagtatctgtcctgccgccttcgcccacgccctgcactccgggaccgtccctgcgcgctctgggcgcaccatggcccgcggggctgcgctggcgctgctgctcttcggcctgctgggtgttctggtcgccgccccggatggtggtttcgatttatccgatgcccttcctgacaatgaaaacaagaaacccactgcaatccccaagaaacccagtgctggggatgactttgacttaggagatgctgttgttgatggagaaaatgacgacccacgaccaccgaacccacccaaaccgatgccaaatccaaaccccaaccaccctagttcctccggtagcttttcagatgctgaccttgcggatggcgtttcaggtggagaaggaaaaggaggcagtgatggtggaggcagccacaggaaagaaggggaagaggccgacgccccaggcgtgatccccgggattgtgggggctgtcgtggtcgccgtggctggagccatctctagcttcattgcttaccagaaaaagaagctatgcttcaaagaaaatgcagaacaaggggaggtggacatggagagccaccggaatgccaacgcagagccagctgttcagcgtactcttttagagaaatagaagattgtcggcagaaacagcccaggcgttggcagcagggttagaacagctgcctgaggctcctccctgaaggacacctgcctgagagcagagatggaggccttctgttcacggcggattctttgttttaatcttgcgatgtgctttgcttgttgctgggcggatgatgtttactaacgatgaattttacatccaaagggggataggcacttggacccccattctccaaggcccgggggggcggtttcccatgggatgtgaaaggctggccattattaagtccctgtaactcaaatgtcaaccccaccgaggcacccccccgtcccccagaatcttggctgtttacaaatcacgtgtccatcgagcacgtctgaaacccctggtagccccgacttctttttaattaaaataaggtaagcccttcaatttgtttcttcaatatttctttcatttgtagggatatttgtttttcatatcagactaataaaaagaaattagaaaccaaaaaaaaagaaataggaaacacaagaagagccagaagagacacacagaagaggaatcaaaagaacataaagtacccatacattacaagaaacaatcagaagagaacctggggggagcccagaatcatacgacggcccacggggggacgacatgcgcagcccatcccagcagaatttggaccaaatagagcaagggcgctggccccacgcacagggggggacggtttccaggcgaagcccacaggggcatgagaggcgctgaccgcggttggtaccacaacacaggacagcgcagggggaagggaaggagccagaacagggtcgggacggggcccaggacacccggtggagagacaaagcagacctcacgcccttgtagccccggtgggcgcaagcaacacatggacgccggggacggactccacaccgagttg

SEQ ID NO: 322855 - DNA, 1153 bp, Homo sapiens
ggacgcgtgggtcgacccacgcgtatctgtcctgccgccttcgcccacgccctgcactccgggaccgtccctgcgcgctctgggcgcaccatggcccgcggggctgcgctggcgctgctgctcttcggcctgctgggtgttctggtcgccgccccggatggtggtttcgatttatccgatgcccttcctgacaatgaaaacaagaaacccactgcaatccccaagaaacccagtgctggggatgactttgacttaggagatgctgttgttgatggagaaaatgacgacccacgaccaccgaacccacccaaaccgatgccaaatccaaaccccaaccaccctagttcctccggtagcttttcagatgctgaccttgcggatggcgtttcaggtggagaaggaaaaggaggcagtgatggtggaggcagccacaggaaagaaggggaagaggccgacgccccaggcgtgatccccgggattgtgggggctgtcgtggtcgccgtggctggagccatctctagcttcattgcttaccagaaaaagaagctatgcttcaaagaaaatgcagaacaaggggaggtggacatggagagccaccggaatgccaacgcagagccagctgttcagcgtactcttttagagaaatagaagattgtcggcagaaacagcccaggcgttggcagcagggttagaacagctgcctgaggctcctccctgaaggacacctgcctgagagcagagatggaggccttctgttcacggcggattctttgttttaatcttgcgatgtgctttgcttgttgctgggcggatgatgtttactaacgatgaattttacatccaaagggggataggcacttggacccccattctccaaggcccgggggggcggtttcccatgggatgtgaaaggctggccattattaagtccctgtaactcaaatgtcaaccccaccgaggcacccccccgtcccccagaatcttggctgtttacaaatcacgtgtccatcgagcacgtctgaaacccctggtagccccgacttctttttaattaaaataaggtaagcccttcaatttgtttcttcaatatttctttcatttgtagggatatttgtttttcatatcagactaataaaaagaaattagaaaccaa

SEQ ID NO: 322856 - DNA, 1173 bp, Homo sapiens
ttctgtgcgcgcgtggaggcccggggcggggcgggcgcagccggcgctgagcttgcagggccgctcccctcacccgcccccttcgagtccccgggcttcgccccacccggcccgtgggggagtatctgtcctgccgccttcgcccacgccctgcactccgggaccgtccctgcgcgctctgggcgcaccatggcccgcggggctgcgctggcgctgctgctcttcggcctgctgggtgttctggtcgccgccccggatggtggtttcgatttatccgatgcccttcctgacaatgaaaacaagaaacccactgcaatccccaagaaacccagtgctggggatgactttgacttaggagatgctgttgttgatggagaaaatgacgacccacgaccaccgaacccacccaaaccgatgccaaatccaaaccccaaccaccctagttcctccggtagcttttcagatgctgaccttgcggatggcgtttcaggtggagaaggaaaaggaggcagtgatggtggaggcagccacaggaaagaaggggaagaggccgacgccccaggcgtgatccccgggattgtgggggctgtcgtggtcgccgtggctggagccatctctagcttcattgcttaccagaaaaagaagctatgcttcaaagaaaatgcagaacaaggggaggtggacatggagagccaccggaatgccaacgcagagccagctgttcagcgtactcttttagagaaatagaagattgtcggcagaaacagcccaggcgttggcagcagggttagaacagctgcctgaggctcctccctgaaggacacctgcctgagagcagagatggaggccttctgttcacggcggattctttgttttaatcttgcgatgtgctttgcttgttgctgggcggatgatgtttactaacgatgaattttacatccaaagggggataggcacttggacccccattctccaaggcccgggggggcggtttcccatgggatgtgaaaggctggccattattaagtccctgtaactcaaatgtcaaccccaccgaggcacccccccgtcccccagaatcttggctgtttacaaatcacgtgtccatcgagcacgtctgaaacccctggtagccccgacttctttttaattaaaataaggtaagcccttcaa

SEQ ID NO: 322857 - DNA, 1184 bp, Homo sapiens
ttctgtgcgcgcgtggaggcccggggcggggcgggcgcagccggcgctgagcttgcagggccgctcccctcacccgcccccttcgagtccccgggcttcgccccacccggcccgtgggggagtatctgtcctgccgccttcgcccacgccctgcactccgggaccgtccctgcgcgctctgggcgcaccatggcccgcggggctgcgctggcgctgctgctcttcggcctgctgggtgttctggtcgccgccccggatggtggtttcgatttatccgatgcccttcctgacaatgaaaacaagaaacccactgcaatccccaagaaacccagtgctggggatgactttgacttaggagatgctgttgttgatggagaaaatgacgacccacgaccaccgaacccacccaaaccgatgccaaatccaaaccccaaccaccctagttcctccggtagcttttcagatgctgaccttgcggatggcgtttcaggtggagaaggaaaaggaggcagtgatggtggaggcagccacaggaaagaaggggaagaggccgacgccccaggcgtgatccccgggattgtgggggctgtcgtggtcgccgtggctggagccatctctagcttcattgcttaccagaaaaagaagctatgcttcaaagaaaatgcagaacaaggggaggtggacatggagagccaccggaatgccaacgcagagccagctgttcagcgtactcttttagagaaatagaagattgtcggcagaaacagcccaggcgttggcagcagggttagaacagctgcctgaggctcctccctgaaggacacctgcctgagagcagagatggaggccttctgttcacggcggattctttgttttaatcttgcgatgtgctttgcttgttgctgggcggatgatgtttactaacgatgaattttacatccaaagggggataggcacttggacccccattctccaaggcccgggggggcggtttcccatgggatgtgaaaggctggccattattaagtccctgtaactcaaatgtcaaccccaccgaggcacccccccgtcccccagaatcttggctgtttacaaatcacgtgtccatcgagcacgtctgaacctggaagcccaatctctttattccaaaggagacccactggttaaaactcacaggggaaacg

SEQ ID NO: 322858 - DNA, 962 bp, Homo sapiens
  misc_feature (2)..(2): n is a, c, g, or t
  misc_feature (6)..(6): n is a, c, g, or t
  misc_feature (21)..(21): n is a, c, g, or t
  misc_feature (23)..(23): n is a, c, g, or t
cncgtncaattcggcagactngncaatccccaagaaacccagtgctggggatgactttgacttaggagatgctgttgttgatggagaaaatgacgacccacgaccaccgaacccacccaaaccgatgccaaatccaaaccccaaccaccctagttcctccggtagcttttcagatgctgaccttgcggatggcgtttcaggtggagaaggaaaaggaggcagtgatggtggaggcagccacaggaaagaaggggaagaggccgacgccccaggcgtgatccccgggattgtgggggctgtcgtggtcgccgtggctggagccatctctagcttcattgcttaccagaaaaagaagctatgcttcaaagaaaatgcagaacaaggggaggtggacatggagagccaccggaatgccaacgcagagccagctgttcagcgtactcttttagagaaatagaagattgtcggcagaaacagcccaggcgttggcagcagggttagaacagctgcctgaggctcctccctgaaggacacctgcctgagagcagagatggaggccttctgttcacggcggattctttgttttaatcttgcgatgtgctttgcttgttgctgggcggatgatgtttactaacgatgaattttacatccaaagggggataggcacttggacccccattctccaaggcccgggggggcggtttcccatgggatgtgaaaggctggccattattaagtccctgtaactcaaatgtcaaccccaccgaggcacccccccgtcccccagaatcttggctgtttacaaatcacgtgtccatcgagcacgtctgaaacccctggtagccccgacttctttttaattaaaataaggtaagcccttcaatttgtttcttcaatatttctttcatttgtagggatatttgtttttcatatcagactaataaaaagaaattagaaaccaa

SEQ ID NO: 322859 - DNA, 1511 bp, Homo sapiens
tgccagcaaccattcctccatcttagttgggttttcaaaatcattcttcatactagaagacaagatctgaggccatggtgaactgtcacatcagttgcggagcacatatgggttgctagagccatgttttagacaccctctagcctaaatctgatcacagtcatctgtccccttctcttagggtctacctttccaaagttgttagggacctgggaggagaggatgatgggatggggagtcaacaggagaaaatcatgtgcaggcagaattggaatttcaacttggtccaggcaacacaattcatttataaattactttatttctctctctctctccccactgcctctcctctgagagcttctctcctagctttttatctgtctctgtctctctgttttttcctctttttatctgagagaatagtgatgtaaaaatggtcaggaattcactttttctaatgagatcctggtcaagctgatattcagaaaagtatttaggaatgtggggccgtggtgtgtttttgatctgttcacgaggtcattccttcctcgtttctctctggaatttggtattaactgctctttcccctcttttaggggatgactttgacttaggagatgctgttgttgatggagaaaatgacgacccacgaccaccgaacccacccaaaccgatgccaaatccaaaccccaaccaccctagttcctccggtagcttttcagatgctgaccttgcggatggcgtttcaggtggagaaggaaaaggaggcagtgatggtggaggcagccacaggaaagaaggggaagaggccgacgccccaggcgtgatccccgggattgtgggggctgtcgtggtcgccgtggctggagccatctctagcttcattgcttaccagaaaaagaagctatgcttcaaagaaaatgcagaacaaggggaggtggacatggagagccaccggaatgccaacgcagagccagctgttcagcgtactcttttagagaaatagaagattgtcggcagaaacagcccaggcgttggcagcagggttagaacagctgcctgaggctcctccctgaaggacacctgcctgagagcagagatggaggccttctgttcacggcggattctttgttttaatcttgcgatgtgctttgcttgttgctgggcggatgatgtttactaacgatgaattttacatccaaagggggataggcacttggacccccattctccaaggcccgggggggcggtttcccatgggatgtgaaaggctggccattattaagtccctgtaactcaaatgtcaaccccaccgaggcacccccccgtcccccagaatcttggctgtttacaaatcacgtgtccatcgagcacgtctgaaacccctggtagccccgacttctttttaattaaaataaggtaagcccttcaatttgtttcttcaatatttctttcatttgtagggatatttgtttttcatatcagactaataaaaagaaattagaaaccaa

SEQ ID NO: 322860 - DNA, 1087 bp, Homo sapiens
gggaatgggctggtggctgactaggtcgttcggccgtgcctgggctgttcttggtcgaccgccggcgagatggtgggcgtgtccgactctaattcgagtagctcgttactctaggatctaactgaataaagccacagagaatccactgcattcccgaatagacacagtgctggggatgactttgacttaggagatgctgttgttgatggagaaaatgacgacccacgaccaccgaacccacccaaaccgatgccaaatccaaaccccaaccaccctagttcctccggtagcttttcagatgctgaccttgcggatggcgtttcaggtggagaaggaaaaggaggcagtgatggtggaggcagccacaggaaagaaggggaagaggccgacgccccaggcgtgatccccgggattgtgggggctgtcgtggtcgccgtggctggagccatctctagcttcattgcttaccagaaaaagaagctatgcttcaaagaaaatgcagaacaaggggaggtggacatggagagccaccggaatgccaacgcagagccagctgttcagcgtactcttttagagaaatagaagattgtcggcagaaacagcccaggcgttggcagcagggttagaacagctgcctgaggctcctccctgaaggacacctgcctgagagcagagatggaggccttctgttcacggcggattctttgttttaatcttgcgatgtgctttgcttgttgctgggcggatgatgtttactaacgatgaattttacatccaaagggggataggcacttggacccccattctccaaggcccgggggggcggtttcccatgggatgtgaaaggctggccattattaagtccctgtaactcaaatgtcaaccccaccgaggcacccccccgtcccccagaatcttggctgtttacaaatcacgtgtccatcgagcacgtctgaaacccctggtagccccgacttctttttaattaaaataaggtaagcccttcaatttgtttcttcaatatttctttcatttgtagggatatttgtttttcatatcagactaataaaaagaaattagaaaccaa

SEQ ID NO: 322861 - DNA, 1204 bp, Homo sapiens
ttctgtgcgcgcgtggaggcccggggcggggcgggcgcagccggcgctgagcttgcagggccgctcccctcacccgcccccttcgagtccccgggcttcgccccacccggcccgtgggggagtatctgtcctgccgccttcgcccacgccctgcactccgggaccgtccctgcgcgctctgggcgcaccatggcccgcggggctgcgctggcgctgctgctcttcggcctgctgggtgttctggtcgccgccccggatggtggtttcgatttatccgatgcccttcctggggatgactttgacttaggagatgctgttgttgatggagaaaatgacgacccacgaccaccgaacccacccaaaccgatgccaaatccaaaccccaaccaccctagttcctccggtagcttttcagatgctgaccttgcggatggcgtttcaggtggagaaggaaaaggaggcagtgatggtggaggcagccacaggaaagaaggggaagaggccgacgccccaggcgtgatccccgggattgtgggggctgtcgtggtcgccgtggctggagccatctctagcttcattgcttaccagaaaaagaagctatgcttcaaagaaaatgcagaacaaggggaggtggacatggagagccaccggaatgccaacgcagagccagctgttcagcgtactcttttagagaaatagaagattgtcggcagaaacagcccaggcgttggcagcagggttagaacagctgcctgaggctcctccctgaaggacacctgcctgagagcagagatggaggccttctgttcacggcggattctttgttttaatcttgcgatgtgctttgcttgttgctgggcggatgatgtttactaacgatgaattttacatccaaagggggataggcacttggacccccattctccaaggcccgggggggcggtttcccatgggatgtgaaaggctggccattattaagtccctgtaactcaaatgtcaaccccaccgaggcacccccccgtcccccagaatcttggctgtttacaaatcacgtgtccatcgagcacgtctgaaacccctggtagccccgacttctttttaattaaaataaggtaagcccttcaatttgtttcttcaatatttctttcatttgtagggatatttgtttttcatatcagactaataaaaagaaattagaaaccaa

SEQ ID NO: 322862 - DNA, 1218 bp, Homo sapiens
ttctgtgcgcgcgtggaggcccggggcggggcgggcgcagccggcgctgagcttgcagggccgctcccctcacccgcccccttcgagtccccgggcttcgccccacccggcccgtgggggagtatctgtcctgccgccttcgcccacgccctgcactccgggaccgtccctgcgcgctctgggcgcaccatggcccgcggggctgcgctggcgctgctgctcttcggcctgctgggtgttctggtcgccgccccggatggtggtttcgatttatccgatgcccttcctgacaatgaaaacaagaaacccactgcaatccccaagaaacccagtgctggggatgactttgacttaggagatgctgttgttgatggagaaaatgacgacccacgaccaccgaacccacccaaaccgatgccaaatccaaaccccaaccaccctagttcctccggtagcttttcagatgctgaccttgcggatggcgtttcaggtggagaaggaaaaggaggcagtgatggtggaggcagccacaggaaagaaggggaagaggccgacgccccaggcgtgatccccgggattgtgggggctgtcgtggtcgccgtggctggagccatctctagcttcattgcttaccagaaaaagaagctatgcttcaaagaaaatgcagaacaaggggaggtggacatggagagccaccggaatgccaacgcagagccagctgttcagcgtactcttttagagaaatagaagattgtcggcagaaacagcccaggcgttggcagcagggttagaacagctgcctgaggctcctccctgactgttcacggcggattctttgttttaatcttgcgatgtgctttgcttgttgctgggcggatgatgtttactaacgatgaattttacatccaaagggggataggcacttggacccccattctccaaggcccgggggggcggtttcccatgggatgtgaaaggctggccattattaagtccctgtaactcaaatgtcaaccccaccgaggcacccccccgtcccccagaatcttggctgtttacaaatcacgtgtccatcgagcacgtctgaaacccctggtagccccgacttctttttaattaaaataaggtaagcccttcaatttgtttcttcaatatttctttcatttgtagggatatttgtttttcatatcagactaataaaaagaaattagaaaccaa

SEQ ID NO: 322863 - DNA, 857 bp, Homo sapiens
ttctgtgcgcgcgtggaggcccggggcggggcgggcgcagccggcgctgagcttgcagggccgctcccctcacccgcccccttcgagtccccgggcttcgccccacccggcccgtgggggagtatctgtcctgccgccttcgcccacgccctgcactccgggaccgtccctgcgcgctctgggcgcaccatggcccgcggggctgcgctggcgctgctgctcttcggcctgctgggtgttctggtcgccgccccggatggtggtttcgatttatccgatgcccttcctgacaatgaaaacaagaaacccactgcaatccccaagaaacccagtgctggggatgactttgacttaggagatgctgttgttgatggagaaaatgacgacccacgaccaccgaacccacccaaaccgatgccaaatccaaaccccaaccaccctagttcctccggtagcttttcagatgctgaccttgcggatggcgtttcaggtggagaaggaaaaggaggcagtgatggtggaggcagccacaggaaagaaggggaagaggccgacgccccaggcgtgatccccgggattgtgggggctgtcgtggtcgccgtggctggagccatctctagcttcattgcttaccagaaaaagaagctatgcttcaaagaaaatgcagaacaaggggaggtggacatggagagccaccggaatgccaacgcagagccagctgttcagcgtactcttttagagaaatagaagattgtcggcagaaacagcccaggcgttggcagcagggttagaacagctgcctgaggctcctccctgaagtcgtctcacggggaatcctctgagagtcaccccagcaa

SEQ ID NO: 322864 - DNA, 808 bp, Homo sapiens
catttgttagtgtctctgtgacgtcgttagtggaaattgccttctgctgttttccttctgctttttctgcagcatccattttttttaatgaatggcatcattcaatgaaattgattgaattgattgagatttagggttttgctttctcgtgatgagttttgggcccatttttcttatgcagaaataaaaccactggctcctgaaagttgtaggaactgtgtccacgtgagtgctcagggacctgggaatgactttcttttgtctctgtctcccacagttcagcgtactcttttagagaaatagaagattgtcggcagaaacagcccaggcgttggcagcagggttagaacagctgcctgaggctcctccctgaaggacacctgcctgagagcagagatggaggccttctgttcacggcggattctttgttttaatcttgcgatgtgctttgcttgttgctgggcggatgatgtttactaacgatgaattttacatccaaagggggataggcacttggacccccattctccaaggcccgggggggcggtttcccatgggatgtgaaaggctggccattattaagtccctgtaactcaaatgtcaaccccaccgaggcacccccccgtcccccagaatcttggctgtttacaaatcacgtgtccatcgagcacgtctgaaacccctggtagccccgacttctttttaattaaaataaggtaagcccttcaatttgtttcttcaatatttctttcatttgtagggatatttgtttttcatatcagactaataaaaagaaattagaaaccaa

SEQ ID NO: 322865 - DNA, 635 bp, Homo sapiens
ttctgtgcgcgcgtggaggcccggggcggggcgggcgcagccggcgctgagcttgcagggccgctcccctcacccgcccccttcgagtccccgggcttcgccccacccggcccgtgggggagtatctgtcctgccgccttcgcccacgccctgcactccgggaccgtccctgcgcgctctgggcgcaccatggcccgcggggctgcgctggcgctgctgctcttcggcctgctgggtgttctggtcgccgccccggatggtggtttcgatttatccgatgcccttcctgacaatgaaaacaagaaacccactgcaatccccaagaaacccagtgctggggatgactttgacttaggagatgctgttgttgatggagaaaatgacgacccacgaccaccgaacccacccaaaccgatgccaaatccaaaccccaaccaccctagttcctccggtagcttttcagatgctgaccttgcggatggcgtttcaggtggagaaggaaaaggaggcagtgatggtggaggcagccacaggaaagaaggggaagaggccgacgccccaggcgtgatccccgggattgtgggggctgtcgtggtcgccgtggctggagcgtgacacaggatccgctagatcaa

SEQ ID NO: 322866 - DNA, 396 bp, Homo sapiens
gaaacggcagtgaatcgagctccggtaccctgtggagtgcttgttgctgggcggatgatgtttactaacgatgaattttacatccaaagggggataggcacttggacccccattctccaaggcccgggggggcggtttcccatgggatgtgaaaggctggccattattaagtccctgtaactcaaatgtcaaccccaccgaggcacccccccgtcccccagaatcttggctgtttacaaatcacgtgtccatcgagcacgtctgaaacccctggtagccccgacttctttttaattaaaataaggtaagcccttcaatttgtttcttcaatatttctttcatttgtagggatatttgtttttcatatcagactaataaaaagaaattagaaaccaa

SEQ ID NO: 322867 - DNA, 403 bp, Homo sapiens
aggtgagaaaaaacaatgctaaaaacattctccgactgtttccaagaaaatgaaacatccttaaccacaaaagagttgacacttgttttcccagctgcaacttttactaactgaaatatcttatctctttagacaatgaaaacaagaaacccactgcaatccccaagaaacccagtgctggtgagaagggcttcttcctagtatgcaaagaaaaagagcaaatcattttctcggacagcaggacgggacttaggcaactagaaagaagacagaagtgatttgagtgctccggctggagtctggttaatagttaatactggaattgtgttatgatgttacatttcatgtagtgattccagtaaaagaatggttgctgatgtgaaatgtttcggggccatttgga

SEQ ID NO: 322868 - DNA, 367 bp, Homo sapiens
tttataaattactttatttctctctctctctccccactgcctctcctctgagagcttctctcctagctttttatctgtctctgtctctctgttttttcctctttttatctgagagaatagtgatgtaaaaatggtcaggaattcactttttctaatgagatcctggtcaagctgatattcagaaaagtatttaggaatgtggggccgtggtgtgtttttgatctgttcacgaggtcattccttcctcgtttctctctggaatttggtattaactgctctttcccctcttttaggggatgactttgacttaggagatgctgttgttgatggagaaaatggtgagtattttcctttaatctcttctgct

SEQ ID NO: 322869 - DNA, 1252 bp, Homo sapiens
ttctgtgcgcgcgtggaggcccggggcggggcgggcgcagccggcgctgagcttgcagggccgctcccctcacccgcccccttcgagtccccgggcttcgccccacccggcccgtgggggagtatctgtcctgccgccttcgcccacgccctgcactccgggaccgtccctgcgcgctctgggcgcaccatggcccgcggggctgcgctggcgctgctgctcttcggcctgctgggtgttctggtcgccgccccggatggtggtttcgatttatccgatgcccttcctgacaatgaaaacaagaaacccactgcaatccccaagaaacccagtgctggggatgactttgacttaggagatgctgttgttgatggagaaaatgacgacccacgaccaccgaacccacccaaaccgatgccaaatccaaaccccaaccaccctagttcctccggtagcttttcagatgctgaccttgcggatggcgtttcaggtggagaaggaaaaggaggcagtgatggtggaggcagccacaggaaagaaggggaagaggccgacgccccaggcgtgatccccgggattgtgggggctgtcgtggtcgccgtggctggagccatctctagcttcattgcttaccagaaaaagaagctatgcttcaaagaaaatgcagaacaaggggaggtggacatggagagccaccggaatgccaacgcagagccagctgttcagcgtactcttttagagaaatagaagattgtcggcagaaacagcccaggcgttggcagcagggttagaacagctgcctgaggctcctccctgaaggacacctgcctgagagcagagatggaggccttctgttcacggcggattctttgttttaatcttgcgatgtgctttgcttgttgctgggcggatgatgtttactaacgatgaattttacatccaaagggggataggcacttggacccccattctccaaggcccgggggggcggtttcccatgggatgtgaaaggctggccattattaagtccctgtaactcaaatgtcaaccccaccgaggcacccccccgtcccccagaatcttggctgtttacaaatcacgtgtccatcgagcacgtctgaaacccctggtagccccgacttctttttaattaaaataaggtaagcccttcaatttgtttcttcaatatttctttcatttgtagggatatttgtttttcatatcagactaataaaaagaaattagaaaccaa

SEQ ID NO: 322870 - DNA, 998 bp, Homo sapiens
tgctgcggtcgtctagaggatcccagacgaccttgacaatgaaaacaagaaacccactgcaatccccaagaaacccagtgctggggatgactttgacttaggagatgctgttgttgatggagaaaatgacgacccacgaccaccgaacccacccaaaccgatgccaaatccaaaccccaaccaccctagttcctccggtagcttttcagatgctgaccttgcggatggcgtttcaggtggagaaggaaaaggaggcagtgatggtggaggcagccacaggaaagaaggggaagaggccgacgccccaggcgtgatccccgggattgtgggggctgtcgtggtcgccgtggctggagccatctctagcttcattgcttaccagaaaaagaagctatgcttcaaagaaaatgcagaacaaggggaggtggacatggagagccaccggaatgccaacgcagagccagctgttcagcgtactcttttagagaaatagaagattgtcggcagaaacagcccaggcgttggcagcagggttagaacagctgcctgaggctcctccctgaaggacacctgcctgagagcagagatggaggccttctgttcacggcggattctttgttttaatcttgcgatgtgctttgcttgttgctgggcggatgatgtttactaacgatgaattttacatccaaagggggataggcacttggacccccattctccaaggcccgggggggcggtttcccatgggatgtgaaaggctggccattattaagtccctgtaactcaaatgtcaaccccaccgaggcacccccccgtcccccagaatcttggctgtttacaaatcacgtgtccatcgagcacgtctgaaacccctggtagccccgacttctttttaattaaaataaggtaagcccttcaatttgtttcttcaatatttctttcatttgtagggatatttgtttttcatatcagactaataaaaagaaattagaaaccaa

SEQ ID NO: 322871 - DNA, 1034 bp, Homo sapiens
tcgtcgtcgtcgtcgtcgtcgtcgtcgtcgtcgtcgtcgtggtggtttcgatttatctgatgtccttcctgacaatgaaaacaagaaacccactgcaatccccaagaaacccagtgctggggatgactttgacttaggagatgctgttgttgatggagaaaatgacgacccacgaccaccgaacccacccaaaccgatgccaaatccaaaccccaaccaccctagttcctccggtagcttttcagatgctgaccttgcggatggcgtttcaggtggagaaggaaaaggaggcagtgatggtggaggcagccacaggaaagaaggggaagaggccgacgccccaggcgtgatccccgggattgtgggggctgtcgtggtcgccgtggctggagccatctctagcttcattgcttaccagaaaaagaagctatgcttcaaagaaaatgcagaacaaggggaggtggacatggagagccaccggaatgccaacgcagagccagctgttcagcgtactcttttagagaaatagaagattgtcggcagaaacagcccaggcgttggcagcagggttagaacagctgcctgaggctcctccctgaaggacacctgcctgagagcagagatggaggccttctgttcacggcggattctttgttttaatcttgcgatgtgctttgcttgttgctgggcggatgatgtttactaacgatgaattttacatccaaagggggataggcacttggacccccattctccaaggcccgggggggcggtttcccatgggatgtgaaaggctggccattattaagtccctgtaactcaaatgtcaaccccaccgaggcacccccccgtcccccagaatcttggctgtttacaaatcacgtgtccatcgagcacgtctgaaacccctggtagccccgacttctttttaattaaaataaggtaagcccttcaatttgtttcttcaatatttctttcatttgtagggatatttgtttttcatatcagactaataaaaagaaattagaaaccaa

SEQ ID NO: 322872 - DNA, 983 bp, Homo sapiens
cgacgagccgggatgttaatcggccgaggaacagacacccactgcaatccccaagaaacccagtgctggggatgactttgacttaggagatgctgttgttgatggagaaaatgacgacccacgaccaccgaacccacccaaaccgatgccaaatccaaaccccaaccaccctagttcctccggtagcttttcagatgctgaccttgcggatggcgtttcaggtggagaaggaaaaggaggcagtgatggtggaggcagccacaggaaagaaggggaagaggccgacgccccaggcgtgatccccgggattgtgggggctgtcgtggtcgccgtggctggagccatctctagcttcattgcttaccagaaaaagaagctatgcttcaaagaaaatgcagaacaaggggaggtggacatggagagccaccggaatgccaacgcagagccagctgttcagcgtactcttttagagaaatagaagattgtcggcagaaacagcccaggcgttggcagcagggttagaacagctgcctgaggctcctccctgaaggacacctgcctgagagcagagatggaggccttctgttcacggcggattctttgttttaatcttgcgatgtgctttgcttgttgctgggcggatgatgtttactaacgatgaattttacatccaaagggggataggcacttggacccccattctccaaggcccgggggggcggtttcccatgggatgtgaaaggctggccattattaagtccctgtaactcaaatgtcaaccccaccgaggcacccccccgtcccccagaatcttggctgtttacaaatcacgtgtccatcgagcacgtctgaaacccctggtagccccgacttctttttaattaaaataaggtaagcccttcaatttgtttcttcaatatttctttcatttgtagggatatttgtttttcatatcagactaataaaaagaaattagaaaccaa

SEQ ID NO: 322873 - DNA, 1012 bp, Homo sapiens
  misc_feature (460)..(460): n is a, c, g, or t
ttctgtgcgcgcgtggaggcccggggcggggcgggcgcagccggcgctgagcttgcagggccgctcccctcacccgcccccttcgagtccccgggcttcgccccacccggcccgtgggggagtatctgtcctgccgccttcgcccacgccctgcactccgggaccgtccctgcgcgctctgggcgcaccatggcccgcggggctgcgctggcgctgctgctcttcggcctgctgggtgttctggtcgccgccccggatggtggtttcgatttatccgatgcccttcctgacaatgaaaacaagaaacccactgcaatccccaagaaacccagtgctggggatgactttgacttaggagatgctgttgttgatggagaaaatgacgacccacgaccaccgaacccacccaaaccgatgccaaatccaaaccccaaccaccctagttcctccggcttttcanatgccaacgcagagccagctgttcagcgtactcttttagagaaatagaagattgtcggcagaaacagcccaggcgttggcagcagggttagaacagctgcctgaggctcctccctgaaggacacctgcctgagagcagagatggaggccttctgttcacggcggattctttgttttaatcttgcgatgtgctttgcttgttgctgggcggatgatgtttactaacgatgaattttacatccaaagggggataggcacttggacccccattctccaaggcccgggggggcggtttcccatgggatgtgaaaggctggccattattaagtccctgtaactcaaatgtcaaccccaccgaggcacccccccgtcccccagaatcttggctgtttacaaatcacgtgtccatcgagcacgtctgaaacccctggtagccccgacttctttttaattaaaataaggtaagcccttcaatttgtttcttcaatatttctttcatttgtagggatatttgtttttcatatcagactaataaaaagaaattagaaaccaa

SEQ ID NO: 322874 - DNA, 742 bp, Homo sapiens
ttctgtgcgcgcgtggaggcccggggcggggcgggcgcagccggcgctgagcttgcagggccgctcccctcacccgcccccttcgagtccccgggcttcgccccacccggcccgtgggggagtatctgtcctgccgccttcgcccacgccctgcactccgggaccgtccctgcgcgctctgggcgcaccatggcccgcggggctgcgctggcgctgctgctcttcggcctgctgggtgttctggtcgccgccccggatggtggtttcgatttatccgatgcccttcctgacaatgaaaacaagaaacccactgcaatccccaagaaacccagtgctggggatgactttgacttaggagatgctgttgttgatggagaaaatgacgacccacgaccaccgaacccacccaaaccgatgccaaatccaaaccccaaccaccctagttcctccggtagcttttcagatgctgaccttgcggatggcgtttcaggtggagaaggaaaaggaggcagtgatggtggaggcagccacaggaaagaaggggaagaggccgacgccccaggcgtgatccccgggattgtgggggctgtcgtggtcgccgtggctggagccatctctagcttcattgcttaccagaaaaagaagctatgcttcaaagaaaatgcagaacaaggggaggtggacatggagagccaccggaatgccaacgcagagccagctggtaagaaggacggggaacgat

SEQ ID NO: 322875 - DNA, 712 bp, Homo sapiens
ttctgtgcgcgcgtggaggcccggggcggggcgggcgcagccggcgctgagcttgcagggccgctcccctcacccgcccccttcgagtccccgggcttcgccccacccggcccgtgggggagtatctgtcctgccgccttcgcccacgccctgcactccgggaccgtccctgcgcgctctgggcgcaccatggcccgcggggctgcgctggcgctgctgctcttcggcctgctgggtgttctggtcgccgccccggatggtggtttcgatttatccgatgcccttcctgacaatgaaaacaagaaacccactgcaatccccaagaaacccagtgctggggatgactttgacttaggagatgctgttgttgatggagaaaatgacgacccacgaccaccgaacccacccaaaccgatgccaaatccaaaccccaaccaccctagttcctccggtagcttttcagatgctgaccttgcggatggcgtttcaggtggagaaggaaaaggaggcagtgatggtggaggcagccacaggaaagaaggggaagaggccgacgccccaggcgtgatccccgggattgtgggggctgtcgtggtcgccgtggctggagccatctctagcttcattgcttaccagaaaaagaagctatgcttcaaagaaaatggtcagctggcaggctctttgggaccttgtattgggatccgccgtgaag

SEQ ID NO: 322876 - DNA, 926 bp, Homo sapiens
gagccacccttacttcagaagaacggcatggggtgggggggccttaggtggtgcccgcctcacctatgactgccaaaagcggtcatggggttatttttaaacatggggaggaagtatttattgttcctgggctgcagagagctgggcggagtgtggaattcttctcgggaggcagtgctgggtcctttccaccatggcacctaagaaagcaaagaagagagccgggggcgccaactccaacgtgttctccatgttcgaacagacccaaatccaggaatttaaggaggccttcactatcatggaccagaacagggatggcttcattgacaagaacgatctgagagacacctttgctgcccttgggcgagtgaacgtgaaaaatgaagaaattgatgaaatgatcaaggaggctccgggtccaattaactttactgtgttcctcacaatgtttggggagaaacttaagggagcggaccctgaggaaaccattctcaacgcattcaaagtgtttgaccctgaaggcaaaggggtgctgaaggctgattacgttcgggaaatgctgaccacgcaggcggagaggttttccaaggaggaggttgaccagatgttcgccgccttcccccctgacgtgactggcaacttggactacaagaacctggtgcacatcatcacccacggagaagagaaggactaggagggggctcgctgctgcgccctgggctcgtctttgcagagtggtccctgccctcatctctctcccccgagtaccgcctctgtccctaccttgtctgttagccatgtggctgccccatttatccacctccatcttctttgcagcctgggtggctatgggtacttcgtggccgcacatcctacagttggaaatccatccagaggccatgttccaataaacaggaggtcgtgta

SEQ ID NO: 322877 - DNA, 885 bp, Homo sapiens
  misc_feature (18)..(18): n is a, c, g, or t
  misc_feature (22)..(22): n is a, c, g, or t
  misc_feature (27)..(27): n is a, c, g, or t
ccgggctgcaggaattcngganttttntggggaggcagtgctgggtcctttccaccatggcacctaagaaagcaaagaagagagccgggggcgccaactccaacgtgttctccatgttcgaacagacccaaatccaggaatttaaggaggccttcactatcatggaccagaacagggatggcttcattgacaagaacgatctgagagacacctttgctgcccttgggcgagtgaacgtgaaaaatgaagaaattgatgaaatgatcaaggaggctccgggtccaattaactttactgtgttcctcacaatgtttggggagaaacttaagggagcggaccctgaggaaaccattctcaacgcattcaaagtgtttgaccctgaaggcaaaggggtgctgaaggctgattacgttcgggaaatgctgaccacgcaggcggagaggttttccaaggaggaggttgaccagatgttcgccgccttcccccctgacgtgactggcaacttggactacaagaacctggtgcacatcatcacccacggagaagagaaggactaggagggggctcgctgctgcgccctgggctcgtctttgcagagtggtccctgccctcatctctctcccccgagtaccgcctctgtccctaccttgtctgttagccatgtggcattatcactcatttttgagctggtggtatggtactgtgggggacatctaagtgaatcatccgagcagtcaataaaggggcggttggccaattttggacaggctggtagaagaagcgatatttgaagtgggcgaaaaaaaaaaaatgtgggcgccgaagtaaatgggggcgaaaaaatagagacagaggggtaacaaggggggaaagagagaaaaggag

SEQ ID NO: 322878 - DNA, 1036 bp, Homo sapiens
gagccacccttacttcagaagaacggcatggggtgggggggccttaggtggtgcccgcctcacctatgactgccaaaagcggtcatggggttatttttaaacatggggaggaagtatttattgttcctgggctgcagagagctgggcggagtgtggaattcttctcgggaggcagtgctgggtcctttccaccatggcacctaagaaagcaaagaagagagccgggggcgccaactccaacgtgttctccatgttcgaacagacccaaatccaggaatttaaggaggccttcactatcatggaccagaacagggatggcttcattgacaagaacgatctgagagacacctttgctgcccttgggcgagtgaacgtgaaaaatgaagaaattgatgaaatgatcaaggaggctccgggtccaattaactttactgtgttcctcacaatgtttggggagaaacttaagggagcggaccctgaggaaaccattctcaacgcattcaaagtgtttgaccctgaaggcaaaggggtgctgaaggctgattacacttgaatgcgttgagaatggttcctcaggtttccccctcccctttcatgacatgaaacgaatactacttttctgtgtgcggtctaggcatggcttggccaccaagtgggtagtcccatattgggtattgggtgatgtgtgccaaccttggggaagctcactggctataaagagggacataacagacgacagcggagggagacgggccaaaaggaagacacattggggatagaatcacccaactccaagcatttgtgttcctcaagacaggggaccaatgttctggggagagagacttgtgccaccccttatgttggattgcggaccaggaggggggatatggctcacactgctggatggttatggggcgtttaaacaaaaggagaagagcacgataagagagcagagtgccatagaaacaacaaaagaaaaaagacaagagaagaaagaggcgacgcatagggaagcgacacacaccacaggaaacag

SEQ ID NO: 322879 - DNA, 538 bp, Homo sapiens
  misc_feature (406)..(406): n is a, c, g, or t
  misc_feature (413)..(413): n is a, c, g, or t
  misc_feature (418)..(419): n is a, c, g, or t
  misc_feature (423)..(423): n is a, c, g, or t
gagccacccttacttcagaagaacggcatggggtgggggggccttaggtggtgcccgcctcacctatgactgccaaaagcggtcatggggttatttttaaacatggggaggaagtatttattgttcctgggctgcagagagctgggcggagtgtggaattcttctcgggaggcagtgctgggtcctttccaccatggcacctaagaaagcaaagaagagagccgggggcgccaactccaacgtgttctccatgttcgaacagacccaaatccaggaatttaaggaggccttcactatcatggaccagaacagggatggcttcattgacaagaacgatctgagagacacctttgctgcccttggcgagtgaacgtgaaaatgagaattgatgaatgatcaggggtcnggtcatnacttnntgtntctacatgttggagacttaggagcgacctaggaccatctcacgattcaagtgttaccttagcaagggtctagctgatacgtcggaatctgacacgagcgaagttcagagagtcca

SEQ ID NO: 322880 - DNA, 517 bp, Homo sapiens
gagccacccttacttcagaagaacggcatggggtgggggggccttaggtggtgcccgcctcacctatgactgccaaaagcggtcatggggttatttttaaacatggggaggaagtatttattgttcctgggctgcagagagctgggcggagtgtggaattcttctcgggaggcagtgctgggtcctttccaccatggcacctaagaaagcaaagaagagagccgggggcgccaactccaacgtgttctccatgttcgaacagacccaaatccaggaatttaaggaggtgggtgcagctattgaatcatccgcctggatggaaatcccacccacgagggagaaccttctttttgttccatattcccagcagggacctttcattagatgcctctatcctccaaacaatcccaaattcggcctgaacggatgtgtgaatttttaaaagaaactatttttaatattttcactgattatcaaagtaaaacatattccatgttgaaaaatgttggaaaatttt

SEQ ID NO: 322881 - DNA, 1277 bp, Homo sapiens
gagccacccttacttcagaagaacggcatggggtgggggggccttaggtggtgcccgcctcacctatgactgccaaaagcggtcatggggttatttttaaacatggggaggaagtatttattgttcctgggctgcagagagctgggcggagtgtggaattcttctcgggaggcagtgctgggtcctttccaccatggcacctaagaaagcaaagaagagagccgggggcgccaactccaacgtgttctccatgttcgaacagacccaaatccaggaatttaaggaggccttcactatcatggaccagaacagggatggcttcattgacaagaacgatctgagagacacctttgctgcccttgggcgagtgaacgtgaaaaatgaagaaattgatgaaatgatcaaggaggctccgggtccaattaactttactgtgttcctcacaatgtttggggagaaacttaagggagcggaccctgaggaaaccattctcaacgcattcaaagtgtttgaccctgaaggcaaaggggtgctgaaggctgattacgttcgggaaatgctgaccacgcaggcggagaggttttccaaggaggaggttgaccagatgttcgccgccttcccccctgacgtgactggcaacttggactacaagaacctggtgcacatcatcacccacggagaagagaaggactaggagggggctcgctgctgcgccctgggctcgtctttgcagagtggtccctgccctcatctctctcccccgagtaccgcctctgtccctaccttgtctgttagccatgtggctgccccatttatccacctccatcttctttgcagcctgggtggctatgggtacttcgtggccgcacatcctacagttggaaatccatccagaggccatgttccaataaacaggaggtcgtgtaaaaaaaaaaaaaaaaaaaaaaaaaaaaaaaaagaaaaaaaaaaaaaaaaaaaaaaaaaaaaaagggggggggcgccgcggcccccgaaaaagacttttaaaaacacccgggggggggggggggccccaagagtgaagtaagtggagccaccatgcgggcaacaagcggtgggtgccataggagagcgctgggcgaaggagccaatcgccgggggtggctctctctccccaaaagaaaaaaacccgcgcgcggggaaccccacgccgtgttgtgaaaaacacactacgaggggggcgcgagggcggcacacaggggaggcatccaccgagggggcgcacaggccgcgattat

SEQ ID NO: 322882 - DNA, 1291 bp, Homo sapiens
gagccacccttacttcagaagaacggcatggggtgggggggccttaggtggtgcccgcctcacctatgactgccaaaagcggtcatggggttatttttaaacatggggaggaagtatttattgttcctgggctgcagagagctgggcggagtgtggaattcttctcgggaggcagtgctgggtcctttccaccatggcacctaagaaagcaaagaagagagccgggggcgccaactccaacgtgttctccatgttcgaacagacccaaatccaggaatttaaggaggccttcactatcatggaccagaacagggatggcttcattgacaagaacgatctgagagacacctttgctgcccttgggcgagtgaacgtgaaaaatgaagaaattgatgaaatgatcaaggaggctccgggtccaattaactttactgtgttcctcacaatgtttggggagaaacttaagggagcggaccctgaggaaaccattctcaacgcattcaaagtgtttgaccctgaaggcaaaggggtgctgaaggctgattacgttcgggaaatgctgaccacgcaggcggagaggttttccaaggaggaggttgaccagatgttcgccgccttcccccctgacgtgactggcaacttggactacaagaacctggtgcacatcatcacccacggagaagagaaggactaggagggggctcgctgctgcgccctgggctcgtctttgcagagtggtccctgccctcatctctctcccccgagtaccgcctctgtccctaccttgtctgttagccatgtggctgccccatttatccacctccatcttctttgcagcctgggtggctatgggtacttcgtggccgcacatcctacagttggaaatccatccagaggccatgttccaataaacaggaggtcgtgtaaaaaaaaaaaaaaaaaaaaaaaaaaaaaaaaagaaaaaaaaaaaaaaaaaaaaaaaaaaaaaaaatttggggggggcccgggcccgggaaaacgtttctaaagacaaatgggggggggggcgggggccccacaagacgaggaggaacgggggtcaagcaggggcacacaaggagaaaggggggcacacacacgggggggggatctctcaaataaaaaaaaacgccgcgcgggggggggccaacgaggggtgcttgcggagaaactcacccaagaggggggagggagcgggcgaccgagggggggcgaatcccaaagagggagccgcggagaggggcagcataaaatacaccccccgagggggggc

SEQ ID NO: 322883 - DNA, 791 bp, Homo sapiens
  misc_feature (18)..(18): n is a, c, g, or t
  misc_feature (22)..(22): n is a, c, g, or t
  misc_feature (27)..(27): n is a, c, g, or t
  misc_feature (93)..(93): n is a, c, g, or t
ccgggctgcaggaattcngganttttntggggaggcagtgctgggtcctttccaccatggcacctaagaaagcaaagaagagagccggggggngaaattccacgtgttttttaaggtgtggtgttgttgtttgttggctggttatgtgagttgtggtgttcagagttgtgtatgttgttatgggtgtgggtgtgtttgttgagtgtggtggtatcattggctgccttggcgagtgaacgtgaaaaatgaagaaattgatgaaatgatcaaggaggctccgggtccaattaactttactgtgttcctcacaatgtttggggagaaacttaagggagcggaccctgaggaaaccattctcaacgcattcaaagtgtttgaccctgaaggcaaaggggtgctgaaggctgattacgttcgggaaatgctgaccacgcaggcggagaggttttccaaggaggaggttgaccagatgttcgccgccttcccccctgacgtgactggcaacttggactacaagaacctggtgcacatcatcacccacggagaagagaaggactaggagggggctcgctgctgcgccctgggctcgtctttgcagagtggtccctgccctcatctctctcccccgagtaccgcctctgtccctaccttgtctgttagccatgtggctgccccatttatccacctccatcttctttgcagcctgggtggctatgggtacttcgtggccgcacatcctacagttggaaatccatccagaggccatgttccaataaacaggaggtcgtgta

SEQ ID NO: 322884 - DNA, 884 bp, Homo sapiens
gagccacccttacttcagaagaacggcatggggtgggggggccttaggtggtgcccgcctcacctatgactgccaaaagcggtcatggggttatttttaaacatggggaggaagtatttattgttcctgggctgcagagagctgggcggagtgtggaattcttctcgggaggcagtgctgggtcctttccaccatggcacctaagaaagcaaagaagagagccgggggcgccaactccaacgtgttctccatgttcgaacagacccaaatccaggaatttaaggagctcggagtccctgagtgtgtgtttcctaccctagggcgagtgaacgtgaaaaatgaagaaattgatgaaatgatcaaggaggctccgggtccaattaactttactgtgttcctcacaatgtttggggagaaacttaagggagcggaccctgaggaaaccattctcaacgcattcaaagtgtttgaccctgaaggcaaaggggtgctgaaggctgattacgttcgggaaatgctgaccacgcaggcggagaggttttccaaggaggaggttgaccagatgttcgccgccttcccccctgacgtgactggcaacttggactacaagaacctggtgcacatcatcacccacggagaagagaaggactaggagggggctcgctgctgcgccctgggctcgtctttgcagagtggtccctgccctcatctctctcccccgagtaccgcctctgtccctaccttgtctgttagccatgtggctgccccatttatccacctccatcttctttgcagcctgggtggctatgggtacttcgtggccgcacatcctacagttggaaatccatccagaggccatgttccaataaacaggaggtcgtgta

SEQ ID NO: 322885 - DNA, 840 bp, Homo sapiens
agctgcgctagtgtcgaaactgcttgtcgcgcaggcacctgctgggtccttgccaccgtggataacctagtaacaagcaagaaatacagcctggtggacgtcaccatagctctcgagaactgtcgttcacctccatgttatcgaagccagcaggccgaagaatccagagacgtttctggacggcctccaggaagtcatggcaccaggaacagggcatggatccatccgacaggaagtgatctgaaaagacgaaccattgctgccctctgccgcgacggcgagtgaacgtgaaaaatgaagaaattgatgaaatgatcaaggaggctccgggtccaattaactttactgtgttcctcacaatgtttggggagaaacttaagggagcggaccctgaggaaaccattctcaacgcattcaaagtgtttgaccctgaaggcaaaggggtgctgaaggctgattacgttcgggaaatgctgaccacgcaggcggagaggttttccaaggaggaggttgaccagatgttcgccgccttcccccctgacgtgactggcaacttggactacaagaacctggtgcacatcatcacccacggagaagagaaggactaggagggggctcgctgctgcgccctgggctcgtctttgcagagtggtccctgccctcatctctctcccccgagtaccgcctctgtccctaccttgtctgttagccatgtggctgccccatttatccacctccatcttctttgcagcctgggtggctatgggtacttcgtggccgcacatcctacagttggaaatccatccagaggccatgttccaataaacaggaggtcgtgta

SEQ ID NO: 322886 - DNA, 870 bp, Homo sapiens
  misc_feature (382)..(382): n is a, c, g, or t
  misc_feature (390)..(390): n is a, c, g, or t
gagccacccttacttcagaagaacggcatggggtgggggggccttaggtggtgcccgcctcacctatgactgccaaaagcggtcatggggttatttttaaacatggggaggaagtatttattgttcctgggctgcagagagctgggcggagtgtggaattcttctcgggaggcagtgctgggtcctttccaccatggcacctaagaaagcaaagaagagagccgggggcgccaactccaacgtgttctccatgttcgaacagacccaaatccaggaatttaaggaggccttcactatcatggaccagaacagggatggcttcattgacaagaacgatctgagagacacctttgctgcccttggcgagtgaacgtgaaaaatncctcacantgtttggggagaaacttaagggagcggaccctgaggaaaccattctcaacgcattcaaagtgtttgaccctgaaggcaaaggggtgctgaaggctgattacgttcgggaaatgctgaccacgcaggcggagaggttttccaaggaggaggttgaccagatgttcgccgccttcccccctgacgtgactggcaacttggactacaagaacctggtgcacatcatcacccacggagaagagaaggactaggagggggctcgctgctgcgccctgggctcgtctttgcagagtggtccctgccctcatctctctcccccgagtaccgcctctgtccctaccttgtctgttagccatgtggctgccccatttatccacctccatcttctttgcagcctgggtggctatgggtacttcgtggccgcacatcctacagttggaaatccatccagaggccatgttccaataaacaggaggtcgtgta

SEQ ID NO: 322887 - DNA, 679 bp, Homo sapiens
gagccacccttacttcagaagaacggcatggggtgggggggccttaggtggtgcccgcctcacctatgactgccaaaagcggtcatggggttatttttaaacatggggaggaagtatttattgttcctgggctgcagagagctgggcggagtgtggaattcttctcgggaggcagtgctgggtcctttccaccatggcacctaagaaagcaaagaagagagccgggggcgccaactccaacgtgttctccatgttcgaacagacccaaatccaggaatttaaggaggccttcactatcatggaccagaacagggatggcttcattgacaagaacgatctgagagacacctttgctgcccttgaaaaaaaaaaaaaaaaaaaaaaaaaaaaagggggggggcgccgcggcccccgaaaaagacttttaaaaacacccgggggggggggggggccccaagagtgaagtaagtggagccaccatgcgggcaacaagcggtgggtgccataggagagcgctgggcgaaggagccaatcgccgggggtggctctctctccccaaaagaaaaaaacccgcgcgcggggaaccccacgccgtgttgtgaaaaacacactacgaggggggcgcgagggcggcacacaggggaggcatccaccgagggggcgcacaggccgcgattat

SEQ ID NO: 322888 - DNA, 1633 bp, Homo sapiens
gagccacccttacttcagaagaacggcatggggtgggggggccttaggtggtgcccgcctcacctatgactgccaaaagcggtcatggggttatttttaaacatggggaggaagtatttattgttcctgggctgcagagagctgggcggagtgtggaattcttctcgggaggcagtgctgggtcctttccaccatggcacctaagaaagcaaagaagagagccgggggcgccaactccaacgtgttctccatgttcgaacagacccaaatccaggaatttaaggaggccttcactatcatggaccagaacagggatggcttcattgacaagaacgatctgagagacacctttgctgcccttgggcgagtgaacgtgaaaaatgaagaaattgatgaaatgatcaaggaggctccgggtccaattaactttactgtgttcctcacaatgtttggggagaaacttaagggagcggaccctgaggaaaccattctcaacgcattcaaagtgtttgaccctgaaggcaaaggggtgctgaaggctgattacgttcgggaaatgctgaccacgcaggcggagaggttttccaaggaggaggttgaccagatgttcgccgccttcccccctgacgtgactggcaacttggactacaagaacctggtgcacatcatcacccacggagaagagaaggactaggagggggctcgctgctgcgccctgggctcgtctttgcagagtggtccctgccctcatctctctcccccgagtaccgcctctgtccctaccttgtctgttagccatgtggctgccccatttatccacctccatcttctttgcagcctgggtggctatgggtacttcgtggccgcacatcctacagttggaaatccatccagaggccatgttccaataaacaggaggtcgtgtatttggtcacgacatttctctgaaaaaaagtgccttgtgtaaggaaggcaaaggcagatgagctagtgacagccttgcagtcattattattgaatcttggtgactctttatttaaggtagaccttttgcagccactcagaactgtttctatcaaggatcacgttttcctggaatgttacctggatgaccaaagccctctcttccaaagagctcaagcatttagagggccttgcttccatgacatctgtcccttgggatgccatcggaatgcctctcctgccagtgacagtgacaagaaggaagcggactgacacatggtaggaacatagctcgttcaacagtaatcacacctgctaatcctaagagggtgacttctagtttcagataaagtagaagttgtctgtacttcttccctagcaaactgagggagtggtactgacttctgtctctgtctggggcccaggcctggatgtgagttgacctttgattttgaatgaccacagtcacggttgaagcattcaggtctgttatggctgcaagagtcccagtgtaagaaacaaatagggccaggtgtggtggctcacgcctgtgatgctagcgctttgagaggctgaggcaggaggatcacttgagcccaaaagtttgagaccagcctaggcaacatagtgagatccaatctctataaaaaataaatagccaggcatggtg

SEQ ID NO: 322889 - DNA, 857 bp, Homo sapiens
gagccacccttacttcagaagaacggcatggggtgggggggccttaggtggtgcccgcctcacctatgactgccaaaagcggtcatggggttatttttaaacatggggaggaagtatttattgttcctgggctgcagagagctgggcggagtgtggaattcttctcgggaggcagtgctgggtcctttccaccatggtgagtacaagggctccaggaggtgatgatgccgggtgggcgaggagaggaagccactacaagcgagggaccacggcggagggggaggaaggcggccctcaaagcctccagccccttgtggaaaaagccccattgactgcgcgggcacagaggaaccccaatcaatgccccgataggccacaaataacagcagctctcggggactcacaaacacaaaataagagagttggcttttttatggcttgtctactgacctctcgaggaatcaataactcccaggacttgcaaaatgggattgaatgcttttaaggatcaaattgtaattcttttctcttgttcaggcagctgggaaaaagaatgtttttgttttcaccttttgaacttgcaaatttaaaacctttctttctgtgctgttgggttaggtgtccccctcctgaagtgggcagtccccaaatcagggtcagcacaggagggagagtggttagaggcaggaactctggagtcagaatgcccaagttcaactccccaagttcaacgcccaagttcaactccggctctgccttctgtgtgtgtggctgtgtgatcttgggcaagtgacccaacctctctgagcctcagttgcctctcctgtaaaatggggatgataataatagtatccact

SEQ ID NO: 322890 - DNA, 1264 bp, Homo sapiens
  misc_feature (1264)..(1264): n is a, c, g, or t
gagccacccttacttcagaagaacggcatggggtgggggggccttaggtggtgcccgcctcacctatgactgccaaaagcggtcatggggttatttttaaacatggggaggaagtatttattgttcctgggctgcagagagctgggcggagtgtggaattcttctcgggaggcagtgctgggtcctttccaccatggcacctaagaaagcaaagaagagagccgggggcgccaactccaacgtgttctccatgttcgaacagacccaaatccaggaatttaaggaggccttcactatcatggaccagaacagggatggcttcattgacaagaacgatctgagagacacctttgctgcccttgggcgagtgaacgtgaaaaatgaagaaattgatgaaatgatcaaggaggctccgggtccaattaactttactgtgttcctcacaatgtttggggagaaacttaagggagcggaccctgaggaaaccattctcaacgcattcaaagtgtttgaccctgaaggcaaaggggtgctgaaggctgattacgttcgggaaatgctgaccacgcaggcggagaggttttccaaggaggaggttgaccagatgttcgccgccttcccccctgacgtgactggcaacttggactacaagaacctggtgcacatcatcacccacggagaagagaaggactaggagggggctcgctgctgcgccctgggctcgtctttgcagagtggtccctgccctcatctctctcccccgagtaccgcctctgtccctaccttgtctgttagccatgtggctgccccatttatccacctccatcttctttgcagcctgggtggctatgggtacttcgtggcggagtgtggtatagttgtcgggacggccacagaggggtcgttccacatcatgggcgacctacgtagtaggcaggtacgtagagccgggggcgccaactccaacgtgttctccagtgtcgaacagacccaaatccaggaatttaaggaggcctttcacgtatcatggaccagaacagggatggccttcatggacaaggagcgatctggagagacacctgttgctgcccttggggcgagtgaacgcgcaaaaatgaagacatcgctgaccatgctcacgtcggtccgggccccaacaagttactgggtccccacaggggtctgggacgaagctcaagggacggaccgagaaccccccagcgggcgcacaaggtggccccagcacacgggggaacgggaaccn

SEQ ID NO: 322891 - DNA, 765 bp, Homo sapiens
tgactctttgaggatcccctgccatttactccatggcacctaagaaagcaaagaagagagccgggggcgccaactccaacgtgttctccatgttcgaacagacccaaatccaggaatttaaggaggccttcactatcatggaccagaacagggatggcttcattgacaagaacgatctgagagacacctttgctgcccttgggcgagtgaacgtgaaaaatgaagaaattgatgaaatgatcaaggaggctccgggtccaattaactttactgtgttcctcacaatgtttggggagaaacttaagggagcggaccctgaggaaaccattctcaacgcattcaaagtgtttgaccctgaaggcaaaggggtgctgaaggctgattacgttcgggaaatgctgaccacgcaggcggagaggttttccaaggaggaggttgaccagatgttcgccgccttcccccctgacgtgactggcaacttggactacaagaacctggtgcacatcatcacccacggagaagagaaggactaggagggggctcgctgctgcgccctgggctcgtctttgcagagtggtccctgccctcatctctctcccccgagtaccgcctctgtccctaccttgtctgttagccatgtggctgccccatttatccacctccatcttctttgcagcctgggtggctatgggtacttcgtggccgcacatcctacagttggaaatccatccagaggccatgttccaataaacaggaggtcgtgta

SEQ ID NO: 322892 - DNA, 789 bp, Homo sapiens
  misc_feature (18)..(18): n is a, c, g, or t
  misc_feature (22)..(22): n is a, c, g, or t
  misc_feature (27)..(27): n is a, c, g, or t
ccgggctgcaggaattcngganttttntggggaggcagtgctgggtcctttccaccatggcacctaagaaagcaaagaagagagccgggggcgccaactccaacgtgttctccatgttcgaacagacccaaatccaggaatttaaggaggccttcactatcatggaccagaacagggatggcttcattgacaagaacgatctgagagacacctttgctgcccttgggcgagtgaacgtgaaaaatgaagaaattgatgaaatgatcaaggaggctccgggtccaattaactttactgtgttcctcacaatgtttggggagaaacttaagggagcggaccctgaggaaaccattctcaacgcattcaaagtgtttgaccctgaaggcaaaggggtgctgaaggctgattacgttcgggaaatgctgaccacgcaggcggagaggttttccaaggaggaggttgaccagatgttcgccgccttcccccctgacgtgactggcaacttggactacaagaacctggtgcacatcatcacccacggagaagagaaggactaggagggggctcgctgctgcgccctgggctcgtctttgcagagtggtccctgccctcatctctctcccccgagtaccgcctctgtccctaccttgtctgttagccatgtggctgccccatttatccacctccatcttctttgcagcctgggtggctatgggtacttcgtggccgcacatcctacagttggaaatccatccagaggccatgttccaataaacaggaggtcgtgta

SEQ ID NO: 322893 - DNA, 696 bp, Homo sapiens
taacgactgcaagtggatctgcatgcatgggcatacctaaatccatgggtttaagggccttcactatcatggaccagaacagggatggcttcattgacaagaacgatctgagagacacctttgctgcccttgggcgagtgaacgtgaaaaatgaagaaattgatgaaatgatcaaggaggctccgggtccaattaactttactgtgttcctcacaatgtttggggagaaacttaagggagcggaccctgaggaaaccattctcaacgcattcaaagtgtttgaccctgaaggcaaaggggtgctgaaggctgattacgttcgggaaatgctgaccacgcaggcggagaggttttccaaggaggaggttgaccagatgttcgccgccttcccccctgacgtgactggcaacttggactacaagaacctggtgcacatcatcacccacggagaagagaaggactaggagggggctcgctgctgcgccctgggctcgtctttgcagagtggtccctgccctcatctctctcccccgagtaccgcctctgtccctaccttgtctgttagccatgtggctgccccatttatccacctccatcttctttgcagcctgggtggctatgggtacttcgtggccgcacatcctacagttggaaatccatccagaggccatgttccaataaacaggaggtcgtgta

SEQ ID NO: 322894 - DNA, 760 bp, Homo sapiens
caaccaaccaaccaacctatccacccacccactaaccaactaactaaccagccaacctactcccccatacccaccaaccaactaaccaacccaccctcccaccaaccaattaaccaggcaacccactcacacccctcccctccaacaaccaacaaaccaaccaccccctatacaaacagcttttggttgcacataaccaaagctgttgttgagtgggaagtggagattgtctaattaataatctgttttattctttttcagatcacgttgcacagggtacataaagctgaatcatctgggggaagtttgctaaagacacagaatgcaaagccccatctcactcttcttgaatcagaatggctgactgtggtgctcaggaatttgcatgtttaataagttttccccgggtgattctaatgaatgcaacttgagtactgtttagtatatgctgagtatacctggagctttgatgtgctgcagggattagaagagttttctgattttgaccttcccattttgaaataagtagattcaccattttttattatttttgggatggagtctcactctgtcgcccaggctggagtgcagcggcgcgatctctactcactcactgcaacctctgcctcctgggttcaagagattcttctgcctcagcctcctgagtagagatggagtttcgccatgctggccaggctggtctcgaactcctgacctcgtgatccacccacctcggcctcccaaagtgctaggattacaa

SEQ ID NO: 322895 - DNA, 503 bp, Homo sapiens
ttcggcacagcgctgcctacggaggtggcagccatctccttctcggcatcatggccgccctcagaccccttgtgaagcccaagatcgtcaaaaagagaaccaagaagttcatccggcaccagtcagaccgatatgtcaaaattaagcgtaactggcggaaacccagaggcattgacaacagggttcgtagaagattcaagggccagatcttgatgcccaacattggttatggaagcaacaaaaaaacaaagcacatgctgcccagtggcttccggaagttcctggtccacaacgtcaaggagctggaagtgctgctgatgtgcaacaaatcttactgtgccgagatcgctcacaatgtttcctccaagaaccgcaaagccatcgtggaaagagctgcccaactggccatcagagtcaccaaccccaatgccaggctgcgcagtgaagaaaatgagtaggcagctcatgtgcacgttttctgtttaaataaatgtaaaaactgc

SEQ ID NO: 322896 - DNA, 616 bp, Homo sapiens
acgccgggtttttccaagtcagacgtttgtaaaacgcgggccggttaattgaaaaacgactcccaaaagggcgaattgggaacgggccccccctcggtcccaattcggcacgagcttcctcggcgctgcctacggaggtggcagccatctccttctcggcatcatggccgccctcagaccccttgtgaagcccaagatcgtcaaaaagagaaccaagaagttcatccggcaccagtcagaccgatatgtcaaaattaagcgtaactggcggaaacccagaggcattgacaacagggttcgtagaagattcaagggccagatcttgatgcccaacattggttatggaagcaacaaaaaaacaaagcacatgctgcccagtggcttccggaagttcctggtccacaacgtcaaggagctggaagtgctgctgatgtgcaacaaatcttactgtgccgagatcgctcacaatgtttcctccaagaaccgcaaagccatcgtggaaagagctgcccaactggccatcagagtcaccaaccccaatgccaggctgcgcagtgaagaaaatgagtaggcagctcatgtgcacgttttctgtttaaataaatgtaaaaactgc

SEQ ID NO: 322897 - DNA, 500 bp, Homo sapiens
  misc_feature (26)..(26): n is a, c, g, or t
tccccgggctgcaggaattcggcacnagccatctccttctcggcatcatggccgccctcagaccccttgtgaagcccaagatcgtcaaaaagagaaccaagaagttcatccggcaccagtcagaccgatatgtcaaaattaagcgtaactggcggaaacccagaggcattgacaacagggttcgtagaagattcaagggccagatcttgatgcccaacattggttatggaagcaacaaaaaaacaaagcacatgctgcccagtggcttccggaagttcctggtccacaacgtcaaggagctggaagtgctgctgatgtgcaacaaatcttactgtgccgagatcgctcacaatgtttcctccaagaaccgcaaagccatcgtggaaagagctgcccaactggccatcagagtcaccaaccccaatgccaggctgcgcagtgaagaaaatgagtaggcagctcatgtgcacgttttctgtttaaataaatgtaaaaactgc

SEQ ID NO: 322898 - DNA, 558 bp, Homo sapiens
caccaggaaagccacaggaacacaatgttggaatacattgggttttgcccgcaccgtcaagctccgaattaattggggaggtgcagccatctccttctcggcatcatggccgccctcagaccccttgtgaagcccaagatcgtcaaaaagagaaccaagaagttcatccggcaccagtcagaccgatatgtcaaaattaagcgtaactggcggaaacccagaggcattgacaacagggttcgtagaagattcaagggccagatcttgatgcccaacattggttatggaagcaacaaaaaaacaaagcacatgctgcccagtggcttccggaagttcctggtccacaacgtcaaggagctggaagtgctgctgatgtgcaacaaatcttactgtgccgagatcgctcacaatgtttcctccaagaaccgcaaagccatcgtggaaagagctgcccaactggccatcagagtcaccaaccccaatgccaggctgcgcagtgaagaaaatgagtaggcagctcatgtgcacgttttctgtttaaataaatgtaaaaactgc

SEQ ID NO: 322899 - DNA, 779 bp, Homo sapiens
  misc_feature (26)..(26): n is a, c, g, or t
  misc_feature (538)..(538): n is a, c, g, or t
  misc_feature (595)..(595): n is a, c, g, or t
  misc_feature (599)..(599): n is a, c, g, or t
tccccgggctgcaggaattcggcacnagccatctccttctcggcatcatggccgccctcagaccccttgtgaagcccaagatcgtcaaaaagagaaccaagaagttcatccggcaccagtcagaccgatatgtcaaaattaagcgtaactggcggaaacccagaggcattgacaacagggttcgtagaagattcaagggccagatcttgatgcccaacattggttatggaagcaacaaaaaaacaaagcacatgctgcccagtggcttccggaagttcctggtccacaacgtcaaggagctggaagtgctgctgatgtgcaacaaatcttactgtgccgagatcgctcacaatgtttcctccaagaaccgcaaagccatcgtggaaagagctgcccaactggccatcagagtcaccaaccccaatgccaggctgcgcagtgaagaaaatgagtaggcagctcatgtgcacgttttctgtttaaataaatgtaaaaactgccaaaaaaaaaaaaaaaaaaaaaaaaagggggggggggntaaaattttccccgggggggcccagtttaggcgtacccagttttttgtgtacaaggnggcncccatatagaaacgccggtattaaaaagacaaagcgcagtggcgcgcggttacaaagggttgggactggtaaacttggctagctggaattttggagaggagacattacttctgggcgtggaccttattggacaccttcctagggatttaacggttcaggaatatacttcagtgatcggac

SEQ ID NO: 322900 - DNA, 1587 bp, Homo sapiens
ctgccctgtccggcagccgggtctgccgccccgtgggagagcttccgggccggcgcgggattcggcccaggcagcgccgcgcgtcccacccggagtaccccgggggactcgaggggtgctctgcggaggcccgggttgctgggggcagggccgcgagctgctgtggggcctacagggttcgtagaagattcaagggccagatcttgatgcccaacattggttatggaagcaacaaaaaaacaaagcacatgctgcccagtggcttccggaagttcctggtccacaacgtcaaggagctggaagtgctgctgatgtgcaacaaatcttactgtgccgagatcgctcacaatgtttcctccaagaaccgcaaagccatcgtggaaagagctgcccaactggccatcagagtcaccaaccccaatgccaggctgcgcagtgaagaaaatgagtaggcagctcatgtgcacgtttactgtttagataaagtgtaaaaactggcatctggcatcttccttccttgattttaagtcttcagcttcttggccaacttagtttgccacagagattgttcttttgcttaagcccctttggaatctcccatttggaggggatttgtaaaggacactcagtccttgaacaggggaatgtggcctcaagtgcacagactagccttagtcatctccagttgaggctgggtatgaggggtacagacttggccctcacaccaggtaggttctgagacacttgaagaagcttgtggctcccaagccacaagtagtcattcttagccttgcttttgtaaagttaggtgacaagttattccatgtgatgcttgtgagaattgagaaaatatgcatggaaatatccagatgaatttcttacacagattcttacgggatgcctaaattgcatcctgtaacttctgtccaaaaagaacaggatgatgtacaaattgctcttccaggtaatccaccacggttaactggaaaagcactttcagtctcctataaccctcccaccagctgctgcttcaggtataatgttacagcagtttgccaaggcggggacctaactggtgacaattgagcctcttgactggtactcagaatttagtgacacgtggtcctgattttttttggagacggggtcttgctctcacccaggctgggagtgcagtggcacactgactacagccttgacctccccaggctcaggtgatcttcccacctcagccttccaagtagctgggactacagatgcacacctccaaacctgggtagtttttgaagtttttttgtagaggtggtctagccatgttgcctaggctcccgaactcctgagctcaagcaatcctgcttcagcctcccaaagtactgggattacaggcatcttctgtagtatataggtcatgagggatatgggatgtggtacttatgagacagaaatgcttacaggatgtttttctgtaaccatcctggtcaacttagcagaaatgctgcgctgggtataataaagcttttctacttctagtctagacaggaatcttacagattgtctcctgttcaaaacctagtcataaatatttat

SEQ ID NO: 322901 - DNA, 546 bp, Homo sapiens
atgggcaaggtcaagcaccctgtgactgggggagaacctttgaacctggagtgtgggcctgggttcgccccggatccctgtccattgcttgctgtgggccttggtttctttatctgtaaaatggaggtaatgcctggattacaaggctgctataaggatgagaggggacaatgagggtactttttaatgaaagcattcttgtcaccaccagggaaccatagtcaggatttgggggcatgtaggtgtcattccacagccacttaccaagcagccctctcttagcttggtgctgggactcattgcctctccaatggaattttccaagtgtgttgagggctgtcttgctccttacctacttgattctcttgcagatcttactgtgccgagatcgctcacaatgtttcctccaagaaccgcaaagccatcgtggaaagagctgcccaactggccatcagagtcaccaaccccaatgccaggctgcgcagtgaagaaaatgagtaggcagctcatgtgcacgttttctgtttaaataaatgtaaaaactgc

SEQ ID NO: 322902 - DNA, 289 bp, Homo sapiens
tcgctattcatcggcacctcgctattcatcggcaccagtcagaccgatatgtcaaaattaagcgtaactggcggaaacccagaggcattgacaacagggttcgtagaagattcaagggccagatcttgatgcccaacattggttatggaagcaacaaaaaaacaaagcacatgctgcccagtggcttccggaagttcctggtccacaacgtcaaggagctggaagtgctgctgatgtgcaacaaatcttacggtgccgatgaatagcgaggtgccgatgataacgaggg

SEQ ID NO: 322903 - DNA, 486 bp, Homo sapiens
  misc_feature (378)..(378): n is a, c, g, or t
aaaaaaaaaaaaaaaaaaaaaaaaaaaaaaaaaaaaaaaaaaaaacaaagcacatgctgcccagtggcttccggaagttcctggtccacaacgtcaaggagctggaagtgctgctgatgtgcaacaaatcttactgtgccgagatcgctcacaatgtttcctccaagaaccgcaaagccatcgtggaaagagctgcccaactggccatcagagtcaccaaccccaatgccaggctgcgcagtgaagaaaatgagtaggcagctcatgtgcacgttttctgtttaaataaatgtaaaaactgccaaaggtcacttcaggaaagctttttaaaaaaagcttgaatttttacttgaaagaaaaaacaacaccaaaaaaatncttcttgggtggggggcgcgggaacaccaatctcgccctatacgggaatcttaattacaaataacactggcccgtcgttataacaaacggcgggaactggagaaaacc

SEQ ID NO: 322904 - DNA, 538 bp, Homo sapiens
  misc_feature (26)..(27): n is a, c, g, or t
gcgcccctactactactaaattaacnnacgctcgaccttcctcggcgctgcctacggaggtggcagccatctccttctcggcatcatggccgccctcagaccccttgtgaagcccaagatcgtcaaaaagagaaccaagaagttcatccggcaccagtcagaccgatatgtcaaaattaagcgtaactggcggaaacccagaggcattgacaacagggttcgtagaagattcaagggccagatcttgatgcccaacattggttatggaagcaacaaaaaaacaaagcacatgctgcccagtggcttccggaagttcctggtccacaacgtcaaggagctggaagtgctgctgatgtgcaacaaatcttactgtgccgagatcgctcacaatgtttcctccaagaaccgcaaagccatcgtggaaagagctgcccaactggccatcagagtcaccaaccccaatgccaggctgcgcagtgaagaaaatgagtaggcagctcatgtgcacgttttctgtttaaataaatgtaaaaactgc

SEQ ID NO: 322905 - DNA, 1705 bp, Homo sapiens
acgccgggtttttccaagtcagacgtttgtaaaacgcgggccggttaattgaaaaacgactcccaaaagggcgaattgggaacgggccccccctcggtcccaattcggcacgagcttcctcggcgctgcctacggaggtggcagccatctccttctcggcatcatggccgccctcagaccccttgtgaagcccaagatcgtcaaaaagagaaccaagaagttcatccggcaccagtcagaccgatatgtcaaaattaagcgtaactggcggaaacccagaggcattgacaacagggttcgtagaagattcaagggccagatcttgatgcccaacattggttatggaagcaacaaaaaaacaaagcacatgctgcccagtggcttccggaagttcctggtccacaacgtcaaggagctggaagtgctgctgatgtgcaacaaatcttactgtgccgagatcgctcacaatgtttcctccaagaaccgcaaagccatcgtggaaagagctgcccaactggccatcagagtcaccaaccccaatgccaggctgcgcagtgaagaaaatgagtaggcagctcatgtgcacgttttctgtttaaataaatgtaaaaactgccatctggcatcttccttccttgattttaagtcttcagcttcttggccaacttagtttgccacagagattgttcttttgcttaagcccctttggaatctcccatttggaggggatttgtaaaggacactcagtccttgaacaggggaatgtggcctcaagtgcacagactagccttagtcatctccagttgaggctgggtatgaggggtacagacttggccctcacaccaggtaggttctgagacacttgaagaagcttgtggctcccaagccacaagtagtcattcttagccttgcttttgtaaagttaggtgacaagttattccatgtgatgcttgtgagaattgagaaaatatgcatggaaatatccagatgaatttcttacacagattcttacgggatgcctaaattgcatcctgtaacttctgtccaaaaagaacaggatgatgtacaaattgctcttccaggtaatccaccacggttaactggaaaagcactttcagtctcctataaccctcccaccagctgctgcttcaggtataatgttacagcagtttgccaaggcggggacctaactggtgacaattgagcctcttgactggtactcagaatttagtgacacgtggtcctgattttttttggagacggggtcttgctctcacccaggctgggagtgcagtggcacactgactacagccttgacctccccaggctcaggtgatcttcccacctcagccttccaagtagctgggactacagatgcacacctccaaacctgggtagtttttgaagtttttttgtagaggtggtctagccatgttgcctaggctcccgaactcctgagctcaagcaatcctgcttcagcctcccaaagtactgggattacaggcatcttctgtagtatataggtcatgagggatatgggatgtggtacttatgagacagaaatgcttacaggatgtttttctgtaaccatcctggtcaacttagcagaaatgctgcgctgggtataataaagcttttctacttctagtctagacaggaatcttacagattgtctcctgttcaaaacctagtcataaatatttat

SEQ ID NO: 322906 - DNA, 792 bp, Homo sapiens
  misc_feature (593)..(593): n is a, c, g, or t
  misc_feature (600)..(600): n is a, c, g, or t
  misc_feature (603)..(603): n is a, c, g, or t
tacgacccatcagcccttgcgcgccaccgtcccttctctcttcctcggcgctgcctacggaggtggcagccatctccttctcggcatcatggccgccctcagaccccttgtgaagcccaagatcgtcaaaaagagaaccaagaagttcatccggcaccagtcagaccgatatgtcaaaattaagcgtaactggcggaaacccagaggcattgacaacagggttcgtagaagattcaagggccagatcttgatgcccaacattggttatggaagcaacaaaaaaacaaagcacatgctgcccagtggcttccggaagttcctggtccacaacgtcaaggagctggaagtgctgctgatgtgcaacaaatcttactgtgccgagatcgctcacaatgtttcctccaagaaccgcaaagccatcgtggaaagagctgcccaactggccatcagagtcaccaaccccaatgccaggctgcgcagtgaagaaaatgagtaggcagctcatgtgcacgttttctgtttaaataaatgtaaaaactgccatctggcatcttccttccttgaaaaaaaaaaaaaaaaaaagaaaaaacaanttttgtnggngggcctgggcccaagaaaaagtttttaaaaaccccttccggttgggccccgggcccatggtgaacggcaccctggccctggtcccaaaggaaccggggccggccttggcgggttccccaaaaaaacgccggggcaccgggttcggccaacccaggcgcggggccgggtctcccgggccagggccattac

SEQ ID NO: 322907 - DNA, 1337 bp, Homo sapiens
  misc_feature (1337)..(1337): n is a, c, g, or t
tacgacccatcagcccttgcgcgccaccgtcccttctctcttcctcggcgctgcctacggaggtggcagccatctccttctcggcatcatggccgccctcagaccccttgtgaagcccaagatcgtcaaaaagagaaccaagaagttcatccggcaccagtcagaccgatatgtcaaaattaagcgtaactggcggaaacccagaggcattgacaacagggttcgtagaagattcaagggccagatcttgatgcccaacattggttatggaagcaacaaaaaaacaaagcacatgctgcccagtggcttccggaagttcctggtccacaacgtcaaggagctggaagtgctgctgatgtgcaacaaatcttactgtgccgagatcgctcacaatgtttcctccaagaaccgcaaagccatcgtggaaagagctgcccaactggccatcagagtcaccaaccccaatgccaggctgcgcagtgaagaaaatgagtaggcagctcatgtgcacgttttctgtttaaataaatgtaaaaactgccatctggcatcttccttccttgacaaaaaaaaaaaaaaaaaaaaaaaaaaaaaaaacaaaaaaaaaaaaaaaaaacaaaaacaaaaacaaaaaaaaaaaaaaaaaaaaaaaaaaaaaaggggggggggggggctagacctcccgggggggccaaaaattaccgccaccccaatatttaataaacacagggggcctcacagatagagtgtcatatatatatacagagcagacggggagccgtatataaaaccgtgtgtgatcggcaaaacccatgtgctcaagccatgccactcttttgagcaagccaaccttcttttgggagagccacacaaattaagggcaacacccatccaacacgaaataaaaaacacaccacaagacaaataaaacgatagatataatgatgggaacgacacactcgagagcaatctggaagacgagtgagaatatctcttcggacaacgacgtatctctagaagcaacattatacacgggcgcctcctctgtctatactaccaacacgaaccaacagcaactgaaacaacacaaacccacgcgggagtgccgaggcggggcctgagcggcgggcggacgggggtggaaagcaggcaggagccaacaagaaggccaaacgccccccggcggggcgacacacaagacgaggttagaggaggagagatgcaagaagaaaatatggagagagggacatgagaagaagcaggaggcagatgaaggagagcgaaagaggaacaaggaagagagtcgggaaaagggggaagcaaacaaaagacgaacn

SEQ ID NO: 322908 - DNA, 593 bp, Homo sapiens
tacgacccatcagcccttgcgcgccaccgtcccttctctcttcctcggcgctgcctacggaggtggcagccatctccttctcggcatcatggccgccctcagaccccttgtgaagcccaagatcgtcaaaaagagaaccaagaagttcatccggcaccagtcagaccgatatgtcaaaattaagcgtaactggcggaaacccagaggcattgacaacagggttcgtagaagattcaagggccagatcttgatgcccaacattggttatggaagcaacaaaaaaacaaagcacatgctgcccagtggcttccggaagttcctggtccacaacgtcaaggagctggaagtgctgctgatgtgcaacaaatcttactgtgccgagatcgctcacaatgtttcctccaagaaccgcaaagccatcgtggaaagagctgcccaactggccatcagagtcaccaaccccaatgccaggctgcgcagtgaagaaaatgagtaggcagctcatgtgcacgttttctgtttaaataaatgtaaaaactgcaaaaaaaaaagtcgacgcggccgcgaatttagtagtagtagtaggcggccgc

SEQ ID NO: 322909 - DNA, 2956 bp, Homo sapiens
acgccgggtttttccaagtcagacgtttgtaaaacgcgggccggttaattgaaaaacgactcccaaaagggcgaattgggaacgggccccccctcggtcccaattcggcacgagcttcctcggcgctgcctacggaggtggcagccatctccttctcggtaagtgttaatccgtggcaatccgcattcctgcgggattcatctggccccgtcgcccagtggtgcggaggcctccccttcagcgcggtagtgtctgtgggtattgttattgtcagcttactggagcgtgtacaggaacagaacgaagccgccgagttgatagggctttgcgtcccagagcctcctgccctccgcctgtattcagagctgcgggctgcttgtttgttccttggcggtggagggtgctagttgaggccagacttcggggtctcctgggggccgtgggacgaccaggggtggcccagcttgacagctttcagctgggatctgtggatcccagcgctcaccaatgtcggcccacgtgtattcgttcatgccatggccggcttcttccgctgcagtctctggcccgagggctgctgctgcgggaccgccaaggaaagacgagctgtaggtcggctggtccagctgcaggcagaaattctggtagtatctctgggaatatgaagatgcaactgcccccaccttgccttcgaggatatcatgggccagaaggcagagtcgttttgaatacgtggttcattgagtacccactctgggccagttgatggctgcgaagagagcagaaggggtgctgctgtaggaaatcaatggctcggaagaccacactgaggaaggtgtgagttgatactggaagatctccaggtttgaggcatcttcagaggtatatggtggttttgtgtgtgttgagggtgtggtagcgcagcagctccctagggaattagaaggttttattgaacatttaccctgtgacaggcactgcaggcattcagcgcgcagtgtcatcttcattttacaggtgaggaaaagactcaggttcaagtagatggtcaaggccagtactaccggaaggaccatctgggggttcggacactggtggggtgggatttgctgccccttgcaaattgagagtgtcttggggtcagttttgatttgctcagctgttggcattctttgggctctgagtgggtgaggtgacccttgacctcctgggatcgcatctggagagtgcctagtattctgccagcttcggaaagggagggaaagcaagcctggcagaggcacccattccattcccagcttgctccgtagctggcgattggaagacactctgcgacagtgttcagtccctgggcaggaaagcctccttccaggattcttcctcacctggggccgcttcttccccaaaaggcatcatggccgccctcagaccccttgtgaagcccaagatcgtcaaaaagagaaccaagaagttcatccggcaccagtcagaccgatatgtcaaaattaagcgtaactggcggaaacccagaggcattgacaacagggttcgtagaagattcaagggccagatcttgatgcccaacattggttatggaagcaacaaaaaaacaaagcacatgctgcccagtggcttccggaagttcctggtccacaacgtcaaggagctggaagtgctgctgatgtgcaacaaatcttactgtgccgagatcgctcacaatgtttcctccaagaaccgcaaagccatcgtggaaagagctgcccaactggccatcagagtcaccaaccccaatgccaggctgcgcagtgaagaaaatgagtaggcagctcatgtgcacgttttctgtttaaataaatgtaaaaactgccatctggcatcttccttccttgattttaagtcttcagcttcttggccaacttagtttgccacagagattgttcttttgcttaagcccctttggaatctcccatttggaggggatttgtaaaggacactcagtccttgaacaggggaatgtggcctcaagtgcacagactagccttagtcatctccagttgaggctgggtatgaggggtacagacttggccctcacaccaggtaggttctgagacacttgaagaagcttgtggctcccaagccacaagtagtcattcttagccttgcttttgtaaagttaggtgacaagttattccatgtgatgcttgtgagaattgagaaaatatgcatggaaatatccagatgaatttcttacacagattcttacgggatgcctaaattgcatcctgtaacttctgtccaaaaagaacaggatgatgtacaaattgctcttccaggtaatccaccacggttaactggaaaagcactttcagtctcctataaccctcccaccagctgctgcttcaggtataatgttacagcagtttgccaaggcggggacctaactggtgacaattgagcctcttgactggtactcagaatttagtgacacgtggtcctgattttttttggagacggggtcttgctctcacccaggctgggagtgcagtggcacactgactacagccttgacctccccaggctcaggtgatcttcccacctcagccttccaagtagctgggactacagatgcacacctccaaacctgggtagtttttgaagtttttttgtagaggtggtctagccatgttgcctaggctcccgaactcctgagctcaagcaatcctgcttcagcctcccaaagtactgggattacaggcatcttctgtagtatataggtcatgagggatatgggatgtggtacttatgagacagaaatgcttacaggatgtttttctgtaaccatcctggtcaacttagcagaaatgctgcgctgggtataataaagcttttctacttctagtctagacaggaatcttacagattgtctcctgttcaaaacctagtcataaatatttat

SEQ ID NO: 322910 - DNA, 2433 bp, Homo sapiens
acgccgggtttttccaagtcagacgtttgtaaaacgcgggccggttaattgaaaaacgactcccaaaagggcgaattgggaacgggccccccctcggtcccaattcggcacgagcttcctcggcgctgcctacggaggtggcagccatctccttctcggtaagtgttaatccgtggcaatccgcattcctgcgggattcatctggccccgtcgcccagtggtgcggaggcctccccttcagcgcggtagtgtctgtgggtattgttattgtcagcttactggagcgtgtacaggaacagaacgaagccgccgagttgatagggctttgcgtcccagagcctcctgccctccgcctgtattcagagctgcgggctgcttgtttgttccttggcggtggagggtgctagttgaggccagacttcggggtctcctgggggccgtgggacgaccaggggtggcccagcttgacagctttcagctgggatctgtggatcccagcgctcaccaatgtcggcccacgtgtattcgttcatgccatggccggcttcttccgctgcagtctctggcccgagggctgctgctgcgggaccgccaaggaaagacgagctgtaggtcggctggtccagctgcaggcagaaattctggtagtatctctgggaatatgaagatgcaactgcccccaccttgccttcgaggatatcatgggccagaaggcagagtcgttttgaatacgtggttcattgagtacccactctgggccagttgatggctgcgaagagagcagaaggggtgctgctgtaggaaatcaatggctcggaagaccacactgaggaaggtgtgagttgatactggaagatctccaggtttgaggcatcttcagaggtaggcatcatggccgccctcagaccccttgtgaagcccaagatcgtcaaaaagagaaccaagaagttcatccggcaccagtcagaccgatatgtcaaaattaagcgtaactggcggaaacccagaggcattgacaacagggttcgtagaagattcaagggccagatcttgatgcccaacattggttatggaagcaacaaaaaaacaaagcacatgctgcccagtggcttccggaagttcctggtccacaacgtcaaggagctggaagtgctgctgatgtgcaacaaatcttactgtgccgagatcgctcacaatgtttcctccaagaaccgcaaagccatcgtggaaagagctgcccaactggccatcagagtcaccaaccccaatgccaggctgcgcagtgaagaaaatgagtaggcagctcatgtgcacgttttctgtttaaataaatgtaaaaactgccatctggcatcttccttccttgattttaagtcttcagcttcttggccaacttagtttgccacagagattgttcttttgcttaagcccctttggaatctcccatttggaggggatttgtaaaggacactcagtccttgaacaggggaatgtggcctcaagtgcacagactagccttagtcatctccagttgaggctgggtatgaggggtacagacttggccctcacaccaggtaggttctgagacacttgaagaagcttgtggctcccaagccacaagtagtcattcttagccttgcttttgtaaagttaggtgacaagttattccatgtgatgcttgtgagaattgagaaaatatgcatggaaatatccagatgaatttcttacacagattcttacgggatgcctaaattgcatcctgtaacttctgtccaaaaagaacaggatgatgtacaaattgctcttccaggtaatccaccacggttaactggaaaagcactttcagtctcctataaccctcccaccagctgctgcttcaggtataatgttacagcagtttgccaaggcggggacctaactggtgacaattgagcctcttgactggtactcagaatttagtgacacgtggtcctgattttttttggagacggggtcttgctctcacccaggctgggagtgcagtggcacactgactacagccttgacctccccaggctcaggtgatcttcccacctcagccttccaagtagctgggactacagatgcacacctccaaacctgggtagtttttgaagtttttttgtagaggtggtctagccatgttgcctaggctcccgaactcctgagctcaagcaatcctgcttcagcctcccaaagtactgggattacaggcatcttctgtagtatataggtcatgagggatatgggatgtggtacttatgagacagaaatgcttacaggatgtttttctgtaaccatcctggtcaacttagcagaaatgctgcgctgggtataataaagcttttctacttctagtctagacaggaatcttacagattgtctcctgttcaaaacctagtcataaatatttat

SEQ ID NO: 322911 - DNA, 1804 bp, Homo sapiens
acgccgggtttttccaagtcagacgtttgtaaaacgcgggccggttaattgaaaaacgactcccaaaagggcgaattgggaacgggccccccctcggtcccaattcggcacgagcttcctcggcgctgcctacggaggtggcagccatctccttctcgctggcgattggaagacactctgcgacagtgttcagtccctgggcaggaaagcctccttccaggattcttcctcacctggggccgcttcttccccaaaaggcatcatggccgccctcagaccccttgtgaagcccaagatcgtcaaaaagagaaccaagaagttcatccggcaccagtcagaccgatatgtcaaaattaagcgtaactggcggaaacccagaggcattgacaacagggttcgtagaagattcaagggccagatcttgatgcccaacattggttatggaagcaacaaaaaaacaaagcacatgctgcccagtggcttccggaagttcctggtccacaacgtcaaggagctggaagtgctgctgatgtgcaacaaatcttactgtgccgagatcgctcacaatgtttcctccaagaaccgcaaagccatcgtggaaagagctgcccaactggccatcagagtcaccaaccccaatgccaggctgcgcagtgaagaaaatgagtaggcagctcatgtgcacgttttctgtttaaataaatgtaaaaactgccatctggcatcttccttccttgattttaagtcttcagcttcttggccaacttagtttgccacagagattgttcttttgcttaagcccctttggaatctcccatttggaggggatttgtaaaggacactcagtccttgaacaggggaatgtggcctcaagtgcacagactagccttagtcatctccagttgaggctgggtatgaggggtacagacttggccctcacaccaggtaggttctgagacacttgaagaagcttgtggctcccaagccacaagtagtcattcttagccttgcttttgtaaagttaggtgacaagttattccatgtgatgcttgtgagaattgagaaaatatgcatggaaatatccagatgaatttcttacacagattcttacgggatgcctaaattgcatcctgtaacttctgtccaaaaagaacaggatgatgtacaaattgctcttccaggtaatccaccacggttaactggaaaagcactttcagtctcctataaccctcccaccagctgctgcttcaggtataatgttacagcagtttgccaaggcggggacctaactggtgacaattgagcctcttgactggtactcagaatttagtgacacgtggtcctgattttttttggagacggggtcttgctctcacccaggctgggagtgcagtggcacactgactacagccttgacctccccaggctcaggtgatcttcccacctcagccttccaagtagctgggactacagatgcacacctccaaacctgggtagtttttgaagtttttttgtagaggtggtctagccatgttgcctaggctcccgaactcctgagctcaagcaatcctgcttcagcctcccaaagtactgggattacaggcatcttctgtagtatataggtcatgagggatatgggatgtggtacttatgagacagaaatgcttacaggatgtttttctgtaaccatcctggtcaacttagcagaaatgctgcgctgggtataataaagcttttctacttctagtctagacaggaatcttacagattgtctcctgttcaaaacctagtcataaatatttat

SEQ ID NO: 322912 - DNA, 1592 bp, Homo sapiens
ttcggcacagcgctgcctacggaggtggcagccatctccttctcggcatcatggccgccctcagaccccttgtgaagcccaagatcgtcaaaaagagaaccaagaagttcatccggcaccagtcagaccgatatgtcaaaattaagcgtaactggcggaaacccagaggcattgacaacagggttcgtagaagattcaagggccagatcttgatgcccaacattggttatggaagcaacaaaaaaacaaagcacatgctgcccagtggcttccggaagttcctggtccacaacgtcaaggagctggaagtgctgctgatgtgcaacaaatcttactgtgccgagatcgctcacaatgtttcctccaagaaccgcaaagccatcgtggaaagagctgcccaactggccatcagagtcaccaaccccaatgccaggctgcgcagtgaagaaaatgagtaggcagctcatgtgcacgttttctgtttaaataaatgtaaaaactgccatctggcatcttccttccttgattttaagtcttcagcttcttggccaacttagtttgccacagagattgttcttttgcttaagcccctttggaatctcccatttggaggggatttgtaaaggacactcagtccttgaacaggggaatgtggcctcaagtgcacagactagccttagtcatctccagttgaggctgggtatgaggggtacagacttggccctcacaccaggtaggttctgagacacttgaagaagcttgtggctcccaagccacaagtagtcattcttagccttgcttttgtaaagttaggtgacaagttattccatgtgatgcttgtgagaattgagaaaatatgcatggaaatatccagatgaatttcttacacagattcttacgggatgcctaaattgcatcctgtaacttctgtccaaaaagaacaggatgatgtacaaattgctcttccaggtaatccaccacggttaactggaaaagcactttcagtctcctataaccctcccaccagctgctgcttcaggtataatgttacagcagtttgccaaggcggggacctaactggtgacaattgagcctcttgactggtactcagaatttagtgacacgtggtcctgattttttttggagacggggtcttgctctcacccaggctgggagtgcagtggcacactgactacagccttgacctccccaggctcaggtgatcttcccacctcagccttccaagtagctgggactacagatgcacacctccaaacctgggtagtttttgaagtttttttgtagaggtggtctagccatgttgcctaggctcccgaactcctgagctcaagcaatcctgcttcagcctcccaaagtactgggattacaggcatcttctgtagtatataggtcatgagggatatgggatgtggtacttatgagacagaaatgcttacaggatgtttttctgtaaccatcctggtcaacttagcagaaatgctgcgctgggtataataaagcttttctacttctagtctagacaggaatcttacagattgtctcctgttcaaaacctagtcataaatatttat

SEQ ID NO: 322913 - DNA, 1647 bp, Homo sapiens
caccaggaaagccacaggaacacaatgttggaatacattgggttttgcccgcaccgtcaagctccgaattaattggggaggtgcagccatctccttctcggcatcatggccgccctcagaccccttgtgaagcccaagatcgtcaaaaagagaaccaagaagttcatccggcaccagtcagaccgatatgtcaaaattaagcgtaactggcggaaacccagaggcattgacaacagggttcgtagaagattcaagggccagatcttgatgcccaacattggttatggaagcaacaaaaaaacaaagcacatgctgcccagtggcttccggaagttcctggtccacaacgtcaaggagctggaagtgctgctgatgtgcaacaaatcttactgtgccgagatcgctcacaatgtttcctccaagaaccgcaaagccatcgtggaaagagctgcccaactggccatcagagtcaccaaccccaatgccaggctgcgcagtgaagaaaatgagtaggcagctcatgtgcacgttttctgtttaaataaatgtaaaaactgccatctggcatcttccttccttgattttaagtcttcagcttcttggccaacttagtttgccacagagattgttcttttgcttaagcccctttggaatctcccatttggaggggatttgtaaaggacactcagtccttgaacaggggaatgtggcctcaagtgcacagactagccttagtcatctccagttgaggctgggtatgaggggtacagacttggccctcacaccaggtaggttctgagacacttgaagaagcttgtggctcccaagccacaagtagtcattcttagccttgcttttgtaaagttaggtgacaagttattccatgtgatgcttgtgagaattgagaaaatatgcatggaaatatccagatgaatttcttacacagattcttacgggatgcctaaattgcatcctgtaacttctgtccaaaaagaacaggatgatgtacaaattgctcttccaggtaatccaccacggttaactggaaaagcactttcagtctcctataaccctcccaccagctgctgcttcaggtataatgttacagcagtttgccaaggcggggacctaactggtgacaattgagcctcttgactggtactcagaatttagtgacacgtggtcctgattttttttggagacggggtcttgctctcacccaggctgggagtgcagtggcacactgactacagccttgacctccccaggctcaggtgatcttcccacctcagccttccaagtagctgggactacagatgcacacctccaaacctgggtagtttttgaagtttttttgtagaggtggtctagccatgttgcctaggctcccgaactcctgagctcaagcaatcctgcttcagcctcccaaagtactgggattacaggcatcttctgtagtatataggtcatgagggatatgggatgtggtacttatgagacagaaatgcttacaggatgtttttctgtaaccatcctggtcaacttagcagaaatgctgcgctgggtataataaagcttttctacttctagtctagacaggaatcttacagattgtctcctgttcaaaacctagtcataaatatttat

SEQ ID NO: 322914 - DNA, 1158 bp, Homo sapiens
  misc_feature (670)..(671): n is a, c, g, or t
  misc_feature (677)..(677): n is a, c, g, or t
  misc_feature (680)..(681): n is a, c, g, or t
  misc_feature (725)..(725): n is a, c, g, or t
  misc_feature (727)..(727): n is a, c, g, or t
  misc_feature (823)..(823): n is a, c, g, or t
  misc_feature (1054)..(1054): n is a, c, g, or t
tacgacccatcagcccttgcgcgccaccgtcccttctctcttcctcggcgctgcctacggaggtggcagccatctccttctcggcatcatggccgccctcagaccccttgtgaagcccaagatcgtcaaaaagagaaccaagaagttcatccggcaccagtcagaccgatatgtcaaaattaagcgtaactggcggaaacccagaggcattgacaacagggttcgtagaagattcaagggccagatcttgatgcccaacattggttatggaagcaacaaaaaaacaaagcacatgctgcccagtggcttccggaagttcctggtccacaacgtcaaggagctggaagtgctgctgatgtgcaacaaatcttactgtgccgagatcgctcacaatgtttcctccaagaaccgcaaagccatcgtggaaagagctgcccaactggccatcagagtcaccaaccccaatgccaggctgcgcagtgaagaaaatgagtaggcagctcatgtgcacgttttctgtttaaataaatgtaaaaactgccaaaaaaaaaaaaaaaaaaaaaaaaaaaaaaaacaaaaaaaaaaaaaaaacaaaaaaaaaaaaaaaaaaaaaaaaaaaaaaaaaaaaaaaaaaaaaaaaaaaaaaaaaaaaaaaaaaaaaaaaaaaaanntttaanaannatttaaaaaaataaaatttttttttttataacctttttccccantncctttttaatttcaaaattttttttttcccccccaaattttcactttatattccaattccccccttttaaaaaccttttaaaataaaaaacccccncttttcccaaactaatacctggaaaaccccttcctttccccaatttaaacctttttaaaaaaaaccccctttccaaaattcttataaaaaaaaaaagcccccaaaattccccttttacaaaaattgcaaatttttatttaaaaattcaatttaaaccctttatattttttaaaattttacccaaaattttttaaaaaaaaatatttttttaaacccaaagacccaaccccnaaaatcttcttatattaaaaaaattacaccaaaaaccccttttttttttcccctttttaaccaaaaacccttttataactttttctcccactcctccccttttt

SEQ ID NO: 322915 - DNA, 993 bp, Homo sapiens
tacgacccatcagcccttgcgcgccaccgtcccttctctcttcctcggcgctgcctacggaggtggcagccatctccttctcggcatcatggccgccctcagaccccttgtgaagcccaagatcgtcaaaaagagaaccaagaagttcatccggcaccagtcagaccgatatgtcaaaattaagcgtaactggcggaaacccagaggcattgacaacagggttcgtagaagattcaagggccagatcttgatgcccaacattggttatggaagcaacaaaaaaacaaagcacatgctgcccagtggcttccggaagttcctggtccacaacgtcaaggagctggaagtgctgctgatgtgcaacaaatcttactgtgccgagatcgctcacaatgtttcctccaagaaccgcaaagccatcgtggaaagagctgcccaactggccatcagagtcaccaaccccaatgccaggctgcgcagtgaagaaaatgagtaggcagctcatgtgcacgttttctgtttaaataaatgtaaaaactgccaaaaaaaaaaaaaaaaaaaaaaaaaaaaaaaacaaaaaaaaaaaaaaaaggggggggggggaaaaaaaaacccccgggggggccctttcgcccgttttttttgaaaagggggccccaagggggggggaataaaaaaaaggggacgggggggcgctaacaaaccggcgggcggcgacacaccggcccgcgggcaccttgggaagcagaccgtccccgtgggggtggccacctgcggaccccacccaagagagtaacgggcaggcaacaaaaccttgcggggttacgggcgacaccggcttgccgcgcggaacttgctcgcttatagtacctcgcagcatcaataacacacccgaccagacccgcacacaggaaagcaacccacacaacaccgacgacaacacaaccacaacccgacacacgacacacagaaccagcgaacgcacgcacacga

SEQ ID NO: 322916 - DNA, 809 bp, Homo sapiens
  misc_feature (610)..(610): n is a, c, g, or t
  misc_feature (617)..(617): n is a, c, g, or t
  misc_feature (620)..(620): n is a, c, g, or t
caccaggaaagccacaggaacacaatgttggaatacattgggttttgcccgcaccgtcaagctccgaattaattggggaggtgcagccatctccttctcggcatcatggccgccctcagaccccttgtgaagcccaagatcgtcaaaaagagaaccaagaagttcatccggcaccagtcagaccgatatgtcaaaattaagcgtaactggcggaaacccagaggcattgacaacagggttcgtagaagattcaagggccagatcttgatgcccaacattggttatggaagcaacaaaaaaacaaagcacatgctgcccagtggcttccggaagttcctggtccacaacgtcaaggagctggaagtgctgctgatgtgcaacaaatcttactgtgccgagatcgctcacaatgtttcctccaagaaccgcaaagccatcgtggaaagagctgcccaactggccatcagagtcaccaaccccaatgccaggctgcgcagtgaagaaaatgagtaggcagctcatgtgcacgttttctgtttaaataaatgtaaaaactgccatctggcatcttccttccttgaaaaaaaaaaaaaaaaaaagaaaaaacaanttttgtnggngggcctgggcccaagaaaaagtttttaaaaaccccttccggttgggccccgggcccatggtgaacggcaccctggccctggtcccaaaggaaccggggccggccttggcgggttccccaaaaaaacgccggggcaccgggttcggccaacccaggcgcggggccgggtctcccgggccagggccattac

SEQ ID NO: 322917 - DNA, 820 bp, Homo sapiens
  misc_feature (579)..(579): n is a, c, g, or t
  misc_feature (636)..(636): n is a, c, g, or t
  misc_feature (640)..(640): n is a, c, g, or t
tacgacccatcagcccttgcgcgccaccgtcccttctctcttcctcggcgctgcctacggaggtggcagccatctccttctcggcatcatggccgccctcagaccccttgtgaagcccaagatcgtcaaaaagagaaccaagaagttcatccggcaccagtcagaccgatatgtcaaaattaagcgtaactggcggaaacccagaggcattgacaacagggttcgtagaagattcaagggccagatcttgatgcccaacattggttatggaagcaacaaaaaaacaaagcacatgctgcccagtggcttccggaagttcctggtccacaacgtcaaggagctggaagtgctgctgatgtgcaacaaatcttactgtgccgagatcgctcacaatgtttcctccaagaaccgcaaagccatcgtggaaagagctgcccaactggccatcagagtcaccaaccccaatgccaggctgcgcagtgaagaaaatgagtaggcagctcatgtgcacgttttctgtttaaataaatgtaaaaactgccaaaaaaaaaaaaaaaaaaaaaaaaagggggggggggntaaaattttccccgggggggcccagtttaggcgtacccagttttttgtgtacaaggnggcncccatatagaaacgccggtattaaaaagacaaagcgcagtggcgcgcggttacaaagggttgggactggtaaacttggctagctggaattttggagaggagacattacttctgggcgtggaccttattggacaccttcctagggatttaacggttcaggaatatacttcagtgatcggac

SEQ ID NO: 322918 - DNA, 769 bp, Homo sapiens
  misc_feature (570)..(570): n is a, c, g, or t
  misc_feature (577)..(577): n is a, c, g, or t
  misc_feature (580)..(580): n is a, c, g, or t
tacgacccatcagcccttgcgcgccaccgtcccttctctcttcctcggcgctgcctacggaggtggcagccatctccttctcggcatcatggccgccctcagaccccttgtgaagcccaagatcgtcaaaaagagaaccaagaagttcatccggcaccagtcagaccgatatgtcaaaattaagcgtaactggcggaaacccagaggcattgacaacagggttcgtagaagattcaagggccagatcttgatgcccaacattggttatggaagcaacaaaaaaacaaagcacatgctgcccagtggcttccggaagttcctggtccacaacgtcaaggagctggaagtgctgctgatgtgcaacaaatcttactgtgccgagatcgctcacaatgtttcctccaagaaccgcaaagccatcgtggaaagagctgcccaactggccatcagagtcaccaaccccaatgccaggctgcgcagtgaagaaaatgagtaggcagctcatgtgcacgttttctgtttaaataaatgtaaaaactgcaaaaaaaaaaaaaaaaaagaaaaaacaanttttgtnggngggcctgggcccaagaaaaagtttttaaaaaccccttccggttgggccccgggcccatggtgaacggcaccctggccctggtcccaaaggaaccggggccggccttggcgggttccccaaaaaaacgccggggcaccgggttcggccaacccaggcgcggggccgggtctcccgggccagggccattac

SEQ ID NO: 322919 - DNA, 1264 bp, Homo sapiens
  misc_feature (1264)..(1264): n is a, c, g, or t
tacgacccatcagcccttgcgcgccaccgtcccttctctcttcctcggcgctgcctacggaggtggcagccatctccttctcggcatcatggccgccctcagaccccttgtgaagcccaagatcgtcaaaaagagaaccaagaagttcatccggcaccagtcagaccgatatgtcaaaattaagcgtaactggcggaaacccagaggcattgacaacagggttcgtagaagattcaagggccagatcttgatgcccaacattggttatggaagcaacaaaaaaacaaagcacatgctgcccagtggcttccggaagttcctggtccacaacgtcaaggagctggaagtgctgctgatgtgcaacaaatcttactgtgccgagatcgctcacaatgtttcctccaagaaccgcaaagccatcgtggaaagagctgcccaactggccatcagagtcaccaaccccaatgccaggctgcgcagtgaagaaaatgagtaggcagctcatgtgcacgttttctgtttaaataaatgtaaaaactgcaacaaaaacaaaaacaaaaaaaaaaaaaaaaaaaaaaaaaaaaaaggggggggggggggctagacctcccgggggggccaaaaattaccgccaccccaatatttaataaacacagggggcctcacagatagagtgtcatatatatatacagagcagacggggagccgtatataaaaccgtgtgtgatcggcaaaacccatgtgctcaagccatgccactcttttgagcaagccaaccttcttttgggagagccacacaaattaagggcaacacccatccaacacgaaataaaaaacacaccacaagacaaataaaacgatagatataatgatgggaacgacacactcgagagcaatctggaagacgagtgagaatatctcttcggacaacgacgtatctctagaagcaacattatacacgggcgcctcctctgtctatactaccaacacgaaccaacagcaactgaaacaacacaaacccacgcgggagtgccgaggcggggcctgagcggcgggcggacgggggtggaaagcaggcaggagccaacaagaaggccaaacgccccccggcggggcgacacacaagacgaggttagaggaggagagatgcaagaagaaaatatggagagagggacatgagaagaagcaggaggcagatgaaggagagcgaaagaggaacaaggaagagagtcgggaaaagggggaagcaaacaaaagacgaacn

SEQ ID NO: 322920 - DNA, 572 bp, Homo sapiens
acgccgggtttttccaagtcagacgtttgtaaaacgcgggccggttaattgaaaaacgactcccaaaagggcgaattgggaacgggccccccctcggtcccaattcggcacgagcttcctcggcgctgcctacggaggtggcagccatctccttctcggcatcatggccgccctcagaccccttgtgaagcccaagatcgtcaaaaagagaaccaagaagttcatccggcaccagtcagaccgatatgtcaaaattaagcgtaactggcggaaacccagaggcattgacaacagggttcgtagaagattcaagggccagatcttgatgcccaacattggttatggaagcaacaaaaaaacaaagcacatgctgcccagtggcttccggaagttcctggtccacaacgtcaaggagctggaagtgctgctgatgtgcaacaaatcttactgtgccgagatcgctcacaatgtttcctccaagaaccgcaaagccatcgtggaaagagctgcccaactggccatcagagtcaccaaccccgcacgttttctgtttaaataaatgtaaaaactgc

SEQ ID NO: 322921 - DNA, 1010 bp, Homo sapiens
  misc_feature (26)..(26): n is a, c, g, or t
tccccgggctgcaggaattcggcacnagccatctccttctcggcatcatggccgccctcagaccccttgtgaagcccaagatcgtcaaaaagagaaccaagaagttcatccggcaccagtcagaccgatatgtcaaaattaagcgtaactggcggaaacccagaggcattgacaacagggttcgtagaagattcaagggccagatcttgatgcccaacattggttatggaagcaacaaaaaaacaaagcacatgctgcccagtggcttccggaagttcctggtccacaacgtcaaggagctggaagtgctgctgatgtgcaacaaatcttactgtgccgagatcgctcacaatgtttcctccaagaaccgcaaagccatcgtggaaagagctgcccaactggccatcagagtcaccaaccccaatgccaggctgcgcagtgaagaaaatgagtaggcagctcatgtgcacgttttctgtttaaataaatgtaaaaactgccaaaaaaaaaaaaaaaaaaaaaaaaacaaaaaaaaaaaaaaaaaaaaaaaaaagacgcgggggacttttttgggggggggggaaaaaggaggttgttaaggggcaggggcaagtgtccgggacccccttttttttgcagggggggacaatggggagggcccccaaaaggagagggggcgaataaatttcaaaacggcgggtacccgcaaaataaacaggagagcaaaaagaaggccgaagaggcccgacacggcaccgcggagccaaaacgggggggcccacccggcaccacggcagggcggacgagacaaacgcgacccggcgacagacacagcacgccccaaccagaacaaacagcgagagacggaacacaaacagcaccacacgaccgcgaaaagcagacccgccaccaccaaagacaacagcacgcggaaccgacaccgcggacaggcaacaacacgaagagcaacgagcacccaaccccgagccacgcagccacacgcgcagacg

SEQ ID NO: 322922 - DNA, 908 bp, Homo sapiens
  misc_feature (590)..(590): n is a, c, g, or t
  misc_feature (595)..(595): n is a, c, g, or t
  misc_feature (597)..(597): n is a, c, g, or t
caccaggaaagccacaggaacacaatgttggaatacattgggttttgcccgcaccgtcaagctccgaattaattggggaggtgcagccatctccttctcggcatcatggccgccctcagaccccttgtgaagcccaagatcgtcaaaaagagaaccaagaagttcatccggcaccagtcagaccgatatgtcaaaattaagcgtaactggcggaaacccagaggcattgacaacagggttcgtagaagattcaagggccagatcttgatgcccaacattggttatggaagcaacaaaaaaacaaagcacatgctgcccagtggcttccggaagttcctggtccacaacgtcaaggagctggaagtgctgctgatgtgcaacaaatcttactgtgccgagatcgctcacaatgtttcctccaagaaccgcaaagccatcgtggaaagagctgcccaactggccatcagagtcaccaaccccaatgccaggctgcgcagtgaagaaaatgagtaggcagctcatgtgcacgttttctgtttaaataaatgtaaaaactgccaaaaaaaaaaaaaaaaaaaaaaaaaaaaaanaaaananaaaaaaaaaaaaaaaaaaaggggggggggggggaaaaaatttccccggggggggccatttggggccaccccgaccattttctttaacaaaagggggggccccaatagagggaggcagcataataaaaagacagacgagcgggggccgctaaaacacagcgccggcggcggaaaagctcgacggaggaacattggggaaagaaccccctccgcgcggcgacatagggggacacaccccggagtattgacgcggggaaataactcgcggtcagggtcccagcgcacgtcgggaaatgccagaattacgcaata

SEQ ID NO: 322923 - DNA, 496 bp, Homo sapiens
acgccgggtttttccaagtcagacgtttgtaaaacgcgggccggttaattgaaaaacgactcccaaaagggcgaattgggaacgggccccccctcggtcccaattcggcacgagcttcctcggcgctgcctacggaggtggcagccatctccttctcggcatcatggccgccctcagaccccttgtgaagcccaagatcgtcaaaaagagaaccaagaagttcatccggcaccagtcagaccgatatgtcaaaattaagcgtaactggcggaaacccagaggcattgacaacagggttcgtagaagattcaagggccagatcttgatgcccaacattggttatggaagcaacaaaaaaacaaagcacatgctgcccagtggcttccggaagttcctggtccacaacgtcaaggagctggaagtgctgctgatgtgcaacaaatcttactgtgccgagatcgctcacaatgtgcctttcggaaagagggcccaggtt

SEQ ID NO: 322924 - DNA, 1684 bp, Homo sapiens
gtatttgtttaatacccggtacatatctttgagttcaacctgtagtacgtgtggcttggtcacttcgtggctaaggtaagaacgtgcttgtggaagacaagtctgtggcttggtgagtctgtgtggccagcagcctctgatctgtgcagggtattaacgtgtcaggcctgagtgttctgggatttctctagaggctggcaagaaccagttgttttgtcttgcgggtctgtcagggttggaaagtccaagccgtaggacccagtttcctttcttagctgatgtctttggccagaacaccgtgggctgttacttgctttgagttggaagcaacaaaaaaacaaagcacatgctgcccagtggcttccggaagttcctggtccacaacgtcaaggagctggaagtgctgctgatgtgcaacaaatcttactgtgccgagatcgctcacaatgtttcctccaagaaccgcaaagccatcgtggaaagagctgcccaactggccatcagagtcaccaaccccaatgccaggctgcgcagtgaagaaaatgagtaggcagctcatgtgcacgttttctgtttaaataaatgtaaaaactgccatctggcatcttccttccttgattttaagtcttcagcttcttggccaacttagtttgccacagagattgttcttttgcttaagcccctttggaatctcccatttggaggggatttgtaaaggacactcagtccttgaacaggggaatgtggcctcaagtgcacagactagccttagtcatctccagttgaggctgggtatgaggggtacagacttggccctcacaccaggtaggttctgagacacttgaagaagcttgtggctcccaagccacaagtagtcattcttagccttgcttttgtaaagttaggtgacaagttattccatgtgatgcttgtgagaattgagaaaatatgcatggaaatatccagatgaatttcttacacagattcttacgggatgcctaaattgcatcctgtaacttctgtccaaaaagaacaggatgatgtacaaattgctcttccaggtaatccaccacggttaactggaaaagcactttcagtctcctataaccctcccaccagctgctgcttcaggtataatgttacagcagtttgccaaggcggggacctaactggtgacaattgagcctcttgactggtactcagaatttagtgacacgtggtcctgattttttttggagacggggtcttgctctcacccaggctgggagtgcagtggcacactgactacagccttgacctccccaggctcaggtgatcttcccacctcagccttccaagtagctgggactacagatgcacacctccaaacctgggtagtttttgaagtttttttgtagaggtggtctagccatgttgcctaggctcccgaactcctgagctcaagcaatcctgcttcagcctcccaaagtactgggattacaggcatcttctgtagtatataggtcatgagggatatgggatgtggtacttatgagacagaaatgcttacaggatgtttttctgtaaccatcctggtcaacttagcagaaatgctgcgctgggtataataaagcttttctacttctagtctagacaggaatcttacagattgtctcctgttcaaaacctagtcataaatatttat

SEQ ID NO: 322925 - DNA, 1391 bp, Homo sapiens
aaaaaaaaaaaaaaaaaaaaaaaaaaaaaaaaaaaaaaaaaaaaacaaagcacatgctgcccagtggcttccggaagttcctggtccacaacgtcaaggagctggaagtgctgctgatgtgcaacaaatcttactgtgccgagatcgctcacaatgtttcctccaagaaccgcaaagccatcgtggaaagagctgcccaactggccatcagagtcaccaaccccaatgccaggctgcgcagtgaagaaaatgagtaggcagctcatgtgcacgttttctgtttaaataaatgtaaaaactgccatctggcatcttccttccttgattttaagtcttcagcttcttggccaacttagtttgccacagagattgttcttttgcttaagcccctttggaatctcccatttggaggggatttgtaaaggacactcagtccttgaacaggggaatgtggcctcaagtgcacagactagccttagtcatctccagttgaggctgggtatgaggggtacagacttggccctcacaccaggtaggttctgagacacttgaagaagcttgtggctcccaagccacaagtagtcattcttagccttgcttttgtaaagttaggtgacaagttattccatgtgatgcttgtgagaattgagaaaatatgcatggaaatatccagatgaatttcttacacagattcttacgggatgcctaaattgcatcctgtaacttctgtccaaaaagaacaggatgatgtacaaattgctcttccaggtaatccaccacggttaactggaaaagcactttcagtctcctataaccctcccaccagctgctgcttcaggtataatgttacagcagtttgccaaggcggggacctaactggtgacaattgagcctcttgactggtactcagaatttagtgacacgtggtcctgattttttttggagacggggtcttgctctcacccaggctgggagtgcagtggcacactgactacagccttgacctccccaggctcaggtgatcttcccacctcagccttccaagtagctgggactacagatgcacacctccaaacctgggtagtttttgaagtttttttgtagaggtggtctagccatgttgcctaggctcccgaactcctgagctcaagcaatcctgcttcagcctcccaaagtactgggattacaggcatcttctgtagtatataggtcatgagggatatgggatgtggtacttatgagacagaaatgcttacaggatgtttttctgtaaccatcctggtcaacttagcagaaatgctgcgctgggtataataaagcttttctacttctagtctagacaggaatcttacagattgtctcctgttcaaaacctagtcataaatatttat

SEQ ID NO: 322926 - DNA, 587 bp, Homo sapiens
acgccgggtttttccaagtcagacgtttgtaaaacgcgggccggttaattgaaaaacgactcccaaaagggcgaattgggaacgggccccccctcggtcccaattcggcacgagcttcctcggcgctgcctacggaggtggcagccatctccttctcggcatcatggccgccctcagaccccttgtgaagcccaagatcgtcaaaaagagaaccaagaagttcatccggcaccagtcagaccgatatgtcaaaattaagcgtaactggcggaaacccagaggcattgacaacagggttcgtagaagattcaagggccagatcttgatgcccaacattggttatggaagcaacaaaaaaacaaagcacatgctgcccagtggcttccggaagttcctggtccacaacgtcaaggagctggaagtgctgctgatgtgcaacaagtgagttgggtcccacctctagttttcagtgatcagaagtttgcatctgtgtgagcacttctggcaggaactctacaaactcttgggatgcattttggcggggggtgttgtacattctctgagggaatcagaagttgttccttgca

SEQ ID NO: 322927 - DNA, 1635 bp, Homo sapiens
atgggcaaggtcaagcaccctgtgactgggggagaacctttgaacctggagtgtgggcctgggttcgccccggatccctgtccattgcttgctgtgggccttggtttctttatctgtaaaatggaggtaatgcctggattacaaggctgctataaggatgagaggggacaatgagggtactttttaatgaaagcattcttgtcaccaccagggaaccatagtcaggatttgggggcatgtaggtgtcattccacagccacttaccaagcagccctctcttagcttggtgctgggactcattgcctctccaatggaattttccaagtgtgttgagggctgtcttgctccttacctacttgattctcttgcagatcttactgtgccgagatcgctcacaatgtttcctccaagaaccgcaaagccatcgtggaaagagctgcccaactggccatcagagtcaccaaccccaatgccaggctgcgcagtgaagaaaatgagtaggcagctcatgtgcacgttttctgtttaaataaatgtaaaaactgccatctggcatcttccttccttgattttaagtcttcagcttcttggccaacttagtttgccacagagattgttcttttgcttaagcccctttggaatctcccatttggaggggatttgtaaaggacactcagtccttgaacaggggaatgtggcctcaagtgcacagactagccttagtcatctccagttgaggctgggtatgaggggtacagacttggccctcacaccaggtaggttctgagacacttgaagaagcttgtggctcccaagccacaagtagtcattcttagccttgcttttgtaaagttaggtgacaagttattccatgtgatgcttgtgagaattgagaaaatatgcatggaaatatccagatgaatttcttacacagattcttacgggatgcctaaattgcatcctgtaacttctgtccaaaaagaacaggatgatgtacaaattgctcttccaggtaatccaccacggttaactggaaaagcactttcagtctcctataaccctcccaccagctgctgcttcaggtataatgttacagcagtttgccaaggcggggacctaactggtgacaattgagcctcttgactggtactcagaatttagtgacacgtggtcctgattttttttggagacggggtcttgctctcacccaggctgggagtgcagtggcacactgactacagccttgacctccccaggctcaggtgatcttcccacctcagccttccaagtagctgggactacagatgcacacctccaaacctgggtagtttttgaagtttttttgtagaggtggtctagccatgttgcctaggctcccgaactcctgagctcaagcaatcctgcttcagcctcccaaagtactgggattacaggcatcttctgtagtatataggtcatgagggatatgggatgtggtacttatgagacagaaatgcttacaggatgtttttctgtaaccatcctggtcaacttagcagaaatgctgcgctgggtataataaagcttttctacttctagtctagacaggaatcttacagattgtctcctgttcaaaacctagtcataaatatttat

SEQ ID NO: 322928 - DNA, 617 bp, Homo sapiens
acgccgggtttttccaagtcagacgtttgtaaaacgcgggccggttaattgaaaaacgactcccaaaagggcgaattgggaacgggccccccctcggtcccaattcggcacgagcttcctcggcgctgcctacggaggtggcagccatctccttctcggcatcatggccgccctcagaccccttgtgaagcccaagatcgtcaaaaagagaaccaagaagttcatccggcaccagtcagaccgatatgtcaaaattaagcgtaactggcggaaacccagaggcattgacaacagggttcgtagaagattcaagggccagatcttgatgcccaacattggttatggaagcaacaaaaaaacaaagcacatgctgcccagtggcttccggaagttcctggtccacaacgtcaaggagctggcggggtggcgccttgccccacaagtgcccttgaggcttttttgggggaagagaccccttttatgaggaatgagtttgcgtgggtaccctggccatgctgggagtcagagttcaccccctcacccctccaagctcactccccaacccccaactccgtgtggtaagcaacatggctttgatgataaacggctttactcta

SEQ ID NO: 322929 - DNA, 541 bp, Homo sapiens
tacgacccatcagcccttgcgcgccaccgtcccttctctcttcctcggcgctgcctacggaggtggcagccatctccttctcggcatcatggccgccctcagaccccttgtgaagcccaagatcgtcaaaaagagaaccaagaagttcatccggcaccagtcagaccgatatgtcaaaattaagcgtaactggcggaaacccagaggcattgacaacagggttcgtagaagattcaagggccagatcttgatgcccaacattggttatggaagcaacaaaaaaacaaagcacatgctgcccagtggcttccggaagttcctggtccacaacgtcaaggagctggaagtgctgctgatgtgcaacaaatcttactgtgccgagatcgctcacaatgtttcctccaagaaccgcaaagccatcgtggaaagagctgcccaactggccatcagagtcaccaaccccaatgccaggctgcgcagtgaagaaaatgagtaggcagctcatgtgcacgttttctgtttaaataaatgtaaaaactgc

SEQ ID NO: 322930 - DNA, 532 bp, Homo sapiens
  misc_feature (7)..(7): n is a, c, g, or t
  misc_feature (30)..(30): n is a, c, g, or t
aaaaatnggctaggtacgaggccggtggtncttcctcggcgctgcctacggaggtggcagccatctccttctcggcatcatggccgccctcagaccccttgtgaagcccaagatcgtcaaaaagagaaccaagaagttcatccggcaccagtcagaccgatatgtcaaaattaagcgtaactggcggaaacccagaggcattgacaacagggttcgtagaagattcaagggccagatcttgatgcccaacattggttatggaagcaacaaaaaaacaaagcacatgctgcccagtggcttccggaagttcctggtccacaacgtcaaggagctggaagtgctgctgatgtgcaacaaatcttactgtgccgagatcgctcacaatgtttcctccaagaaccgcaaagccatcgtggaaagagctgcccaactggccatcagagtcaccaaccccaatgccaggctgcgcagtgaagaaaatgagtaggcagctcatgtgcacgttttctgtttaaataaatgtaaaaactgc

SEQ ID NO: 322931 - DNA, 787 bp, Homo sapiens
tacgacccatcagcccttgcgcgccaccgtcccttctctcttcctcggcgctgcctacggaggtggcagccatctccttctcggcatcatggccgccctcagaccccttgtgaagcccaagatcgtcaaaaagagaaccaagaagttcatccggcaccagtcagaccgatatgtcaaaattaagcgtaactggcggaaacccagaggcattgacaacagggttcgtagaagattcaagggccagatcttgatgcccaacattggttatggaagcaacaaaaaaacaaagcacatgctgcccagtggcttccggaagttcctggtccacaacgtcaaggagctggaagtgctgctgatgtgcaacaaatcttactgtgccgagatcgctcacaatgtttcctccaagaaccgcaaagccatcgtggaaagagctgcccaactggccatcagagtcaccaaccccaatgccaggctgcgcagtgaagaaaatgagtaggcagctcatgtgcacgttttctgtttaaataaatgtaaaaactgccaaaaaataaatataaaattctaactttcttatctgcctacactaaatcaaatctttcaaattcataacattcttatatataaaaacctcgaggtgggcccggcaccaatttgcctatgtgagtcgattacattaattgccgtcgtttacaacgttggactggaaaaccgttggtacccaattaaacgcttgaagaataccccttctccagctggggaaaagcaaaagccgtacggaggcctttca

SEQ ID NO: 322932 - DNA, 310 bp, Homo sapiens
  misc_feature (26)..(27): n is a, c, g, or t
gcgcccctactactactaaattaacnnacgctcgactggaagcaacaaaaaaacaaagcacatgctgcccagtggcttccggaagttcctggtccacaacgtcaaggagctggaagtgctgctgatgtgcaacaaatcttactgtgccgagatcgctcacaatgtttcctccaagaaccgcaaagccatcgtggaaagagctgcccaactggccatcagagtcaccaaccccaatgccaggctgcgcagtgaagaaaatgagtaggcagctcatgtgcacgttttctgtttaaataaatgtaaaaactgc

SEQ ID NO: 322933 - DNA, 437 bp, Homo sapiens
cttaggttttgcttgggaaactcaacttcttttcctctggagacggggcatctcactctgatttccttctgctatgacaaaacctttaatctgcaccttacaactcggggacaaatggggacaggaaggatcaagttgtagagagaaaaagaaaacaagagatatacattgtgatatattagggacactttcacagtcctgtcctctggatcacagacactgcacagaccttagggaatggcaggttcaagttccacttcttggtggggatgagaagggagagagagctagagggacaaagagaatgagaagacatgagttccgagatgacccaactggccatcagagtcaccaaccccaatgccaggctgcgcagtgaagaaaatgagtaggcagctcatgtgcacgttttctgtttaaataaatgtaaaaactgc

SEQ ID NO: 322934 - DNA, 1630 bp, Homo sapiens
tacgacccatcagcccttgcgcgccaccgtcccttctctcttcctcggcgctgcctacggaggtggcagccatctccttctcggcatcatggccgccctcagaccccttgtgaagcccaagatcgtcaaaaagagaaccaagaagttcatccggcaccagtcagaccgatatgtcaaaattaagcgtaactggcggaaacccagaggcattgacaacagggttcgtagaagattcaagggccagatcttgatgcccaacattggttatggaagcaacaaaaaaacaaagcacatgctgcccagtggcttccggaagttcctggtccacaacgtcaaggagctggaagtgctgctgatgtgcaacaaatcttactgtgccgagatcgctcacaatgtttcctccaagaaccgcaaagccatcgtggaaagagctgcccaactggccatcagagtcaccaaccccaatgccaggctgcgcagtgaagaaaatgagtaggcagctcatgtgcacgttttctgtttaaataaatgtaaaaactgccatctggcatcttccttccttgattttaagtcttcagcttcttggccaacttagtttgccacagagattgttcttttgcttaagcccctttggaatctcccatttggaggggatttgtaaaggacactcagtccttgaacaggggaatgtggcctcaagtgcacagactagccttagtcatctccagttgaggctgggtatgaggggtacagacttggccctcacaccaggtaggttctgagacacttgaagaagcttgtggctcccaagccacaagtagtcattcttagccttgcttttgtaaagttaggtgacaagttattccatgtgatgcttgtgagaattgagaaaatatgcatggaaatatccagatgaatttcttacacagattcttacgggatgcctaaattgcatcctgtaacttctgtccaaaaagaacaggatgatgtacaaattgctcttccaggtaatccaccacggttaactggaaaagcactttcagtctcctataaccctcccaccagctgctgcttcaggtataatgttacagcagtttgccaaggcggggacctaactggtgacaattgagcctcttgactggtactcagaatttagtgacacgtggtcctgattttttttggagacggggtcttgctctcacccaggctgggagtgcagtggcacactgactacagccttgacctccccaggctcaggtgatcttcccacctcagccttccaagtagctgggactacagatgcacacctccaaacctgggtagtttttgaagtttttttgtagaggtggtctagccatgttgcctaggctcccgaactcctgagctcaagcaatcctgcttcagcctcccaaagtactgggattacaggcatcttctgtagtatataggtcatgagggatatgggatgtggtacttatgagacagaaatgcttacaggatgtttttctgtaaccatcctggtcaacttagcagaaatgctgcgctgggtataataaagcttttctacttctagtctagacaggaatcttacagattgtctcctgttcaaaacctagtcataaatatttat

SEQ ID NO: 322935 - DNA, 760 bp, Homo sapiens
tacgacccatcagcccttgcgcgccaccgtcccttctctcttcctcggcgctgcctacggaggtggcagccatctccttctcggcatcatggccgccctcagaccccttgtgaagcccaagatcgtcaaaaagagaaccaagaagttcatccggcaccagtcagaccgatatgtcaaaattaagcgtaactggcggaaacccagaggcattgacaacagggttcgtagaagattcaagggccagatcttgatgcccaacattggttatggaagcaacaaaaaaacaaagcacatgctgcccagtggcttccggaagttcctggtccacaacgtcaaggagctggaagtgctgctgatgtgcaacaaatcttactgtgccgagatcgctcacaatgtttcctccaagaaccgcaaagccatcgtggaaagagctgcccaactggccatcagagtcaccaaccccaatgccaggctgcgcagtgaagaaaatgagtaggcagctcatgtgcacgttttctgtttaaataaatgtaaaaactgccatctggcatcttccttccttgacaaaaaaaaaaaaaaaaaaaaaaaaattgggggcattaaggggggggggggaaaagggggaaaggacaggggccaagggcgcaaacgggagtcccgggacccagtttcttggcacaagggggcaaactcggcgagtccccaatagggagccgaataactcgaaaaacccggtaccggatagaaacccccaaaaagt

SEQ ID NO: 322936 - DNA, 616 bp, Homo sapiens
tacgacccatcagcccttgcgcgccaccgtcccttctctcttcctcggcgctgcctacggaggtggcagccatctccttctcggcatcatggccgccctcagaccccttgtgaagcccaagatcgtcaaaaagagaaccaagaagttcatccggcaccagtcagaccgatatgtcaaaattaagcgtaactggcggaaacccagaggcattgacaacagggttcgtagaagattcaagggccagatcttgatgcccaacattggttatggaagcaacaaaaaaacaaagcacatgctgcccagtggcttccggaagttcctggtccacaacgtcaaggagctggaagtgctgctgatgtgcaacaaatcttactgtgccgagatcgctcacaatgtttcctccaagaaccgcaaagccatcgtggaaagagctgcccaactggccatcagagtcaccaaccccaatgccaggctgcgcagtgaagaaaatgagtaggcagctcatgtgcacgttttctgtttaaataaatgtaaaaactgccatctggcatcttccttccttgaaaaaaaaaaagtcgacgcggccgcgaatttagtagtagtagtaggcggccgc

SEQ ID NO: 322937 - DNA, 1314 bp, Homo sapiens
  misc_feature (1314)..(1314): n is a, c, g, or t
tacgacccatcagcccttgcgcgccaccgtcccttctctcttcctcggcgctgcctacggaggtggcagccatctccttctcggcatcatggccgccctcagaccccttgtgaagcccaagatcgtcaaaaagagaaccaagaagttcatccggcaccagtcagaccgatatgtcaaaattaagcgtaactggcggaaacccagaggcattgacaacagggttcgtagaagattcaagggccagatcttgatgcccaacattggttatggaagcaacaaaaaaacaaagcacatgctgcccagtggcttccggaagttcctggtccacaacgtcaaggagctggaagtgctgctgatgtgcaacaaatcttactgtgccgagatcgctcacaatgtttcctccaagaaccgcaaagccatcgtggaaagagctgcccaactggccatcagagtcaccaaccccaatgccaggctgcgcagtgaagaaaatgagtaggcagctcatgtgcacgttttctgtttaaataaatgtaaaaactgccaaaaaaaaaaaaaaaaaaaaaaaaaaaaaaaacaaaaaaaaaaaaaaaaaacaaaaacaaaaacaaaaaaaaaaaaaaaaaaaaaaaaaaaaaaggggggggggggggctagacctcccgggggggccaaaaattaccgccaccccaatatttaataaacacagggggcctcacagatagagtgtcatatatatatacagagcagacggggagccgtatataaaaccgtgtgtgatcggcaaaacccatgtgctcaagccatgccactcttttgagcaagccaaccttcttttgggagagccacacaaattaagggcaacacccatccaacacgaaataaaaaacacaccacaagacaaataaaacgatagatataatgatgggaacgacacactcgagagcaatctggaagacgagtgagaatatctcttcggacaacgacgtatctctagaagcaacattatacacgggcgcctcctctgtctatactaccaacacgaaccaacagcaactgaaacaacacaaacccacgcgggagtgccgaggcggggcctgagcggcgggcggacgggggtggaaagcaggcaggagccaacaagaaggccaaacgccccccggcggggcgacacacaagacgaggttagaggaggagagatgcaagaagaaaatatggagagagggacatgagaagaagcaggaggcagatgaaggagagcgaaagaggaacaaggaagagagtcgggaaaagggggaagcaaacaaaagacgaacn

SEQ ID NO: 322938 - DNA, 1867 bp, Homo sapiens
acgccgggtttttccaagtcagacgtttgtaaaacgcgggccggttaattgaaaaacgactcccaaaagggcgaattgggaacgggccccccctcggtcccaattcggcacgagcttcctcggcgctgcctacggaggtggcagccatctccttctcggtaagtgttaatccgtggcaatccgcattcctgcgggattcatctggccccgtcgcccagtggtgcggaggcctccccttcagcgcggtagtgtctgtgggtattgttattgtcagcttactggagcgtgtacaggaacagaacgaagccgccgagttgatagggctttgcgtcccagagcctcctgccctccgcctgtattcagagctgcgggctgcttgtttgttccttggcggtggagggtgctagttgaggccagacttcggggtctcctgggggccgtgggacgaccaggggtggcccagcttgacagctttcagctgggatctgtggatcccagcgctcaccaatgtcggcccacgtgtattcgttcatgccatggccggcttcttccgctgcagtctctggcccgagggctgctgctgcgggaccgccaaggaaagacgagctgtaggtcggctggtccagctgcaggcagaaattctggtagtatctctgggaatatgaagatgcaactgcccccaccttgccttcgaggatatcatgggccagaaggcagagtcgttttgaatacgtggttcattgagtacccactctgggccagttgatggctgcgaagagagcagaaggggtgctgctgtaggaaatcaatggctcggaagaccacactgaggaaggtgtgagttgatactggaagatctccaggtttgaggcatcttcagaggtatatggtggttttgtgtgtgttgagggtgtggtagcgcagcagctccctagggaattagaaggttttattgaacatttaccctgtgacaggcactgcaggcattcagcgcgcagtgtcatcttcattttacaggtgaggaaaagactcaggttcaagtagatggtcaaggccagtactaccggaaggaccatctgggggttcggacactggtggggtgggatttgctgccccttgcaaattgagagtgtcttggggtcagttttgatttgctcagctgttggcattctttgggctctgagtgggtgaggtgacccttgacctcctgggatcgcatctggagagtgcctagtattctgccagcttcggaaagggagggaaagcaagcctggcagaggcacccattccattcccagcttgctccgtagctggcgattggaagacactctgcgacagtgttcagtccctgggcaggaaagcctccttccaggattcttcctcacctggggccgcttcttccccaaaaggcatcatggccgccctcagaccccttgtgaagcccaagatcgtcaaaaagagaaccaagaagttcatccggcaccagtcagaccgatatgtcaaaattaagcgtaactggcggaaacccagaggcattgacaacagggttcgtagaagattcaagggccagatcttgatgcccaacattggttatggaagcaacaaaaaaacaaagcacatgctgcccagtggcttccggaagttcctggtccacaacgtcaaggagctggaagtgctgctgatgtgcaacaaatcttactgtgccgagatcgctcacaatgtttcctccaagaaccgcaaagccatcgtggaaagagctgcccaactggccatcagagtcaccaaccccaatgccaggctgcgcagtgaagaaaatgagtaggcagctcatgtgcacgttttctgtttaaataaatgtaaaaactgc

SEQ ID NO: 322939 - DNA, 1305 bp, Homo sapiens
  misc_feature (7)..(7): n is a, c, g, or t
  misc_feature (30)..(30): n is a, c, g, or t
  misc_feature (1305)..(1305): n is a, c, g, or t
aaaaatnggctaggtacgaggccggtggtncttcctcggcgctgcctacggaggtggcagccatctccttctcggcatcatggccgccctcagaccccttgtgaagcccaagatcgtcaaaaagagaaccaagaagttcatccggcaccagtcagaccgatatgtcaaaattaagcgtaactggcggaaacccagaggcattgacaacagggttcgtagaagattcaagggccagatcttgatgcccaacattggttatggaagcaacaaaaaaacaaagcacatgctgcccagtggcttccggaagttcctggtccacaacgtcaaggagctggaagtgctgctgatgtgcaacaaatcttactgtgccgagatcgctcacaatgtttcctccaagaaccgcaaagccatcgtggaaagagctgcccaactggccatcagagtcaccaaccccaatgccaggctgcgcagtgaagaaaatgagtaggcagctcatgtgcacgttttctgtttaaataaatgtaaaaactgccaaaaaaaaaaaaaaaaaaaaaaaaaaaaaaaacaaaaaaaaaaaaaaaaaacaaaaacaaaaacaaaaaaaaaaaaaaaaaaaaaaaaaaaaaaggggggggggggggctagacctcccgggggggccaaaaattaccgccaccccaatatttaataaacacagggggcctcacagatagagtgtcatatatatatacagagcagacggggagccgtatataaaaccgtgtgtgatcggcaaaacccatgtgctcaagccatgccactcttttgagcaagccaaccttcttttgggagagccacacaaattaagggcaacacccatccaacacgaaataaaaaacacaccacaagacaaataaaacgatagatataatgatgggaacgacacactcgagagcaatctggaagacgagtgagaatatctcttcggacaacgacgtatctctagaagcaacattatacacgggcgcctcctctgtctatactaccaacacgaaccaacagcaactgaaacaacacaaacccacgcgggagtgccgaggcggggcctgagcggcgggcggacgggggtggaaagcaggcaggagccaacaagaaggccaaacgccccccggcggggcgacacacaagacgaggttagaggaggagagatgcaagaagaaaatatggagagagggacatgagaagaagcaggaggcagatgaaggagagcgaaagaggaacaaggaagagagtcgggaaaagggggaagcaaacaaaagacgaacn

SEQ ID NO: 322940 - DNA, 1132 bp, Homo sapiens
  misc_feature (644)..(645): n is a, c, g, or t
  misc_feature (651)..(651): n is a, c, g, or t
  misc_feature (654)..(655): n is a, c, g, or t
  misc_feature (699)..(699): n is a, c, g, or t
  misc_feature (701)..(701): n is a, c, g, or t
  misc_feature (797)..(797): n is a, c, g, or t
  misc_feature (1028)..(1028): n is a, c, g, or t
tacgacccatcagcccttgcgcgccaccgtcccttctctcttcctcggcgctgcctacggaggtggcagccatctccttctcggcatcatggccgccctcagaccccttgtgaagcccaagatcgtcaaaaagagaaccaagaagttcatccggcaccagtcagaccgatatgtcaaaattaagcgtaactggcggaaacccagaggcattgacaacagggttcgtagaagattcaagggccagatcttgatgcccaacattggttatggaagcaacaaaaaaacaaagcacatgctgcccagtggcttccggaagttcctggtccacaacgtcaaggagctggaagtgctgctgatgtgcaacaaatcttactgtgccgagatcgctcacaatgtttcctccaagaaccgcaaagccatcgtggaaagagctgcccaactggccatcagagtcaccaaccccaatgccaggctgcgcagtgaagaaaatgagtaggcagctcatgtgcacgttttctgtttaaataaatgtaaaaactgccaaaaaaaaaaaaaaaaaaaaaaaaaaaaaaaacaaaaaaaaaaaaaaaaaaaaaaaaaaaaaaaaaaaaaaaaaaaaaaaaaaaaaaaaaaaaaaaaaaaanntttaanaannatttaaaaaaataaaatttttttttttataacctttttccccantncctttttaatttcaaaattttttttttcccccccaaattttcactttatattccaattccccccttttaaaaaccttttaaaataaaaaacccccncttttcccaaactaatacctggaaaaccccttcctttccccaatttaaacctttttaaaaaaaaccccctttccaaaattcttataaaaaaaaaaagcccccaaaattccccttttacaaaaattgcaaatttttatttaaaaattcaatttaaaccctttatattttttaaaattttacccaaaattttttaaaaaaaaatatttttttaaacccaaagacccaaccccnaaaatcttcttatattaaaaaaattacaccaaaaaccccttttttttttcccctttttaaccaaaaacccttttataactttttctcccactcctccccttttt

SEQ ID NO: 322941 - DNA, 1051 bp, Homo sapiens
tacgacccatcagcccttgcgcgccaccgtcccttctctcttcctcggcgctgcctacggaggtggcagccatctccttctcggcatcatggccgccctcagaccccttgtgaagcccaagatcgtcaaaaagagaaccaagaagttcatccggcaccagtcagaccgatatgtcaaaattaagcgtaactggcggaaacccagaggcattgacaacagggttcgtagaagattcaagggccagatcttgatgcccaacattggttatggaagcaacaaaaaaacaaagcacatgctgcccagtggcttccggaagttcctggtccacaacgtcaaggagctggaagtgctgctgatgtgcaacaaatcttactgtgccgagatcgctcacaatgtttcctccaagaaccgcaaagccatcgtggaaagagctgcccaactggccatcagagtcaccaaccccaatgccaggctgcgcagtgaagaaaatgagtaggcagctcatgtgcacgttttctgtttaaataaatgtaaaaactgccaaaaaaaaaaaaaaaaaaaaaaaaacaaaaaaaaaaaaaaaaaaaaaaaaaagacgcgggggacttttttgggggggggggaaaaaggaggttgttaaggggcaggggcaagtgtccgggacccccttttttttgcagggggggacaatggggagggcccccaaaaggagagggggcgaataaatttcaaaacggcgggtacccgcaaaataaacaggagagcaaaaagaaggccgaagaggcccgacacggcaccgcggagccaaaacgggggggcccacccggcaccacggcagggcggacgagacaaacgcgacccggcgacagacacagcacgccccaaccagaacaaacagcgagagacggaacacaaacagcaccacacgaccgcgaaaagcagacccgccaccaccaaagacaacagcacgcggaaccgacaccgcggacaggcaacaacacgaagagcaacgagcacccaaccccgagccacgcagccacacgcgcagacg

SEQ ID NO: 322942 - DNA, 949 bp, Homo sapiens
tacgacccatcagcccttgcgcgccaccgtcccttctctcttcctcggcgctgcctacggaggtggcagccatctccttctcggcatcatggccgccctcagaccccttgtgaagcccaagatcgtcaaaaagagaaccaagaagttcatccggcaccagtcagaccgatatgtcaaaattaagcgtaactggcggaaacccagaggcattgacaacagggttcgtagaagattcaagggccagatcttgatgcccaacattggttatggaagcaacaaaaaaacaaagcacatgctgcccagtggcttccggaagttcctggtccacaacgtcaaggagctggaagtgctgctgatgtgcaacaaatcttactgtgccgagatcgctcacaatgtttcctccaagaaccgcaaagccatcgtggaaagagctgcccaactggccatcagagtcaccaaccccaatgccaggctgcgcagtgaagaaaatgagtaggcagctcatgtgcacgttttctgtttaaataaatgtaaaaactgccaaaaaaaaaaaaaaaaaaaaaaaaaaaaaaaaaaaacccgcggggacaaatattcggggggggcggaaaaaaggggaaaaaaaggggcccggggccaaaggggaacccggagccccaatttttgggtaacagggggcgcaaacatctcgcgcggggacccccaaaagaggagagcgcgagcaaaattcccggaaaacccagggtacccgggtaagaacaccagcacacaacccccaaaacaaaaccacgcagaaaaaacgggaaacacaaagaacacaggaaagaaaaaaaagaaagaaacaacacaccaacggggaaagcaaacgggcagaaaaacccaaaaaaaacacagacaccccccgcggagacaaaaacgacaccaacaagacccacacaaccaccacaac

SEQ ID NO: 322943 - DNA, 840 bp, Homo sapiens
tacgacccatcagcccttgcgcgccaccgtcccttctctcttcctcggcgctgcctacggaggtggcagccatctccttctcggcatcatggccgccctcagaccccttgtgaagcccaagatcgtcaaaaagagaaccaagaagttcatccggcaccagtcagaccgatatgtcaaaattaagcgtaactggcggaaacccagaggcattgacaacagggttcgtagaagattcaagggccagatcttgatgcccaacattggttatggaagcaacaaaaaaacaaagcacatgctgcccagtggcttccggaagttcctggtccacaacgtcaaggagctggaagtgctgctgatgtgcaacaaatcttactgtgccgagatcgctcacaatgtttcctccaagaaccgcaaagccatcgtggaaagagctgcccaactggccatcagagtcaccaaccccaatgccaggctgcgcagtgaagaaaatgagtaggcagctcatgtgcacgttttctgtttaaataaatgtaaaaactgccctagtataacaaaaactaatcgtcaagacagatatacttgttagggcccggttgggccctaaagaaagatttttaaaagactcacggtacggcggcgagcgggccctgagaggacctgtcgaccttgcgccagaacccggctccaaaagagaacccccgggcacagacggagcgcgcgaatctcccccgttgaaaaaacgccccggggaacccgacgctgctgaacaaccacaaaaggggtccggagagccacacacgggacaccacacaccagggtcccaggagctccaatcattca

SEQ ID NO: 322944 - DNA, 1484 bp, Homo sapiens
  misc_feature (26)..(27): n is a, c, g, or t
gcgcccctactactactaaattaacnnacgctcgacagcgtaactggcggaaacccagaggcattgacaacagggttcgtagaagattcaagggccagatcttgatgcccaacattggttatggaagcaacaaaaaaacaaagcacatgctgcccagtggcttccggaagttcctggtccacaacgtcaaggagctggaagtgctgctgatgtgcaacaaatcttactgtgccgagatcgctcacaatgtttcctccaagaaccgcaaagccatcgtggaaagagctgcccaactggccatcagagtcaccaaccccaatgccaggctgcgcagtgaagaaaatgagtaggcagctcatgtgcacgttttctgtttaaataaatgtaaaaactgccatctggcatcttccttccttgattttaagtcttcagcttcttggccaacttagtttgccacagagattgttcttttgcttaagcccctttggaatctcccatttggaggggatttgtaaaggacactcagtccttgaacaggggaatgtggcctcaagtgcacagactagccttagtcatctccagttgaggctgggtatgaggggtacagacttggccctcacaccaggtaggttctgagacacttgaagaagcttgtggctcccaagccacaagtagtcattcttagccttgcttttgtaaagttaggtgacaagttattccatgtgatgcttgtgagaattgagaaaatatgcatggaaatatccagatgaatttcttacacagattcttacgggatgcctaaattgcatcctgtaacttctgtccaaaaagaacaggatgatgtacaaattgctcttccaggtaatccaccacggttaactggaaaagcactttcagtctcctataaccctcccaccagctgctgcttcaggtataatgttacagcagtttgccaaggcggggacctaactggtgacaattgagcctcttgactggtactcagaatttagtgacacgtggtcctgattttttttggagacggggtcttgctctcacccaggctgggagtgcagtggcacactgactacagccttgacctccccaggctcaggtgatcttcccacctcagccttccaagtagctgggactacagatgcacacctccaaacctgggtagtttttgaagtttttttgtagaggtggtctagccatgttgcctaggctcccgaactcctgagctcaagcaatcctgcttcagcctcccaaagtactgggattacaggcatcttctgtagtatataggtcatgagggatatgggatgtggtacttatgagacagaaatgcttacaggatgtttttctgtaaccatcctggtcaacttagcagaaatgctgcgctgggtataataaagcttttctacttctagtctagacaggaatcttacagattgtctcctgttcaaaacctagtcataaatatttat

SEQ ID NO: 322945 - DNA, 1544 bp, Homo sapiens
tcaggggcgcgccccggcgcgccgccggggcgggccgccccgccccggggcgcccgccgccgcgaggcccgcgccaccggcgccggcgccgacgccgccgcggcgccgcggcggcacccgggggccgccgcagggttcgtagaagattcaagggccagatcttgatgcccaacattggttatggaagcaacaaaaaaacaaagcacatgctgcccagtggcttccggaagttcctggtccacaacgtcaaggagctggaagtgctgctgatgtgcaacaaatcttactgtgccgagatcgctcacaatgtttcctccaagaaccgcaaagccatcgtggaaagagctgcccaactggccatcagagtcaccaaccccaatgccaggctgcgcagtgaagaaaatgagtaggcagctcatgtgcacgttttctgtttaaataaatgtaaaaactgccatctggcatcttccttccttgattttaagtcttcagcttcttggccaacttagtttgccacagagattgttcttttgcttaagcccctttggaatctcccatttggaggggatttgtaaaggacactcagtccttgaacaggggaatgtggcctcaagtgcacagactagccttagtcatctccagttgaggctgggtatgaggggtacagacttggccctcacaccaggtaggttctgagacacttgaagaagcttgtggctcccaagccacaagtagtcattcttagccttgcttttgtaaagttaggtgacaagttattccatgtgatgcttgtgagaattgagaaaatatgcatggaaatatccagatgaatttcttacacagattcttacgggatgcctaaattgcatcctgtaacttctgtccaaaaagaacaggatgatgtacaaattgctcttccaggtaatccaccacggttaactggaaaagcactttcagtctcctataaccctcccaccagctgctgcttcaggtataatgttacagcagtttgccaaggcggggacctaactggtgacaattgagcctcttgactggtactcagaatttagtgacacgtggtcctgattttttttggagacggggtcttgctctcacccaggctgggagtgcagtggcacactgactacagccttgacctccccaggctcaggtgatcttcccacctcagccttccaagtagctgggactacagatgcacacctccaaacctgggtagtttttgaagtttttttgtagaggtggtctagccatgttgcctaggctcccgaactcctgagctcaagcaatcctgcttcagcctcccaaagtactgggattacaggcatcttctgtagtatataggtcatgagggatatgggatgtggtacttatgagacagaaatgcttacaggatgtttttctgtaaccatcctggtcaacttagcagaaatgctgcgctgggtataataaagcttttctacttctagtctagacaggaatcttacagattgtctcctgttcaaaacctagtcataaatatttat

SEQ ID NO: 322946 - DNA, 1637 bp, Homo sapiens
acgccgggtttttccaagtcagacgtttgtaaaacgcgggccggttaattgaaaaacgactcccaaaagggcgaattgggaacgggccccccctcggtcccaattcggcacgagcttcctcggcgctgcctacggaggtggcagccatctccttctcggcatcatggccgccctcagaccccttgtgaagcccaagatcgtcaaaaagagaaccaagaagttcatccggcaccagtcagaccgatatgtcaaaattaagcgtaactggcggaaacccagaggcattgacaacagggttcgtagaagattcaagggccagatcttgatgcccaacattggttaaggagctggaagtgctgctgatgtgcaacaaatcttactgtgccgagatcgctcacaatgtttcctccaagaaccgcaaagccatcgtggaaagagctgcccaactggccatcagagtcaccaaccccaatgccaggctgcgcagtgaagaaaatgagtaggcagctcatgtgcacgttttctgtttaaataaatgtaaaaactgccatctggcatcttccttccttgattttaagtcttcagcttcttggccaacttagtttgccacagagattgttcttttgcttaagcccctttggaatctcccatttggaggggatttgtaaaggacactcagtccttgaacaggggaatgtggcctcaagtgcacagactagccttagtcatctccagttgaggctgggtatgaggggtacagacttggccctcacaccaggtaggttctgagacacttgaagaagcttgtggctcccaagccacaagtagtcattcttagccttgcttttgtaaagttaggtgacaagttattccatgtgatgcttgtgagaattgagaaaatatgcatggaaatatccagatgaatttcttacacagattcttacgggatgcctaaattgcatcctgtaacttctgtccaaaaagaacaggatgatgtacaaattgctcttccaggtaatccaccacggttaactggaaaagcactttcagtctcctataaccctcccaccagctgctgcttcaggtataatgttacagcagtttgccaaggcggggacctaactggtgacaattgagcctcttgactggtactcagaatttagtgacacgtggtcctgattttttttggagacggggtcttgctctcacccaggctgggagtgcagtggcacactgactacagccttgacctccccaggctcaggtgatcttcccacctcagccttccaagtagctgggactacagatgcacacctccaaacctgggtagtttttgaagtttttttgtagaggtggtctagccatgttgcctaggctcccgaactcctgagctcaagcaatcctgcttcagcctcccaaagtactgggattacaggcatcttctgtagtatataggtcatgagggatatgggatgtggtacttatgagacagaaatgcttacaggatgtttttctgtaaccatcctggtcaacttagcagaaatgctgcgctgggtataataaagcttttctacttctagtctagacaggaatcttacagattgtctcctgttcaaaacctagtcataaatatttat

SEQ ID NO: 322947 - DNA, 1747 bp, Homo sapiens
acgccgggtttttccaagtcagacgtttgtaaaacgcgggccggttaattgaaaaacgactcccaaaagggcgaattgggaacgggccccccctcggtcccaattcggcacgagcttcctcggcgctgcctacggaggtggcagccatctccttctcggtaagtgttaatccgtggcaatccgcattcctgcgggattcatctggccccgtcgcccagtggtgcggaggcctccccttcagcgcggtagtgtctgtgggtattgttattgtcagcttactggagcgtgtacaggaacagaacgaagccgccgagttgatagggctttgcgtcccagagcctcctgccctccgcctgtattcagagctgcgggctgcttgtttgttccttggcggtggagggtgctagttgaggccagacttcggggtctcctgggggccgtgggacgaccaggggtggcccagcttgacagctttcagctgggatctgtggatcccagcgctcaccaatgtcggcccacgtgtattcgttcatgccatggccggcttcttccgctgcagtctctggcccgagggctgctgctgcgggaccgccaaggaaagacgagctgtaggtcggctggtccagctgcaggcagaaattctggtagtatctctgggaatatgaagatgcaactgcccccaccttgccttcgaggatatcatgggccagaaggcagagtcgttttgaatacgtggttcattgagtacccactctgggccagttgatggctgcgaagagagcagaaggggtgctgctgtaggaaatcaatggctcggaagaccacactgaggaaggtgtgagttgatactggaagatctccaggtttgaggcatcttcagaggtatatggtggttttgtgtgtgttgagggtgtggtagcgcagcagctccctagggaattagaaggttttattgaacatttaccctgtgacaggcactgcaggcattcagcgcgcagtgtcatcttcattttacaggtgaggaaaagactcaggttcaagtagatggtcaaggccagtactaccggaaggaccatctgggggttcggacactggtggggtgggatttgctgccccttgcaaattgagagtgtcttggggtcagttttgatttgctcagctgttggcattctttgggctctgagtgggtgaggtgacccttgacctcctgggatcgcatctggagagtgcctagtattctgccagcttcggaaagggagggaaagcaagcctggcagaggcacccattccattcccagcttgctccgtagctggcgattggaagacactctgcgacagtgttcagtccctgggcaggaaagcctccttccaggattcttcctcacctggggccgcttcttccccaaaaggcatcatggccgccctcagaccccttgtgaagcccaagatcgtcaaaaagagaaccaagaagttcatccggcaccagtcagaccgatatgtcaaaattaagcgtaactggcggaaacccagaggcattgacaacagggttcgtagaagattcaagggccagatcttgatgcccaacattggttatggaagcaacaaaaaaacaaagcacatgctgcccagtggcttccggaagttcctggtccacaacgtcaaggagctggaagtgctgctgatgtgcaacaaatcttactgtgccgagatcgctcacaatgtgcctttcggaaagagggcccaggtt

SEQ ID NO: 322948 - DNA, 457 bp, Homo sapiens
ataccagagaacagatggcttggcagggcctagcttccatccttgctttgtaacagttcaggagatcctgcctggctgtggccctgggaggccttctgtagtacttaagatattagttttagtattttggttaattttaggtgtagataatgctgtttcaccattttcgtctaaattcatccaattgaaaactaaaaacatttctatctgattaaacccttgatgactatattcttgtattctttatctgttagccaaactcatgtgcttggaatatgcagccgttcttttggctaaatttcactgggatagacttttttgaggcagggtctctctctgttgcccaggctggagtgcagtggcatgatcatggcttactgcggcctcaacttccagggctcaagcaatcctcctgccttagccttctgagtagctgggagactataggtgtgcacca

SEQ ID NO: 322949 - DNA, 7695 bp, Homo sapiens
  misc_feature (1)..(1): n is a, c, g, or t
  misc_feature (4)..(7): n is a, c, g, or t
  misc_feature (10)..(10): n is a, c, g, or t
ngcnnnngcngttcctcaaggcattcacggacttcctggccttcatggtcctctttaactacatcatccctgtgtccatgtacgtcacggtcgagatgcagaagttcctcggctcttacttcatcacctgggacgaagacatgtttgacgaggagactggcgaggggcctctggtgaacacgtcggacctcaatgaagagctgggacaggtggagtacatcttcacagacaagaccggcaccctcacggaaaacaacatggagttcaaggagtgctgcatcgaaggccatgtctacgtgccccacgtcatctgcaacgggcaggtcctcccagagtcgtcaggaatcgacatgattgactcgtcccccagcgtcaacgggagggagcgcgaggagctgtttttccgggccctctgtctctgccacaccgtccaggtgaaagacgatgacagcgtagacggccccaggaaatcgccggacggggggaaatcctgtgtgtacatctcatcctcgcccgacgaggtggcgctggtcgaaggtgtccagagacttggctttacctacctaaggctgaaggacaattacatggagatattaaacagggagaaccacatcgaaaggtttgaattgctggaaattttgagttttgactcagtcagaaggagaatgagtgtaattgtaaaatctgctacaggagaaatttatctgttttgcaaaggagcagattcttcgatattcccccgagtgatagaaggcaaagttgaccagatccgagccagagtggagcgtaacgcagtggaggggctccgaactttgtgtgttgcttataaaaggctgatccaagaagaatatgaaggcatttgtaagctgctgcaggctgccaaagtggcccttcaagatcgagagaaaaagttagcagaagcctatgagcaaatagagaaagatcttactctgcttggtgctacagctgttgaggaccggctgcaggagaaagctgcagacaccatcgaggccctgcagaaggccgggatcaaagtctgggttctcacgggagacaagatggagacggccgcggccacgtgctacgcctgcaagctcttccgcaggaacacgcagctgctggagctgaccaccaagaggatcgaggagcagagcctgcacgacgtcctgttcgagctgagcaagacggtcctgcgccacagcgggagcctgaccagagacaacctctccggactttcagcagatatgcaggactacggtttaattatcgacggagctgcactgtctctgataatgaagcctcgagaagacgggagttccggcaactacagggagctcttcctggaaatctgccggagctgcagcgcggtgctctgctgccgcatggcgcccttgcagaaggctcagattgttaaattaatcaaattttcaaaagagcacccaatcacgttagcaattggcgatggtgcaaatgatgtcagcatgattctggaagcgcacgtgggcataggtgtcatcggcaaggaaggccgccaggctgccaggaacagcgactatgcaatcccaaagtttaagcatttgaagaagatgctgcttgttcacgggcatttttattacattaggatctctgagctcgtgcagtacttcttctataagaacgtctgcttcatcttccctcagtttttataccagttcttctgtgggttttcacaacagactttgtacgacaccgcgtatctgaccctctacaacatcagcttcacctccctccccatcctcctgtacagcctcatggagcagcatgttggcattgacgtgctcaagagagacccgaccctgtacagggacgtcgccaagaatgccctgctgcgctggcgcgtgttcatctactggacgctcctgggactgtttgacgcactggtgttcttctttggtgcttatttcgtgtttgaaaatacaactgtgacaagcaacgggcagatatttggaaactggacgtttggaacgctggtattcaccgtgatggtgttcacagttacactaaagcttgcattggacacacactactggacttggatcaaccattttgtcatctgggggtcgctgctgttctacgttgtcttttcacttctctggggaggagtgatctggccgttcctcaactaccagaggatgtactacgtgttcatccagatgctgtccagcgggcccgcctggctggccatcgtgctgctggtgaccatcagcctccttcccgacgtcctcaagaaagtcctgtgccggcagctgtggccaacagcaacagagagagtccagactaagagccagtgcctttctgtcgagcagtcaaccatctttatgctttctcagacttccagcagcctgagtttctgatggaacaagagcccaggctaccagagcacctgtccctcggccgcctggtacagctcccactctcagcaggtgacactcgcggcctggaaggagaaggtgtccacggagcccccacccatcctcggcggttcccatcaccactgcagttccatcccaagtcacagctgccctaggtcccgtgtgggaatgctcgtgtgatggatggtcctaagcctgtggagactgtgcacgtgcctcttcctggcccccagcaggcaaggaggggggtcacaggccttgccctcgagcatggcaccctggccgcctggacccagcactgtggttgttgagccacaccagtggcctctgggcattcggctcaacgcaggagggacattctgctggcccaccctgcgcgctgtcatgcagaggccattcccccaggcctgtgtcttcacccacctgccgtcattggcctttgctgtcactgggagagaagagccgtccagggacccatggtggcccacatgtggatgccacatgctgctgtttcctgcttgcccggccaccacccatgccctccatagggtgaggtggagccatggtggtgcgtcctttactcaacaaccctccaatccggatgctgtgggaagggccgggtcactcggataccatcatccctgcggatgcaccgccgtaccctgctcatctgggagtggtttccctgcggttacgtccaagcccgcctgccctgtgtgttggggctggctgagtttcggtctccccatcaccggccgcctcgtggagaaggcagtgccacgtgggaggacaaggccacgccggcagcttccagccctgccgcagaagtgccaggatgtccatcagccactcgccagggcacggagccgtcagtccactgttacgggagaatgttgatttcgcgggtgcgagggccgggagacagatacttggctgtgatgagcagacatcctctgtccccgtggaggggtcaacaccaaggtggtgttcgtgcaccagaacctgtctcgggctgacgggggtggcacacaggacacgggtggatcccaacaggcagcaccgcacctccgcccgcctcccgcactgcagctccgcccgccgggctctgcgtctccacgtcccctcgtcccatccccacgtcccctcatcccgtcacctcgtccccacatccccttgccccgtcacctcgtcctcatgtccccttgtcctgtcacctcgtccccacgtcccctcgtctcatccccacgtcctctcgtccccttgtcccgtccccacataccctcgtccccatgtccccacgcagggctctccttcgtcttaggatctgtccagcgctgctctgggtgggttagcaaccccagggctgctgtgataggaagtccctgttgttctccgtactggcatttctatttctagaaataatatttgacatagccttaatggtccttaaagaagacatttcagtgtgagattcagacttcagacgctgaaactgctgcctttcaggaaagcaccaccaacgctggaggaggagccggccctcacgcccgccccgcgccacgctgtggaacggggctccggcaagtgaaacccagagggtgtttccgaggtgctcgacagtaggtatttttggaagctcagatttcaccatttgattgtataatcttttacctataaaatatttatttgaagtagagggtaaatcagcggtaagaacagtgaacacagtggttgggataaaataaggtgacaaacatcacaccaaagatgagggtagcgagcaactggcttgagcagacagaacggggaagactccactctgtcccgaggggccagccgcaggcgtccccagggccaccctgccctgaggtccttgtgtggccgccctggcttggcagccctgcccacgctgcccccgcaaacaatggtgtgtgcgtttttacagccctttttaggaacccaatatgggcataaatgtaacacctgtagcgggggcagattctctgtatgttcagttaacaaattatttgtaatgtatttttttagaaatcttaaaattgcctttgcactgaagtattttcatagctgtttatatctcttttattcatttatttaacatactgtctaattttaaaaataggtttttaaagctttcatttttaagtttatgaaattttggccactttacatttagattctggtgagagttttgactgaatgttccaatctctgatgaatgcgaattttcagatttgattttattctctacacacacctcttcttttcttggtatttctggtggcagtgattagttgaacagcacatttaaggcacgataatttgctacactttttctttacaatttgttgcaatttcatctgctttctatgtttcattgttaattgccatccttcagccttaaaaatagaagattctcacgtgaaggtttagtaagttgggtcccagctctgcctgtgtggagatagtcaccatgtacctctgacaacaagttttagtgtgaaagtcactaaacttttacacactcccaaacgtctttttaaaaattgcttgggaaattattaaatgaatgtgcctgatgatttgaaatagacaaggggcacgagataaaaaagaaaaggatgagaagatcctcagtgaatgacgttgcagggtcttcatgcaattttccacctcgcagtagttagtatttacttgccttaaactaactttgaagcaagtaatgtcaactttgagcactttgttgagttttgaaaaatcttatttgttgctgcacaggttaataaattatcaatttgtaattcagcatgttggtcagagacacggtcactgattcacacccagtccctgccacagaccgtctcagacacgcacagtgggcctgctgcatgattcacacccagtccctgccacagaccgtctcagacacgcacagtgggcctgctgcatgattcacacccagtccctgccacagaccgtctcagacacgcacagtgggcctgctgcatgcgtgttacctggcttttggctccacgctcactcatagccatgtccacatgggggcttgcacacaggatcactcacatatgtacatgtacccaccacaaacgtgcaagctcctgcacacatgcatgcacacaaacgtgtacacaagtgtgagctcctacacgcatacacacacacacgtgtacatgcaccaaagcatgtgtgacctacagacatgcagaacatgcacgtgtacacataccacagacacgcgtgtgcatgctcctacacaatacatatgcacatatcatgaacagcgtaagttcctacacacggacgtgtgatacacatgcatgtacaggtaagcacacatgtacaagctcctacaggcttgctctcacacacgtgtatgcacagcagagagacgtatgagcttctactgcacacatgcacacacacacgcacacgtacattcactacaaacgtgcagcctcctgcacacgtgcacattcatgtgtacaccacaaatgagttcccagacgtgtaaacacacgtgcacacatcgtacacatgtgagctcccacacgtacacacagatgcacatggacacaccccaaacacgcacaggctcctacacacatgcacacacgtgtacaccacaaacgagctcccagacatgtaaacacacgtctcccacacgtgagctcccacacatgtacacatgcacatgtacgcaccacaaacacatgcgcaggctcctgcaggcgtgaatacacacatgcacacacatatacacacacgtgccacaaacaagtgcacactgtcctggtgtcctgcactgcatcctgcctccttgctgaggggcccctgtgagaggcctctggatgggcatgggaagatgggctccctggcccccagcccatgcctccctgggatgaagagtccccctcctggcagaatgtctgggctttgcagagcaggccccgggggtgaagtcgcagcttcacttacaccagctgctctgtgagcaaggcttggtgccctggacaaggcccttcccctttagggaggtccagcctcgcaagctgaaacctcccctcggctcagccctataccaggcggccacagcaggactggccacacccacgccgcacctcatccgtgcacgcgtcggagcacggccagccttccgccacgagccagctgggaagggccgcggccgcctaaagccccagtcaacccagcctgtgtctgagcagacagggcgaacaagcaggccacaccgtctcgagggaggaggccagatgcggccagcgtctccaacagggtgaccatccgctcggcttgctgagcgtttaaacaaatgtttagacaggctgtggggactcccctgagttgagccttggccaggggtccggtgctgtcgcgggaaacctccagccttgttcttcaaaccactcagctcatgtgttttgcactgactagtactgaataatacaaccactcttatttaatgttagtattatttatttgacaactcagtgtctaacagcttgatatgcaggtccttgcatcctacatttctttaggaagttacccatttgtaactttaaaaacaggaaaaatatcagttggcaaatgcaatcttttttttttttaagctaaaggtgggtgaactggaatgaaaatctttctgatgttgtgtctataagcagccttgatgggatatgttagaagtgtcatgaaagtgtgattctacttttgcagaaaaatctaaagatcaatttatatagctttattttttactttatcaaagtatacagaattttaatatgcatatattgtgtctgacttaaaattataatgtctgcgtcaccatttaaaatgtctgttcattatgtaatgtaataaaagaaggtcttcaaaaatgtatttaacatgaatggtatccatagttgtcatcatcataaatactggagtttatttttaaattattaaacatagtaggtgcattaacataaatcagtctccacacagtaacatttaactgataattcattaatcagctttgaaaaattaaattgttaattaaaccaatctaacatttcagtaaagtttattttgtatgcttctgtttttaacttttatttctgtagataaactgactggataatattatattggacttttctctagattatctaagcaggagacctgaatctgcttgcaataaagaataaaagtctgcttcagtttctttataaagaaactcacacaagtg

SEQ ID NO: 322950 - DNA, 7381 bp, Homo sapiens
  misc_feature (1)..(1): n is a, c, g, or t
  misc_feature (4)..(7): n is a, c, g, or t
  misc_feature (10)..(10): n is a, c, g, or t
ngcnnnngcngttcctcaaggcattcacggacttcctggccttcatggtcctctttaactacatcatccctgtgtccatgtacgtcacggtcgagatgcagaagttcctcggctcttacttcatcacctgggacgaagacatgtttgacgaggagactggcgaggggcctctggtgaacacgtcggacctcaatgaagagctgggacaggtggagtacatcttcacagacaagaccggcaccctcacggaaaacaacatggagttcaaggagtgctgcatcgaaggccatgtctacgtgccccacgtcatctgcaacgggcaggtcctcccagagtcgtcaggaatcgacatgattgactcgtcccccagcgtcaacgggagggagcgcgaggagctgtttttccgggccctctgtctctgccacaccgtccaggtgaaagacgatgacagcgtagacggccccaggaaatcgccggacggggggaaatcctgtgtgtacatctcatcctcgcccgacgaggtggcgctggtcgaaggtgtccagagacttggctttacctacctaaggctgaaggacaattacatggagatattaaacagggagaaccacatcgaaaggtttgaattgctggaaattttgagttttgactcagtcagaaggagaatgagtgtaattgtaaaatctgctacaggagaaatttatctgttttgcaaaggagcagattcttcgatattcccccgagtgatagaaggcaaagttgaccagatccgagccagagtggagcgtaacgcagtggaggggctccgaactttgtgtgttgcttataaaaggctgatccaagaagaatatgaaggcatttgtaagctgctgcaggctgccaaagtggcccttcaagatcgagagaaaaagttagcagaagcctatgagcaaatagagaaagatcttactctgcttggtgctacagctgttgaggaccggctgcaggagaaagctgcagacaccatcgaggccctgcagaaggccgggatcaaagtctgggttctcacgggagacaagatggagacggccgcggccacgtgctacgcctgcaagctcttccgcaggaacacgcagctgctggagctgaccaccaagaggatcgaggagcagagcctgcacgacgtcctgttcgagctgagcaagacggtcctgcgccacagcgggagcctgaccagagacaacctctccggactttcagcagatatgcaggactacggtttaattatcgacggagctgcactgtctctgataatgaagcctcgagaagacgggagttccggcaactacagggagctcttcctggaaatctgccggagctgcagcgcggtgctctgctgccgcatggcgcccttgcagaaggctcagattgttaaattaatcaaattttcaaaagagcacccaatcacgttagcaattggcgatggtgcaaatgatgtcagcatgattctggaagcgcacgtgggcataggtgtcatcggcaaggaaggccgccaggctgccaggaacagcgactatgcaatcccaaagtttaagcatttgaagaagatgctgcttgttcacgggcatttttattacattaggatctctgagctcgtgcagtacttcttctataagaacgtctgcttcatcttccctcagtttttataccagttcttctgtgggttttcacaacagggacgtcgccaagaatgccctgctgcgctggcgcgtgttcatctactggacgctcctgggactgtttgacgcactggtgttcttctttggtgcttatttcgtgtttgaaaatacaactgtgacaagcaacgggcagatatttggaaactggacgtttggaacgctggtattcaccgtgatggtgttcacagttacactaaagcttgcattggacacacactactggacttggatcaaccattttgtcatctgggggtcgctgctgttctacgttgtcttttcacttctctggggaggagtgatctggccgttcctcaactaccagaggatgtactacgtgttcatccagatgctgtccagcgggcccgcctggctggccatcgtgctgctggtgaccatcagcctccttcccgacgtcctcaagaaagtcctgtgccggcagctgtggccaacagcaacagagagagtccagactaagagccagtgcctttctgtcgagcagtcaaccatctttatgctttctcagacttccagcagcctgagtttctgatggaacaagagcccaggctaccagagcacctgtccctcggccgcctggtacagctcccactctcagcaggtgacactcgcggcctggaaggagaaggtgtccacggagcccccacccatcctcggcggttcccatcaccactgcagttccatcccaagtcacagctgccctaggtcccgtgtgggaatgctcgtgtgatggatggtcctaagcctgtggagactgtgcacgtgcctcttcctggcccccagcaggcaaggaggggggtcacaggccttgccctcgagcatggcaccctggccgcctggacccagcactgtggttgttgagccacaccagtggcctctgggcattcggctcaacgcaggagggacattctgctggcccaccctgcgcgctgtcatgcagaggccattcccccaggcctgtgtcttcacccacctgccgtcattggcctttgctgtcactgggagagaagagccgtccagggacccatggtggcccacatgtggatgccacatgctgctgtttcctgcttgcccggccaccacccatgccctccatagggtgaggtggagccatggtggtgcgtcctttactcaacaaccctccaatccggatgctgtgggaagggccgggtcactcggataccatcatccctgcggatgcaccgccgtaccctgctcatctgggagtggtttccctgcggttacgtccaagcccgcctgccctgtgtgttggggctggctgagtttcggtctccccatcaccggccgcctcgtggagaaggcagtgccacgtgggaggacaaggccacgccggcagcttccagccctgccgcagaagtgccaggatgtccatcagccactcgccagggcacggagccgtcagtccactgttacgggagaatgttgatttcgcgggtgcgagggccgggagacagatacttggctgtgatgagcagacatcctctgtccccgtggaggggtcaacaccaaggtggtgttcgtgcaccagaacctgtctcgggctgacgggggtggcacacaggacacgggtggatcccaacaggcagcaccgcacctccgcccgcctcccgcactgcagctccgcccgccgggctctgcgtctccacgtcccctcgtcccatccccacgtcccctcatcccgtcacctcgtccccacatccccttgccccgtcacctcgtcctcatgtccccttgtcctgtcacctcgtccccacgtcccctcgtctcatccccacgtcctctcgtccccttgtcccgtccccacataccctcgtccccatgtccccacgcagggctctccttcgtcttaggatctgtccagcgctgctctgggtgggttagcaaccccagggctgctgtgataggaagtccctgttgttctccgtactggcatttctatttctagaaataatatttgacatagccttaatggtccttaaagaagacatttcagtgtgagattcagacttcagacgctgaaactgctgcctttcaggaaagcaccaccaacgctggaggaggagccggccctcacgcccgccccgcgccacgctgtggaacggggctccggcaagtgaaacccagagggtgtttccgaggtgctcgacagtaggtatttttggaagctcagatttcaccatttgattgtataatcttttacctataaaatatttatttgaagtagagggtaaatcagcggtaagaacagtgaacacagtggttgggataaaataaggtgacaaacatcacaccaaagatgagggtagcgagcaactggcttgagcagacagaacggggaagactccactctgtcccgaggggccagccgcaggcgtccccagggccaccctgccctgaggtccttgtgtggccgccctggcttggcagccctgcccacgctgcccccgcaaacaatggtgtgtgcgtttttacagccctttttaggaacccaatatgggcataaatgtaacacctgtagcgggggcagattctctgtatgttcagttaacaaattatttgtaatgtatttttttagaaatcttaaaattgcctttgcactgaagtattttcatagctgtttatatctcttttattcatttatttaacatactgtctaattttaaaaataggtttttaaagctttcatttttaagtttatgaaattttggccactttacatttagattctggtgagagttttgactgaatgttccaatctctgatgaatgcgaattttcagatttgattttattctctacacacacctcttcttttcttggtatttctggtggcagtgattagttgaacagcacatttaaggcacgataatttgctacactttttctttacaatttgttgcaatttcatctgctttctatgtttcattgttaattgccatccttcagccttaaaaatagaagattctcacgtgaaggtttagtaagttgggtcccagctctgcctgtgtggagatagtcaccatgtacctctgacaacaagttttagtgtgaaagtcactaaacttttacacactcccaaacgtctttttaaaaattgcttgggaaattattaaatgaatgtgcctgatgatttgaaatagacaaggggcacgagataaaaaagaaaaggatgagaagatcctcagtgaatgacgttgcagggtcttcatgcaattttccacctcgcagtagttagtatttacttgccttaaactaactttgaagcaagtaatgtcaactttgagcactttgttgagttttgaaaaatcttatttgttgctgcacaggttaataaattatcaatttgtaattcagcatgttggtcagagacacggtcactgattcacacccagtccctgccacagaccgtctcagacacgcacagtgggcctgctgcatgattcacacccagtccctgccacagaccgtctcagacacgcacagtgggcctgctgcatgattcacacccagtccctgccacagaccgtctcagacacgcacagtgggcctgctgcatgcgtgttacctggcttttggctccacgctcactcatagccatgtccacatgggggcttgcacacaggatcactcacatatgtacatgtacccaccacaaacgtgcaagctcctgcacacatgcatgcacacaaacgtgtacacaagtgtgagctcctacacgcatacacacacacacgtgtacatgcaccaaagcatgtgtgacctacagacatgcagaacatgcacgtgtacacataccacagacacgcgtgtgcatgctcctacacaatacatatgcacatatcatgaacagcgtaagttcctacacacggacgtgtgatacacatgcatgtacaggtaagcacacatgtacaagctcctacaggcttgctctcacacacgtgtatgcacagcagagagacgtatgagcttctactgcacacatgcacacacacacgcacacgtacattcactacaaacgtgcagcctcctgcacacgtgcacattcatgtgtacaccacaaatgagttcccagacgtgtaaacacacgtgcacacatcgtacacatgtgagctcccacacgtacacacagatgcacatggacacaccccaaacacgcacaggctcctacacacatgcacacacgtgtacaccacaaacgagctcccagacatgtaaacacacgtctcccacacgtgagctcccacacatgtacacatgcacatgtacgcaccacaaacacatgcgcaggctcctgcaggcgtgaatacacacatgcacacacatatacacacacgtgccacaaacaagtgcacactgtcctggtgtcctgcactgcatcctgcctccttgctgaggggcccctgtgagaggcctctggatgggcatgggaagatgggctccctggcccccagcccatgcctccctgggatgaagagtccccctcctggcagaatgtctgggctttgcagagcaggccccgggggtgaagtcgcagcttcacttacaccagctgctctgtgagcaaggcttggtgccctggacaaggcccttcccctttagggaggtccagcctcgcaagctgaaacctcccctcggctcagccctataccaggcggccacagcaggactggccacacccacgccgcacctcatccgtgcacgcgtcggagcacggccagccttccgccacgagccagctgggaagggccgcggccgcctaaagccccagtcaacccagcctgtgtctgagcagacagggcgaacaagcaggccacaccgtctcgagggaggaggccagatgcggccagcgtctccaacagggtgaccatccgctcggcttgctgagcgtttaaacaaatgtttagacaggctgtggggactcccctgagttgagccttggccaggggtccggtgctgtcgcgggaaacctccagccttgttcttcaaaccactcagctcatgtgttttgcactgactagtactgaataatacaaccactcttatttaatgttagtattatttatttgacaactcagtgtctaacagcttgatatgcaggtccttgcatcctacatttctttaggaagttacccatttgtaactttaaaaacaggaaaaatatcagttggcaaatgcaatcttttttttttttaagctaaaggtgggtgaactggaatgaaaatctttctgatgttgtgtctataagcagccttgatgggatatgttagaagtgtcatgaaagtgtgattctacttttgcagaaaaatctaaagatcaatttatatagctttattttttactttatcaaagtatacagaattttaatatgcatatattgtgtctgacttaaaattataatgtctgcgtcaccatttaaaatgtctgttcattatgtaatgtaataaaagaaggtcttcaaaaatgtatttaacatgaatggtatccatagttgtcatcatcataaatactggagtttatttttaaattattaaacatagtaggtgcattaacataaatcagtctccacacagtaacatttaactgataattcattaatcagctttgaaaaattaaattgttaattaaacc

SEQ ID NO: 322951 - DNA, 7482 bp, Homo sapiens
  misc_feature (1)..(1): n is a, c, g, or t
  misc_feature (4)..(7): n is a, c, g, or t
  misc_feature (10)..(10): n is a, c, g, or t
ngcnnnngcngttcctcaaggcattcacggacttcctggccttcatggtcctctttaactacatcatccctgtgtccatgtacgtcacggtcgagatgcagaagttcctcggctcttacttcatcacctgggacgaagacatgtttgacgaggagactggcgaggggcctctggtgaacacgtcggacctcaatgaagagctgggacaggtggagtacatcttcacagacaagaccggcaccctcacggaaaacaacatggagttcaaggagtgctgcatcgaaggccatgtctacgtgccccacgtcatctgcaacgggcaggtcctcccagagtcgtcaggaatcgacatgattgactcgtcccccagcgtcaacgggagggagcgcgaggagctgtttttccgggccctctgtctctgccacaccgtccaggtgaaagacgatgacagcgtagacggccccaggaaatcgccggacggggggaaatcctgtgtgtacatctcatcctcgcccgacgaggtggcgctggtcgaaggtgtccagagacttggctttacctacctaaggctgaaggacaattacatggagatattaaacagggagaaccacatcgaaaggtttgaattgctggaaattttgagttttgactcagtcagaaggagaatgagtgtaattgtaaaatctgctacaggagaaatttatctgttttgcaaaggagcagattcttcgatattcccccgagtgatagaaggcaaagttgaccagatccgagccagagtggagcgtaacgcagtggaggggctccgaactttgtgtgttgcttataaaaggctgatccaagaagaatatgaaggcatttgtaagctgctgcaggctgccaaagtggcccttcaagatcgagagaaaaagttagcagaagcctatgagcaaatagagaaagatcttactctgcttggtgctacagctgttgaggaccggctgcaggagaaagctgcagacaccatcgaggccctgcagaaggccgggatcaaagtctgggttctcacgggagacaagatggagacggccgcggccacgtgctacgcctgcaagctcttccgcaggaacacgcagctgctggagctgaccaccaagaggatcgaggagcagagcctgcacgacgtcctgttcgagctgagcaagacggtcctgcgccacagcgggagcctgaccagagacaacctctccggactttcagcagatatgcaggactacggtttaattatcgacggagctgcactgtctctgataatgaagcctcgagaagacgggagttccggcaactacagggagctcttcctggaaatctgccggagctgcagcgcggtgctctgctgccgcatggcgcccttgcagaaggctcagattgttaaattaatcaaattttcaaaagagcacccaatcacgttagcaattggcgatggtgcaaatgatgtcagcatgattctggaagcgcacgtgggcataggtgtcatcggcaaggaaggccgccaggctgccaggaacagcgactatgcaatcccaaagtttaagcatttgaagaagatgctgcttgttcacgggcatttttattacattaggatctctgagctcgtgcagtacttcttctataagaacgtctgcttcatcttccctcagtttttataccagttcttctgtgggttttcacaacagactttgtacgacaccgcgtatctgaccctctacaacatcagcttcacctccctccccatcctcctgtacagcctcatggagcagcatgttggcattgacgtgctcaagagagacccgaccctgtacagggacgtcgccaagaatgccctgctgcgctggcgcgtgttcatctactggacgctcctgggactgtttgacgcactggtgttcttctttggtgcttatttcgtgtttgaaaatacaactgtgacaagcaacgggcagatatttggaaactggacgtttggaacgctggtattcaccgtgatggtgttcacagttacactaaagcttgcattggacacacactactggacttggatcaaccattttgtcatctgggggtcgctgctgttctacgttgtcttttcacttctctggggaggagtgatctggccgttcctcaactaccagaggatgtactacgtgttcatccagatgctgtccagcgggcccgcctggctggccatcgtgctgctggtgaccatcagcctccttcccgacgtcctcaagaaagtcctgtgccggcagctgtggccaacagcaacagagagagtccagaatgggtgcgcacagcctcgggaccgcgactcagaattcacccctcttgcctctctgcagagcccaggctaccagagcacctgtccctcggccgcctggtacagctcccactctcagcaggtgacactcgcggcctggaaggagaaggtgtccacggagcccccacccatcctcggcggttcccatcaccactgcagttccatcccaagtcacagctgccctaggtcccgtgtgggaatgctcgtgtgatggatggtcctaagcctgtggagactgtgcacgtgcctcttcctggcccccagcaggcaaggaggggggtcacaggccttgccctcgagcatggcaccctggccgcctggacccagcactgtggttgttgagccacaccagtggcctctgggcattcggctcaacgcaggagggacattctgctggcccaccctgcgcgctgtcatgcagaggccattcccccaggcctgtgtcttcacccacctgccgtcattggcctttgctgtcactgggagagaagagccgtccagggacccatggtggcccacatgtggatgccacatgctgctgtttcctgcttgcccggccaccacccatgccctccatagggtgaggtggagccatggtggtgcgtcctttactcaacaaccctccaatccggatgctgtgggaagggccgggtcactcggataccatcatccctgcggatgcaccgccgtaccctgctcatctgggagtggtttccctgcggttacgtccaagcccgcctgccctgtgtgttggggctggctgagtttcggtctccccatcaccggccgcctcgtggagaaggcagtgccacgtgggaggacaaggccacgccggcagcttccagccctgccgcagaagtgccaggatgtccatcagccactcgccagggcacggagccgtcagtccactgttacgggagaatgttgatttcgcgggtgcgagggccgggagacagatacttggctgtgatgagcagacatcctctgtccccgtggaggggtcaacaccaaggtggtgttcgtgcaccagaacctgtctcgggctgacgggggtggcacacaggacacgggtggatcccaacaggcagcaccgcacctccgcccgcctcccgcactgcagctccgcccgccgggctctgcgtctccacgtcccctcgtcccatccccacgtcccctcatcccgtcacctcgtccccacatccccttgccccgtcacctcgtcctcatgtccccttgtcctgtcacctcgtccccacgtcccctcgtctcatccccacgtcctctcgtccccttgtcccgtccccacataccctcgtccccatgtccccacgcagggctctccttcgtcttaggatctgtccagcgctgctctgggtgggttagcaaccccagggctgctgtgataggaagtccctgttgttctccgtactggcatttctatttctagaaataatatttgacatagccttaatggtccttaaagaagacatttcagtgtgagattcagacttcagacgctgaaactgctgcctttcaggaaagcaccaccaacgctggaggaggagccggccctcacgcccgccccgcgccacgctgtggaacggggctccggcaagtgaaacccagagggtgtttccgaggtgctcgacagtaggtatttttggaagctcagatttcaccatttgattgtataatcttttacctataaaatatttatttgaagtagagggtaaatcagcggtaagaacagtgaacacagtggttgggataaaataaggtgacaaacatcacaccaaagatgagggtagcgagcaactggcttgagcagacagaacggggaagactccactctgtcccgaggggccagccgcaggcgtccccagggccaccctgccctgaggtccttgtgtggccgccctggcttggcagccctgcccacgctgcccccgcaaacaatggtgtgtgcgtttttacagccctttttaggaacccaatatgggcataaatgtaacacctgtagcgggggcagattctctgtatgttcagttaacaaattatttgtaatgtatttttttagaaatcttaaaattgcctttgcactgaagtattttcatagctgtttatatctcttttattcatttatttaacatactgtctaattttaaaaataggtttttaaagctttcatttttaagtttatgaaattttggccactttacatttagattctggtgagagttttgactgaatgttccaatctctgatgaatgcgaattttcagatttgattttattctctacacacacctcttcttttcttggtatttctggtggcagtgattagttgaacagcacatttaaggcacgataatttgctacactttttctttacaatttgttgcaatttcatctgctttctatgtttcattgttaattgccatccttcagccttaaaaatagaagattctcacgtgaaggtttagtaagttgggtcccagctctgcctgtgtggagatagtcaccatgtacctctgacaacaagttttagtgtgaaagtcactaaacttttacacactcccaaacgtctttttaaaaattgcttgggaaattattaaatgaatgtgcctgatgatttgaaatagacaaggggcacgagataaaaaagaaaaggatgagaagatcctcagtgaatgacgttgcagggtcttcatgcaattttccacctcgcagtagttagtatttacttgccttaaactaactttgaagcaagtaatgtcaactttgagcactttgttgagttttgaaaaatcttatttgttgctgcacaggttaataaattatcaatttgtaattcagcatgttggtcagagacacggtcactgattcacacccagtccctgccacagaccgtctcagacacgcacagtgggcctgctgcatgattcacacccagtccctgccacagaccgtctcagacacgcacagtgggcctgctgcatgattcacacccagtccctgccacagaccgtctcagacacgcacagtgggcctgctgcatgcgtgttacctggcttttggctccacgctcactcatagccatgtccacatgggggcttgcacacaggatcactcacatatgtacatgtacccaccacaaacgtgcaagctcctgcacacatgcatgcacacaaacgtgtacacaagtgtgagctcctacacgcatacacacacacacgtgtacatgcaccaaagcatgtgtgacctacagacatgcagaacatgcacgtgtacacataccacagacacgcgtgtgcatgctcctacacaatacatatgcacatatcatgaacagcgtaagttcctacacacggacgtgtgatacacatgcatgtacaggtaagcacacatgtacaagctcctacaggcttgctctcacacacgtgtatgcacagcagagagacgtatgagcttctactgcacacatgcacacacacacgcacacgtacattcactacaaacgtgcagcctcctgcacacgtgcacattcatgtgtacaccacaaatgagttcccagacgtgtaaacacacgtgcacacatcgtacacatgtgagctcccacacgtacacacagatgcacatggacacaccccaaacacgcacaggctcctacacacatgcacacacgtgtacaccacaaacgagctcccagacatgtaaacacacgtctcccacacgtgagctcccacacatgtacacatgcacatgtacgcaccacaaacacatgcgcaggctcctgcaggcgtgaatacacacatgcacacacatatacacacacgtgccacaaacaagtgcacactgtcctggtgtcctgcactgcatcctgcctccttgctgaggggcccctgtgagaggcctctggatgggcatgggaagatgggctccctggcccccagcccatgcctccctgggatgaagagtccccctcctggcagaatgtctgggctttgcagagcaggccccgggggtgaagtcgcagcttcacttacaccagctgctctgtgagcaaggcttggtgccctggacaaggcccttcccctttagggaggtccagcctcgcaagctgaaacctcccctcggctcagccctataccaggcggccacagcaggactggccacacccacgccgcacctcatccgtgcacgcgtcggagcacggccagccttccgccacgagccagctgggaagggccgcggccgcctaaagccccagtcaacccagcctgtgtctgagcagacagggcgaacaagcaggccacaccgtctcgagggaggaggccagatgcggccagcgtctccaacagggtgaccatccgctcggcttgctgagcgtttaaacaaatgtttagacaggctgtggggactcccctgagttgagccttggccaggggtccggtgctgtcgcgggaaacctccagccttgttcttcaaaccactcagctcatgtgttttgcactgactagtactgaataatacaaccactcttatttaatgttagtattatttatttgacaactcagtgtctaacagcttgatatgcaggtccttgcatcctacatttctttaggaagttacccatttgtaactttaaaaacaggaaaaatatcagttggcaaatgcaatcttttttttttttaagctaaaggtgggtgaactggaatgaaaatctttctgatgttgtgtctataagcagccttgatgggatatgttagaagtgtcatgaaagtgtgattctacttttgcagaaaaatctaaagatcaatttatatagctttattttttactttatcaaagtatacagaattttaatatgcatatattgtgtctgacttaaaattataatgtctgcgtcaccatttaaaatgtctgttcattatgtaatgtaataaaagaaggtcttcaaaaatgtatttaacatgaatggtatccatagttgtcatcatcataaatactggagtttatttttaaattattaaacatagtaggtgcattaacataaatcagtctccacacagtaacatttaactgataattcattaatcagctttgaaaaattaaattgttaattaaacc

SEQ ID NO: 322952 - DNA, 7300 bp, Homo sapiens
  misc_feature (1)..(1): n is a, c, g, or t
  misc_feature (4)..(7): n is a, c, g, or t
  misc_feature (10)..(10): n is a, c, g, or t
ngcnnnngcngttcctcaaggcattcacggacttcctggccttcatggtcctctttaactacatcatccctgtgtccatgtacgtcacggtcgagatgcagaagttcctcggctcttacttcatcacctgggacgaagacatgtttgacgaggagactggcgaggggcctctggtgaacacgtcggacctcaatgaagagctgggacaggtggagtacatcttcacagacaagaccggcaccctcacggaaaacaacatggagttcaaggagtgctgcatcgaaggccatgtctacgtgccccacgtcatctgcaacgggcaggtcctcccagagtcgtcaggaatcgacatgattgactcgtcccccagcgtcaacgggagggagcgcgaggagctgtttttccgggccctctgtctctgccacaccgtccaggtgaaagacgatgacagcgtagacggccccaggaaatcgccggacggggggaaatcctgtgtgtacatctcatcctcgcccgacgaggtggcgctggtcgaaggtgtccagagacttggctttacctacctaaggctgaaggacaattacatggagatattaaacagggagaaccacatcgaaaggtttgaattgctggaaattttgagttttgactcagtcagaaggagaatgagtgtaattgtaaaatctgctacaggagaaatttatctgttttgcaaaggagcagattcttcgatattcccccgagtgatagaaggcaaagttgaccagatccgagccagagtggagcgtaacgcagtggctgcaggagaaagctgcagacaccatcgaggccctgcagaaggccgggatcaaagtctgggttctcacgggagacaagatggagacggccgcggccacgtgctacgcctgcaagctcttccgcaggaacacgcagctgctggagctgaccaccaagaggatcgaggagcagagcctgcacgacgtcctgttcgagctgagcaagacggtcctgcgccacagcgggagcctgaccagagacaacctctccggactttcagcagatatgcaggactacggtttaattatcgacggagctgcactgtctctgataatgaagcctcgagaagacgggagttccggcaactacagggagctcttcctggaaatctgccggagctgcagcgcggtgctctgctgccgcatggcgcccttgcagaaggctcagattgttaaattaatcaaattttcaaaagagcacccaatcacgttagcaattggcgatggtgcaaatgatgtcagcatgattctggaagcgcacgtgggcataggtgtcatcggcaaggaaggccgccaggctgccaggaacagcgactatgcaatcccaaagtttaagcatttgaagaagatgctgcttgttcacgggcatttttattacattaggatctctgagctcgtgcagtacttcttctataagaacgtctgcttcatcttccctcagtttttataccagttcttctgtgggttttcacaacagactttgtacgacaccgcgtatctgaccctctacaacatcagcttcacctccctccccatcctcctgtacagcctcatggagcagcatgttggcattgacgtgctcaagagagacccgaccctgtacagggacgtcgccaagaatgccctgctgcgctggcgcgtgttcatctactggacgctcctgggactgtttgacgcactggtgttcttctttggtgcttatttcgtgtttgaaaatacaactgtgacaagcaacgggcagatatttggaaactggacgtttggaacgctggtattcaccgtgatggtgttcacagttacactaaagcttgcattggacacacactactggacttggatcaaccattttgtcatctgggggtcgctgctgttctacgttgtcttttcacttctctggggaggagtgatctggccgttcctcaactaccagaggatgtactacgtgttcatccagatgctgtccagcgggcccgcctggctggccatcgtgctgctggtgaccatcagcctccttcccgacgtcctcaagaaagtcctgtgccggcagctgtggccaacagcaacagagagagtccagaatgggtgcgcacagcctcgggaccgcgactcagaattcacccctcttgcctctctgcagagcccaggctaccagagcacctgtccctcggccgcctggtacagctcccactctcagcaggtgacactcgcggcctggaaggagaaggtgtccacggagcccccacccatcctcggcggttcccatcaccactgcagttccatcccaagtcacagctgccctaggtcccgtgtgggaatgctcgtgtgatggatggtcctaagcctgtggagactgtgcacgtgcctcttcctggcccccagcaggcaaggaggggggtcacaggccttgccctcgagcatggcaccctggccgcctggacccagcactgtggttgttgagccacaccagtggcctctgggcattcggctcaacgcaggagggacattctgctggcccaccctgcgcgctgtcatgcagaggccattcccccaggcctgtgtcttcacccacctgccgtcattggcctttgctgtcactgggagagaagagccgtccagggacccatggtggcccacatgtggatgccacatgctgctgtttcctgcttgcccggccaccacccatgccctccatagggtgaggtggagccatggtggtgcgtcctttactcaacaaccctccaatccggatgctgtgggaagggccgggtcactcggataccatcatccctgcggatgcaccgccgtaccctgctcatctgggagtggtttccctgcggttacgtccaagcccgcctgccctgtgtgttggggctggctgagtttcggtctccccatcaccggccgcctcgtggagaaggcagtgccacgtgggaggacaaggccacgccggcagcttccagccctgccgcagaagtgccaggatgtccatcagccactcgccagggcacggagccgtcagtccactgttacgggagaatgttgatttcgcgggtgcgagggccgggagacagatacttggctgtgatgagcagacatcctctgtccccgtggaggggtcaacaccaaggtggtgttcgtgcaccagaacctgtctcgggctgacgggggtggcacacaggacacgggtggatcccaacaggcagcaccgcacctccgcccgcctcccgcactgcagctccgcccgccgggctctgcgtctccacgtcccctcgtcccatccccacgtcccctcatcccgtcacctcgtccccacatccccttgccccgtcacctcgtcctcatgtccccttgtcctgtcacctcgtccccacgtcccctcgtctcatccccacgtcctctcgtccccttgtcccgtccccacataccctcgtccccatgtccccacgcagggctctccttcgtcttaggatctgtccagcgctgctctgggtgggttagcaaccccagggctgctgtgataggaagtccctgttgttctccgtactggcatttctatttctagaaataatatttgacatagccttaatggtccttaaagaagacatttcagtgtgagattcagacttcagacgctgaaactgctgcctttcaggaaagcaccaccaacgctggaggaggagccggccctcacgcccgccccgcgccacgctgtggaacggggctccggcaagtgaaacccagagggtgtttccgaggtgctcgacagtaggtatttttggaagctcagatttcaccatttgattgtataatcttttacctataaaatatttatttgaagtagagggtaaatcagcggtaagaacagtgaacacagtggttgggataaaataaggtgacaaacatcacaccaaagatgagggtagcgagcaactggcttgagcagacagaacggggaagactccactctgtcccgaggggccagccgcaggcgtccccagggccaccctgccctgaggtccttgtgtggccgccctggcttggcagccctgcccacgctgcccccgcaaacaatggtgtgtgcgtttttacagccctttttaggaacccaatatgggcataaatgtaacacctgtagcgggggcagattctctgtatgttcagttaacaaattatttgtaatgtatttttttagaaatcttaaaattgcctttgcactgaagtattttcatagctgtttatatctcttttattcatttatttaacatactgtctaattttaaaaataggtttttaaagctttcatttttaagtttatgaaattttggccactttacatttagattctggtgagagttttgactgaatgttccaatctctgatgaatgcgaattttcagatttgattttattctctacacacacctcttcttttcttggtatttctggtggcagtgattagttgaacagcacatttaaggcacgataatttgctacactttttctttacaatttgttgcaatttcatctgctttctatgtttcattgttaattgccatccttcagccttaaaaatagaagattctcacgtgaaggtttagtaagttgggtcccagctctgcctgtgtggagatagtcaccatgtacctctgacaacaagttttagtgtgaaagtcactaaacttttacacactcccaaacgtctttttaaaaattgcttgggaaattattaaatgaatgtgcctgatgatttgaaatagacaaggggcacgagataaaaaagaaaaggatgagaagatcctcagtgaatgacgttgcagggtcttcatgcaattttccacctcgcagtagttagtatttacttgccttaaactaactttgaagcaagtaatgtcaactttgagcactttgttgagttttgaaaaatcttatttgttgctgcacaggttaataaattatcaatttgtaattcagcatgttggtcagagacacggtcactgattcacacccagtccctgccacagaccgtctcagacacgcacagtgggcctgctgcatgattcacacccagtccctgccacagaccgtctcagacacgcacagtgggcctgctgcatgattcacacccagtccctgccacagaccgtctcagacacgcacagtgggcctgctgcatgcgtgttacctggcttttggctccacgctcactcatagccatgtccacatgggggcttgcacacaggatcactcacatatgtacatgtacccaccacaaacgtgcaagctcctgcacacatgcatgcacacaaacgtgtacacaagtgtgagctcctacacgcatacacacacacacgtgtacatgcaccaaagcatgtgtgacctacagacatgcagaacatgcacgtgtacacataccacagacacgcgtgtgcatgctcctacacaatacatatgcacatatcatgaacagcgtaagttcctacacacggacgtgtgatacacatgcatgtacaggtaagcacacatgtacaagctcctacaggcttgctctcacacacgtgtatgcacagcagagagacgtatgagcttctactgcacacatgcacacacacacgcacacgtacattcactacaaacgtgcagcctcctgcacacgtgcacattcatgtgtacaccacaaatgagttcccagacgtgtaaacacacgtgcacacatcgtacacatgtgagctcccacacgtacacacagatgcacatggacacaccccaaacacgcacaggctcctacacacatgcacacacgtgtacaccacaaacgagctcccagacatgtaaacacacgtctcccacacgtgagctcccacacatgtacacatgcacatgtacgcaccacaaacacatgcgcaggctcctgcaggcgtgaatacacacatgcacacacatatacacacacgtgccacaaacaagtgcacactgtcctggtgtcctgcactgcatcctgcctccttgctgaggggcccctgtgagaggcctctggatgggcatgggaagatgggctccctggcccccagcccatgcctccctgggatgaagagtccccctcctggcagaatgtctgggctttgcagagcaggccccgggggtgaagtcgcagcttcacttacaccagctgctctgtgagcaaggcttggtgccctggacaaggcccttcccctttagggaggtccagcctcgcaagctgaaacctcccctcggctcagccctataccaggcggccacagcaggactggccacacccacgccgcacctcatccgtgcacgcgtcggagcacggccagccttccgccacgagccagctgggaagggccgcggccgcctaaagccccagtcaacccagcctgtgtctgagcagacagggcgaacaagcaggccacaccgtctcgagggaggaggccagatgcggccagcgtctccaacagggtgaccatccgctcggcttgctgagcgtttaaacaaatgtttagacaggctgtggggactcccctgagttgagccttggccaggggtccggtgctgtcgcgggaaacctccagccttgttcttcaaaccactcagctcatgtgttttgcactgactagtactgaataatacaaccactcttatttaatgttagtattatttatttgacaactcagtgtctaacagcttgatatgcaggtccttgcatcctacatttctttaggaagttacccatttgtaactttaaaaacaggaaaaatatcagttggcaaatgcaatcttttttttttttaagctaaaggtgggtgaactggaatgaaaatctttctgatgttgtgtctataagcagccttgatgggatatgttagaagtgtcatgaaagtgtgattctacttttgcagaaaaatctaaagatcaatttatatagctttattttttactttatcaaagtatacagaattttaatatgcatatattgtgtctgacttaaaattataatgtctgcgtcaccatttaaaatgtctgttcattatgtaatgtaataaaagaaggtcttcaaaaatgtatttaacatgaatggtatccatagttgtcatcatcataaatactggagtttatttttaaattattaaacatagtaggtgcattaacataaatcagtctccacacagtaacatttaactgataattcattaatcagctttgaaaaattaaattgttaattaaacc

SEQ ID NO: 322953 - DNA, 7609 bp, Homo sapiens
  misc_feature (1)..(1): n is a, c, g, or t
  misc_feature (4)..(7): n is a, c, g, or t
  misc_feature (10)..(10): n is a, c, g, or t
ngcnnnngcngttcctcaaggcattcacggacttcctggccttcatggtcctctttaactacatcatccctgtgtccatgtacgtcacggtcgagatgcagaagttcctcggctcttacttcatcacctgggacgaagacatgtttgacgaggagactggcgaggggcctctggtgaacacgtcggacctcaatgaagagctgggacaggtggagtacatcttcacagacaagaccggcaccctcacggaaaacaacatggagttcaaggagtgctgcatcgaaggccatgtctacgtgccccacgtcatctgcaacgggcaggtcctcccagagtcgtcaggaatcgacatgattgactcgtcccccagcgtcaacgggagggagcgcgaggagctgtttttccgggccctctgtctctgccacaccgtccaggtgaaagacgatgacagcgtagacggccccaggaaatcgccggacggggggaaatcctgtgtgtacatctcatcctcgcccgacgaggtggcgctggtcgaaggtgtccagagacttggctttacctacctaaggctgaaggacaattacatggagatattaaacagggagaaccacatcgaaaggtttgaattgctggaaattttgagttttgactcagtcagaaggagaatgagtgtaattgtaaaatctgctacaggagaaatttatctgttttgcaaaggagcagattcttcgatattcccccgagtgatagaaggcaaagttgaccagatccgagccagagtggagcgtaacgcagtggaggggctccgaactttgtgtgttgcttataaaaggctgatccaagaagaatatgaaggcatttgtaagctgctgcaggctgccaaagtggcccttcaagatcgagagaaaaagttagcagaagcctatgagcaaatagagaaagatcttactctgcttggtgctacagctgttgaggaccggctgcaggagaaagctgcagacaccatcgaggccctgcagaaggccgggatcaaagtctgggttctcacgggagacaagatggagacggccgcggccacgtgctacgcctgcaagctcttccgcaggaacacgcagctgctggagctgaccaccaagaggatcgaggagcagagcctgcacgacgtcctgttcgagctgagcaagacggtcctgcgccacagcgggagcctgaccagagacaacctctccggactttcagcagatatgcaggactacggtttaattatcgacggagctgcactgtctctgataatgaagcctcgagaagacgggagttccggcaactacagggagctcttcctggaaatctgccggagctgcagcgcggtgctctgctgccgcatggcgcccttgcagaaggctcagattgttaaattaatcaaattttcaaaagagcacccaatcacgttagcaattggcgatggtgcaaatgatgtcagcatgattctggaagcgcacgtgggcataggtgtcatcggcaaggaaggccgccaggctgccaggaacagcgactatgcaatcccaaagtttaagcatttgaagaagatgctgcttgttcacgggcatttttattacattaggatctctgagctcgtgcagtacttcttctataagaacgtctgcttcatcttccctcagtttttataccagttcttctgtgggttttcacaacagactttgtacgacaccgcgtatctgaccctctacaacatcagcttcacctccctccccatcctcctgtacagcctcatggagcagcatgttggcattgacgtgctcaagagagacccgaccctgtacagggacgtcgccaagaatgccctgctgcgctggcgcgtgttcatctactggacgctcctgggactgtttgacgcactggtgttcttctttggtgcttatttcgtgtttgaaaatacaactgtgacaagcaacgggcagatatttggaaactggacgtttggaacgctggtattcaccgtgatggtgttcacagttacactaaagcttgcattggacacacactactggacttggatcaaccattttgtcatctgggggtcgctgctgttctacgttgtcttttcacttctctggggaggagtgatctggccgttcctcaactaccagaggatgtactacgtgttcatccagatgctgtccagcgggcccgcctggctggccatcgtgctgctggtgaccatcagcctccttcccgacgtcctcaagaaagtcctgtgccggcagctgtggccaacagcaacagagagagtccagaatgggtgcgcacagcctcgggaccgcgactcagaattcacccctcttgcctctctgcagagcccaggctaccagagcacctgtccctcggccgcctggtacagctcccactctcagcaggtgacactcgcggcctggaaggagaaggtgtccacggagcccccacccatcctcggcggttcccatcaccactgcagttccatcccaagtcacagctgccctaggtcccgtgtgggaatgctcgtgtgatggatggtcctaagcctgtggagactgtgcacgtgcctcttcctggcccccagcaggcaaggaggggggtcacaggccttgccctcgagcatggcaccctggccgcctggacccagcactgtggttgttgagccacaccagtggcctctgggcattcggctcaacgcaggagggacattctgctggcccaccctgcgcgctgtcatgcagaggccattcccccaggcctgtgtcttcacccacctgccgtcattggcctttgctgtcactgggagagaagagccgtccagggacccatggtggcccacatgtggatgccacatgctgctgtttcctgcttgcccggccaccacccatgccctccatagggtgaggtggagccatggtggtgcgtcctttactcaacaaccctccaatccggatgctgtgggaagggccgggtcactcggataccatcatccctgcggatgcaccgccgtaccctgctcatctgggagtggtttccctgcggttacgtccaagcccgcctgccctgtgtgttggggctggctgagtttcggtctccccatcaccggccgcctcgtggagaaggcagtgccacgtgggaggacaaggccacgccggcagcttccagccctgccgcagaagtgccaggatgtccatcagccactcgccagggcacggagccgtcagtccactgttacgggagaatgttgatttcgcgggtgcgagggccgggagacagatacttggctgtgatgagcagacatcctctgtccccgtggaggggtcaacaccaaggtggtgttcgtgcaccagaacctgtctcgggctgacgggggtggcacacaggacacgggtggatcccaacaggcagcaccgcacctccgcccgcctcccgcactgcagctccgcccgccgggctctgcgtctccacgtcccctcgtcccatccccacgtcccctcatcccgtcacctcgtccccacatccccttgccccgtcacctcgtcctcatgtccccttgtcctgtcacctcgtccccacgtcccctcgtctcatccccacgtcctctcgtccccttgtcccgtccccacataccctcgtccccatgtccccacgcagggctctccttcgtcttaggatctgtccagcgctgctctgggtgggttagcaaccccagggctgctgtgataggaagtccctgttgttctccgtactggcatttctatttctagaaataatatttgacatagccttaatggtccttaaagaagacatttcagtgtgagattcagacttcagacgctgaaactgctgcctttcaggaaagcaccaccaacgctggaggaggagccggccctcacgcccgccccgcgccacgctgtggaacggggctccggcaagtgaaacccagagggtgtttccgaggtgctcgacagtaggtatttttggaagctcagatttcaccatttgattgtataatcttttacctataaaatatttatttgaagtagagggtaaatcagcggtaagaacagtgaacacagtggttgggataaaataaggtgacaaacatcacaccaaagatgagggtagcgagcaactggcttgagcagacagaacggggaagactccactctgtcccgaggggccagccgcaggcgtccccagggccaccctgccctgaggtccttgtgtggccgccctggcttggcagccctgcccacgctgcccccgcaaacaatggtgtgtgcgtttttacagccctttttaggaacccaatatgggcataaatgtaacacctgtagcgggggcagattctctgtatgttcagttaacaaattatttgtaatgtatttttttagaaatcttaaaattgcctttgcactgaagtattttcatagctgtttatatctcttttattcatttatttaacatactgtctaattttaaaaataggtttttaaagctttcatttttaagtttatgaaattttggccactttacatttagattctggtgagagttttgactgaatgttccaatctctgatgaatgcgaattttcagatttgattttattctctacacacacctcttcttttcttggtatttctggtggcagtgattagttgaacagcacatttaaggcacgataatttgctacactttttctttacaatttgttgcaatttcatctgctttctatgtttcattgttaattgccatccttcagccttaaaaatagaagattctcacgtgaaggtttagtaagttgggtcccagctctgcctgtgtggagatagtcaccatgtacctctgacaacaagttttagtgtgaaagtcactaaacttttacacactcccaaacgtctttttaaaaattgcttgggaaattattaaatgaatgtgcctgatgatttgaaatagacaaggggcacgagataaaaaagaaaaggatgagaagatcctcagtgaatgacgttgcagggtcttcatgcaattttccacctcgcagtagttagtatttacttgccttaaactaactttgaagcaagtaatgtcaactttgagcactttgttgagttttgaaaaatcttatttgttgctgcacaggttaataaattatcaatttgtaattcagcatgttggtcagagacacggtcactgattcacacccagtccctgccacagaccgtctcagacacgcacagtgggcctgctgcatgattcacacccagtccctgccacagaccgtctcagacacgcacagtgggcctgctgcatgcgtgttacctggcttttggctccacgctcactcatagccatgtccacatgggggcttgcacacaggatcactcacatatgtacatgtacccaccacaaacgtgcaagctcctgcacacatgcatgcacacaaacgtgtacacaagtgtgagctcctacacgcatacacacacacacgtgtacatgcaccaaagcatgtgtgacctacagacatgcagaacatgcacgtgtacacataccacagacacgcgtgtgcatgctcctacacaatacatatgcacatatcatgaacagcgtaagttcctacacacggacgtgtgatacacatgcatgtacaggtaagcacacatgtacaagctcctacaggcttgctctcacacacgtgtatgcacagcagagagacgtatgagcttctactgcacacatgcacacacacacgcacacgtacattcactacaaacgtgcagcctcctgcacacgtgcacattcatgtgtacaccacaaatgagttcccagacgtgtaaacacacgtgcacacatcgtacacatgtgagctcccacacgtacacacagatgcacatggacacaccccaaacacgcacaggctcctacacacatgcacacacgtgtacaccacaaacgagctcccagacatgtaaacacacgtctcccacacgtgagctcccacacatgtacacatgcacatgtacgcaccacaaacacatgcgcaggctcctgcaggcgtgaatacacacatgcacacacatatacacacacgtgccacaaacaagtgcacactgtcctggtgtcctgcactgcatcctgcctccttgctgaggggcccctgtgagaggcctctggatgggcatgggaagatgggctccctggcccccagcccatgcctccctgggatgaagagtccccctcctggcagaatgtctgggctttgcagagcaggccccgggggtgaagtcgcagcttcacttacaccagctgctctgtgagcaaggcttggtgccctggacaaggcccttcccctttagggaggtccagcctcgcaagctgaaacctcccctcggctcagccctataccaggcggccacagcaggactggccacacccacgccgcacctcatccgtgcacgcgtcggagcacggccagccttccgccacgagccagctgggaagggccgcggccgcctaaagccccagtcaacccagcctgtgtctgagcagacagggcgaacaagcaggccacaccgtctcgagggaggaggccagatgcggccagcgtctccaacagggtgaccatccgctcggcttgctgagcgtttaaacaaatgtttagacaggctgtggggactcccctgagttgagccttggccaggggtccggtgctgtcgcgggaaacctccagccttgttcttcaaaccactcagctcatgtgttttgcactgactagtactgaataatacaaccactcttatttaatgttagtattatttatttgacaactcagtgtctaacagcttgatatgcaggtccttgcatcctacatttctttaggaagttacccatttgtaactttaaaaacaggaaaaatatcagttggcaaatgcaatcttttttttttttaagctaaaggtgggtgaactggaatgaaaatctttctgatgttgtgtctataagcagccttgatgggatatgttagaagtgtcatgaaagtgtgattctacttttgcagaaaaatctaaagatcaatttatatagctttattttttactttatcaaagtatacagaattttaatatgcatatattgtgtctgacttaaaattataatgtctgcgtcaccatttaaaatgtctgttcattatgtaatgtaataaaagaaggtcttcaaaaatgtatttaacatgaatggtatccatagttgtcatcatcataaatactggagtttatttttaaattattaaacatagtaggtgcattaacataaatcagtctccacacagtaacatttaactgataattcattaatcagctttgaaaaattaaattgttaattaaaccaatctaacatttcagtaaagtttattttgtatgcttctgtttttaacttttatttctgtagataaactgactggataatattatattggacttttctctagattatctaagcaggagacctgaatctgcttgcaataaagaataaaagtctgcttcagtttctttataaagaaactcacacaagtg

SEQ ID NO: 322954 - DNA, 4638 bp, Homo sapiens
  misc_feature (1)..(1): n is a, c, g, or t
  misc_feature (4)..(7): n is a, c, g, or t
  misc_feature (10)..(10): n is a, c, g, or t
ngcnnnngcngttcctcaaggcattcacggacttcctggccttcatggtcctctttaactacatcatccctgtgtccatgtacgtcacggtcgagatgcagaagttcctcggctcttacttcatcacctgggacgaagacatgtttgacgaggagactggcgaggggcctctggtgaacacgtcggacctcaatgaagagctgggacaggtggagtacatcttcacagacaagaccggcaccctcacggaaaacaacatggagttcaaggagtgctgcatcgaaggccatgtctacgtgccccacgtcatctgcaacgggcaggtcctcccagagtcgtcaggaatcgacatgattgactcgtcccccagcgtcaacgggagggagcgcgaggagctgtttttccgggccctctgtctctgccacaccgtccaggtgaaagacgatgacagcgtagacggccccaggaaatcgccggacggggggaaatcctgtgtgtacatctcatcctcgcccgacgaggtggcgctggtcgaaggtgtccagagacttggctttacctacctaaggctgaaggacaattacatggagatattaaacagggagaaccacatcgaaaggtttgaattgctggaaattttgagttttgactcagtcagaaggagaatgagtgtaattgtaaaatctgctacaggagaaatttatctgttttgcaaaggagcagattcttcgatattcccccgagtgatagaaggcaaagttgaccagatccgagccagagtggagcgtaacgcagtggaggggctccgaactttgtgtgttgcttataaaaggctgatccaagaagaatatgaaggcatttgtaagctgctgcaggctgccaaagtggcccttcaagatcgagagaaaaagttagcagaagcctatgagcaaatagagaaagatcttactctgcttggtgctacagctgttgaggaccggctgcaggagaaagctgcagacaccatcgaggccctgcagaaggccgggatcaaagtctgggttctcacgggagacaagatggagacggccgcggccacgtgctacgcctgcaagctcttccgcaggaacacgcagctgctggagctgaccaccaagaggatcgaggagcagagcctgcacgacgtcctgttcgagctgagcaagacggtcctgcgccacagcgggagcctgaccagagacaacctctccggactttcagcagatatgcaggactacggtttaattatcgacggagctgcactgtctctgataatgaagcctcgagaagacgggagttccggcaactacagggagctcttcctggaaatctgccggagctgcagcgcggtgctctgctgccgcatggcgcccttgcagaaggctcagattgttaaattaatcaaattttcaaaagagcacccaatcacgttagcaattggcgatggtgcaaatgatgtcagcatgattctggaagcgcacgtgggcataggtgtcatcggcaaggaaggccgccaggctgccaggaacagcgactatgcaatcccaaagtttaagcatttgaagaagatgctgcttgttcacgggcatttttattacattaggatctctgagctcgtgcagtacttcttctataagaacgtctgcttcatcttccctcagtttttataccagttcttctgtgggttttcacaacagactttgtacgacaccgcgtatctgaccctctacaacatcagcttcacctccctccccatcctcctgtacagcctcatggagcagcatgttggcattgacgtgctcaagagagacccgaccctgtacagggacgtcgccaagaatgccctgctgcgctggcgcgtgttcatctactggacgctcctgggactgtttgacgcactggtgttcttctttggtgcttatttcgtgtttgaaaatacaactgtgacaagcaacgggcagatatttggaaactggacgtttggaacgctggtattcaccgtgatggtgttcacagttacactaaagcttgcattggacacacactactggacttggatcaaccattttgtcatctgggggtcgctgctgttctacgttgtcttttcacttctctggggaggagtgatctggccgttcctcaactaccagaggatgtactacgtgttcatccagatgctgtccagcgggcccgcctggctggccatcgtgctgctggtgaccatcagcctccttcccgacgtcctcaagaaagtcctgtgccggcagctgtggccaacagcaacagagagagtccagaatgggtgcgcacagcctcgggaccgcgactcagaattcacccctcttgcctctctgcagagcccaggctaccagagcacctgtccctcggccgcctggtacagctcccactctcagcaggtgacactcgcggcctggaaggagaaggtgtccacggagcccccacccatcctcggcggttcccatcaccactgcagttccatcccaagtcacagctgccctaggtcccgtgtgggaatgctcgtgtgatggatggtcctaagcctgtggagactgtgcacgtgcctcttcctggcccccagcaggcaaggaggggggtcacaggccttgccctcgagcatggcaccctggccgcctggacccagcactgtggttgttgagccacaccagtggcctctgggcattcggctcaacgcaggagggacattctgctggcccaccctgcgcgctgtcatgcagaggccattcccccaggcctgtgtcttcacccacctgccgtcattggcctttgctgtcactgggagagaagagccgtccagggacccatggtggcccacatgtggatgccacatgctgctgtttcctgcttgcccggccaccacccatgccctccatagggtgaggtggagccatggtggtgcgtcctttactcaacaaccctccaatccggatgctgtgggaagggccgggtcactcggataccatcatccctgcggatgcaccgccgtaccctgctcatctgggagtggtttccctgcggttacgtccaagcccgcctgccctgtgtgttggggctggctgagtttcggtctccccatcaccggccgcctcgtggagaaggcagtgccacgtgggaggacaaggccacgccggcagcttccagccctgccgcagaagtgccaggatgtccatcagccactcgccagggcacggagccgtcagtccactgttacgggagaatgttgatttcgcgggtgcgagggccgggagacagatacttggctgtgatgagcagacatcctctgtccccgtggaggggtcaacaccaaggtggtgttcgtgcaccagaacctgtctcgggctgacgggggtggcacacaggacacgggtggatcccaacaggcagcaccgcacctccgcccgcctcccgcactgcagctccgcccgccgggctctgcgtctccacgtcccctcgtcccatccccacgtcccctcatcccgtcacctcgtccccacatccccttgccccgtcacctcgtcctcatgtccccttgtcctgtcacctcgtccccacgtcccctcgtctcatccccacgtcctctcgtccccttgtcccgtccccacataccctcgtccccatgtccccacgcagggctctccttcgtcttaggatctgtccagcgctgctctgggtgggttagcaaccccagggctgctgtgataggaagtccctgttgttctccgtactggcatttctatttctagaaataatatttgacatagccttaatggtccttaaagaagacatttcagtgtgagattcagacttcagacgctgaaactgctgcctttcaggaaagcaccaccaacgctggaggaggagccggccctcacgcccgccccgcgccacgctgtggaacggggctccggcaagtgaaacccagagggtgtttccgaggtgctcgacagtaggtatttttggaagctcagatttcaccatttgattgtataatcttttacctataaaatatttatttgaagtagagggtaaatcagcggtaagaacagtgaacacagtggttgggataaaataaggtgacaaacatcacaccaaagatgagggtagcgagcaactggcttgagcagacagaacggggaagactccactctgtcccgaggggccagccgcaggcgtccccagggccaccctgccctgaggtccttgtgtggccgccctggcttggcagccctgcccacgctgcccccgcaaacaatggtgtgtgcgtttttacagccctttttaggaacccaatatgggcataaatgtaacacctgtagcgggggcagattctctgtatgttcagttaacaaattatttgtaatgtatttttttagaaatcttaaaattgcctttgcactgaagtattttcatagctgtttatatctcttttattcatttatttaacatactgtctaattttaaaaataggttttcaacattagacgtcaaagcgaactactatactccatggatcccataacttgaccaacggaaccagttcctagggataaggcatccatccgagcctttacatggttcgac

SEQ ID NO: 322955 - DNA, 3466 bp, Homo sapiens
  misc_feature (1)..(1): n is a, c, g, or t
  misc_feature (4)..(7): n is a, c, g, or t
  misc_feature (10)..(10): n is a, c, g, or t
ngcnnnngcngttcctcaaggcattcacggacttcctggccttcatggtcctctttaactacatcatccctgtgtccatgtacgtcacggtcgagatgcagaagttcctcggctcttacttcatcacctgggacgaagacatgtttgacgaggagactggcgaggggcctctggtgaacacgtcggacctcaatgaagagctgggacaggtggagtacatcttcacagacaagaccggcaccctcacggaaaacaacatggagttcaaggagtgctgcatcgaaggccatgtctacgtgccccacgtcatctgcaacgggcaggtcctcccagagtcgtcaggaatcgacatgattgactcgtcccccagcgtcaacgggagggagcgcgaggagctgtttttccgggccctctgtctctgccacaccgtccaggtgaaagacgatgacagcgtagacggccccaggaaatcgccggacggggggaaatcctgtgtgtacatctcatcctcgcccgacgaggtggcgctggtcgaaggtgtccagagacttggctttacctacctaaggctgaaggacaattacatggagatattaaacagggagaaccacatcgaaaggtttgaattgctggaaattttgagttttgactcagtcagaaggagaatgagtgtaattgtaaaatctgctacaggagaaatttatctgttttgcaaaggagcagattcttcgatattcccccgagtgatagaaggcaaagttgaccagatccgagccagagtggagcgtaacgcagtggaggggctccgaactttgtgtgttgcttataaaaggctgatccaagaagaatatgaaggcatttgtaagctgctgcaggctgccaaagtggcccttcaagatcgagagaaaaagttagcagaagcctatgagcaaatagagaaagatcttactctgcttggtgctacagctgttgaggaccggctgcaggagaaagctgcagacaccatcgaggccctgcagaaggccgggatcaaagtctgggttctcacgggagacaagatggagacggccgcggccacgtgctacgcctgcaagctcttccgcaggaacacgcagctgctggagctgaccaccaagaggatcgaggagcagagcctgcacgacgtcctgttcgagctgagcaagacggtcctgcgccacagcgggagcctgaccagagacaacctctccggactttcagcagatatgcaggactacggtttaattatcgacggagctgcactgtctctgataatgaagcctcgagaagacgggagttccggcaactacagggagctcttcctggaaatctgccggagctgcagcgcggtgctctgctgccgcatggcgcccttgcagaaggctcagattgttaaattaatcaaattttcaaaagagcacccaatcacgttagcaattggcgatggtgcaaatgatgtcagcatgattctggaagcgcacgtgggcataggtgtcatcggcaaggaaggccgccaggctgccaggaacagcgactatgcaatcccaaagtttaagcatttgaagaagatgctgcttgttcacgggcatttttattacattaggatctctgagctcgtgcagtacttcttctataagaacgtctgcttcatcttccctcagtttttataccagttcttctgtgggttttcacaacagactttgtacgacaccgcgtatctgaccctctacaacatcagcttcacctccctccccatcctcctgtacagcctcatggagcagcatgttggcattgacgtgctcaagagagacccgaccctgtacagggacgtcgccaagaatgccctgctgcgctggcgcgtgttcatctactggacgctcctgggactgtttgacgcactggtgttcttctttggtgcttatttcgtgtttgaaaatacaactgtgacaagcaacgggcagatatttggaaactggacgtttggaacgctggtattcaccgtgatggtgttcacagttacactaaagcttgcattggacacacactactggacttggatcaaccattttgtcatctgggggtcgctgctgttctacgttgtcttttcacttctctggggaggagtgatctggccgttcctcaactaccagaggatgtactacgtgttcatccagatgctgtccagcgggcccgcctggctggccatcgtgctgctggtgaccatcagcctccttcccgacgtcctcaagaaagtcctgtgccggcagctgtggccaacagcaacagagagagtccagaatgggtgcgcacagcctcgggaccgcgactcagaattcacccctcttgcctctctgcagagcccaggctaccagagcacctgtccctcggccgcctggtacagctcccactctcagcaggtgacactcgcggcctggaaggagaaggtgtccacggagcccccacccatcctcggcggttcccatcaccactgcagttccatcccaagtcacagctgccctaggtcccgtgtgggaatgctcgtgtgatggatggtcctaagcctgtggagactgtgcacgtgcctcttcctggcccccagcaggcaaggaggggggtcacaggccttgccctcgagcatggcaccctggccgcctggacccagcactgtggttgttgagccacaccagtggcctctgggcattcggctcaacgcaggagggacattctgctggcccaccctgcgcgctgtcatgcagaggccattcccccaggcctgtgtcttcacccacctgccgtcattggcctttgctgtcactgggagagaagagccgtccagggacccatggtggcccacatgtggatgccacatgctgctgtttcctgcttgcccggccaccacccatgccctccatagggtgaggtggagccatggtggtgcgtcctttactcaacaaccctccaatccggatgctgtgggaagggccgggtcactcggataccatcatccctgcggatgcaccgccgtaccctgctcatctgggagtggtttccctgcggttacgtccaagcccgcctgccctgtgtgttggggctggctgagtttcggtctccccatcaccggccgcctcgtggagaaggcagtgccacgtgggaggacaaggccacgccggcagcttccagccctgccgcagaagtgccaggatgtccatcagccactcgccagggcacggagccgtcagtccactgttacgggagaatgttgatttcgcgggtgcgagggccgggagacagatacttggctgtgatgagcagacatcctctgtccccgtggaggggtcaacaccaaggtggtgttcgtgcaccagaacctgtctcgggctgacgggggtggcacacaggacacgggtggatcccaacaggcttggtggggaatcactagtgaattcgc

SEQ ID NO: 322956 - DNA, 1669 bp, Homo sapiens
  misc_feature (1)..(1): n is a, c, g, or t
  misc_feature (4)..(7): n is a, c, g, or t
  misc_feature (10)..(10): n is a, c, g, or t
ngcnnnngcngttcctcaaggcattcacggacttcctggccttcatggtcctctttaactacatcatccctgtgtccatgtacgtcacggtcgagatgcagaagttcctcggctcttacttcatcacctgggacgaagacatgtttgacgaggagactggcgaggggcctctggtgaacacgtcggacctcaatgaagagctgggacaggtggagtacatcttcacagacaagaccggcaccctcacggaaaacaacatggagttcaaggagtgctgcatcgaaggccatgtctacgtgccccacgtcatctgcaacgggcaggtcctcccagagtcgtcaggaatcgacatgattgactcgtcccccagcgtcaacgggagggagcgcgaggagctgtttttccgggccctctgtctctgccacaccgtccaggtgaaagacgatgacagcgtagacggccccaggaaatcgccggacggggggaaatcctgtgtgtacatctcatcctcgcccgacgaggtggcgctggtcgaaggtgtccagagacttggctttacctacctaaggctgaaggacaattacatggagatattaaacagggagaaccacatcgaaaggtttgaattgctggaaattttgagttttgactcagtcagaaggagaatgagtgtaattgtaaaatctgctacaggagaaatttatctgttttgcaaaggagcagattcttcgatattcccccgagtgatagaaggcaaagttgaccagatccgagccagagtggagcgtaacgcagtggaggggctccgaactttgtgtgttgcttataaaaggctgatccaagaagaatatgaaggcatttgtaagctgctgcaggctgccaaagtggcccttcaagatcgagagaaaaagttagcagaagcctatgagcaaatagagaaagatcttactctgcttggtgctacagctgttgaggaccggctgcaggagaaagctgcagacaccatcgaggccctgcagaaggccgggatcaaagtctgggttctcacgggagacaagatggagacggccgcggccacgtgctacgcctgcaagctcttccgcaggaacacgcagctgctggagctgaccaccaagaggatcgaggagcagagcctgcacgacgtcctgttcgagctgagcaagacggtcctgcgccacagcgggagcctgaccagagacaacctctccggactttcagcagatatgcaggactacggtttaattatcgacggagctgcactgtctctgataatgaagcctcgagaagacgggagttccggcaactacagggagctcttcctggaaatctgccggagctgcagcgcggtgctctgctgccgcatggcgcccttgcagaaggctcaggtgctgcccgcccgtcctcgatagctggtggtcagggcgtccaaaacactgaaaaccttccgttaggtctcaccgcctcagattgttaaacaatctagcagggtaccacctgttaaaaatagaagcaaccgtgatagagatttaaaacgcagatcttgttttgcttgtcgggccagcttctgtgattagtgggtgatgaccagtcagatgtatgacccttccagatgcagtggccaggacagctgccctggctgacttctgtt

SEQ ID NO: 322957 - DNA, 395 bp, Homo sapiens
cctgaaaccctccccaggtagtgagtcccacctacacacaaaaccgccaggcttgtcagacgtcagtgacacaagacagccctttacttctcacatgtttgatccatgtttatctctctgctgttaggaagtgtttcgctgtgaaacactagttcagaccttcagaagctgcttcagtacttcgtggtgagatcatgagccacagtgtggagtgttttgattttgaggggctacgatattttgacagctttgcaagtttctgcagttccttatttggattcctgggtcagcactgacttttctctatgctgtgtttggttttgcctccctcaggctgcaggagaaagctgcagacaccatcgaggccctgcagaaggccgggatcaaagtctggg

SEQ ID NO: 322958 - DNA, 473 bp, Homo sapiens
cgtccctgccctgtgtgtggtgtgcagaaagcatttcttcagctccttcacctccgtcttctaggtgtcatcggcaaggaaggccgccaggctgccaggaacagcgactatgcaatcccaaagtttaagcatttgaagaagatgctgcttgttcacgggcatttttattacattaggatctctgagctcgtgcagtacttcttctataaggtaggagggtcgccgctccccctcacggtgttagcaacaggtcacgcacagggtggcacgacccttgtctgagccacttgatgccacaagaggtcattgatctccgaggagcagcaactgtcagaaaggaaggggtgaatctgattgcagtcatctcttgcttagctgtgactttgctttttacagtttccattacctacagtcaacccatgcccaaaaatatcaaacgcaaaattgcagaaataaacagttcctcaggttta

SEQ ID NO: 322959 - DNA, 453 bp, Homo sapiens
tgaagtttgtgctgatagaatgggatgagtcagtgttaggctttttgccagctgtgactttcatcctgaaatcacagttgatatcacagaccctagtttatattgttaagctttgaaaagcgctctggtctttctatgcatttcagaaagaaaatatatttaatcaaaagatccaaaaagtttgtaacaatgcactgaggtgccacttcttgtgactttcctcttacagactttgtacgacaccgcgtatctgaccctctacaacatcagcttcacctccctccccatcctcctgtacagcctcatggagcagcatgttggcattgacgtgctcaagagagacccgaccctgtacaggtaccatcctccaaacagcctctcctgagagcagagagagtaactaggcagcactctggcagttccttccaatagccacctggcagacctcagttg

SEQ ID NO: 322960 - DNA, 643 bp, Homo sapiens
cgtcaggggtgtgccttgtgttctctgttcgttgctttcagaagcagcagcatgtggcagcatctctgtgcctatgacgatattgcagtgaatatgagagagaaaatatctgagcaaaagttagccaaggacatgagtgggtagtgaaatgctggttgtgatgaacatgccacatttgtggccagagcacaaacttgatgtttactggccgtgcacatcttatcccatgaagacaacgtccagggatggccaccccagagcctgggggaggtgccgggccctgattctcgaggacacacgctgtgcacctttctcctcaccagggacgtcgccaagaatgccctgctgcgctggcgcgtgttcatctactggacgctcctgggactgtttgacgcactggtgttcttctttggtgcttatttcgtgtttgaaaatacaactgtgacaagcaacgggcaggtcagtacagagctcgattgcgctgacttagctgcttaggaataaagcctcccaagcccatatgatgattttgccaaagcagaattcagtgcagcccatgcagcttcccagcggggtccatcaccacctgcgcagtaattcagtgcaggccacgcagcttcccagcggggtccatcaccacatg

SEQ ID NO: 322961 - DNA, 771 bp, Homo sapiens
ccctcaggacgagggtgtgtcctgagttgagtctagcagttcctgcaggaggcgatggtagtgagtgcatcccagagtggctcaggtcaccccaggcagccccgtgggtatccctgagactgaccatgtgtctcgttctctcagcagaatgggtgcgcacagcctcgggaccgcgactcagaattcacccctcttgcctctctgcagagcccaggctaccagagcacctgtccctcggccgcctggtacagctcccactctcagcaggtgacactcgcggcctggaaggagaaggtgtccacggagcccccacccatcctcggcggttcccatcaccactgcagttccatcccaagtcacagctgccctaggtcccgtgtgggaatgctcgtgtgatggatggtcctaagcctgtggagactgtgcacgtgcctcttcctggcccccagcaggcaaggaggggggtcacaggccttgccctcgagcatggcaccctggccgcctggacccagcactgtggttgttgagccacaccagtggcctctgggcattcggctcaacgcaggagggacattctgctggcccaccctgcgcgctgtcatgcagaggccattcccccaggcctgtgtcttcacccacctgccgtcattggcctttgctgtcactgggagagaagagccgtccagggacccatggtggcccacatgtggatgccacatgctgctgtttcctgcttgcccggccaccacccatgccctccatagggtgagg

SEQ ID NO: 322962 - DNA, 7509 bp, Homo sapiens
  misc_feature (1)..(1): n is a, c, g, or t
  misc_feature (4)..(7): n is a, c, g, or t
  misc_feature (10)..(10): n is a, c, g, or t
ngcnnnngcngttcctcaaggcattcacggacttcctggccttcatggtcctctttaactacatcatccctgtgtccatgtacgtcacggtcgagatgcagaagttcctcggctcttacttcatcacctgggacgaagacatgtttgacgaggagactggcgaggggcctctggtgaacacgtcggacctcaatgaagagctgggacaggtggagtacatcttcacagacaagaccggcaccctcacggaaaacaacatggagttcaaggagtgctgcatcgaaggccatgtctacgtgccccacgtcatctgcaacgggcaggtcctcccagagtcgtcaggaatcgacatgattgactcgtcccccagcgtcaacgggagggagcgcgaggagctgtttttccgggccctctgtctctgccacaccgtccaggtgaaagacgatgacagcgtagacggccccaggaaatcgccggacggggggaaatcctgtgtgtacatctcatcctcgcccgacgaggtggcgctggtcgaaggtgtccagagacttggctttacctacctaaggctgaaggacaattacatggagatattaaacagggagaaccacatcgaaaggtttgaattgctggaaattttgagttttgactcagtcagaaggagaatgagtgtaattgtaaaatctgctacaggagaaatttatctgttttgcaaaggagcagattcttcgatattcccccgagtgatagaaggcaaagttgaccagatccgagccagagtggagcgtaacgcagtggaggggctccgaactttgtgtgttgcttataaaaggctgatccaagaagaatatgaaggcatttgtaagctgctgcaggctgccaaagtggcccttcaagatcgagagaaaaagttagcagaagcctatgagcaaatagagaaagatcttactctgcttggtgctacagctgttgaggaccggctgcaggagaaagctgcagacaccatcgaggccctgcagaaggccgggatcaaagtctgggttctcacgggagacaagatggagacggccgcggccacgtgctacgcctgcaagctcttccgcaggaacacgcagctgctggagctgaccaccaagaggatcgaggagcagagcctgcacgacgtcctgttcgagctgagcaagacggtcctgcgccacagcgggagcctgaccagagacaacctctccggactttcagcagatatgcaggactacggtttaattatcgacggagctgcactgtctctgataatgaagcctcgagaagacgggagttccggcaactacagggagctcttcctggaaatctgccggagctgcagcgcggtgctctgctgccgcatggcgcccttgcagaaggctcagattgttaaattaatcaaattttcaaaagagcacccaatcacgttagcaattggcgatggtgcaaatgatgtcagcatgattctggaagcgcacgtgggcataggtgtcatcggcaaggaaggccgccaggctgccaggaacagcgactatgcaatcccaaagtttaagcatttgaagaagatgctgcttgttcacgggcatttttattacattaggatctctgagctcgtgcagtacttcttctataagaacgtctgcttcatcttccctcagtttttataccagttcttctgtgggttttcacaacagactttgtacgacaccgcgtatctgaccctctacaacatcagcttcacctccctccccatcctcctgtacagcctcatggagcagcatgttggcattgacgtgctcaagagagacccgaccctgtacagggacgtcgccaagaatgccctgctgcgctggcgcgtgttcatctactggacgctcctgggactgtttgacgcactggtgttcttctttggtgcttatttcgtgtttgaaaatacaactgtgacaagcaacgggcagatatttggaaactggacgtttggaacgctggtattcaccgtgatggtgttcacagttacactaaagcttgcattggacacacactactggacttggatcaaccattttgtcatctgggggtcgctgctgttctacgttgtcttttcacttctctggggaggagtgatctggccgttcctcaactaccagaggatgtactacgtgttcatccagatgctgtccagcgggcccgcctggctggccatcgtgctgctggtgaccatcagcctccttcccgacgtcctcaagaaagtcctgtgccggcagctgtggccaacagcaacagagagagtccagactaagagccagtgcctttctgtcgagcagtcaaccatctttatgctttctcagacttccagcagcctgagtttctgatggaacaagagcccaggctaccagagcacctgtccctcggccgcctggtacagctcccactctcagcaggtgacactcgcggcctggaaggagaaggtgtccacggagcccccacccatcctcggcggttcccatcaccactgcagttccatcccaagtcacagctgccctaggtcccgtgtgggaatgctcgtgtgatggatggtcctaagcctgtggagactgtgcacgtgcctcttcctggcccccagcaggcaaggaggggggtcacaggccttgccctcgagcatggcaccctggccgcctggacccagcactgtggttgttgagccacaccagtggcctctgggcattcggctcaacgcaggagggacattctgctggcccaccctgcgcgctgtcatgcagaggccattcccccaggcctgtgtcttcacccacctgccgtcattggcctttgctgtcactgggagagaagagccgtccagggacccatggtggcccacatgtggatgccacatgctgctgtttcctgcttgcccggccaccacccatgccctccatagggtgaggtggagccatggtggtgcgtcctttactcaacaaccctccaatccggatgctgtgggaagggccgggtcactcggataccatcatccctgcggatgcaccgccgtaccctgctcatctgggagtggtttccctgcggttacgtccaagcccgcctgccctgtgtgttggggctggctgagtttcggtctccccatcaccggccgcctcgtggagaaggcagtgccacgtgggaggacaaggccacgccggcagcttccagccctgccgcagaagtgccaggatgtccatcagccactcgccagggcacggagccgtcagtccactgttacgggagaatgttgatttcgcgggtgcgagggccgggagacagatacttggctgtgatgagcagacatcctctgtccccgtggaggggtcaacaccaaggtggtgttcgtgcaccagaacctgtctcgggctgacgggggtggcacacaggacacgggtggatcccaacaggcagcaccgcacctccgcccgcctcccgcactgcagctccgcccgccgggctctgcgtctccacgtcccctcgtcccatccccacgtcccctcatcccgtcacctcgtccccacatccccttgccccgtcacctcgtcctcatgtccccttgtcctgtcacctcgtccccacgtcccctcgtctcatccccacgtcctctcgtccccttgtcccgtccccacataccctcgtccccatgtccccacgcagggctctccttcgtcttaggatctgtccagcgctgctctgggtgggttagcaaccccagggctgctgtgataggaagtccctgttgttctccgtactggcatttctatttctagaaataatatttgacatagccttaatggtccttaaagaagacatttcagtgtgagattcagacttcagacgctgaaactgctgcctttcaggaaagcaccaccaacgctggaggaggagccggccctcacgcccgccccgcgccacgctgtggaacggggctccggcaagtgaaacccagagggtgtttccgaggtgctcgacagtaggtatttttggaagctcagatttcaccatttgattgtataatcttttacctataaaatatttatttgaagtagagggtaaatcagcggtaagaacagtgaacacagtggttgggataaaataaggtgacaaacatcacaccaaagatgagggtagcgagcaactggcttgagcagacagaacggggaagactccactctgtcccgaggggccagccgcaggcgtccccagggccaccctgccctgaggtccttgtgtggccgccctggcttggcagccctgcccacgctgcccccgcaaacaatggtgtgtgcgtttttacagccctttttaggaacccaatatgggcataaatgtaacacctgtagcgggggcagattctctgtatgttcagttaacaaattatttgtaatgtatttttttagaaatcttaaaattgcctttgcactgaagtattttcatagctgtttatatctcttttattcatttatttaacatactgtctaattttaaaaataggtttttaaagctttcatttttaagtttatgaaattttggccactttacatttagattctggtgagagttttgactgaatgttccaatctctgatgaatgcgaattttcagatttgattttattctctacacacacctcttcttttcttggtatttctggtggcagtgattagttgaacagcacatttaaggcacgataatttgctacactttttctttacaatttgttgcaatttcatctgctttctatgtttcattgttaattgccatccttcagccttaaaaatagaagattctcacgtgaaggtttagtaagttgggtcccagctctgcctgtgtggagatagtcaccatgtacctctgacaacaagttttagtgtgaaagtcactaaacttttacacactcccaaacgtctttttaaaaattgcttgggaaattattaaatgaatgtgcctgatgatttgaaatagacaaggggcacgagataaaaaagaaaaggatgagaagatcctcagtgaatgacgttgcagggtcttcatgcaattttccacctcgcagtagttagtatttacttgccttaaactaactttgaagcaagtaatgtcaactttgagcactttgttgagttttgaaaaatcttatttgttgctgcacaggttaataaattatcaatttgtaattcagcatgttggtcagagacacggtcactgattcacacccagtccctgccacagaccgtctcagacacgcacagtgggcctgctgcatgattcacacccagtccctgccacagaccgtctcagacacgcacagtgggcctgctgcatgattcacacccagtccctgccacagaccgtctcagacacgcacagtgggcctgctgcatgcgtgttacctggcttttggctccacgctcactcatagccatgtccacatgggggcttgcacacaggatcactcacatatgtacatgtacccaccacaaacgtgcaagctcctgcacacatgcatgcacacaaacgtgtacacaagtgtgagctcctacacgcatacacacacacacgtgtacatgcaccaaagcatgtgtgacctacagacatgcagaacatgcacgtgtacacataccacagacacgcgtgtgcatgctcctacacaatacatatgcacatatcatgaacagcgtaagttcctacacacggacgtgtgatacacatgcatgtacaggtaagcacacatgtacaagctcctacaggcttgctctcacacacgtgtatgcacagcagagagacgtatgagcttctactgcacacatgcacacacacacgcacacgtacattcactacaaacgtgcagcctcctgcacacgtgcacattcatgtgtacaccacaaatgagttcccagacgtgtaaacacacgtgcacacatcgtacacatgtgagctcccacacgtacacacagatgcacatggacacaccccaaacacgcacaggctcctacacacatgcacacacgtgtacaccacaaacgagctcccagacatgtaaacacacgtctcccacacgtgagctcccacacatgtacacatgcacatgtacgcaccacaaacacatgcgcaggctcctgcaggcgtgaatacacacatgcacacacatatacacacacgtgccacaaacaagtgcacactgtcctggtgtcctgcactgcatcctgcctccttgctgaggggcccctgtgagaggcctctggatgggcatgggaagatgggctccctggcccccagcccatgcctccctgggatgaagagtccccctcctggcagaatgtctgggctttgcagagcaggccccgggggtgaagtcgcagcttcacttacaccagctgctctgtgagcaaggcttggtgccctggacaaggcccttcccctttagggaggtccagcctcgcaagctgaaacctcccctcggctcagccctataccaggcggccacagcaggactggccacacccacgccgcacctcatccgtgcacgcgtcggagcacggccagccttccgccacgagccagctgggaagggccgcggccgcctaaagccccagtcaacccagcctgtgtctgagcagacagggcgaacaagcaggccacaccgtctcgagggaggaggccagatgcggccagcgtctccaacagggtgaccatccgctcggcttgctgagcgtttaaacaaatgtttagacaggctgtggggactcccctgagttgagccttggccaggggtccggtgctgtcgcgggaaacctccagccttgttcttcaaaccactcagctcatgtgttttgcactgactagtactgaataatacaaccactcttatttaatgttagtattatttatttgacaactcagtgtctaacagcttgatatgcaggtccttgcatcctacatttctttaggaagttacccatttgtaactttaaaaacaggaaaaatatcagttggcaaatgcaatcttttttttttttaagctaaaggtgggtgaactggaatgaaaatctttctgatgttgtgtctataagcagccttgatgggatatgttagaagtgtcatgaaagtgtgattctacttttgcagaaaaatctaaagatcaatttatatagctttattttttactttatcaaagtatacagaattttaatatgcatatattgtgtctgacttaaaattataatgtctgcgtcaccatttaaaatgtctgttcattatgtaatgtaataaaagaaggtcttcaaaaatgtatttaacatgaatggtatccatagttgtcatcatcataaatactggagtttatttttaaattattaaacatagtaggtgcattaacataaatcagtctccacacagtaacatttaactgataattcattaatcagctttgaaaaattaaattgttaattaaacc

SEQ ID NO: 322963 - DNA, 7602 bp, Homo sapiens
  misc_feature (1)..(1): n is a, c, g, or t
  misc_feature (4)..(7): n is a, c, g, or t
  misc_feature (10)..(10): n is a, c, g, or t
ngcnnnngcngttcctcaaggcattcacggacttcctggccttcatggtcctctttaactacatcatccctgtgtccatgtacgtcacggtcgagatgcagaagttcctcggctcttacttcatcacctgggacgaagacatgtttgacgaggagactggcgaggggcctctggtgaacacgtcggacctcaatgaagagctgggacaggtggagtacatcttcacagacaagaccggcaccctcacggaaaacaacatggagttcaaggagtgctgcatcgaaggccatgtctacgtgccccacgtcatctgcaacgggcaggtcctcccagagtcgtcaggaatcgacatgattgactcgtcccccagcgtcaacgggagggagcgcgaggagctgtttttccgggccctctgtctctgccacaccgtccaggtgaaagacgatgacagcgtagacggccccaggaaatcgccggacggggggaaatcctgtgtgtacatctcatcctcgcccgacgaggtggcgctggtcgaaggtgtccagagacttggctttacctacctaaggctgaaggacaattacatggagatattaaacagggagaaccacatcgaaaggtttgaattgctggaaattttgagttttgactcagtcagaaggagaatgagtgtaattgtaaaatctgctacaggagaaatttatctgttttgcaaaggagcagattcttcgatattcccccgagtgatagaaggcaaagttgaccagatccgagccagagtggagcgtaacgcagtggaggggctccgaactttgtgtgttgcttataaaaggctgatccaagaagaatatgaaggcatttgtaagctgctgcaggctgccaaagtggcccttcaagatcgagagaaaaagttagcagaagcctatgagcaaatagagaaagatcttactctgcttggtgctacagctgttgaggaccggctgcaggagaaagctgcagacaccatcgaggccctgcagaaggccgggatcaaagtctgggttctcacgggagacaagatggagacggccgcggccacgtgctacgcctgcaagctcttccgcaggaacacgcagctgctggagctgaccaccaagaggatcgaggagcagagcctgcacgacgtcctgttcgagctgagcaagacggtcctgcgccacagcgggagcctgaccagagacaacctctccggactttcagcagatatgcaggactacggtttaattatcgacggagctgcactgtctctgataatgaagcctcgagaagacgggagttccggcaactacagggagctcttcctggaaatctgccggagctgcagcgcggtgctctgctgccgcatggcgcccttgcagaaggctcagattgttaaattaatcaaattttcaaaagagcacccaatcacgttagcaattggcgatggtgcaaatgatgtcagcatgattctggaagcgcacgtgggcataggtgtcatcggcaaggaaggccgccaggctgccaggaacagcgactatgcaatcccaaagtttaagcatttgaagaagatgctgcttgttcacgggcatttttattacattaggatctctgagctcgtgcagtacttcttctataagaacgtctgcttcatcttccctcagtttttataccagttcttctgtgggttttcacaacagactttgtacgacaccgcgtatctgaccctctacaacatcagcttcacctccctccccatcctcctgtacagcctcatggagcagcatgttggcattgacgtgctcaagagagacccgaccctgtacagggacgtcgccaagaatgccctgctgcgctggcgcgtgttcatctactggacgctcctgggactgtttgacgcactggtgttcttctttggtgcttatttcgtgtttgaaaatacaactgtgacaagcaacgggcagatatttggaaactggacgtttggaacgctggtattcaccgtgatggtgttcacagttacactaaagcttgcattggacacacactactggacttggatcaaccattttgtcatctgggggtcgctgctgttctacgttgtcttttcacttctctggggaggagtgatctggccgttcctcaactaccagaggatgtactacgtgttcatccagatgctgtccagcgggcccgcctggctggccatcgtgctgctggtgaccatcagcctccttcccgacgtcctcaagaaagtcctgtgccggcagctgtggccaacagcaacagagagagtccagaatgggtgcgcacagcctcgggaccgcgactcagaattcacccctcttgcctctctgcagagcccaggctaccagagcacctgtccctcggccgcctggtacagctcccactctcagcaggtgacactcgcggcctggaaggagaaggtgtccacggagcccccacccatcctcggcggttcccatcaccactgcagttccatcccaagtcacagctgccctaggtcccgtgtgggaatgctcgtgtgatggatggtcctaagcctgtggagactgtgcacgtgcctcttcctggcccccagcaggcaaggaggggggtcacaggccttgccctcgagcatggcaccctggccgcctggacccagcactgtggttgttgagccacaccagtggcctctgggcattcggctcaacgcaggagggacattctgctggcccaccctgcgcgctgtcatgcagaggccattcccccaggcctgtgtcttcacccacctgccgtcattggcctttgctgtcactgggagagaagagccgtccagggacccatggtggcccacatgtggatgccacatgctgctgtttcctgcttgcccggccaccacccatgccctccatagggtgaggtggagccatggtggtgcgtcctttactcaacaaccctccaatccggatgctgtgggaagggccgggtcactcggataccatcatccctgcggatgcaccgccgtaccctgctcatctgggagtggtttccctgcggttacgtccaagcccgcctgccctgtgtgttggggctggctgagtttcggtctccccatcaccggccgcctcgtggagaaggcagtgccacgtgggaggacaaggccacgccggcagcttccagccctgccgcagaagtgccaggatgtccatcagccactcgccagggcacggagccgtcagtccactgttacgggagaatgttgatttcgcgggtgcgagggccgggagacagatacttggctgtgatgagcagacatcctctgtccccgtggaggggtcaacaccaaggtggtgttcgtgcaccagaacctgtctcgggctgacgggggtggcacacaggacacgggtggatcccaacaggcagcaccgcacctccgcccgcctcccgcactgcagctccgcccgccgggctctgcgtctccacgtcccctcgtcccatccccacgtcccctcatcccgtcacctcgtccccacatccccttgccccgtcacctcgtcctcatgtccccttgtcctgtcacctcgtccccacgtcccctcgtctcatccccacgtcctctcgtccccttgtcccgtccccacataccctcgtccccatgtccccacgcagggctctccttcgtcttaggatctgtccagcgctgctctgggtgggttagcaaccccagggctgctgtgataggaagtccctgttgttctccgtactggcatttctatttctagaaataatatttgacatagccttaatggtccttaaagaagacatttcagtgtgagattcagacttcagacgctgaaactgctgcctttcaggaaagcaccaccaacgctggaggaggagccggccctcacgcccgccccgcgccacgctgtggaacggggctccggcaagtgaaacccagagggtgtttccgaggtgctcgacagtaggtatttttggaagctcagatttcaccatttgattgtataatcttttacctataaaatatttatttgaagtagagggtaaatcagcggtaagaacagtgaacacagtggttgggataaaataaggtgacaaacatcacaccaaagatgagggtagcgagcaactggcttgagcagacagaacggggaagactccactctgtcccgaggggccagccgcaggcgtccccagggccaccctgccctgaggtccttgtgtggccgccctggcttggcagccctgcccacgctgcccccgcaaacaatggtgtgtgcgtttttacagccctttttaggaacccaatatgggcataaatgtaacacctgtagcgggggcagattctctgtatgttcagttaacaaattatttgtaatgtatttttttagaaatcttaaaattgcctttgcactgaagtattttcatagctgtttatatctcttttattcatttatttaacatactgtctaattttaaaaataggtttttaaagctttcatttttaagtttatgaaattttggccactttacatttagattctggtgagagttttgactgaatgttccaatctctgatgaatgcgaattttcagatttgattttattctctacacacacctcttcttttcttggtatttctggtggcagtgattagttgaacagcacatttaaggcacgataatttgctacactttttctttacaatttgttgcaatttcatctgctttctatgtttcattgttaattgccatccttcagccttaaaaatagaagattctcacgtgaaggtttagtaagttgggtcccagctctgcctgtgtggagatagtcaccatgtacctctgacaacaagttttagtgtgaaagtcactaaacttttacacactcccaaacgtctttttaaaaattgcttgggaaattattaaatgaatgtgcctgatgatttgaaatagacaaggggcacgagataaaaaagaaaaggatgagaagatcctcagtgaatgacgttgcagggtcttcatgcaattttccacctcgcagtagttagtatttacttgccttaaactaactttgaagcaagtaatgtcaactttgagcactttgttgagttttgaaaaatcttatttgttgctgcacaggttaataaattatcaatttgtaattcagcatgttggtcagagacacggtcactgattcacacccagtccctgccacagaccgtctcagacacgcacagtgggcctgctgcatgattcacacccagtccctgccacagaccgtctcagacacgcacagtgggcctgctgcatgattcacacccagtccctgccacagaccgtctcagacacgcacagtgggcctgctgcatgcgtgttacctggcttttggctccacgctcactcatagccatgtccacatgggggcttgcacacaggatcactcacatatgtacatgtacccaccacaaacgtgcaagctcctgcacacatgcatgcacacaaacgtgtacacaagtgtgagctcctacacgcatacacacacacacgtgtacatgcaccaaagcatgtgtgacctacagacatgcagaacatgcacgtgtacacataccacagacacgcgtgtgcatgctcctacacaatacatatgcacatatcatgaacagcgtaagttcctacacacggacgtgtgatacacatgcatgtacaggtaagcacacatgtacaagctcctacaggcttgctctcacacacgtgtatgcacagcagagagacgtatgagcttctactgcacacatgcacacacacacgcacacgtacattcactacaaacgtgcagcctcctgcacacgtgcacattcatgtgtacaccacaaatgagttcccagacgtgtaaacacacgtgcacacatcgtacacatgtgagctcccacacgtacacacagatgcacatggacacaccccaaacacgcacaggctcctacacacatgcacacacgtgtacaccacaaacgagctcccagacatgtaaacacacgtctcccacacgtgagctcccacacatgtacacatgcacatgtacgcaccacaaacacattgcacactgtcctggtgtcctgcactgcatcctgcctccttgctgaggggcccctgtgagaggcctctggatgggcatgggaagatgggctccctggcccccagcccatgcctccctgggatgaagagtccccctcctggcagaatgtctgggctttgcagagcaggccccgggggtgaagtcgcagcttcacttacaccagctgctctgtgagcaaggcttggtgccctggacaaggcccttcccctttagggaggtccagcctcgcaagctgaaacctcccctcggctcagccctataccaggcggccacagcaggactggccacacccacgccgcacctcatccgtgcacgcgtcggagcacggccagccttccgccacgagccagctgggaagggccgcggccgcctaaagccccagtcaacccagcctgtgtctgagcagacagggcgaacaagcaggccacaccgtctcgagggaggaggccagatgcggccagcgtctccaacagggtgaccatccgctcggcttgctgagcgtttaaacaaatgtttagacaggctgtggggactcccctgagttgagccttggccaggggtccggtgctgtcgcgggaaacctccagccttgttcttcaaaccactcagctcatgtgttttgcactgactagtactgaataatacaaccactcttatttaatgttagtattatttatttgacaactcagtgtctaacagcttgatatgcaggtccttgcatcctacatttctttaggaagttacccatttgtaactttaaaaacaggaaaaatatcagttggcaaatgcaatcttttttttttttaagctaaaggtgggtgaactggaatgaaaatctttctgatgttgtgtctataagcagccttgatgggatatgttagaagtgtcatgaaagtgtgattctacttttgcagaaaaatctaaagatcaatttatatagctttattttttactttatcaaagtatacagaattttaatatgcatatattgtgtctgacttaaaattataatgtctgcgtcaccatttaaaatgtctgttcattatgtaatgtaataaaagaaggtcttcaaaaatgtatttaacatgaatggtatccatagttgtcatcatcataaatactggagtttatttttaaattattaaacatagtaggtgcattaacataaatcagtctccacacagtaacatttaactgataattcattaatcagctttgaaaaattaaattgttaattaaaccaatctaacatttcagtaaagtttattttgtatgcttctgtttttaacttttatttctgtagataaactgactggataatattatattggacttttctctagattatctaagcaggagacctgaatctgcttgcaataaagaataaaagtctgcttcagtttctttataaagaaactcacacaagtg

SEQ ID NO: 322964 - DNA, 7319 bp, Homo sapiens
  misc_feature (1)..(1): n is a, c, g, or t
  misc_feature (4)..(7): n is a, c, g, or t
  misc_feature (10)..(10): n is a, c, g, or t
ngcnnnngcngttcctcaaggcattcacggacttcctggccttcatggtcctctttaactacatcatccctgtgtccatgtacgtcacggtcgagatgcagaagttcctcggctcttacttcatcacctgggacgaagacatgtttgacgaggagactggcgaggggcctctggtgaacacgtcggacctcaatgaagagctgggacaggtggagtacatcttcacagacaagaccggcaccctcacggaaaacaacatggagttcaaggagtgctgcatcgaaggccatgtctacgtgccccacgtcatctgcaacgggcaggtcctcccagagtcgtcaggaatcgacatgattgactcgtcccccagcgtcaacgggagggagcgcgaggagctgtttttccgggccctctgtctctgccacaccgtccaggtgaaagacgatgacagcgtagacggccccaggaaatcgccggacggggggaaatcctgtgtgtacatctcatcctcgcccgacgaggtggcgctggtcgaaggtgtccagagacttggctttacctacctaaggctgaaggacaattacatggagatattaaacagggagaaccacatcgaaaggtttgaattgctggaaattttgagttttgactcagtcagaaggagaatgagtgtaattgtaaaatctgctacaggagaaatttatctgttttgcaaaggagcagattcttcgatattcccccgagtgatagaaggcaaagttgaccagatccgagccagagtggagcgtaacgcagtggaggggctccgaactttgtgtgttgcttataaaaggctgatccaagaagaatatgaaggcatttgtaagctgctgcaggctgccaaagtggcccttcaagatcgagagaaaaagttagcagaagcctatgagcaaatagagaaagatcttactctgcttggtgctacagctgttgaggaccggctgcaggagaaagctgcagacaccatcgaggccctgcagaaggccgggatcaaagtctgggttctcacgggagacaagatggagacggccgcggccacgtgctacgcctgcaagctcttccgcaggaacacgcagctgctggagctgaccaccaagaggatcgaggagcagagcctgcacgacgtcctgttcgagctgagcaagacggtcctgcgccacagcgggagcctgaccagagacaacctctccggactttcagcagatatgcaggactacggtttaattatcgacggagctgcactgtctctgataatgaagcctcgagaagacgggagttccggcaactacagggagctcttcctggaaatctgccggagctgcagcgcggtgctctgctgccgcatggcgcccttgcagaaggctcagattgttaaattaatcaaattttcaaaagagcacccaatcacgttagcaattggcgatggtgcaaatgatgtcagcatgattctggaagcgcacgtgggcataggtgtcatcggcaaggaaggccgccaggctgccaggaacagcgactatgcaatcccaaagtttaagcatttgaagaagatgctgcttgttcacgggcatttttattacattaggatctctgagctcgtgcagtacttcttctataagaacgtctgcttcatcttccctcagtttttataccagttcttctgtgggttttcacaacagactttgtacgacaccgcgtatctgaccctctacaacatcagcttcacctccctccccatcctcctgtacagcctcatggagcagcatgttggcattgacgtgctcaagagagacccgaccctgtacagggacgtcgccaagaatgccctgctgcgctggcgcgtgttcatctactggacgctcctgggactgtttgacgcactggtgttcttctttggtgcttatttcgtgtttgaaaatacaactgtgacaagcaacgggcagatatttggaaactggacgtttggaacgctggtattcaccgtgatggtgttcacagttacactaaagcttgcattggacacacactactggacttggatcaaccattttgtcatctgggggtcgctgctgttctacgttgtcttttcacttctctggggaggagtgatctggccgttcctcaactaccagaggatgtactacgtgttcatccagatgctgtccagcgggcccgcctggctggccatcgtgctgctggtgaccatcagcctccttcccgacgtcctcaagaaagtcctgtgccggcagctgtggccaacagcaacagagagagtccagaatgggtgcgcacagcctcgggaccgcgactcagaattcacccctcttgcctctctgcagagcccaggctaccagagcacctgtccctcggccgcctggtacagctcccactctcagcaggtgacactcgcggcctggaaggagaaggtgtccacggagcccccacccatcctcggcggttcccatcaccactgcagttccatcccaagtcacagctgccctaggtcccgtgtgggaatgctcgtgtgatggatggtcctaagcctgtggagactgtgcacgtgcctcttcctggcccccagcaggcaaggaggggggtcacaggccttgccctcgagcatggcaccctggccgcctggacccagcactgtggttgttgagccacaccagtggcctctgggcattcggctcaacgcaggagggacattctgctggcccaccctgcgcgctgtcatgcagaggccattcccccaggcctgtgtcttcacccacctgccgtcattggcctttgctgtcactgggagagaagagccgtccagggacccatggtggcccacatgtggatgccacatgctgctgtttcctgcttgcccggccaccacccatgccctccatagggtgaggtggagccatggtggtgcgtcctttactcaacaaccctccaatccggatgctgtgggaagggccgggtcactcggataccatcatccctgcggatgcaccgccgtaccctgctcatctgggagtggtttccctgcggttacgtccaagcccgcctgccctgtgtgttggggctggctgagtttcggtctccccatcaccggccgcctcgtggagaaggcagtgccacgtgggaggacaaggccacgccggcagcttccagccctgccgcagaagtgccaggatgtccatcagccactcgccagggcacggagccgtcagtccactgttacgggagaatgttgatttcgcgggtgcgagggccgggagacagatacttggctgtgatgagcagacatcctctgtccccgtggaggggtcaacaccaaggtggtgttcgtgcaccagaacctgtctcgggctgacgggggtggcacacaggacacgggtggatcccaacaggcagcaccgcacctccgcccgcctcccgcactgcagctccgcccgccgggctctgcgtctccacgtcccctcgtcccatccccacgtcccctcatcccgtcacctcgtccccacatccccttgccccgtcacctcgtcctcatgtccccttgtcctgtcacctcgtccccacgtcccctcgtctcatccccacgtcctctcgtccccttgtcccgtccccacataccctcgtccccatgtccccacgcagggctctccttcgtcttaggatctgtccagcgctgctctgggtgggttagcaaccccagggctgctgtgataggaagtccctgttgttctccgtactggcatttctatttctagaaataatatttgacatagccttaatggtccttaaagaagacatttcagtgtgagattcagacttcagacgctgaaactgctgcctttcaggaaagcaccaccaacgctggaggaggagccggccctcacgcccgccccgcgccacgctgtggaacggggctccggcaagtgaaacccagagggtgtttccgaggtgctcgacagtaggtatttttggaagctcagatttcaccatttgattgtataatcttttacctataaaatatttatttgaagtagagggtaaatcagcggtaagaacagtgaacacagtggttgggataaaataaggtgacaaacatcacaccaaagatgagggtagcgagcaactggcttgagcagacagaacggggaagactccactctgtcccgaggggccagccgcaggcgtccccagggccaccctgccctgaggtccttgtgtggccgccctggcttggcagccctgcccacgctgcccccgcaaacaatggtgtgtgcgtttttacagccctttttaggaacccaatatgggcataaatgtaacacctgtagcgggggcagattctctgtatgttcagttaacaaattatttgtaatgtatttttttagaaatcttaaaattgcctttgcactgaagtattttcatagctgtttatatctcttttattcatttatttaacatactgtctaattttaaaaataggtttttaaagctttcatttttaagtttatgaaattttggccactttacatttagattctggtgagagttttgactgaatgttccaatctctgatgaatgcgaattttcagatttgattttattctctacacacacctcttcttttcttggtatttctggtggcagtgattagttgaacagcacatttaaggcacgataatttgctacactttttctttacaatttgttgcaatttcatctgctttctatgtttcattgttaattgccatccttcagccttaaaaatagaagattctcacgtgaaggtttagtaagttgggtcccagctctgcctgtgtggagatagtcaccatgtacctctgacaacaagttttagtgtgaaagtcactaaacttttacacactcccaaacgtctttttaaaaattgcttgggaaattattaaatgaatgtgcctgatgatttgaaatagacaaggggcacgagataaaaaagaaaaggatgagaagatcctcagtgaatgacgttgcagggtcttcatgcaattttccacctcgcagtagttagtatttacttgccttaaactaactttgaagcaagtaatgtcaactttgagcactttgttgagttttgaaaaatcttatttgttgctgcacagatgcatgcacacaaacgtgtacacaagtgtgagctcctacacgcatacacacacacacgtgtacatgcaccaaagcatgtgtgacctacagacatgcagaacatgcacgtgtacacataccacagacacgcgtgtgcatgctcctacacaatacatatgcacatatcatgaacagcgtaagttcctacacacggacgtgtgatacacatgcatgtacaggtaagcacacatgtacaagctcctacaggcttgctctcacacacgtgtatgcacagcagagagacgtatgagcttctactgcacacatgcacacacacacgcacacgtacattcactacaaacgtgcagcctcctgcacacgtgcacattcatgtgtacaccacaaatgagttcccagacgtgtaaacacacgtgcacacatcgtacacatgtgagctcccacacgtacacacagatgcacatggacacaccccaaacacgcacaggctcctacacacatgcacacacgtgtacaccacaaacgagctcccagacatgtaaacacacgtctcccacacgtgagctcccacacatgtacacatgcacatgtacgcaccacaaacacatgcgcaggctcctgcaggcgtgaatacacacatgcacacacatatacacacacgtgccacaaacaagtgcacactgtcctggtgtcctgcactgcatcctgcctccttgctgaggggcccctgtgagaggcctctggatgggcatgggaagatgggctccctggcccccagcccatgcctccctgggatgaagagtccccctcctggcagaatgtctgggctttgcagagcaggccccgggggtgaagtcgcagcttcacttacaccagctgctctgtgagcaaggcttggtgccctggacaaggcccttcccctttagggaggtccagcctcgcaagctgaaacctcccctcggctcagccctataccaggcggccacagcaggactggccacacccacgccgcacctcatccgtgcacgcgtcggagcacggccagccttccgccacgagccagctgggaagggccgcggccgcctaaagccccagtcaacccagcctgtgtctgagcagacagggcgaacaagcaggccacaccgtctcgagggaggaggccagatgcggccagcgtctccaacagggtgaccatccgctcggcttgctgagcgtttaaacaaatgtttagacaggctgtggggactcccctgagttgagccttggccaggggtccggtgctgtcgcgggaaacctccagccttgttcttcaaaccactcagctcatgtgttttgcactgactagtactgaataatacaaccactcttatttaatgttagtattatttatttgacaactcagtgtctaacagcttgatatgcaggtccttgcatcctacatttctttaggaagttacccatttgtaactttaaaaacaggaaaaatatcagttggcaaatgcaatcttttttttttttaagctaaaggtgggtgaactggaatgaaaatctttctgatgttgtgtctataagcagccttgatgggatatgttagaagtgtcatgaaagtgtgattctacttttgcagaaaaatctaaagatcaatttatatagctttattttttactttatcaaagtatacagaattttaatatgcatatattgtgtctgacttaaaattataatgtctgcgtcaccatttaaaatgtctgttcattatgtaatgtaataaaagaaggtcttcaaaaatgtatttaacatgaatggtatccatagttgtcatcatcataaatactggagtttatttttaaattattaaacatagtaggtgcattaacataaatcagtctccacacagtaacatttaactgataattcattaatcagctttgaaaaattaaattgttaattaaaccaatctaacatttcagtaaagtttattttgtatgcttctgtttttaacttttatttctgtagataaactgactggataatattatattggacttttctctagattatctaagcaggagacctgaatctgcttgcaataaagaataaaagtctgcttcagtttctttataaagaaactcacacaagtg

SEQ ID NO: 322965 - DNA, 408 bp, Homo sapiens
atgggaggacacccctcacccagcagccctctgtgtgtcccctgaggaagggccagggctgccccagccattctgctgtggagagctccacagttaccagatggaatcacgtgagcacccgtgtggacggtgtgaccttctgcatttctctttcaggtttgaattgctggaaattttgagttttgactcagtcagaaggagaatgagtgtaattgtaaaatctgctacaggtaaaatttctttttcttttgatttattaagttatacgtggtggttgtgttttattctgatgactaaattctacaggagctttaaggatttagggtttaagaatgatttattctttttttaaaaactatagacaaatcctcacaaaatactaattttttatttttaaaaagtgcaaca

SEQ ID NO: 322966 - DNA, 390 bp, Homo sapiens
gcctctcagggcatccatgggaggacacccctcacccagcagccctctgtgtgtcccctgaggaagggccagggctgccccagccattctgctgtggagagctccacagttaccagatggaatcacgtgagcacccgtgtggacggtgtgaccttctgcatttctctttcaggtttgaattgctggaaattttgagttttgactcagtcagaaggagaatgagtgtaattgtaaaatctgctacaggtaaaatttctttttcttttgatttattaagttatacgtggtggttgtgttttattctgatgactaaattctacaggagctttaaggatttagggtttaagaatgatttattctttttttaaaaactatagacaaatcctcaca

SEQ ID NO: 322967 - DNA, 586 bp, Homo sapiens
attggcgatggtgcaaatgatgtcagcatgattctggaagcgcacgtgggcataggtgagcttcgtccttgctgctggcacatcctggtggccaggtcaccccttcgctagacaaaggcccatggcagcacgcaggtgcattcaggacacccccgtcaccaccctcgtgtgtgaccgggaaggctcatgatgatggtttcatccgttcttctccccgtccctgccctgtgtgtggtgtgcagaaagcatttcttcagctccttcacctccgtcttctaggtgtcatcggcaaggaaggccgccaggctgccaggaacagcgactatgcaatcccaaagtttaagcatttgaagaagatgctgcttgttcacgggcatttttattacattaggatctctgagctcgtgcagtacttcttctataaggtaggagggtcgccgctccccctcacggtgttagcaacaggtcacgcacagggtggcacgacccttgtctgagccacttgatgccacaagaggtcattgatctccgaggagcagcaactgtcagaaaggaaggggtgaatctgattgcagtcatctcttgc

SEQ ID NO: 322968 - DNA, 2263 bp, Homo sapiens
accccttcggggtagggggaggaaatgaaccccaaacagacccatggggagccaagcggcggttcgacccgacccgagtaggcctcggttgctatggtgacgcggccttctgggccccccaggtccagagcggcaaggcgcatgcgcaaagtgcctgggagcccgcaagggggattcgtctccctcttcccacccaggatgccccacggtccttgggtgctgacgtcacgagagagggcggtcccccatttgatgaagttaaccgcgttatatacaagagcgccagcgacagaggcccgttagtttatctcagactcggcctaggtttgctgagtctaaaaagggaccgcggtggaccttttgaggtgaccatagccgccgaggagcataagtgactgcgcactgaggtggccacagtcgctaagaaggttgccatcgcgacgcggctgctcgagggtttcgcttccgggttaggcggccgcagaagcgtagaccgagtagcttgagcgcctcttccggttaccttttcccagcgccagaggcgcctagggttggggtcctcgctcaggcacagagacccgacaccgagcggcggcttccccgggatcgagggacgcgcacgccagaggagacgaaaggaacccgggtcggaccagatcggaaccactgaccattgcccatggcggccctaggccctagcagccagaatgtcactgaatacgtcgttcgagttcctaagaatacaaccaaaaaatataacatcatggcttttaatgcagccgacaaagtcaactttgctacgtggaatcaggctcggctggagcgggacttgagcaacaagaaaatctaccaagaggaggagatgcccgaatcgggcgcgggcagtgagttcaaccgcaagcttcgggaggaggctcggaggaagaagtacggcatcgtcctcaaggagttccggcccgaggaccagccctggctgctccgggtcaacggcaaatcaggcaggaagttcaagggcatcaagaagggaggcgtaacagagaacacgtcctactacatcttcacccagtgccccgacggggccttcgaggccttccccgtgcacaactggtacaatttcacaccgctggcccggcatcgcacgctcactgccgaggaggccgaggaggagtgggagaggaggaacaaggtgctgaaccacttcagcatcatgcagcagcggcggctcaaggatcaggaccaggacgaggatgaggaggagaaggagaaacgtggccgcaggaaggcgagcgagctgcgcatccacgacctggaggacgacctggagatgtcgtccgatgccagtgatgccagtggtgaggaggggggcagagtccccaaggccaagaagaaggcgccgctggccaagggcggcaggaaaaagaagaagaagaagggttcagacgacgaggccttcgaggacagcgatgatggggacttcgagggccaagaggtggactacatgtcagacggctccagtagctcccaagaagagcctgagagcaaggccaaggcgccgcagcaggaggaggggcccaagggtgtcgatgagcagagcgacagtagtgaggagagtgaggaggagaagccgcctgaggaggacaaggaggaggaggaggagaagaaggcacccaccccgcaggagaagaagcgcaggaaagacagcagcgaggagtcggacagctcagaggagagcgacattgacagcgaggcctcctcagccctcttcatggcgaagaagaagacgccacccaagagagagcggaagccgtcgggagggagctcaaggggcaacagccgcccaggcacgcccagcgcagagggtggcagcacctcctccaccctgcgggcggctgccagcaaactcgagcaagggaagcgggtgagcgagatgcctgcagccaagcggttgcggctggacacgggaccccagagcctgtctgggaagtcgacaccccagccaccatcaggcaagacaacacccaacagcggcgacgtgcaggtgactgaggatgccgtgcgccgctacctgacacggaagcccatgaccactaaggacctgctgaaaaagttccagaccaagaagacagggctgagcagcgagcagacagtgaacgtgttggcccagatcctcaagcgactcaaccccgagcgcaagatgatcaacgacaaaatgcacttctccctcaaggagtgaggcttggtccaatacatggctctgcccccc

SEQ ID NO: 322969 - DNA, 3837 bp, Homo sapiens
accccttcggggtagggggaggaaatgaaccccaaacagacccatggggagccaagcggcggttcgacccgacccgagtaggcctcggttgctatggtgacgcggccttctgggccccccaggtccagagcggcaaggcgcatgcgcaaagtgcctgggagcccgcaagggggattcgtctccctcttcccacccaggatgccccacggtccttgggtgctgacgtcacgagagagggcggtcccccatttgatgaagttaaccgcgttatatacaagagcgccagcgacagaggcccgttagtttatctcagactcggcctaggtttgctgagtctaaaaagggaccgcggtggaccttttgaggtgaccatagccgccgaggagcataagtgactgcgcactgaggtggccacagtcgctaagaaggttgccatcgcgacgcggctgctcgagggtttcgcttccgggttaggcggccgcagaagcgtagaccgagtagcttgagcgcctcttccggttaccttttcccagcgccagaggcgcctagggttggggtcctcgctcaggcacagagacccgacaccgagcggcggcttccccgggatcgagggacgcgcacgccagaggagacgaaaggaacccgggtcggaccagatcggaaccactgaccattgcccatggcggccctaggccctagcagccagaatgtcactgaatacgtcgttcgagttcctaagaatacaaccaaaaaatataacatcatggcttttaatgcagccgacaaagtcaactttgctacgtggaatcaggctcggctggagcgggacttgagcaacaagaaaatctaccaagaggaggagatgcccgaatcgggcgcgggcagtgagttcaaccgcaagcttcgggaggaggctcggaggaagaagtacggcatcgtcctcaaggagttccggcccgaggaccagccctggctgctccgggtcaacggcaaatcaggcaggaagttcaagggcatcaagaagggaggcgtaacagagaacacgtcctactacatcttcacccagtgccccgacggggccttcgaggccttccccgtgcacaactggtacaatttcacaccgctggcccggcatcgcacgctcactgccgaggaggccgaggaggagtgggagaggaggaacaaggtgctgaaccacttcagcatcatgcagcagcggcggctcaaggatcaggaccaggacgaggatgaggaggagaaggagaaacgtggccgcaggaaggcgagcgagctgcgcatccacgacctggaggacgacctggagatgtcgtccgatgccagtgatgccagtggtgaggaggggggcagagtccccaaggccaagaagaaggcgccgctggccaagggcggcaggaaaaagaagaagaagaagggttcagacgacgaggccttcgaggacagcgatgatggggacttcgagggccaagaggtggactacatgtcagacggctccagtagctcccaagaagagcctgagagcaaggccaaggcgccgcagcaggaggaggggcccaagggtgtcgatgagcagagcgacagtagtgaggagagtgaggaggagaagccgcctgaggaggacaaggaggaggaggaggagaagaaggcacccaccccgcaggagaagaagcgcaggaaagacagcagcgaggagtcggacagctcagaggagagcgacattgacagcgaggcctcctcagccctcttcatggcgaagaagaagacgccacccaagagagagcggaagccgtcgggagggagctcaaggggcaacagccgcccaggcacgcccagcgcagagggtggcagcacctcctccaccctgcgggcggctgccagcaaactcgagcaagggaagcgggtgagcgagatgcctgcagccaagcggttgcggctggacacgggaccccagagcctgtctgggaagtcgacaccccagccaccatcaggcaagacaacacccaacagcggcgacgtgcaggtgactgaggatgccgtgcgccgctacctgacacggaagcccatgaccactaaggacctgctgaaaaagttccagaccaagaagacagggctgagcagcgagcagacagtgaacgtgttggcccagatcctcaagcgactcaaccccgagcgcaagatgatcaacgacaaaatgcacttctccctcaaggagtgaggcttggtccaatacatggctctgccccccagaacttaaggctctcactgccccttcgccatcctagagtgaggctctgtccaatacatggctctgccctccagaacttcaggctctcagtgacccttcgacatcctgcttgctccctgactcccagggccccgtagttagcaattctggaaaagttaagccatctcctcctctggcccttccttctggaatcttcagatgcctgttaggccttcttattgtcctcctcctcctggctcggcctccctcacactgaccaagggcctgtgctgcccactgggtaacttctacagttctcccttccacttccctaagtctctcttcagctgtgacttatccaccacatagcccagtaagtcttcagttttggctgggcatgatggtgagcgcctgcagtcccagctacttgggaggctaagcccagttcaaggctgcagtgaactatgatggtgccactgcattccagcctgggtgacagaatgaaatcctggcacaaaaaaaaaaaaaagtagccaggcatggtggcgggagcctgttgtcccagctgttccgtaggctgaggcacgagattcacttgaacctgggaggtggaggttgctgtgagctgacaccacgccactgcactccagcctgggtgacagtgagactctgtctcaataaataaaaaataataataaattgctcagatttctttgtttcctttttagatctgctactctgtttggataatgtcttattccttatgttttggtcccatctttcatggttttatttttatttatattttaggttttgagacagggtcttgctctgttcaccaggctagagtgcagtggtacaatctcggcttactgcgacctctggttcctgggctcaagcagttctcctgcctcagcctcccgagtagctgggattacgggcgcccgccaccgcgcctggctaatttttgtatttttagtagagacggtgtttcagcatgttggccaggctggtctcgaactcctggccataggtgatctgcctgcctcgtcctcccaaagtactgggattacaggcgtgagccactgcacccacccacgcctggctgatgtttttattttactcatcctgactgaggtctgacaatcctagaagctgaagttcccgggcatccttttgtttcttctgactccccttagtgatagattttcttgtgatttgggattggatgctcatggccagctgggggctctgtgggaatccggggtggcctactttgcaggcagtccttccagatggttcagccttggctttcgctagctacccaggagcgccagccccagcccattttgtgtgtggttctcagcttgcaggtggccaccaaagccaaccccccccactgccccgattgtgggtccctatgtttgaggttcccggtgatgtttcggggggcttctcccttcttacaagctcggtcatgcatatatttgatctggcgttgccaggcattctgtaagggagggcttttccagttcctggaaatggaactggaaaatgtggctggaaacattaatatggctggaaatggaatttgc

SEQ ID NO: 322970 - DNA, 2649 bp, Homo sapiens
accccttcggggtagggggaggaaatgaaccccaaacagacccatggggagccaagcggcggttcgacccgacccgagtaggcctcggttgctatggtgacgcggccttctgggccccccaggtccagagcggcaaggcgcatgcgcaaagtgcctgggagcccgcaagggggattcgtctccctcttcccacccaggatgccccacggtccttgggtgctgacgtcacgagagagggcggtcccccatttgatgaagttaaccgcgttatatacaagagcgccagcgacagaggcccgttagtttatctcagactcggcctaggtttgctgagtctaaaaagggaccgcggtggaccttttgaggtgaccatagccgccgaggagcataagtgactgcgcactgaggtggccacagtcgctaagaaggttgccatcgcgacgcggctgctcgagggtttcgcttccgggttaggcggccgcagaagcgtagaccgagtagcttgagcgcctcttccggttaccttttcccagcgccagaggcgcctagggttggggtcctcgctcaggcacagagacccgacaccgagcggcggcttccccgggatcgagggacgcgcacgccagaggagacgaaaggaacccgggtcggaccagatcggaaccactgaccattgcccatggcggccctaggccctagcagccagaatgtcactgaatacgtcgttcgagttcctaagaatacaaccaaaaaatataacatcatggcttttaatgcagccgacaaagtcaactttgctacgtggaatcaggctcggctggagcgggacttgagcaacaagaaaatctaccaagaggaggagatgcccgaatcgggcgcgggcagtgagttcaaccgcaagcttcgggaggaggctcggaggaagaagtacggcatcgtcctcaaggagttccggcccgaggaccagccctggctgctccgggtcaacggcaaatcaggcaggaagttcaagggcatcaagaagggaggcgtaacagagaacacgtcctactacatcttcacccagtgccccgacggggccttcgaggccttccccgtgcacaactggtacaatttcacaccgctggcccggcatcgcacgctcactgccgaggaggccgaggaggagtgggagaggaggaacaaggtgctgaaccacttcagcatcatgcagcagcggcggctcaaggatcaggaccaggacgaggatgaggaggagaaggagaaacgtggccgcaggaaggcgagcgagctgcgcatccacgacctggaggacgacctggagatgtcgtccgatgccagtgatgccagtggtgaggaggggggcagagtccccaaggccaagaagaaggcgccgctggccaagggcggcaggaaaaagaagaagaagaagggttcagacgacgaggccttcgaggacagcgatgatggggacttcgagggccaagaggtggactacatgtcagacggctccagtagctcccaagaagagcctgagagcaaggccaaggcgccgcagcaggaggaggggcccaagggtgtcgatgagcagagcgacagtagtgaggagagtgaggaggagaagccgcctgaggaggacaaggaggaggaggaggagaagaaggcacccaccccgcaggagaagaagcgcaggaaagacagcagcgaggagtcggacagctcagaggagagcgacattgacagcgaggcctcctcagccctcttcatggcgaagaagaagacgccacccaagagagagcggaagccgtcgggagggagctcaaggggcaacagccgcccaggcacgcccagcgcagagggtggcagcacctcctccaccctgcgggcggctgccagcaaactcgagcaagggaagcgggtgagcgagatgcctgcagccaagcggttgcggctggacacgggaccccagagcctgtctgggaagtcgacaccccagccaccatcaggcaagacaacacccaacagcggcgacgtgcaggtgactgaggatgccgtgcgccgctacctgacacggaagcccatgaccactaaggacctgctgaaaaagttccagaccaagaagacagggctgagcagcgagcagacagtgaacgtgttggcccagatcctcaagcgactcaaccccgagcgcaagatgatcaacgacaaaatgcacttctccctcaaggagtgaggcttggtccaatacatggctctgccccccagaacttaaggctctcactgccccttcgccatcctagagtgaggctctgtccaatacatggctctgccctccagaacttcaggctctcagtgacccttcgacatcctgcttgctccctgactcccagggccccgtagttagcaattctggaaaagttaagccatctcctcctctggcccttccttctggaatcttcagatgcctgttaggccttcttattgtcctcctcctcctggctcggcctccctcacactgaccaagggcctgtgctgcccactgggtaacttctacagttctcccttccacttccctaagtctctcttcagctgtgacttatccaccacatagcccagtaagaaccacacagggatcctctagatcaccca

SEQ ID NO: 322971 - DNA, 2177 bp, Homo sapiens
accccttcggggtagggggaggaaatgaaccccaaacagacccatggggagccaagcggcggttcgacccgacccgagtaggcctcggttgctatggtgacgcggccttctgggccccccaggtccagagcggcaaggcgcatgcgcaaagtgcctgggagcccgcaagggggattcgtctccctcttcccacccaggatgccccacggtccttgggtgctgacgtcacgagagagggcggtcccccatttgatgaagttaaccgcgttatatacaagagcgccagcgacagaggcccgttagtttatctcagactcggcctaggtttgctgagtctaaaaagggaccgcggtggaccttttgaggtgaccatagccgccgaggagcataagtgactgcgcactgaggtggccacagtcgctaagaaggttgccatcgcgacgcggctgctcgagggtttcgcttccgggttaggcggccgcagaagcgtagaccgagtagcttgagcgcctcttccggttaccttttcccagcgccagaggcgcctagggttggggtcctcgctcaggcacagagacccgacaccgagcggcggcttccccgggatcgagggacgcgcacgccagaggagacgaaaggaacccgggtcggaccagatcggaaccactgaccattgcccatggcggccctaggccctagcagccagaatgtcactgaatacgtcgttcgagttcctaagaatacaaccaaaaaatataacatcatggcttttaatgcagccgacaaagtcaactttgctacgtggaatcaggctcggctggagcgggacttgagcaacaagaaaatctaccaagaggaggagatgcccgaatcgggcgcgggcagtgagttcaaccgcaagcttcgggaggaggctcggaggaagaagtacggcatcgtcctcaaggagttccggcccgaggaccagccctggctgctccgggtcaacggcaaatcaggcaggaagttcaagggcatcaagaagggaggcgtaacagagaacacgtcctactacatcttcacccagtgccccgacggggccttcgaggccttccccgtgcacaactggtacaatttcacaccgctggcccggcatcgcacgctcactgccgaggaggccgaggaggagtgggagaggaggaacaaggtgctgaaccacttcagcatcatgcagcagcggcggctcaaggatcaggaccaggacgaggatgaggaggagaaggagaaacgtggccgcaggaaggcgagcgagctgcgcatccacgacctggaggacgacctggagatgtcgtccgatgccagtgatgccagtggtgaggaggggggcagagtccccaaggccaagaagaaggcgccgctggccaagggcggcaggaaaaagaagaagaagaagggttcagacgacgaggccttcgaggacagcgatgatggggacttcgagggccaagaggtggactacatgtcagacggctccagtagctcccaagaagagcctgagagcaaggccaaggcgccgcagcaggaggaggggcccaagggtgtcgatgagcagagcgacagtagtgaggagagtgaggaggagaagccgcctgaggaggacaaggaggaggaggaggagaagaaggcacccaccccgcaggagaagaagcgcaggaaagacagcagcgaggagtcggacagctcagaggagagcgacattgacagcgaggcctcctcagccctcttcatggcgaagaagaagacgccacccaagagagagcggaagccgtcgggagggagctcaaggggcaacagccgcccaggcacgcccagcgcagagtgggttgggcatgcaccctccctccaaaccctgctgggctgggctgcccaaggggcccaaaaaaaaaaaaaaaccctttttttcccccacgagagagggacgcacacaaacaaaaacaggcggcggcggacgcacacacccaagagaagagagaaaagatgcggggaggcgggaggggacgcaggaggcaaaaaaaagacaacaccgcggcgcccccaagatggggagcgagggagagagaggttttttttcgcgggacaaacagcagaggccccccatagggggggcaacaaagacgcgggaggcacacaaaggttta

SEQ ID NO: 322972 - DNA, 2436 bp, Homo sapiens
accccttcggggtagggggaggaaatgaaccccaaacagacccatggggagccaagcggcggttcgacccgacccgagtaggcctcggttgctatggtgacgcggccttctgggccccccaggtccagagcggcaaggcgcatgcgcaaagtgcctgggagcccgcaagggggattcgtctccctcttcccacccaggatgccccacggtccttgggtgctgacgtcacgagagagggcggtcccccatttgatgaagttaaccgcgttatatacaagagcgccagcgacagaggcccgttagtttatctcagactcggcctaggtttgctgagtctaaaaagggaccgcggtggaccttttgaggtgaccatagccgccgaggagcataagtgactgcgcactgaggtggccacagtcgctaagaaggttgccatcgcgacgcggctgctcgagggtttcgcttccgggttaggcggccgcagaagcgtagaccgagtagcttgagcgcctcttccggttaccttttcccagcgccagaggcgcctagggttggggtcctcgctcaggcacagagacccgacaccgagcggcggcttccccgggatcgagggacgcgcacgccagaggagacgaaaggaacccgggtcggaccagatcggaaccactgaccattgcccatggcggccctaggccctagcagccagaatgtcactgaatacgtcgttcgagttcctaagaatacaaccaaaaaatataacatcatggcttttaatgcagccgacaaagtcaactttgctacgtggaatcaggctcggctggagcgggacttgagcaacaagaaaatctaccaagaggaggagatgcccgaatcgggcgcgggcagtgagttcaaccgcaagcttcgggaggaggctcggaggaagaagtacggcatcgtcctcaaggagttccggcccgaggaccagccctggctgctccgggtcaacggcaaatcaggcaggaagttcaagggcatcaagaagggaggcgtaacagagaacacgtcctactacatcttcacccagtgccccgacggggccttcgaggccttccccgtgcacaactggtacaatttcacaccgctggcccggcatcgcacgctcactgccgaggaggccgaggaggagtgggagaggaggaacaaggtgctgaaccacttcagcatcatgcagcagcggcggctcaaggatcaggaccaggacgaggatgaggaggagaaggagaaacgtggccgcaggaaggcgagcgagctgcgcatccacgacctggaggacgacctggagatgtcgtccgatgccagtgatgccagtggtgaggaggggggcagagtccccaaggccaagaagaaggcgccgctggccaagggcggcaggaaaaagaagaagaagaagggttcagacgacgaggccttcgaggacagcgatgatggggacttcgagggccaagaggtggactacatgtcagacggctccagtagctcccaagaagagcctgagagcaaggccaaggcgccgcagcaggaggaggggcccaagggtgtcgatagagcagagcgacagtagtgagcgagaacaaggcacaccaccccgacacgacacacgaagcgcaggacagacagcagcgaggagtcgggacagctcacagcgagagcgaacattgccacgggaggccctcctcagccctctccatgccgaccaaccacgaccgcccaccaccgagagacgcggcagacgtcggagagggagctcaaaggagtccaacacgtcggacacggcaataccacagagagcagcacagggtggaaccacactccaccacaccctgcaggcggcatgccaagcaacacctccgagccaaggacgaagccgggatgaccgcagatgcccatacaacacaaacgagacgcaaagatggaccacagaggaccccgagcaggcttgactgaggcaaggttaaacaacccaagccccccaaatcaaggccagagaaacaccccaaccacagtgcgaagttacacggtgcacgtacacgattgccagggacccatacctcacagcggaaagcccagaccagcaaggcccgcagtcaaacgtccgcaccgcagaccgcgctcacaagacacactaccaacctcccttaacacaactacctacaacaaccacacacaccagcacagataccccacaacaccacaccaacagcaactatcacacatagaataccacaaaaaaagtcgtagccttctacttccatcgcgcaccacacgtcactcttcacccacaacaaaacagctagctagaatacacacccatcttactcaacgtcctttcctctcatacacaaccttaccagtagctcctaccaacacaaagccatacctacacacaccaccaaa

SEQ ID NO: 322973 - DNA, 3756 bp, Homo sapiens
accccttcggggtagggggaggaaatgaaccccaaacagacccatggggagccaagcggcggttcgacccgacccgagtaggcctcggttgctatggtgacgcggccttctgggccccccaggtccagagcggcaaggcgcatgcgcaaagtgcctgggagcccgcaagggggattcgtctccctcttcccacccaggatgccccacggtccttgggtgctgacgtcacgagagagggcggtcccccatttgatgaagttaaccgcgttatatacaagagcgccagcgacagaggcccgttagtttatctcagactcggcctaggtttgctgagtctaaaaagggaccgcggtggaccttttgaggtgaccatagccgccgaggagcataagtgactgcgcactgaggtggccacagtcgctaagaaggttgccatcgcgacgcggctgctcgagggtttcgcttccgggttaggcggccgcagaagcgtagaccgagtagcttgagcgcctcttccggttaccttttcccagcgccagaggcgcctagggttggggtcctcgctcaggcacagagacccgacaccgagcggcggcttccccgggatcgagggacgcgcacgccagaggagacgaaaggaacccgggtcggaccagatcggaaccactgaccattgcccatggcggccctaggccctagcagccagaatgtcactgaatacgtcgttcgagttcctaagaatacaaccaaaaaatataacatcatggcttttaatgcagccgacaaagtcaactttgctacgtggaatcaggctcggctggagcgggacttgagcaacaagaaaatctaccaagaggaggagatgcccgaatcgggcgcgggcagtgagttcaaccgcaagcttcgggaggaggctcggaggaagttcaagggcatcaagaagggaggcgtaacagagaacacgtcctactacatcttcacccagtgccccgacggggccttcgaggccttccccgtgcacaactggtacaatttcacaccgctggcccggcatcgcacgctcactgccgaggaggccgaggaggagtgggagaggaggaacaaggtgctgaaccacttcagcatcatgcagcagcggcggctcaaggatcaggaccaggacgaggatgaggaggagaaggagaaacgtggccgcaggaaggcgagcgagctgcgcatccacgacctggaggacgacctggagatgtcgtccgatgccagtgatgccagtggtgaggaggggggcagagtccccaaggccaagaagaaggcgccgctggccaagggcggcaggaaaaagaagaagaagaagggttcagacgacgaggccttcgaggacagcgatgatggggacttcgagggccaagaggtggactacatgtcagacggctccagtagctcccaagaagagcctgagagcaaggccaaggcgccgcagcaggaggaggggcccaagggtgtcgatgagcagagcgacagtagtgaggagagtgaggaggagaagccgcctgaggaggacaaggaggaggaggaggagaagaaggcacccaccccgcaggagaagaagcgcaggaaagacagcagcgaggagtcggacagctcagaggagagcgacattgacagcgaggcctcctcagccctcttcatggcgaagaagaagacgccacccaagagagagcggaagccgtcgggagggagctcaaggggcaacagccgcccaggcacgcccagcgcagagggtggcagcacctcctccaccctgcgggcggctgccagcaaactcgagcaagggaagcgggtgagcgagatgcctgcagccaagcggttgcggctggacacgggaccccagagcctgtctgggaagtcgacaccccagccaccatcaggcaagacaacacccaacagcggcgacgtgcaggtgactgaggatgccgtgcgccgctacctgacacggaagcccatgaccactaaggacctgctgaaaaagttccagaccaagaagacagggctgagcagcgagcagacagtgaacgtgttggcccagatcctcaagcgactcaaccccgagcgcaagatgatcaacgacaaaatgcacttctccctcaaggagtgaggcttggtccaatacatggctctgccccccagaacttaaggctctcactgccccttcgccatcctagagtgaggctctgtccaatacatggctctgccctccagaacttcaggctctcagtgacccttcgacatcctgcttgctccctgactcccagggccccgtagttagcaattctggaaaagttaagccatctcctcctctggcccttccttctggaatcttcagatgcctgttaggccttcttattgtcctcctcctcctggctcggcctccctcacactgaccaagggcctgtgctgcccactgggtaacttctacagttctcccttccacttccctaagtctctcttcagctgtgacttatccaccacatagcccagtaagtcttcagttttggctgggcatgatggtgagcgcctgcagtcccagctacttgggaggctaagcccagttcaaggctgcagtgaactatgatggtgccactgcattccagcctgggtgacagaatgaaatcctggcacaaaaaaaaaaaaaagtagccaggcatggtggcgggagcctgttgtcccagctgttccgtaggctgaggcacgagattcacttgaacctgggaggtggaggttgctgtgagctgacaccacgccactgcactccagcctgggtgacagtgagactctgtctcaataaataaaaaataataataaattgctcagatttctttgtttcctttttagatctgctactctgtttggataatgtcttattccttatgttttggtcccatctttcatggttttatttttatttatattttaggttttgagacagggtcttgctctgttcaccaggctagagtgcagtggtacaatctcggcttactgcgacctctggttcctgggctcaagcagttctcctgcctcagcctcccgagtagctgggattacgggcgcccgccaccgcgcctggctaatttttgtatttttagtagagacggtgtttcagcatgttggccaggctggtctcgaactcctggccataggtgatctgcctgcctcgtcctcccaaagtactgggattacaggcgtgagccactgcacccacccacgcctggctgatgtttttattttactcatcctgactgaggtctgacaatcctagaagctgaagttcccgggcatccttttgtttcttctgactccccttagtgatagattttcttgtgatttgggattggatgctcatggccagctgggggctctgtgggaatccggggtggcctactttgcaggcagtccttccagatggttcagccttggctttcgctagctacccaggagcgccagccccagcccattttgtgtgtggttctcagcttgcaggtggccaccaaagccaaccccccccactgccccgattgtgggtccctatgtttgaggttcccggtgatgtttcggggggcttctcccttcttacaagctcggtcatgcatatatttgatctggcgttgccaggcattctgtaagggagggcttttccagttcctggaaatggaactggaaaatgtggctggaaacattaatatggctggaaatggaatttgc

SEQ ID NO: 322974 - DNA, 3122 bp, Homo sapiens
atattttcttcttccggtgtgagagctacatcatgaaaaatcaaacagtcccaatccaagtctttcattgcttcttgaaagccaacgtggaatcaggctcggctggagcgggacttgagcaacaagaaaatctaccaagaggaggagatgcccgaatcgggcgcgggcagtgagttcaaccgcaagcttcgggaggaggctcggaggaagaagtacggcatcgtcctcaaggagttccggcccgaggaccagccctggctgctccgggtcaacggcaaatcaggcaggaagttcaagggcatcaagaagggaggcgtaacagagaacacgtcctactacatcttcacccagtgccccgacggggccttcgaggccttccccgtgcacaactggtacaatttcacaccgctggcccggcatcgcacgctcactgccgaggaggccgaggaggagtgggagaggaggaacaaggtgctgaaccacttcagcatcatgcagcagcggcggctcaaggatcaggaccaggacgaggatgaggaggagaaggagaaacgtggccgcaggaaggcgagcgagctgcgcatccacgacctggaggacgacctggagatgtcgtccgatgccagtgatgccagtggtgaggaggggggcagagtccccaaggccaagaagaaggcgccgctggccaagggcggcaggaaaaagaagaagaagaagggttcagacgacgaggccttcgaggacagcgatgatggggacttcgagggccaagaggtggactacatgtcagacggctccagtagctcccaagaagagcctgagagcaaggccaaggcgccgcagcaggaggaggggcccaagggtgtcgatgagcagagcgacagtagtgaggagagtgaggaggagaagccgcctgaggaggacaaggaggaggaggaggagaagaaggcacccaccccgcaggagaagaagcgcaggaaagacagcagcgaggagtcggacagctcagaggagagcgacattgacagcgaggcctcctcagccctcttcatggcgaagaagaagacgccacccaagagagagcggaagccgtcgggagggagctcaaggggcaacagccgcccaggcacgcccagcgcagagggtggcagcacctcctccaccctgcgggcggctgccagcaaactcgagcaagggaagcgggtgagcgagatgcctgcagccaagcggttgcggctggacacgggaccccagagcctgtctgggaagtcgacaccccagccaccatcaggcaagacaacacccaacagcggcgacgtgcaggtgactgaggatgccgtgcgccgctacctgacacggaagcccatgaccactaaggacctgctgaaaaagttccagaccaagaagacagggctgagcagcgagcagacagtgaacgtgttggcccagatcctcaagcgactcaaccccgagcgcaagatgatcaacgacaaaatgcacttctccctcaaggagtgaggcttggtccaatacatggctctgccccccagaacttaaggctctcactgccccttcgccatcctagagtgaggctctgtccaatacatggctctgccctccagaacttcaggctctcagtgacccttcgacatcctgcttgctccctgactcccagggccccgtagttagcaattctggaaaagttaagccatctcctcctctggcccttccttctggaatcttcagatgcctgttaggccttcttattgtcctcctcctcctggctcggcctccctcacactgaccaagggcctgtgctgcccactgggtaacttctacagttctcccttccacttccctaagtctctcttcagctgtgacttatccaccacatagcccagtaagtcttcagttttggctgggcatgatggtgagcgcctgcagtcccagctacttgggaggctaagcccagttcaaggctgcagtgaactatgatggtgccactgcattccagcctgggtgacagaatgaaatcctggcacaaaaaaaaaaaaaagtagccaggcatggtggcgggagcctgttgtcccagctgttccgtaggctgaggcacgagattcacttgaacctgggaggtggaggttgctgtgagctgacaccacgccactgcactccagcctgggtgacagtgagactctgtctcaataaataaaaaataataataaattgctcagatttctttgtttcctttttagatctgctactctgtttggataatgtcttattccttatgttttggtcccatctttcatggttttatttttatttatattttaggttttgagacagggtcttgctctgttcaccaggctagagtgcagtggtacaatctcggcttactgcgacctctggttcctgggctcaagcagttctcctgcctcagcctcccgagtagctgggattacgggcgcccgccaccgcgcctggctaatttttgtatttttagtagagacggtgtttcagcatgttggccaggctggtctcgaactcctggccataggtgatctgcctgcctcgtcctcccaaagtactgggattacaggcgtgagccactgcacccacccacgcctggctgatgtttttattttactcatcctgactgaggtctgacaatcctagaagctgaagttcccgggcatccttttgtttcttctgactccccttagtgatagattttcttgtgatttgggattggatgctcatggccagctgggggctctgtgggaatccggggtggcctactttgcaggcagtccttccagatggttcagccttggctttcgctagctacccaggagcgccagccccagcccattttgtgtgtggttctcagcttgcaggtggccaccaaagccaaccccccccactgccccgattgtgggtccctatgtttgaggttcccggtgatgtttcggggggcttctcccttcttacaagctcggtcatgcatatatttgatctggcgttgccaggcattctgtaagggagggcttttccagttcctggaaatggaactggaaaatgtggctggaaacattaatatggctggaaatggaatttgc

SEQ ID NO: 322975 - DNA, 1204 bp, Homo sapiens
accccttcggggtagggggaggaaatgaaccccaaacagacccatggggagccaagcggcggttcgacccgacccgagtaggcctcggttgctatggtgacgcggccttctgggccccccaggtccagagcggcaaggcgcatgcgcaaagtgcctgggagcccgcaagggggattcgtctccctcttcccacccaggatgccccacggtccttgggtgctgacgtcacgagagagggcggtcccccatttgatgaagttaaccgcgttatatacaagagcgccagcgacagaggcccgttagtttatctcagactcggcctaggtttgctgagtctaaaaagggaccgcggtggaccttttgaggtgaccatagccgccgaggagcataagtgactgcgcactgaggtggccacagtcgctaagaaggttgccatcgcgacgcggctgctcgagggtttcgcttccgggttaggcggccgcagaagcgtagaccgagtagcttgagcgcctcttccggttaccttttcccagcgccagaggcgcctagggttggggtcctcgctcaggcacagagacccgacaccgagcggcggcttccccgggatcgagggacgcgcacgccagaggagacgaaaggaacccgggtcggaccagatcggaaccactgaccattgcccatggcggccctaggccctagcagccagaatgtcactgaatacgtcgttcgagttcctaagaatacaaccaaaaaatataacatcatggcttttaatgcagccgacaaagtcaactttgctacgtggaatcaggctcggctggagcgggacttgagcaacaagaaaatctaccaagaggaggagatgcccgaatcgggcgcgggcagtgagttcaaccgcaagcttcgggaggaggctcggaggaagaagtacggcatcgtcctcaaggagttccggcccgaggaccagccctggctgctccgggtcaacggcaaatcaggcaggaagttcaagggcatcaagaagggaggcgtaacagagaacacgtcctactacatcttcacccagtgccccgacggggccttcgaggccttccccgtgcacaactggtacaatttcacaccgctggcccggcatcgcacgctcactgccgagcctgattccacgtagcaaagttgactttgtcgcctgcaatcaagcctggaa

SEQ ID NO: 322976 - DNA, 2424 bp, Homo sapiens
accccttcggggtagggggaggaaatgaaccccaaacagacccatggggagccaagcggcggttcgacccgacccgagtaggcctcggttgctatggtgacgcggccttctgggccccccaggtccagagcggcaaggcgcatgcgcaaagtgcctgggagcccgcaagggggattcgtctccctcttcccacccaggatgccccacggtccttgggtgctgacgtcacgagagagggcggtcccccatttgatgaagttaaccgcgttatatacaagagcgccagcgacagaggcccgttagtttatctcagactcggcctaggtttgctgagtctaaaaagggaccgcggtggaccttttgaggtgaccatagccgccgaggagcataagtgactgcgcactgaggtggccacagtcgctaagaaggttgccatcgcgacgcggctgctcgagggtttcgcttccgggttaggcggccgcagaagcgtagaccgagtagcttgagcgcctcttccggttaccttttcccagcgccagaggcgcctagggttggggtcctcgctcaggcacagagacccgacaccgagcggcggcttccccgggatcgagggacgcgcacgccagaggagacgaaaggaacccgggtcggaccagatcggaaccactgaccattgcccatggcggccctaggccctagcagccagaatgtcactgaatacgtcgttcgagttcctaagaatacaaccaaaaaatataacatcatggcttttaatgcagccgacaaagtcaactttgctacgtggaatcaggctcggctggagcgggacttgagcaacaagaaaatctaccaagaggaggagatgcccgaatcgggcgcgggcagtgagttcaaccgcaagcttcgggaggaggctcggaggaagaagtacggcatcgtcctcaaggagttccggcccgaggaccagccctggctgctccgggtcaacggcaaatcaggcaggaagttcaagggcatcaagaagggaggcgtaacagagaacacgtcctactacatcttcacccagtgccccgacggggccttcgaggccttccccctcacactgaccaagggcctgtgctgcccactgggtaacttctacagttctcccttccacttccctaagtctctcttcagctgtgacttatccaccacatagcccagtaagtcttcagttttggctgggcatgatggtgagcgcctgcagtcccagctacttgggaggctaagcccagttcaaggctgcagtgaactatgatggtgccactgcattccagcctgggtgacagaatgaaatcctggcacaaaaaaaaaaaaaagtagccaggcatggtggcgggagcctgttgtcccagctgttccgtaggctgaggcacgagattcacttgaacctgggaggtggaggttgctgtgagctgacaccacgccactgcactccagcctgggtgacagtgagactctgtctcaataaataaaaaataataataaattgctcagatttctttgtttcctttttagatctgctactctgtttggataatgtcttattccttatgttttggtcccatctttcatggttttatttttatttatattttaggttttgagacagggtcttgctctgttcaccaggctagagtgcagtggtacaatctcggcttactgcgacctctggttcctgggctcaagcagttctcctgcctcagcctcccgagtagctgggattacgggcgcccgccaccgcgcctggctaatttttgtatttttagtagagacggtgtttcagcatgttggccaggctggtctcgaactcctggccataggtgatctgcctgcctcgtcctcccaaagtactgggattacaggcgtgagccactgcacccacccacgcctggctgatgtttttattttactcatcctgactgaggtctgacaatcctagaagctgaagttcccgggcatccttttgtttcttctgactccccttagtgatagattttcttgtgatttgggattggatgctcatggccagctgggggctctgtgggaatccggggtggcctactttgcaggcagtccttccagatggttcagccttggctttcgctagctacccaggagcgccagccccagcccattttgtgtgtggttctcagcttgcaggtggccaccaaagccaaccccccccactgccccgattgtgggtccctatgtttgaggttcccggtgatgtttcggggggcttctcccttcttacaagctcggtcatgcatatatttgatctggcgttgccaggcattctgtaagggagggcttttccagttcctggaaatggaactggaaaatgtggctggaaacattaatatggctggaaatggaatttgc

SEQ ID NO: 322977 - DNA, 2944 bp, Homo sapiens
accccttcggggtagggggaggaaatgaaccccaaacagacccatggggagccaagcggcggttcgacccgacccgagtaggcctcggttgctatggtgacgcggccttctgggccccccaggtccagagcggcaaggcgcatgcgcaaagtgcctgggagcccgcaagggggattcgtctccctcttcccacccaggatgccccacggtccttgggtgctgacgtcacgagagagggcggtcccccatttgatgaagttaaccgcgttatatacaagagcgccagcgacagaggcccgttagtttatctcagactcggcctaggtttgctgagtctaaaaagggaccgcggtggaccttttgaggtgaccatagccgccgaggagcataagtgactgcgcactgaggtggccacagtcgctaagaaggttgccatcgcgacgcggctgctcgagggtttcgcttccgggttaggcggccgcagaagcgtagaccgagtagcttgagcgcctcttccggttaccttttcccagcgccagaggcgcctagggttggggtcctcgctcaggcacagagacccgacaccgagcggcggcttccccgggatcgagggacgcgcacgccagaggagacgaaaggaacccgggtcggaccagatcggaaccactgaccattgcccatggcggccctaggccctagcagccagaatgtcactgaatacgtcgttcgagttcctaagaatacaaccaaaaaatataacatcatggcttttaatgcagccgacaaagtcaactttgctacgtggaatcaggctcggctggagcgggacttgagcaacaagaaaatctaccaagaggaggagatgcccgaatcgggcgcgggcagtgagttcaaccgcaagcttcgggaggaggctcggaggaagaagtacggcatcgtcctcaaggagttccggcccgaggaccagccctggctgctccgggtcaacggcaaatcaggcaggaagttcaagggcatcaagaagggaggcgtaacagagaacacgtcctactacatcttcacccagtgccccgacggggccttcgaggccttccccgtgcacaactggtacaatttcacaccgctggcccggcatcgcacgctcactgccgaggaggccgaggaggagtgggagaggaggaacaaggtgctgaaccacttcagcatcatgcagcagcggcggctcaaggatcaggaccaggacgaggatgaggaggagaaggagaaacgtggccgcaggaaggcgagcgagctgcgcatccacgacctggaggacgacctggagatgtcgtccgatgccagtgatgccagtggtgaggaggggggcagagtccccaaggccaagaagaaggcgccgctggccaagggcggcaggaaaaagaagaagaagaagggttcagacgacgaggccttcgaggacagcgatgatggggacttcgagggccaagaggtggactacatgtcagacggctccagtagctcccaagaagagcctgagagcaaggccaaggcgccgcagcaggaggaggggcccaagggtgtcgatgagcagagcgacagtagtgaggagagtgaggaggagaagccgcctgaggaggacaaggaggaggaggaggagaagaaggcacccaccccgcaggagaagaagcgcaggaaagacagcagcgaggagtcggacagctcagaggagagcgacattgacagcgaggcctcctcagccctcttcatggcgaagaagaagacgccacccaagagagagcggaagccgtcgggagggagctcaaggggcaacagccgcccaggcacgcccagcgcagagggtggcagcacctcctccaccctgcgggcggctgccagcaaactcgagcaagggaagcgggtgagcgagatgcctgcagccaagcggttgcggctggacacgggaccccagagcctgtctgggaagtcgacaccccagccaccatcaggcaagacaacacccaacagcggcgacgtgcaggtgactgaggatgccgtgcgccgctacctgacacggaagcccatgaccactaaggacctgctgaaaaagttccagaccaagaagacagggctgagcagcgagcagacagtgaacgtgttggcccagatcctcaagcgactcaaccccgagcgcaagatgatcaacgacaaaatgcacttctccctcaaggagtgaggcttggtccaatacatggctctgccccccagaacttaaggctctcactgccccttcgccatcctagagtgaggctctgtccaatacatggctctgccctccagaacttcaggctctcagtgacccttcgacatcctgcttgctccctgactcccagggccccgtagttagcaattctggaaaagttaagccatctcctcctctggcccttccttctggaatcttcagatgcctgttaggccttcttattgtcctcctcctcctggctcggcctccctcacactgaccaagggcctgtgctgcccactgggtaacttctacagttctcccttccacttccctaagtctctcttcagctgtgacttatccaccacatagcccagtaagtcttcagttttggctgggcatgatggtgagcgcctgcagtcccagctacttgggaggctaagcccagttcaaggctgcagtgaactatgatggtgccactgcattccagcctgggtgacagaatgaaatcctggcacaaaaaaaaaaaaaagtagccaggcatggtggcgggagcctgttgtcccagctgttccgtaggctgaggcacgagattcacttgaacctgggaggtggaggttgctgtgagctgacaccacgccactgcactccagcctgggtgacagtgagactctgtctcaataaataaaaaataataataaattg

SEQ ID NO: 322978 - DNA, 748 bp, Homo sapiens
accccttcggggtagggggaggaaatgaaccccaaacagacccatggggagccaagcggcggttcgacccgacccgagtaggcctcggttgctatggtgacgcggccttctgggccccccaggtccagagcggcaaggcgcatgcgcaaagtgcctgggagcccgcaagggggattcgtctccctcttcccacccaggatgccccacggtccttgggtgctgacgtcacgagagagggcggtcccccatttgatgaagttaaccgcgttatatacaagagcgccagcgacagaggcccgttagtttatctcagactcggcctaggtttgctgagtctaaaaagggaccgcggtggaccttttgaggtgaccatagccgccgaggagcataagtgactgcgcactgaggtggccacagtcgctaagaaggttgccatcgcgacgcggctgctcgagggtttcgcttccgggttaggcggccgcagaagcgtagaccgagtagcttgagcgcctcttccggttaccttttcccagcgccagaggcgcctagggttggggtcctcgctcaggcacagagacccgacaccgagcggcggcttccccgggatcgagggacgcgcacgccagaggagacgaaaggaacccgggtcggaccagatcggaaccactgaccattgcccatggcggccctagtgagtgtggatttggcggggttcgggggttccgacggcgacctcggcgacccctca

SEQ ID NO: 322979 - DNA, 2757 bp, Homo sapiens
accccttcggggtagggggaggaaatgaaccccaaacagacccatggggagccaagcggcggttcgacccgacccgagtaggcctcggttgctatggtgacgcggccttctgggccccccaggtccagagcggcaaggcgcatgcgcaaagtgcctgggagcccgcaagggggattcgtctccctcttcccacccaggatgccccacggtccttgggtgctgacgtcacgagagagggcggtcccccatttgatgaagttaaccgcgttatatacaagagcgccagcgacagaggcccgttagtttatctcagactcggcctaggtttgctgagtctaaaaagggaccgcggtggaccttttgaggtgaccatagccgccgaggagcataagtgactgcgcactgaggtggccacagtcgctaagaaggttgccatcgcgacgcggctgctcgagggtttcgcttccgggttaggcggccgcagaagcgtagaccgagtagcttgagcgcctcttccggttaccttttcccagcgccagaggcgcctagggttggggtcctcgctcaggcacagagacccgacaccgagcggcggcttccccgggatcgagggacgcgcacgccagaggagacgaaaggaacccgggtcggaccagatcggaaccactgaccattgcccatggcggccctaggccctagcagccagaatgtcactgaatacgtcgttcgagttcctaagaatacaaccaaaaaatataacatcatggcttttaatgcagccgacaaagtcaactttgctacgtggaatcaggctcggctggagcgggacttgagcaacaagaaaatctaccaagaggaggagatgcccgaatcgggcgcgggcagtgagttcaaccgcaagcttcgggaggaggctcggaggaagaagtacggcatcgtcctcaaggagttccggcccgaggaccagccctggctgctccgggtcaacggcaaatcaggcaggaagttcaagggcatcaagaagggaggcgtaacagagaacacgtcctactacatcttcacccagtgccccgacggggccttcgaggccttccccgtgcacaactggtacaatttcacaccgctggcccggcatcgcacgctcactgccgaggaggccgaggaggagtgggagaggaggaacaaggtgctgaaccacttcagcatcatgcagcagcggcggctcaaggatcaggaccaggacgaggatgaggaggagaaggagaaacgtggccgcaggaaggcgagcgagctgcgcatccacgacctggaggacgacctggagatgtcgtccgatgccagtgatgccagtggtgaggaggggggcagagtccccaaggccaagaagaaggcgccgctggccaagggcggcaggaaaaagaagaagaagaagggttcagacgacgaggccttcgaggacagcgatgatggggacttcgagggccaagaggtggactacatgtcagacggctccagtagctcccaagaagagcctgagagcaaggccaaggcgccgcagcaggaggaggggcccaagggtgtcgatgagcagagcgacagtagtgaggagagtgaggaggagaagccgcctgaggaggacaaggaggaggaggaggagaagaaggcacccaccccgcaggagaagaagcgcaggaaagacagcagcgaggagtcggacagctcagaggagagcgacattgacagcgaggcctcctcagccctcttcatggcgaagaagaagacgccacccaagagagagcggaagccgtcgggagggagctcaaggggcaacagccgcccaggcacgcccagcgcagagggtggcagcacctcctccaccctgcgggcggctgccagcaaactcgagcaagggaagcgggtgagcgagatgcctgcagccaagcggttgcggctggacacgggaccccagagcctgtctgggaagtcgacaccccagccaccatcaggcaagacaacacccaacagcggcgacgtgcaggtgactgaggatgccgtgcgccgctacctgacacggaagcccatgaccactaaggacctgctgaaaaagttccagaccaagaagacagggctgagcagcgagcagacagtgaacgtgttggcccagatcctcaagcgactcaaccccgagcgcaagatgatcaacgacaaaatgcacttctccctcaaggagtgaggcttggtccaatacatggctctgccccccagaacttaaggctctcactgccccttcgccatcctagagtgaggctctgtccaatacatggctctgccctccagaacttcaggctctcagtgacccttcgacatcctgcttgctccctgactcccagggccccgtagttagcaattctggaaaagttaagccatctcctcctctggcccttccttctggaatcttcagatgcctgttaggccttcttattgtcctcctcctcctggctcggcctccctcacactgaccaagggcctgtgctgcccactgggtaacttctacagttctcccttccacttccctaagtctctcttcagctgtgacttatccaccacatagcccagtaagtcttcagttttggctgggcatgatggtgagcgcctgcagtcccagctacttgggaggctaagcccagttcaaggctgcagtgaactatgatggtgccactgcattccagcctgggtgacagaatgaaatcctggcac

SEQ ID NO: 322980 - DNA, 3912 bp, Homo sapiens
accccttcggggtagggggaggaaatgaaccccaaacagacccatggggagccaagcggcggttcgacccgacccgagtaggcctcggttgctatggtgacgcggccttctgggccccccaggtccagagcggcaaggcgcatgcgcaaagtgcctgggagcccgcaagggggattcgtctccctcttcccacccaggatgccccacggtccttgggtgctgacgtcacgagagagggcggtcccccatttgatgaagttaaccgcgttatatacaagagcgccagcgacagaggcccgttagtttatctcagactcggcctaggtttgctgagtctaaaaagggaccgcggtggaccttttgaggtgaccatagccgccgaggagcataagtgactgcgcactgaggtggccacagtcgctaagaaggttgccatcgcgacgcggctgctcgagggtttcgcttccgggttaggcggccgcagaagcgtagaccgagtagcttgagcgcctcttccggttaccttttcccagcgccagaggcgcctagggttggggtcctcgctcaggcacagagacccgacaccgagcggcggcttccccgggatcgagggacgcgcacgccagaggagacgaaaggaacccgggtcggaccagatcggaaccactgaccattgcccatggcggccctaggccctagcagccagaatgtcactgaatacgtcgttcgagttcctaagaatacaaccaaaaaatataacatcatggcttttaatgcagccgacaaagtcaactttgctacgtggaatcaggctcggctggagcgggacttgagcaacaagaaaatctaccaagaggaggagatgcccgaatcgggcgcgggcagtgagttcaaccgcaagcttcgggaggaggctcggaggaagaagtacggcatcgtcctcaaggagttccggcccgaggaccagccctggctgctccgggtcaacggcaaatcaggcaggaagttcaagggcatcaagaagggaggcgtaacagagaacacgtcctactacatcttcacccagtgccccgacggggccttcgaggccttccccgtgcacaactggtacaatttcacaccgctggcccggcatcgcacgctcactgccgaggaggccgaggaggagtgggagaggaggaacaaggtgctgaaccacttcagcatcatgcagcagcggcggctcaaggatcaggaccaggacgaggatgaggaggagaaggagaaacgtggccgcaggaaggcgagcgagctgcgcatccacgacctggaggacgacctggagatgtcgtccgatgccagtgatgccagtggtgaggaggggggcagagtccccaaggccaagaagaaggcgccgctggccaagggcggcaggaaaaagaagaagaagaagggttcagacgacgaggccttcgaggacagcgatgatggggacttcgagggccaagaggtggactacatgtcagacggctccagtagctcccaagaagagcctgagagcaaggccaaggcgccgcagcaggaggaggggcccaagggtaggcgatggctgggcgggccggggagatgggggcggtgcttccctgctcttgctcataccctgcccctcccaggtgtcgatgagcagagcgacagtagtgaggagagtgaggaggagaagccgcctgaggaggacaaggaggaggaggaggagaagaaggcacccaccccgcaggagaagaagcgcaggaaagacagcagcgaggagtcggacagctcagaggagagcgacattgacagcgaggcctcctcagccctcttcatggcgaagaagaagacgccacccaagagagagcggaagccgtcgggagggagctcaaggggcaacagccgcccaggcacgcccagcgcagagggtggcagcacctcctccaccctgcgggcggctgccagcaaactcgagcaagggaagcgggtgagcgagatgcctgcagccaagcggttgcggctggacacgggaccccagagcctgtctgggaagtcgacaccccagccaccatcaggcaagacaacacccaacagcggcgacgtgcaggtgactgaggatgccgtgcgccgctacctgacacggaagcccatgaccactaaggacctgctgaaaaagttccagaccaagaagacagggctgagcagcgagcagacagtgaacgtgttggcccagatcctcaagcgactcaaccccgagcgcaagatgatcaacgacaaaatgcacttctccctcaaggagtgaggcttggtccaatacatggctctgccccccagaacttaaggctctcactgccccttcgccatcctagagtgaggctctgtccaatacatggctctgccctccagaacttcaggctctcagtgacccttcgacatcctgcttgctccctgactcccagggccccgtagttagcaattctggaaaagttaagccatctcctcctctggcccttccttctggaatcttcagatgcctgttaggccttcttattgtcctcctcctcctggctcggcctccctcacactgaccaagggcctgtgctgcccactgggtaacttctacagttctcccttccacttccctaagtctctcttcagctgtgacttatccaccacatagcccagtaagtcttcagttttggctgggcatgatggtgagcgcctgcagtcccagctacttgggaggctaagcccagttcaaggctgcagtgaactatgatggtgccactgcattccagcctgggtgacagaatgaaatcctggcacaaaaaaaaaaaaaagtagccaggcatggtggcgggagcctgttgtcccagctgttccgtaggctgaggcacgagattcacttgaacctgggaggtggaggttgctgtgagctgacaccacgccactgcactccagcctgggtgacagtgagactctgtctcaataaataaaaaataataataaattgctcagatttctttgtttcctttttagatctgctactctgtttggataatgtcttattccttatgttttggtcccatctttcatggttttatttttatttatattttaggttttgagacagggtcttgctctgttcaccaggctagagtgcagtggtacaatctcggcttactgcgacctctggttcctgggctcaagcagttctcctgcctcagcctcccgagtagctgggattacgggcgcccgccaccgcgcctggctaatttttgtatttttagtagagacggtgtttcagcatgttggccaggctggtctcgaactcctggccataggtgatctgcctgcctcgtcctcccaaagtactgggattacaggcgtgagccactgcacccacccacgcctggctgatgtttttattttactcatcctgactgaggtctgacaatcctagaagctgaagttcccgggcatccttttgtttcttctgactccccttagtgatagattttcttgtgatttgggattggatgctcatggccagctgggggctctgtgggaatccggggtggcctactttgcaggcagtccttccagatggttcagccttggctttcgctagctacccaggagcgccagccccagcccattttgtgtgtggttctcagcttgcaggtggccaccaaagccaaccccccccactgccccgattgtgggtccctatgtttgaggttcccggtgatgtttcggggggcttctcccttcttacaagctcggtcatgcatatatttgatctggcgttgccaggcattctgtaagggagggcttttccagttcctggaaatggaactggaaaatgtggctggaaacattaatatggctggaaatggaatttgc

SEQ ID NO: 322981 - DNA, 2723 bp, Homo sapiens
  misc_feature (2432)..(2432): n is a, c, g, or t
accccttcggggtagggggaggaaatgaaccccaaacagacccatggggagccaagcggcggttcgacccgacccgagtaggcctcggttgctatggtgacgcggccttctgggccccccaggtccagagcggcaaggcgcatgcgcaaagtgcctgggagcccgcaagggggattcgtctccctcttcccacccaggatgccccacggtccttgggtgctgacgtcacgagagagggcggtcccccatttgatgaagttaaccgcgttatatacaagagcgccagcgacagaggcccgttagtttatctcagactcggcctaggtttgctgagtctaaaaagggaccgcggtggaccttttgaggtgaccatagccgccgaggagcataagtgactgcgcactgaggtggccacagtcgctaagaaggttgccatcgcgacgcggctgctcgagggtttcgcttccgggttaggcggccgcagaagcgtagaccgagtagcttgagcgcctcttccggttaccttttcccagcgccagaggcgcctagggttggggtcctcgctcaggcacagagacccgacaccgagcggcggcttccccgggatcgagggacgcgcacgccagaggagacgaaaggaacccgggtcggaccagatcggaaccactgaccattgcccatggcggccctaggccctagcagccagaatgtcactgaatacgtcgttcgagttcctaagaatacaaccaaaaaatataacatcatggcttttaatgcagccgacaaagtcaactttgctacgtggaatcaggctcggctggagcgggacttgagcaacaagaaaatctaccaagaggaggagatgcccgaatcgggcgcgggcagtgagttcaaccgcaagcttcgggaggaggctcggaggaagaagtacggcatcgtcctcaaggagttccggcccgaggaccagccctggctgctccgggtcaacggcaaatcaggcaggaagttcaagggcatcaagaagggaggcgtaacagagaacacgtcctactacatcttcacccagtgccccgacggggccttcgaggccttccccgtgcacaactggtacaatttcacaccgctggcccggcatcgcacgctcactgccgaggaggccgaggaggagtgggagaggaggaacaaggtgctgaaccacttcagcatcatgcagcagcggcggctcaaggatcaggaccaggacgaggatgaggaggagaaggagaaacgtggccgcaggaaggcgagcgagctgcgcatccacgacctggaggacgacctggagatgtcgtccgatgccagtgatgccagtggtgaggaggggggcagagtccccaaggccaagaagaaggcgccgctggccaagggcggcaggaaaaagaagaagaagaagggttcagacgacgaggccttcgaggacagcgatgatggggacttcgagggccaagaggtggactacatgtcagacggctccagtagctcccaagaagagcctgagagcaaggccaaggcgccgcagcaggaggaggggcccaagggtgtcgatgagcagagcgacagtagtgaggagagtgaggaggagaagccgcctgaggaggacaaggaggaggaggaggagaagaaggcacccaccccgcaggagaagaagcgcaggaaagacagcagcgaggagtcggacagctcagaggagagcgacattgacagcgaggcctcctcagccctcttcatggcgaagaagaagacgccacccaagagagagcggaagccgtcgggagggagctcaaggggcaacagccgcccaggcacgcccagcgcagagggtggcagcacctcctccaccctgcgggcggctgccagcaaactcgagcaagggaagcgggtgagcgagatgcctgcagccaagcggttgcggctggacacgggaccccagagcctgtctgggaagtcgacaccccagccaccatcaggcaagacaacacccaacagcggcgacgtgcaggtgactgaggatgccgtgcgccgctacctgacacggaagcccatgaccactaaggacctgctgaaaaagttccagaccaagaagacagggctgagcagcgagcagacagtgaacgtgttggcccagatcctcaagcgactcaaccccgagcgcaagatgatcaacgacaaaatgcacttctccctcaaggagtgaggcttggtccaatacatggctctgccccccagaacttaaggctctcactgccccttcgccatcctagagtgaggccgaggaggagtgggagaggaggaacaaggtgctgaaccacttcagcatcatgcagcagcggcggctcaaggatcaggaccaggacgaggatgaggaggagaaggagaaacgtggccgcaggaangcgagcgactgcgcatccacgacctggaggacgacctggagatgtcgtccgatgccagtgatgccagtggtgaggaggggggcagagtccccaaggccaagaagaaggcggcgctggccaagggcggcaggaagaagaagaagaagaagggttcagacacgaggccttcgaggacagcgatgatggggacttcgagggccaagaggtggactacatgtcagacggctccagtagctcccaagaagaggctgaaacagccgctatccgctatccaatgggaatcctcggagc

SEQ ID NO: 322982 - DNA, 3288 bp, Homo sapiens
accccttcggggtagggggaggaaatgaaccccaaacagacccatggggagccaagcggcggttcgacccgacccgagtaggcctcggttgctatggtgacgcggccttctgggccccccaggtccagagcggcaaggcgcatgcgcaaagtgcctgggagcccgcaagggggattcgtctccctcttcccacccaggatgccccacggtccttgggtgctgacgtcacgagagagggcggtcccccatttgatgaagttaaccgcgttatatacaagagcgccagcgacagaggcccgttagtttatctcagactcggcctaggtttgctgagtctaaaaagggaccgcggtggaccttttgaggtgaccatagccgccgaggagcataagtgactgcgcactgaggtggccacagtcgctaagaaggttgccatcgcgacgcggctgctcgagggtttcgcttccgggttaggcggccgcagaagcgtagaccgagtagcttgagcgcctcttccggttaccttttcccagcgccagaggcgcctagggttggggtcctcgctcaggcacagagacccgacaccgagcggcggcttccccgggatcgagggacgcgcacgccagaggagacgaaaggaacccgggtcggaccagatcggaaccactgaccattgcccatggcggccctaggccctagcagccagaatgtcactgaatacgtcgttcgagttcctaagaatacaaccaaaaaatataacatcatggcttttaatgcagccgacaaagtcaactttgctacgtggaatcaggctcggctggagcgggacttgagcaacaagaaaatctaccaagaggaggagatgcccgaatcgggcgcgggcagtgagttcaaccgcaagcttcgggaggaggctcggaggaagaagtacggcatcgtcctcaaggagttccggcccgaggaccagccctggctgctccgggtcaacggcaaatcaggcaggaagttcaagggcatcaagaagggaggcgtaacagagaacacgtcctactacatcttcacccagtgccccgacggggccttcgaggccttccccgtgcacaactggtacaatttcacaccgctggcccggcatcgcacgctcactgccgaggaggccgaggaggagtgggagaggaggaacaaggtgctgaaccacttcagcatcatgcagcagcggcggctcaaggatcaggaccaggacgaggatgaggaggagaaggagaaacgtggccgcaggaaggcgagcgagctgcgcatccacgacctggaggacgacctggagatgtcgtccgatgccagtgatgccagtggtgaggaggggaagcgggtgagcgagatgcctgcagccaagcggttgcggctggacacgggaccccagagcctgtctgggaagtcgacaccccagccaccatcaggcaagacaacacccaacagcggcgacgtgcaggtgactgaggatgccgtgcgccgctacctgacacggaagcccatgaccactaaggacctgctgaaaaagttccagaccaagaagacagggctgagcagcgagcagacagtgaacgtgttggcccagatcctcaagcgactcaaccccgagcgcaagatgatcaacgacaaaatgcacttctccctcaaggagtgaggcttggtccaatacatggctctgccccccagaacttaaggctctcactgccccttcgccatcctagagtgaggctctgtccaatacatggctctgccctccagaacttcaggctctcagtgacccttcgacatcctgcttgctccctgactcccagggccccgtagttagcaattctggaaaagttaagccatctcctcctctggcccttccttctggaatcttcagatgcctgttaggccttcttattgtcctcctcctcctggctcggcctccctcacactgaccaagggcctgtgctgcccactgggtaacttctacagttctcccttccacttccctaagtctctcttcagctgtgacttatccaccacatagcccagtaagtcttcagttttggctgggcatgatggtgagcgcctgcagtcccagctacttgggaggctaagcccagttcaaggctgcagtgaactatgatggtgccactgcattccagcctgggtgacagaatgaaatcctggcacaaaaaaaaaaaaaagtagccaggcatggtggcgggagcctgttgtcccagctgttccgtaggctgaggcacgagattcacttgaacctgggaggtggaggttgctgtgagctgacaccacgccactgcactccagcctgggtgacagtgagactctgtctcaataaataaaaaataataataaattgctcagatttctttgtttcctttttagatctgctactctgtttggataatgtcttattccttatgttttggtcccatctttcatggttttatttttatttatattttaggttttgagacagggtcttgctctgttcaccaggctagagtgcagtggtacaatctcggcttactgcgacctctggttcctgggctcaagcagttctcctgcctcagcctcccgagtagctgggattacgggcgcccgccaccgcgcctggctaatttttgtatttttagtagagacggtgtttcagcatgttggccaggctggtctcgaactcctggccataggtgatctgcctgcctcgtcctcccaaagtactgggattacaggcgtgagccactgcacccacccacgcctggctgatgtttttattttactcatcctgactgaggtctgacaatcctagaagctgaagttcccgggcatccttttgtttcttctgactccccttagtgatagattttcttgtgatttgggattggatgctcatggccagctgggggctctgtgggaatccggggtggcctactttgcaggcagtccttccagatggttcagccttggctttcgctagctacccaggagcgccagccccagcccattttgtgtgtggttctcagcttgcaggtggccaccaaagccaaccccccccactgccccgattgtgggtccctatgtttgaggttcccggtgatgtttcggggggcttctcccttcttacaagctcggtcatgcatatatttgatctggcgttgccaggcattctgtaagggagggcttttccagttcctggaaatggaactggaaaatgtggctggaaacattaatatggctggaaatggaatttgc

SEQ ID NO: 322983 - DNA, 1501 bp, Homo sapiens
accccttcggggtagggggaggaaatgaaccccaaacagacccatggggagccaagcggcggttcgacccgacccgagtaggcctcggttgctatggtgacgcggccttctgggccccccaggtccagagcggcaaggcgcatgcgcaaagtgcctgggagcccgcaagggggattcgtctccctcttcccacccaggatgccccacggtccttgggtgctgacgtcacgagagagggcggtcccccatttgatgaagttaaccgcgttatatacaagagcgccagcgacagaggcccgttagtttatctcagactcggcctaggtttgctgagtctaaaaagggaccgcggtggaccttttgaggtgaccatagccgccgaggagcataagtgactgcgcactgaggtggccacagtcgctaagaaggttgccatcgcgacgcggctgctcgagggtttcgcttccgggttaggcggccgcagaagcgtagaccgagtagcttgagcgcctcttccggttaccttttcccagcgccagaggcgcctagggttggggtcctcgctcaggcacagagacccgacaccgagcggcggcttccccgggatcgagggacgcgcacgccagaggagacgaaaggaacccgggtcggaccagatcggaaccactgaccattgcccatggcggccctaggccctagcagccagaatgtcactgaatacgtcgttcgagttcctaagaatacaaccaaaaaatataacatcatggcttttaatgcagccgacaaagtcaactttgctacgtggaatcaggctcggctggagcgggacttgagcaacaagaaaatctaccaagaggaggagatgcccgaatcgggcgcgggcagtgagttcaaccgcaagcttcgggaggaggctcggaggaagaagtacggcatcgtcctcaaggagttccggcccgaggaccagccctggctgctccgggtcaacggcaaatcaggcaggaagttcaagggcatcaagaagggaggcgtaacagagaacacgtcctactacatcttcacccagtgccccgacggggccttcgaggccttccccgtgcacaactggtacaatttcacaccgctggcccggcatcgcacgctcactgccgaggaggccgaggaggagtgggagaggaggaacaaggtgctgaaccacttcagcatcatgcagcagcggcggctcaaggatcaggaccaggacgaggatgaggaggagaaggagaaacgtggccgcaggaaggcgagcgagctgcgcatccacgacctggaggacgacctggagatgtcgtccgatgccagtgatgccagtggtgaggagggggcagagtccccaaggccaagaagaaggcgcctggtggaatacagtggtgcaaccatggctcactgcgaactcaacctcctaggctcaagcaagttcccaaagagccacccaacggccacgcaacgagggaccgagctc

SEQ ID NO: 322984 - DNA, 1237 bp, Homo sapiens
accccttcggggtagggggaggaaatgaaccccaaacagacccatggggagccaagcggcggttcgacccgacccgagtaggcctcggttgctatggtgacgcggccttctgggccccccaggtccagagcggcaaggcgcatgcgcaaagtgcctgggagcccgcaagggggattcgtctccctcttcccacccaggatgccccacggtccttgggtgctgacgtcacgagagagggcggtcccccatttgatgaagttaaccgcgttatatacaagagcgccagcgacagaggcccgttagtttatctcagactcggcctaggtttgctgagtctaaaaagggaccgcggtggaccttttgaggtgaccatagccgccgaggagcataagtgactgcgcactgaggtggccacagtcgctaagaaggttgccatcgcgacgcggctgctcgagggtttcgcttccgggttaggcggccgcagaagcgtagaccgagtagcttgagcgcctcttccggttaccttttcccagcgccagaggcgcctagggttggggtcctcgctcaggcacagagacccgacaccgagcggcggcttccccgggatcgagggacgcgcacgccagaggagacgaaaggaacccgggtcggaccagatcggaaccactgaccattgcccatggcggccctaggccctagcagccagaatgtcactgaatacgtcgttcgagttcctaagaatacaaccaaaaaatataacatcatggcttttaatgcagccgacaaagtcaactttgctacgtggaatcaggctcggctggagcgggacttgagcaacaagaaaatctaccaagaggaggagatgcccgaatcgggcgcgggcagtgagttcaaccgcaagcttcgggaggaggctcggaggaagaagtacggcatcgtcctcaaggagttccggcccgaggaccagccctggctgctccgggtcaacggcaaatcaggcaggaagttcaagggcatcaagaagggaggcgtaacagagaacacgtcctactacatcttcacccagtgccccgacggggccttcgaggccttccccgtgcacaactggtacaatttcacaccgctggcccggcatcgcacgctcactgccgaggaggccgaggaggagtgggagagatggggtttcaccgtggtctcgatctcctgacctcgtgatctgcctgcctcggcctcccaa

SEQ ID NO: 322985 - DNA, 191 bp, Homo sapiens
taggactggccaagggtctgtgcttcttaacaggacctagtaatgctgatgctggtggctagggaccacactgagaaccactgcactaatccacttctcaagctggaacaacaagtggtgtgtgtgtgtgtgtgtgtgtgtgtgtgtgtgtatgtattattttattttttgagatggcatctcgctctgtc

SEQ ID NO: 322986 - DNA, 737 bp, Homo sapiens
gaggagtgcggctggatgtccattataggatggggctgtgttccctggccagtgtgtgctggtggggtgggggtacaaagtgggtgttctggagtgaacatctcacctcctcaggctctaaaccctaaggcctgtggctcagggagtggcccgaggggtctacagagtcacactggtagcacccactaggcgggaggtggagtgagtgctgttctttcccggaagagctgggtgtggggagctgagggggcccaggcctcagccctggtgctgtccctgtgacaggccctcggggtgtgtgggaccatgtccagccctctccagtgtatccacagccccgacctttgatgagaactcagctgtccagctgcaaaggaaaagccaagtgagacgggctctgggaccatggtgaccaggctcttcccctgctccctggccctcgccagctgccaggctgaaaagaagcctcagctcccacaccgccctcctcaccgcccttcctcggcagtcacttccactggtggaccacgggaggtgtgtcctgtgtcgggctggctatggtcctcagggtctcctatagtgggcaggctcagtccactgtgcatcctctcatggctgtgaggcaaatcgagggtctgatgtgtgtgatctgagtcgcttgcacacctaccacgaccgtctatggttgggctctggaaaaggcagcaatgggtttctcggaaccggggttgaggccg

SEQ ID NO: 322987 - DNA, 504 bp, Homo sapiens
  misc_feature (44)..(44): n is a, c, g, or t
cgtacccacggaaggttagactcacatcttacaagatggccaangaggcattttccaggacacgatgaggaagttcctggagcaggagtgcaacgtcctccccttgaagctgctcatgccccagtgcaaccaagtgcttgacgactacttccccctggtcatcgactacttccagaaccagactgtgagggctgcaagctcacctcctgcctgcctccccacgcaggcccctgtgcccacccatggggagccacacacacagcaccccagccagccagacacacacacacacacacacacacacagcacccaagccggccagacacaaacacacagcaccccagccagccggaacacacacacacacacacacaacaccccagctggccggacacacacacacacagtaccccagctggccggacacacacacacacagcaccctatccagacacatacacacacacagtaccccagccagctggaaacacacacacacacagc

SEQ ID NO: 322988 - DNA, 530 bp, Homo sapiens
ctccaagttggactcaggcaaggatggggaatctatctgtggaaattcccctcttgaaagatcaaagcaacctttctacagagacctctggggatctttctccatcagatggtgacctgcagtggctattgtccaatggccccgccagcccagggctaccttgcccaaattggggcccaaatgaggaaaggccctgccccctcagcctttcccagatagggttgcgtgggccaccaggggcacaaggcagcaggtgaggttcctgctgaggcaggtggttcacttgagcccaggagttcaagaccagctggccaacatggcgaaaccctgtctctactaaaaatattttttaaaaattagctgagcatggtggcaggtgcctgtaatcccagctactcaggacgcttaggcaggagaatcacttgaacctgggaggcgaaggttgcggtgtgccgagatcgtgccactgcactctagcctaggcaacagagcacaactctgtctcaggaaaaaaaaaaaaaaaaaaaagg

SEQ ID NO: 322989 - DNA, 673 bp, Homo sapiens
aaattgatatggatgagatgggacaagttgggctggtgggcagctgcatgtgccttggagtgctctgttggcctcttcctaagagaacctccccattggagctgggagcctcccccactcatgtgtcctccaccttggggcccctccatccccaggatgacctatgccaagagtgtgaggacatcgtccacatccttaacaagatggccaaggaggccattttccaggacacgatgaggaagttcctggagcaggagtgcaacgtcctccccttgaagctgctcatgccccagtgcaaccaagtgcttgacgactacttccccctggtcatcgactacttccagaaccagactgtgagggctgcaagctcacctcctgcctgcctccccacgcaggcccctgtgcccacccatggggagccacacacacagcaccccagccagccagacacacacacacacacacacacacacagcacccaagccggccagacacaaacacacagcaccccagccagccggaacacacacacacacacacacaacaccccagctggccggacacacacacacacagtaccccagctggccggacacacacacacacagcaccctatccagacacatacacacacacagtaccccagccagctggaaacacacacacacacagc

SEQ ID NO: 322990 - DNA, 3660 bp, Homo sapiens
tcttctgactaatgcaaaccatgtgtccatagaaccagaagatttttccaggggaaaagagcccccacgccccgcccagctataaggggccatgcaccaagcagggtacccaggctgcagaggtgccatggctgagtcacacctgctgcagtggctgctgctgctgctgcccacgctctgtggcccaggcactgctgcctggaccacctcatccttggcctgtgcccagggccctgagttctggtgccaaagcctggagcaagcattgcagtgcagagccctagggcattgcctacaggaagtctggggacatgtgggagccgatgacctatgccaagagtgtgaggacatcgtccacatccttaacaagatggccaaggaggccattttccaggacacgatgaggaagttcctggagcaggagtgcaacgtcctccccttgaagctgctcatgccccagtgcaaccaagtgcttgacgactacttccccctggtcatcgactacttccagaaccagactgactcaaacggcatctgtatgcacctgggcctgtgcaaatcccggcagccagagccagagcaggagccagggatgtcagaccccctgcccaaacctctgcgggaccctctgccagaccctctgctggacaagctcgtcctccctgtgctgcccggggccctccaggcgaggcctgggcctcacacacaggatctctccgagcagcaattccccattcctctcccctattgctggctctgcagggctctgatcaagcggatccaagccatgattcccaagggtgcgctagctgtggcagtggcccaggtgtgccgcgtggtacctctggtggcgggcggcatctgccagtgcctggctgagcgctactccgtcatcctgctcgacacgctgctgggccgcatgctgccccagctggtctgccgcctcgtcctccggtgctccatggatgacagcgctggcccaaggtcgccgacaggagaatggctgccgcgagactctgagtgccacctctgcatgtccgtgaccacccaggccgggaacagcagcgagcaggccataccacaggcaatgctccaggcctgtgttggctcctggctggacagggaaaagtgcaagcaatttgtggagcagcacacgccccagctgctgaccctggtgcccaggggctgggatgcccacaccacctgccaggccctcggggtgtgtgggaccatgtccagccctctccagtgtatccacagccccgacctttgatgagaactcagctgtccagctgcaaaggaaaagccaagtgagacgggctctgggaccatggtgaccaggctcttcccctgctccctggccctcgccagctgccaggctgaaaagaagcctcagctcccacaccgccctcctcaccgcccttcctcggcagtcacttccactggtggaccacgggcccccagccctgtgtcggccttgtctgtctcagctcaaccacagtctgacaccagagcccacttccatcctctctggtgtgaggcacagcgagggcagcatctggaggagctctgcagcctccacacctaccacgacctcccagggctgggctcaggaaaaaccagccactgctttacaggacagggggttgaagctgagccccgcctcacacccacccccatgcactcaaagattggattttacagctacttgcaattcaaaattcagaagaataaaaaatgggaacatacagaactctaaaagatagacatcagaaattgttaagttaagctttttcaaaaaatcagcaattccccagcgtagtcaagggtggacactgcacgctctggcatgatgggatggcgaccgggcaagctttcttcctcgagatgctctgctgcttgagagctattgctttgttaagatataaaaaggggtttctttttgtctttctgtaaggtggacttccagcttttgattgaaagtcctagggtgattctatttctgctgtgatttatctgctgaaagctcagctggggttgtgcaagctagggacccattcctgtgtaatacaatgtctgcaccaatgctaataaagtcctattctcttttatgagaaagaaaaaagacaccgtcctttaaagtgctgcagtatggccagacgtggtggctcacacctgcaatcccagcaccttaggaggccgaggcaggaggatccttgaggtcaggagttcgagaccagcctcgccaacatggtgaaaccccatttctactaaaaatacaaaaaattagccaagtgtggtggcatatgcctgtaatcccaactactcagaaggccgaggcaggagaattacttgaacgcaggagaatcactgcagcccaggaggcagaggttgcagtgagccgagattgcaccactgcactccagcctgggtgacagagcaagactccatctcagtaaataaataaataaataaaaagcgctgcagtagctgtggcctcaccctgaagtcagcgggcccaggcctacctcactctctcccttggcagagaagcagacgtccatagctcctctccctcacaagcgctcccagcctgccctccagctgctgctctcccctcccagtctctactcactgggatgaggttaggtcatgaggacaccaaaaacctaaaaataaacaaaaagccaaacaagccttagcttttcttaaagactgaaatgcctggaagtgtccctttatttataaaataacttttgtcatatttcttatacatgtttcttgtaagaaattcagaaactacagacaaagagagtggaaattacccactgtcaggcctctgagcccaagctaagccatcatatcccctgtgccctgcacgtatacacccagatggcctgaagcaactgaagatccacaaaagaagtgaaaatagccagttcctgccttaactgatgacattccaccattgtgatttgttcctgccccaccctaactgatcaattgaccttgtgacaatacaccttccccacccttgagaaggtgctttgtaatattctccccacccaccccacgcccgcacccccgcacccttaagaaggtattttgtaatattctctccgccattgagaatgtgctttgtaagatccaccccctgcccacaaaaaattgctcctaactccaccgcctatcccaaacctacaagaactaatgataatcccaccaccctttgctgactctttttggactcagcccacctgcacccaggtgattaaaaagctttattgttcacacaaagcctgtttggtagtctcttcacagggaagcatgtgacacccacaatcccacctagcccaggagagagctacggcagggtgtgtgttttgacactgagcttggggctttttccatcttctccccacagcctctggctccacacctccaccgttcaagcgccagaaagagctgtctatgcagcctgctcttgggcctggggatgagacacacaattcattggctcctggattttaagtagacatttgtaaatctatagctaactactgtccttaaagccattgtttccattacaaaatccaactctctgagagaaaagggtgttttaaatttaaaaaaataaaaacaaaaaagtttgattgagac

SEQ ID NO: 322991 - DNA, 3704 bp, Homo sapiens
tcttctgactaatgcaaaccatgtgtccatagaaccagaagatttttccaggggaaaagagcccccacgccccgcccagctataaggggccatgcaccaagcagggtacccaggctgcagaggtgccatggctgagtcacacctgctgcagtggctgctgctgctgctgcccacgctctgtggcccaggcactgctgcctggaccacctcatccttggcctgtgcccagggccctgagttctggtgccaaagcctggagcaagcattgcagtgcagagccctagggcattgcctacaggaagtctggggacatgtgggagccgatgacctatgccaagagtgtgaggacatcgtccacatccttaacaagatggccaaggaggccattttccaggacacgatgaggaagttcctggagcaggagtgcaacgtcctccccttgaagctgctcatgccccagtgcaaccaagtgcttgacgactacttccccctggtcatcgactacttccagaaccagactgactcaaacggcatctgtatgcacctgggcctgtgcaaatcccggcagccagagccagagcaggagccagggatgtcagaccccctgcccaaacctctgcgggaccctctgccagaccctctgctggacaagctcgtcctccctgtgctgcccggggccctccaggcgaggcctgggcctcacacacaggatctctccgagcagcaattccccattcctctcccctattgctggctctgcagggctctgatcaagcggatccaagccatgattcccaagggtgcgctagctgtggcagtggcccaggtgtgccgcgtggtacctctggtggcgggcggcatctgccagtgcctggctgagcgctactccgtcatcctgctcgacacgctgctgggccgcatgctgccccagctggtctgccgcctcgtcctccggtgctccatggatgacagcgctggcccaaggtcgccgacaggagaatggctgccgcgagactctgagtgccacctctgcatgtccgtgaccacccaggccgggaacagcagcgagcaggccataccacaggcaatgctccaggcctgtgttggctcctggctggacagggaaaagtgcaagcaatttgtggagcagcacacgccccagctgctgaccctggtgcccaggggctgggatgcccacaccacctgccaggccctcggggtgtgtgggaccatgtccagccctctccagtgtatccacagccccgacctttgatgagaactcagctgtccaggcaggacatacacacagtccctctctggccctcatcctcctcagctgcaaaggaaaagccaagtgagacgggctctgggaccatggtgaccaggctcttcccctgctccctggccctcgccagctgccaggctgaaaagaagcctcagctcccacaccgccctcctcaccgcccttcctcggcagtcacttccactggtggaccacgggcccccagccctgtgtcggccttgtctgtctcagctcaaccacagtctgacaccagagcccacttccatcctctctggtgtgaggcacagcgagggcagcatctggaggagctctgcagcctccacacctaccacgacctcccagggctgggctcaggaaaaaccagccactgctttacaggacagggggttgaagctgagccccgcctcacacccacccccatgcactcaaagattggattttacagctacttgcaattcaaaattcagaagaataaaaaatgggaacatacagaactctaaaagatagacatcagaaattgttaagttaagctttttcaaaaaatcagcaattccccagcgtagtcaagggtggacactgcacgctctggcatgatgggatggcgaccgggcaagctttcttcctcgagatgctctgctgcttgagagctattgctttgttaagatataaaaaggggtttctttttgtctttctgtaaggtggacttccagcttttgattgaaagtcctagggtgattctatttctgctgtgatttatctgctgaaagctcagctggggttgtgcaagctagggacccattcctgtgtaatacaatgtctgcaccaatgctaataaagtcctattctcttttatgagaaagaaaaaagacaccgtcctttaaagtgctgcagtatggccagacgtggtggctcacacctgcaatcccagcaccttaggaggccgaggcaggaggatccttgaggtcaggagttcgagaccagcctcgccaacatggtgaaaccccatttctactaaaaatacaaaaaattagccaagtgtggtggcatatgcctgtaatcccaactactcagaaggccgaggcaggagaattacttgaacgcaggagaatcactgcagcccaggaggcagaggttgcagtgagccgagattgcaccactgcactccagcctgggtgacagagcaagactccatctcagtaaataaataaataaataaaaagcgctgcagtagctgtggcctcaccctgaagtcagcgggcccaggcctacctcactctctcccttggcagagaagcagacgtccatagctcctctccctcacaagcgctcccagcctgccctccagctgctgctctcccctcccagtctctactcactgggatgaggttaggtcatgaggacaccaaaaacctaaaaataaacaaaaagccaaacaagccttagcttttcttaaagactgaaatgcctggaagtgtccctttatttataaaataacttttgtcatatttcttatacatgtttcttgtaagaaattcagaaactacagacaaagagagtggaaattacccactgtcaggcctctgagcccaagctaagccatcatatcccctgtgccctgcacgtatacacccagatggcctgaagcaactgaagatccacaaaagaagtgaaaatagccagttcctgccttaactgatgacattccaccattgtgatttgttcctgccccaccctaactgatcaattgaccttgtgacaatacaccttccccacccttgagaaggtgctttgtaatattctccccacccaccccacgcccgcacccccgcacccttaagaaggtattttgtaatattctctccgccattgagaatgtgctttgtaagatccaccccctgcccacaaaaaattgctcctaactccaccgcctatcccaaacctacaagaactaatgataatcccaccaccctttgctgactctttttggactcagcccacctgcacccaggtgattaaaaagctttattgttcacacaaagcctgtttggtagtctcttcacagggaagcatgtgacacccacaatcccacctagcccaggagagagctacggcagggtgtgtgttttgacactgagcttggggctttttccatcttctccccacagcctctggctccacacctccaccgttcaagcgccagaaagagctgtctatgcagcctgctcttgggcctggggatgagacacacaattcattggctcctggattttaagtagacatttgtaaatctatagctaactactgtccttaaagccattgtttccattacaaaatccaactctctgagagaaaagggtgttttaaatttaaaaaaataaaaacaaaaaagtttgattgagac

SEQ ID NO: 322992 - DNA, 4080 bp, Homo sapiens
  misc_feature (330)..(330): n is a, c, g, or t
tggtgccaaaaaattcgacatggaaacctttgtggaatgcttaacgcgttcccaggaccggaacttaaatagccggttaaacaattagtcaccaaatacagtcctcgagttttttgccaagaacacatgagtatttgtctaaaacagggtctcctttgaagcactaggccctgccaccacggtgcttgcctgagttcacaaatctgttgaacctgtagcttccctgtcactttctctggctctcctctgcctgctaagctttgtttcctaatgtaaatgcttctgccactgccatagctactgctgctgctgggaaccgccatagccacnttggtttcgtgtttttgcaaagtattggcctccaccgccataggggccagagcttctgcctccaaaatttcctcccttcatgggtccaaaatttgaagactgattgttgtaattcccaaaatcattgtagcttccaccacctccaaaattgcttccatcattaccaaatccattatagccatccccactgccaccatatccaccaccaccacggctgccaccaaagccaccacaccctgtccacaaagggcctaggaaactacgtgcccttcagccatgcacccgaccatgggcccccaggttcaggtgcacacggtgggcctgtacgctcacacacccttacaccctcactctcacacacatgcttacacacttattcattctcacatatatgctcatgctcattcacacacaatcccggccacctgccctaaagtccccacacagccctatctttgccttttgtccccccacatagagttctaaaccacagcacccccactaggcctgcttcctcccattccagtggtccctgagcccttgggccggcctgaataggggtgggcttccctcccagaccctaacactcccaccctgtgctgtgccccaggactcaaacggcatctgtatgcacctgggcctgtgcaaatcccggcagccagagccagagcaggagccagggatgtcagaccccctgcccaaacctctgcgggaccctctgccagaccctctgctggacaagctcgtcctccctgtgctgcccggggccctccaggcgaggcctgggcctcacacacaggatctctccgagcagcaattccccattcctctcccctattgctggctctgcagggctctgatcaagcggatccaagccatgattcccaagggtgcgctagctgtggcagtggcccaggtgtgccgcgtggtacctctggtggcgggcggcatctgccagtgcctggctgagcgctactccgtcatcctgctcgacacgctgctgggccgcatgctgccccagctggtctgccgcctcgtcctccggtgctccatggatgacagcgctggcccaaggtcgccgacaggagaatggctgccgcgagactctgagtgccacctctgcatgtccgtgaccacccaggccgggaacagcagcgagcaggccataccacaggcaatgctccaggcctgtgttggctcctggctggacagggaaaagtgcaagcaatttgtggagcagcacacgccccagctgctgaccctggtgcccaggggctgggatgcccacaccacctgccaggccctcggggtgtgtgggaccatgtccagccctctccagtgtatccacagccccgacctttgatgagaactcagctgtccagctgcaaaggaaaagccaagtgagacgggctctgggaccatggtgaccaggctcttcccctgctccctggccctcgccagctgccaggctgaaaagaagcctcagctcccacaccgccctcctcaccgcccttcctcggcagtcacttccactggtggaccacgggcccccagccctgtgtcggccttgtctgtctcagctcaaccacagtctgacaccagagcccacttccatcctctctggtgtgaggcacagcgagggcagcatctggaggagctctgcagcctccacacctaccacgacctcccagggctgggctcaggaaaaaccagccactgctttacaggacagggggttgaagctgagccccgcctcacacccacccccatgcactcaaagattggattttacagctacttgcaattcaaaattcagaagaataaaaaatgggaacatacagaactctaaaagatagacatcagaaattgttaagttaagctttttcaaaaaatcagcaattccccagcgtagtcaagggtggacactgcacgctctggcatgatgggatggcgaccgggcaagctttcttcctcgagatgctctgctgcttgagagctattgctttgttaagatataaaaaggggtttctttttgtctttctgtaaggtggacttccagcttttgattgaaagtcctagggtgattctatttctgctgtgatttatctgctgaaagctcagctggggttgtgcaagctagggacccattcctgtgtaatacaatgtctgcaccaatgctaataaagtcctattctcttttatgagaaagaaaaaagacaccgtcctttaaagtgctgcagtatggccagacgtggtggctcacacctgcaatcccagcaccttaggaggccgaggcaggaggatccttgaggtcaggagttcgagaccagcctcgccaacatggtgaaaccccatttctactaaaaatacaaaaaattagccaagtgtggtggcatatgcctgtaatcccaactactcagaaggccgaggcaggagaattacttgaacgcaggagaatcactgcagcccaggaggcagaggttgcagtgagccgagattgcaccactgcactccagcctgggtgacagagcaagactccatctcagtaaataaataaataaataaaaagcgctgcagtagctgtggcctcaccctgaagtcagcgggcccaggcctacctcactctctcccttggcagagaagcagacgtccatagctcctctccctcacaagcgctcccagcctgccctccagctgctgctctcccctcccagtctctactcactgggatgaggttaggtcatgaggacaccaaaaacctaaaaataaacaaaaagccaaacaagccttagcttttcttaaagactgaaatgcctggaagtgtccctttatttataaaataacttttgtcatatttcttatacatgtttcttgtaagaaattcagaaactacagacaaagagagtggaaattacccactgtcaggcctctgagcccaagctaagccatcatatcccctgtgccctgcacgtatacacccagatggcctgaagcaactgaagatccacaaaagaagtgaaaatagccagttcctgccttaactgatgacattccaccattgtgatttgttcctgccccaccctaactgatcaattgaccttgtgacaatacaccttccccacccttgagaaggtgctttgtaatattctccccacccaccccacgcccgcacccccgcacccttaagaaggtattttgtaatattctctccgccattgagaatgtgctttgtaagatccaccccctgcccacaaaaaattgctcctaactccaccgcctatcccaaacctacaagaactaatgataatcccaccaccctttgctgactctttttggactcagcccacctgcacccaggtgattaaaaagctttattgttcacacaaagcctgtttggtagtctcttcacagggaagcatgtgacacccacaatcccacctagcccaggagagagctacggcagggtgtgtgttttgacactgagcttggggctttttccatcttctccccacagcctctggctccacacctccaccgttcaagcgccagaaagagctgtctatgcagcctgctcttgggcctggggatgagacacacaattcattggctcctggattttaagtagacatttgtaaatctatagctaactactgtccttaaagccattgtttccattacaaaatccaactctctgagagaaaagggtgttttaaatttaaaaaaataaaaacaaaaaagtttgattgagac

SEQ ID NO: 322993 - DNA, 2451 bp, Homo sapiens
tcttctgactaatgcaaaccatgtgtccatagaaccagaagatttttccaggggaaaagagcccccacgccccgcccagctataaggggccatgcaccaagcagggtacccaggctgcagaggtgccatggctgagtcacacctgctgcagtggctgctgctgctgctgcccacgctctgtggcccaggcactgctgcctggaccacctcatccttggcctgtgcccagggccctgagttctggtgccaaagcctggagcaagcattgcagtgcagagccctagggcattgcctacaggaagtctggggacatgtgggagccgatgacctatgccaagagtgtgaggacatcgtccacatccttaacaagatggccaaggaggccattttccaggacacgatgaggaagttcctggagcaggagtgcaacgtcctccccttgaagctgctcatgccccagtgcaaccaagtgcttgacgactacttccccctggtcatcgactacttccagaaccagactgactcaaacggcatctgtatgcacctgggcctgtgcaaatcccggcagccagagccagagcaggagccagggatgtcagaccccctgcccaaacctctgcgggaccctctgccagaccctctgctggacaagctcgtcctccctgtgctgcccggggccctccaggcgaggcctgggcctcacacacaggatctctccgagcagcaattccccattcctctcccctattgctggctctgcagggctctgatcaagcggatccaagccatgattcccaagggtgcgctagctgtggcagtggcccaggtgtgccgcgtggtacctctggtggcgggcggcatctgccagtgcctggctgagcgctactccgtcatcctgctcgacacgctgctgggccgcatgctgccccagctggtctgccgcctcgtcctccggtgctccatggatgacagcgctggcccaaggtcgccgacaggagaatggctgccgcgagactctgagtgccacctctgcatgtccgtgaccacccaggccgggaacagcagcgagcaggccataccacaggcaatgctccaggcctgtgttggctcctggctggacagggaaaagtgcaagcaatttgtggagcagcacacgccccagctgctgaccctggtgcccaggggctgggatgcccacaccacctgccaggccctcggggtgtgtgggaccatgtccagccctctccagtgtatccacagccccgacctttgatgagaactcagctgtccagctgcaaaggaaaagccaagtgagacgggctctgggaccatggtgaccaggctcttcccctgctccctggccctcgccagctgccaggctgaaaagaagcctcagctcccacaccgccctcctcaccgcccttcctcggcagtcacttccactggtggaccacgggcccccagccctgtgtcggccttgtctgtctcagctcaaccacagtctgacaccagagcccacttccatcctctctggtgtgaggcacagcgagggcagcatctggaggagctctgcagcctccacacctaccacgacctcccagggctgggctcaggaaaaaccagccactgctttacaggacagggggttgaagctgagccccgcctcacacccacccccatgcactcaaagattggattttacagctacttgcaattcaaaattcagaagaataaaaaatgggaacatacagaactctaaaagatagacatcagaaattgttaagttaagctttttcaaaaaatcagcaattccccagcgtagtcaagggtggacactgcacgctctggcatgatgggatggcgaccgggcaagctttcttcctcgagatgctctgctgcttgagagctattgctttgttaagatataaaaaggggtttctttttgtctttctgtaaggtggacttccagcttttgattgaaagtcctagggtgattctatttctgctgtgatttatctgctgaaagctcagctggggttgtgcaagctagggacccattcctgtgtaatacaatgtctgcaccaatgctaataaagtcctattctcttttatgagaaagaaaaaaaaaaaaaaaaaacctcttttgggcggcttgggcccctgaaaaaagtttttaagaaccaattccgtttgggccgcgcgggccccatgttgcgttagcgtcaaccgtgtggcgctatcacgcgtgggccccaaaggagagaacccggggccaaacacatgagcgcgtggggcttcctcccccgatgaagaaaaaacccgcccgggcggggacacccgcgagcgcgttctgtggcacaaaccccgagatgggggcccccagagggacaataacggcgcgctctcactcacagggggagtcccacagacagagcccgagaaataaatgca

SEQ ID NO: 322994 - DNA, 3572 bp, Homo sapiens
caggaggcggaggttgcagtgagccgacatcacgccactgtactctagcctgggtgacagagcaagactctgtctcaaaaaaaaagaaagaaggaaagatcactgcagagattgcagtgagaggtgatgggacagggacggagctgagggctggcctggggatgcatttgggaggtgggcccactgctattgggcatggatgggcctggagcgtgaggaccagggaggactccaaagtgacttttacacactggccagagcaaccagccctctgtaatgccagcagctgagatggggagactaaagaagaaaacaggtttgagcaaaaaaacagagagctccctcctggccatgttgagttcaagatgcctgtgtgaagtgcaggagaggagagtcaggcaagcagctgaatcccaagcattgggggaaggtcaggtccaccatgtcagtctgagagtcactagctgtgggccagagcctttggggccagacgtaggtctgaagctggctcctacactcagtgaccctgtgtgagtcccctgcatcccctggactctctgatccccagtgtccttatttgtgaatagccttgccctcccttctagaagagaatgagggaatgcgtaggaagtgcccagctgggtgctgggcagagagtggaggcttgccaagtgaaggtcccatgctggcctctctccgcccccgccccagggtgcgctagctgtggcagtggcccaggtgtgccgcgtggtacctctggtggcgggcggcatctgccagtgcctggctgagcgctactccgtcatcctgctcgacacgctgctgggccgcatgctgccccagctggtctgccgcctcgtcctccggtgctccatggatgacagcgctggcccaaggtcgccgacaggagaatggctgccgcgagactctgagtgccacctctgcatgtccgtgaccacccaggccgggaacagcagcgagcaggccataccacaggcaatgctccaggcctgtgttggctcctggctggacagggaaaagtgcaagcaatttgtggagcagcacacgccccagctgctgaccctggtgcccaggggctgggatgcccacaccacctgccaggccctcggggtgtgtgggaccatgtccagccctctccagtgtatccacagccccgacctttgatgagaactcagctgtccagctgcaaaggaaaagccaagtgagacgggctctgggaccatggtgaccaggctcttcccctgctccctggccctcgccagctgccaggctgaaaagaagcctcagctcccacaccgccctcctcaccgcccttcctcggcagtcacttccactggtggaccacgggcccccagccctgtgtcggccttgtctgtctcagctcaaccacagtctgacaccagagcccacttccatcctctctggtgtgaggcacagcgagggcagcatctggaggagctctgcagcctccacacctaccacgacctcccagggctgggctcaggaaaaaccagccactgctttacaggacagggggttgaagctgagccccgcctcacacccacccccatgcactcaaagattggattttacagctacttgcaattcaaaattcagaagaataaaaaatgggaacatacagaactctaaaagatagacatcagaaattgttaagttaagctttttcaaaaaatcagcaattccccagcgtagtcaagggtggacactgcacgctctggcatgatgggatggcgaccgggcaagctttcttcctcgagatgctctgctgcttgagagctattgctttgttaagatataaaaaggggtttctttttgtctttctgtaaggtggacttccagcttttgattgaaagtcctagggtgattctatttctgctgtgatttatctgctgaaagctcagctggggttgtgcaagctagggacccattcctgtgtaatacaatgtctgcaccaatgctaataaagtcctattctcttttatgagaaagaaaaaagacaccgtcctttaaagtgctgcagtatggccagacgtggtggctcacacctgcaatcccagcaccttaggaggccgaggcaggaggatccttgaggtcaggagttcgagaccagcctcgccaacatggtgaaaccccatttctactaaaaatacaaaaaattagccaagtgtggtggcatatgcctgtaatcccaactactcagaaggccgaggcaggagaattacttgaacgcaggagaatcactgcagcccaggaggcagaggttgcagtgagccgagattgcaccactgcactccagcctgggtgacagagcaagactccatctcagtaaataaataaataaataaaaagcgctgcagtagctgtggcctcaccctgaagtcagcgggcccaggcctacctcactctctcccttggcagagaagcagacgtccatagctcctctccctcacaagcgctcccagcctgccctccagctgctgctctcccctcccagtctctactcactgggatgaggttaggtcatgaggacaccaaaaacctaaaaataaacaaaaagccaaacaagccttagcttttcttaaagactgaaatgcctggaagtgtccctttatttataaaataacttttgtcatatttcttatacatgtttcttgtaagaaattcagaaactacagacaaagagagtggaaattacccactgtcaggcctctgagcccaagctaagccatcatatcccctgtgccctgcacgtatacacccagatggcctgaagcaactgaagatccacaaaagaagtgaaaatagccagttcctgccttaactgatgacattccaccattgtgatttgttcctgccccaccctaactgatcaattgaccttgtgacaatacaccttccccacccttgagaaggtgctttgtaatattctccccacccaccccacgcccgcacccccgcacccttaagaaggtattttgtaatattctctccgccattgagaatgtgctttgtaagatccaccccctgcccacaaaaaattgctcctaactccaccgcctatcccaaacctacaagaactaatgataatcccaccaccctttgctgactctttttggactcagcccacctgcacccaggtgattaaaaagctttattgttcacacaaagcctgtttggtagtctcttcacagggaagcatgtgacacccacaatcccacctagcccaggagagagctacggcagggtgtgtgttttgacactgagcttggggctttttccatcttctccccacagcctctggctccacacctccaccgttcaagcgccagaaagagctgtctatgcagcctgctcttgggcctggggatgagacacacaattcattggctcctggattttaagtagacatttgtaaatctatagctaactactgtccttaaagccattgtttccattacaaaatccaactctctgagagaaaagggtgttttaaatttaaaaaaataaaaacaaaaaagtttgattgagac

SEQ ID NO: 322995 - DNA, 3744 bp, Homo sapiens
caggaggcggaggttgcagtgagccgacatcacgccactgtactctagcctgggtgacagagcaagactctgtctcaaaaaaaaagaaagaaggaaagatcactgcagagattgcagtgagaggtgatgggacagggacggagctgagggctggcctggggatgcatttgggaggtgggcccactgctattgggcatggatgggcctggagcgtgaggaccagggaggactccaaagtgacttttacacactggccagagcaaccagccctctgtaatgccagcagctgagatggggagactaaagaagaaaacaggtttgagcaaaaaaacagagagctccctcctggccatgttgagttcaagatgcctgtgtgaagtgcaggagaggagagtcaggcaagcagctgaatcccaagcattgggggaaggtcaggtccaccatgtcagtctgagagtcactagctgtgggccagagcctttggggccagacgtaggtctgaagctggctcctacactcagtgaccctgtgtgagtcccctgcatcccctggactctctgatccccagtgtccttatttgtgaatagccttgccctcccttctagaagagaatgagggaatgcgtaggaagtgcccagctgggtgctgggcagagagtggaggcttgccaagtgaaggtcccatgctggcctctctccgcccccgccccagggtgcgctagctgtggcagtggcccaggtgtgccgcgtggtacctctggtggcgggcggcatctgccagtgcctggctgagcgctactccgtcatcctgctcgacacgctgctgggccgcatgctgccccagctggtctgccgcctcgtcctccggtgctccatggatgacagcgctggcccaagtgagcccactgccccctccttagcccaatgcctgctctcctcctccccctaccctgccactgcatgaccctctccctctgtggtcccactgcaatgcaccaaggaggacagaaaccaaacacctctgtagggtggccttgcctgctttccccctaatgctcacatctccagggtcgccgacaggagaatggctgccgcgagactctgagtgccacctctgcatgtccgtgaccacccaggccgggaacagcagcgagcaggccataccacaggcaatgctccaggcctgtgttggctcctggctggacagggaaaagtgcaagcaatttgtggagcagcacacgccccagctgctgaccctggtgcccaggggctgggatgcccacaccacctgccaggccctcggggtgtgtgggaccatgtccagccctctccagtgtatccacagccccgacctttgatgagaactcagctgtccagctgcaaaggaaaagccaagtgagacgggctctgggaccatggtgaccaggctcttcccctgctccctggccctcgccagctgccaggctgaaaagaagcctcagctcccacaccgccctcctcaccgcccttcctcggcagtcacttccactggtggaccacgggcccccagccctgtgtcggccttgtctgtctcagctcaaccacagtctgacaccagagcccacttccatcctctctggtgtgaggcacagcgagggcagcatctggaggagctctgcagcctccacacctaccacgacctcccagggctgggctcaggaaaaaccagccactgctttacaggacagggggttgaagctgagccccgcctcacacccacccccatgcactcaaagattggattttacagctacttgcaattcaaaattcagaagaataaaaaatgggaacatacagaactctaaaagatagacatcagaaattgttaagttaagctttttcaaaaaatcagcaattccccagcgtagtcaagggtggacactgcacgctctggcatgatgggatggcgaccgggcaagctttcttcctcgagatgctctgctgcttgagagctattgctttgttaagatataaaaaggggtttctttttgtctttctgtaaggtggacttccagcttttgattgaaagtcctagggtgattctatttctgctgtgatttatctgctgaaagctcagctggggttgtgcaagctagggacccattcctgtgtaatacaatgtctgcaccaatgctaataaagtcctattctcttttatgagaaagaaaaaagacaccgtcctttaaagtgctgcagtatggccagacgtggtggctcacacctgcaatcccagcaccttaggaggccgaggcaggaggatccttgaggtcaggagttcgagaccagcctcgccaacatggtgaaaccccatttctactaaaaatacaaaaaattagccaagtgtggtggcatatgcctgtaatcccaactactcagaaggccgaggcaggagaattacttgaacgcaggagaatcactgcagcccaggaggcagaggttgcagtgagccgagattgcaccactgcactccagcctgggtgacagagcaagactccatctcagtaaataaataaataaataaaaagcgctgcagtagctgtggcctcaccctgaagtcagcgggcccaggcctacctcactctctcccttggcagagaagcagacgtccatagctcctctccctcacaagcgctcccagcctgccctccagctgctgctctcccctcccagtctctactcactgggatgaggttaggtcatgaggacaccaaaaacctaaaaataaacaaaaagccaaacaagccttagcttttcttaaagactgaaatgcctggaagtgtccctttatttataaaataacttttgtcatatttcttatacatgtttcttgtaagaaattcagaaactacagacaaagagagtggaaattacccactgtcaggcctctgagcccaagctaagccatcatatcccctgtgccctgcacgtatacacccagatggcctgaagcaactgaagatccacaaaagaagtgaaaatagccagttcctgccttaactgatgacattccaccattgtgatttgttcctgccccaccctaactgatcaattgaccttgtgacaatacaccttccccacccttgagaaggtgctttgtaatattctccccacccaccccacgcccgcacccccgcacccttaagaaggtattttgtaatattctctccgccattgagaatgtgctttgtaagatccaccccctgcccacaaaaaattgctcctaactccaccgcctatcccaaacctacaagaactaatgataatcccaccaccctttgctgactctttttggactcagcccacctgcacccaggtgattaaaaagctttattgttcacacaaagcctgtttggtagtctcttcacagggaagcatgtgacacccacaatcccacctagcccaggagagagctacggcagggtgtgtgttttgacactgagcttggggctttttccatcttctccccacagcctctggctccacacctccaccgttcaagcgccagaaagagctgtctatgcagcctgctcttgggcctggggatgagacacacaattcattggctcctggattttaagtagacatttgtaaatctatagctaactactgtccttaaagccattgtttccattacaaaatccaactctctgagagaaaagggtgttttaaatttaaaaaaataaaaacaaaaaagtttgattgagac

SEQ ID NO: 322996 - DNA, 2735 bp, Homo sapiens
gaggagtgcggctggatgtccattataggatggggctgtgttccctggccagtgtgtgctggtggggtgggggtacaaagtgggtgttctggagtgaacatctcacctcctcaggctctaaaccctaaggcctgtggctcagggagtggcccgaggggtctacagagtcacactggtagcacccactaggcgggaggtggagtgagtgctgttctttcccggaagagctgggtgtggggagctgagggggcccaggcctcagccctggtgctgtccctgtgacaggccctcggggtgtgtgggaccatgtccagccctctccagtgtatccacagccccgacctttgatgagaactcagctgtccagctgcaaaggaaaagccaagtgagacgggctctgggaccatggtgaccaggctcttcccctgctccctggccctcgccagctgccaggctgaaaagaagcctcagctcccacaccgccctcctcaccgcccttcctcggcagtcacttccactggtggaccacgggcccccagccctgtgtcggccttgtctgtctcagctcaaccacagtctgacaccagagcccacttccatcctctctggtgtgaggcacagcgagggcagcatctggaggagctctgcagcctccacacctaccacgacctcccagggctgggctcaggaaaaaccagccactgctttacaggacagggggttgaagctgagccccgcctcacacccacccccatgcactcaaagattggattttacagctacttgcaattcaaaattcagaagaataaaaaatgggaacatacagaactctaaaagatagacatcagaaattgttaagttaagctttttcaaaaaatcagcaattccccagcgtagtcaagggtggacactgcacgctctggcatgatgggatggcgaccgggcaagctttcttcctcgagatgctctgctgcttgagagctattgctttgttaagatataaaaaggggtttctttttgtctttctgtaaggtggacttccagcttttgattgaaagtcctagggtgattctatttctgctgtgatttatctgctgaaagctcagctggggttgtgcaagctagggacccattcctgtgtaatacaatgtctgcaccaatgctaataaagtcctattctcttttatgagaaagaaaaaagacaccgtcctttaaagtgctgcagtatggccagacgtggtggctcacacctgcaatcccagcaccttaggaggccgaggcaggaggatccttgaggtcaggagttcgagaccagcctcgccaacatggtgaaaccccatttctactaaaaatacaaaaaattagccaagtgtggtggcatatgcctgtaatcccaactactcagaaggccgaggcaggagaattacttgaacgcaggagaatcactgcagcccaggaggcagaggttgcagtgagccgagattgcaccactgcactccagcctgggtgacagagcaagactccatctcagtaaataaataaataaataaaaagcgctgcagtagctgtggcctcaccctgaagtcagcgggcccaggcctacctcactctctcccttggcagagaagcagacgtccatagctcctctccctcacaagcgctcccagcctgccctccagctgctgctctcccctcccagtctctactcactgggatgaggttaggtcatgaggacaccaaaaacctaaaaataaacaaaaagccaaacaagccttagcttttcttaaagactgaaatgcctggaagtgtccctttatttataaaataacttttgtcatatttcttatacatgtttcttgtaagaaattcagaaactacagacaaagagagtggaaattacccactgtcaggcctctgagcccaagctaagccatcatatcccctgtgccctgcacgtatacacccagatggcctgaagcaactgaagatccacaaaagaagtgaaaatagccagttcctgccttaactgatgacattccaccattgtgatttgttcctgccccaccctaactgatcaattgaccttgtgacaatacaccttccccacccttgagaaggtgctttgtaatattctccccacccaccccacgcccgcacccccgcacccttaagaaggtattttgtaatattctctccgccattgagaatgtgctttgtaagatccaccccctgcccacaaaaaattgctcctaactccaccgcctatcccaaacctacaagaactaatgataatcccaccaccctttgctgactctttttggactcagcccacctgcacccaggtgattaaaaagctttattgttcacacaaagcctgtttggtagtctcttcacagggaagcatgtgacacccacaatcccacctagcccaggagagagctacggcagggtgtgtgttttgacactgagcttggggctttttccatcttctccccacagcctctggctccacacctccaccgttcaagcgccagaaagagctgtctatgcagcctgctcttgggcctggggatgagacacacaattcattggctcctggattttaagtagacatttgtaaatctatagctaactactgtccttaaagccattgtttccattacaaaatccaactctctgagagaaaagggtgttttaaatttaaaaaaataaaaacaaaaaagtttgattgagac

SEQ ID NO: 322997 - DNA, 2415 bp, Homo sapiens
gtctctagagttccctgcagctctctgatgacaactctgctgtccagctgcaaaggaaaagccaagtgagacgggctctgggaccatggtgaccaggctcttcccctgctccctggccctcgccagctgccaggctgaaaagaagcctcagctcccacaccgccctcctcaccgcccttcctcggcagtcacttccactggtggaccacgggcccccagccctgtgtcggccttgtctgtctcagctcaaccacagtctgacaccagagcccacttccatcctctctggtgtgaggcacagcgagggcagcatctggaggagctctgcagcctccacacctaccacgacctcccagggctgggctcaggaaaaaccagccactgctttacaggacagggggttgaagctgagccccgcctcacacccacccccatgcactcaaagattggattttacagctacttgcaattcaaaattcagaagaataaaaaatgggaacatacagaactctaaaagatagacatcagaaattgttaagttaagctttttcaaaaaatcagcaattccccagcgtagtcaagggtggacactgcacgctctggcatgatgggatggcgaccgggcaagctttcttcctcgagatgctctgctgcttgagagctattgctttgttaagatataaaaaggggtttctttttgtctttctgtaaggtggacttccagcttttgattgaaagtcctagggtgattctatttctgctgtgatttatctgctgaaagctcagctggggttgtgcaagctagggacccattcctgtgtaatacaatgtctgcaccaatgctaataaagtcctattctcttttatgagaaagaaaaaagacaccgtcctttaaagtgctgcagtatggccagacgtggtggctcacacctgcaatcccagcaccttaggaggccgaggcaggaggatccttgaggtcaggagttcgagaccagcctcgccaacatggtgaaaccccatttctactaaaaatacaaaaaattagccaagtgtggtggcatatgcctgtaatcccaactactcagaaggccgaggcaggagaattacttgaacgcaggagaatcactgcagcccaggaggcagaggttgcagtgagccgagattgcaccactgcactccagcctgggtgacagagcaagactccatctcagtaaataaataaataaataaaaagcgctgcagtagctgtggcctcaccctgaagtcagcgggcccaggcctacctcactctctcccttggcagagaagcagacgtccatagctcctctccctcacaagcgctcccagcctgccctccagctgctgctctcccctcccagtctctactcactgggatgaggttaggtcatgaggacaccaaaaacctaaaaataaacaaaaagccaaacaagccttagcttttcttaaagactgaaatgcctggaagtgtccctttatttataaaataacttttgtcatatttcttatacatgtttcttgtaagaaattcagaaactacagacaaagagagtggaaattacccactgtcaggcctctgagcccaagctaagccatcatatcccctgtgccctgcacgtatacacccagatggcctgaagcaactgaagatccacaaaagaagtgaaaatagccagttcctgccttaactgatgacattccaccattgtgatttgttcctgccccaccctaactgatcaattgaccttgtgacaatacaccttccccacccttgagaaggtgctttgtaatattctccccacccaccccacgcccgcacccccgcacccttaagaaggtattttgtaatattctctccgccattgagaatgtgctttgtaagatccaccccctgcccacaaaaaattgctcctaactccaccgcctatcccaaacctacaagaactaatgataatcccaccaccctttgctgactctttttggactcagcccacctgcacccaggtgattaaaaagctttattgttcacacaaagcctgtttggtagtctcttcacagggaagcatgtgacacccacaatcccacctagcccaggagagagctacggcagggtgtgtgttttgacactgagcttggggctttttccatcttctccccacagcctctggctccacacctccaccgttcaagcgccagaaagagctgtctatgcagcctgctcttgggcctggggatgagacacacaattcattggctcctggattttaagtagacatttgtaaatctatagctaactactgtccttaaagccattgtttccattacaaaatccaactctctgagagaaaagggtgttttaaatttaaaaaaataaaaacaaaaaagtttgattgagac

SEQ ID NO: 322998 - DNA, 2832 bp, Homo sapiens
tcttctgactaatgcaaaccatgtgtccatagaaccagaagatttttccaggggaaaagagcccccacgccccgcccagctataaggggccatgcaccaagcagggtacccaggctgcagaggtgccatggctgagtcacacctgctgcagtggctgctgctgctgctgcccacgctctgtggcccaggcactgctgcctggaccacctcatccttggcctgtgcccagggccctgagttctggtgccaaagcctggagcaagcattgcagtgcagagccctagggcattgcctacaggaagtctggggacatgtgggagccgatgacctatgccaagagtgtgaggacatcgtccacatccttaacaagatggccaaggaggccattttccaggacacgatgaggaagttcctggagcaggagtgcaacgtcctccccttgaagctgctcatgccccagtgcaaccaagtgcttgacgactacttccccctggtcatcgactacttccagaaccagactgactcaaacggcatctgtatgcacctgggcctgtgcaaatcccggcagccagagccagagcaggagccagggatgtcagaccccctgcccaaacctctgcgggaccctctgccagaccctctgctggacaagctcgtcctccctgtgctgcccggggccctccaggcgaggcctgggcctcacacacaggatctctccgagcagcaattccccattcctctcccctattgctggctctgcagggctctgatcaagcggatccaagccatgattcccaagggtgcgctagctgtggcagtggcccaggtgtgccgcgtggtacctctggtggcgggcggcatctgccagtgcctggctgagcgctactccgtcatcctgctcgacacgctgctgggccgcatgctgccccagctggtctgccgcctcgtcctccggtgctccatggatgacagcgctggcccaaggtcgccgacaggagaatggctgccgcgagactctgagtgccacctctgcatgtccgtgaccacccaggccgggaacagcagcgagcaggccataccacaggcaatgctccaggcctgtgttggctcctggctggacagggaaaagtgcaagcaatttgtggagcagcacacgccccagctgctgaccctggtgcccaggggctgggatgcccacaccacctgccaggccctcggggtgtgtgggaccatgtccagccctctccagtgtatccacagccccgacctttgatgagaactcagctgtccagaaaaagacaccgtcctttaaagtgctgcagtatggccagacgtggtggctcacacctgcaatcccagcaccttaggaggccgaggcaggaggatccttgaggtcaggagttcgagaccagcctcgccaacatggtgaaaccccatttctactaaaaatacaaaaaattagccaagtgtggtggcatatgcctgtaatcccaactactcagaaggccgaggcaggagaattacttgaacgcaggagaatcactgcagcccaggaggcagaggttgcagtgagccgagattgcaccactgcactccagcctgggtgacagagcaagactccatctcagtaaataaataaataaataaaaagcgctgcagtagctgtggcctcaccctgaagtcagcgggcccaggcctacctcactctctcccttggcagagaagcagacgtccatagctcctctccctcacaagcgctcccagcctgccctccagctgctgctctcccctcccagtctctactcactgggatgaggttaggtcatgaggacaccaaaaacctaaaaataaacaaaaagccaaacaagccttagcttttcttaaagactgaaatgcctggaagtgtccctttatttataaaataacttttgtcatatttcttatacatgtttcttgtaagaaattcagaaactacagacaaagagagtggaaattacccactgtcaggcctctgagcccaagctaagccatcatatcccctgtgccctgcacgtatacacccagatggcctgaagcaactgaagatccacaaaagaagtgaaaatagccagttcctgccttaactgatgacattccaccattgtgatttgttcctgccccaccctaactgatcaattgaccttgtgacaatacaccttccccacccttgagaaggtgctttgtaatattctccccacccaccccacgcccgcacccccgcacccttaagaaggtattttgtaatattctctccgccattgagaatgtgctttgtaagatccaccccctgcccacaaaaaattgctcctaactccaccgcctatcccaaacctacaagaactaatgataatcccaccaccctttgctgactctttttggactcagcccacctgcacccaggtgattaaaaagctttattgttcacacaaagcctgtttggtagtctcttcacagggaagcatgtgacacccacaatcccacctagcccaggagagagctacggcagggtgtgtgttttgacactgagcttggggctttttccatcttctccccacagcctctggctccacacctccaccgttcaagcgccagaaagagctgtctatgcagcctgctcttgggcctggggatgagacacacaattcattggctcctggattttaagtagacatttgtaaatctatagctaactactgtccttaaagccattgtttccattacaaaatccaactctctgagagaaaagggtgttttaaatttaaaaaaataaaaacaaaaaagtttgattgagac

SEQ ID NO: 322999 - DNA, 2303 bp, Homo sapiens
tcttctgactaatgcaaaccatgtgtccatagaaccagaagatttttccaggggaaaagagcccccacgccccgcccagctataaggggccatgcaccaagcagggtacccaggctgcagaggtgccatggctgagtcacacctgctgcagtggctgctgctgctgctgcccacgctctgtggcccaggcactgctgcctggaccacctcatccttggcctgtgcccagggccctgagttctggtgccaaagcctggagcaagcattgcagtgcagagccctagggcattgcctacaggaagtctggggacatgtgggagccgatgacctatgccaagagtgtgaggacatcgtccacatccttaacaagatggccaaggaggccattttccaggacacgatgaggaagttcctggagcaggagtgcaacgtcctccccttgaagctgctcatgccccagtgcaaccaagtgcttgacgactacttccccctggtcatcgactacttccagaaccagactgactcaaacggcatctgtatgcacctgggcctgtgcaaatcccggcagccagagccagagcaggagccagggatgtcagaccccctgcccaaacctctgcgggaccctctgccagaccctctgctggacaagctcgtcctccctgtgctgcccggggccctccaggcgaggcctgggcctcacacacaggatctctccgagcagcaattccccattcctctcccctattgctggctctgcagggctctgatcaagcggatccaagccatgattcccaagggtgcgctagctgtggcagtggcccaggtgtgccgcgtggtacctctggtggcgggcggcatctgccagtgcctggctgagcgctactccgtcatcctgctcgacacgctgctgggccgcatgctgccccagctggtctgccgcctcgtcctccggtgctccatggatgacagcgctggcccaaggtcgccgacaggagaatggctgccgcgagactctgagtgccacctctgcatgtccgtgaccacccaggccgggaacagcagcgagcaggccataccacaggcaatgctccaggcctgtgttggctcctggctggacagggaaaagtgcaagcaatttgtggagcagcacacgccccagctgctgaccctggtgcccaggggctgggatgcccacaccacctgccaggccctcggggtgtgtgggaccatgtccagccctctccagtgtatccacagccccgacctttgatgagaactcagctgtccaggtgagtccaggcccccagttgcggggaggtaagggggcaggtcctgaccatcagggcatgggaggcccttctgctccccaagcaggaagaggcggccactcctgccggctgctccatcctccctctcaccgcacagctggaggctcctgagggcttctggctggccatcaggaaaacaccctttccggaccccgagcactgccccgcccagaaccccagtcactgagtgcccaacccccagcttcccccccaaccccccgccctgccctgtcccaggcctccctctcagagcttgccccagggactctctggccctcagggttcaatgtattctgaccaaggccaagctttcctggggctcagggaaaatcacactttgctacccgaagctgtatcccctcagatgccaggaaggccgtgatcatctgactccaccctcctgagacacattctctccctgactgtcctgttctaagtcagcggagcaccttaggatggaggggtggaggcgaggccagatgcagcctctgtgaacaggtgcctggaggctgggaaatgaccctgagagggcaggacacagcaaccgtgggcttaaggtgaccttgagagcaagcttggcccactttacaattctgttcagagccagcccctaacatggtggtcatttattcatttgttccctcattttaaaaaatgtaaggccaggcatggtggctcacgccggtaatcccagcactttgggaggccgaggcaggcagatcacctgaggtcaggagttcgagactagcctggccaacatggcgaaaccctgtctctactaaaaatattttttaaaaattagctgagcatggtggcaggtgcctgtaatcccagctactcaggacgcttaggcaggagaatcacttgaacctgggaggcgaaggttgcggtgtgccgagatcgtgccactgcactctagcctaggcaacagagcacaactctgtctcaggaaaaaaaaaaaaaaaaaaaagg

SEQ ID NO: 323000 - DNA, 1378 bp, Homo sapiens
gaggagtgcggctggatgtccattataggatggggctgtgttccctggccagtgtgtgctggtggggtgggggtacaaagtgggtgttctggagtgaacatctcacctcctcaggctctaaaccctaaggcctgtggctcagggagtggcccgaggggtctacagagtcacactggtagcacccactaggcgggaggtggagtgagtgctgttctttcccggaagagctgggtgtggggagctgagggggcccaggcctcagccctggtgctgtccctgtgacaggccctcggggtgtgtgggaccatgtccagccctctccagtgtatccacagccccgacctttgatgagaactcagctgtccaggtgagtccaggcccccagttgcggggaggtaagggggcaggtcctgaccatcagggcatgggaggcccttctgctccccaagcaggaagaggcggccactcctgccggctgctccatcctccctctcaccgcacagctggaggctcctgagggcttctggctggccatcaggaaaacaccctttccggaccccgagcactgccccgcccagaaccccagtcactgagtgcccaacccccagcttcccccccaaccccccgccctgccctgtcccaggcctccctctcagagcttgccccagggactctctggccctcagggttcaatgtattctgaccaaggccaagctttcctggggctcagggaaaatcacactttgctacccgaagctgtatcccctcagatgccaggaaggccgtgatcatctgactccaccctcctgagacacattctctccctgactgtcctgttctaagtcagcggagcaccttaggatggaggggtggaggcgaggccagatgcagcctctgtgaacaggtgcctggaggctgggaaatgaccctgagagggcaggacacagcaaccgtgggcttaaggtgaccttgagagcaagcttggcccactttacaattctgttcagagccagcccctaacatggtggtcatttattcatttgttccctcattttaaaaaatgtaaggccaggcatggtggctcacgccggtaatcccagcactttgggaggccgaggcaggcagatcacctgaggtcaggagttcgagactagcctggccaacatggcgaaaccctgtctctactaaaaatattttttaaaaattagctgagcatggtggcaggtgcctgtaatcccagctactcaggacgcttaggcaggagaatcacttgaacctgggaggcgaaggttgcggtgtgccgagatcgtgccactgcactctagcctaggcaacagagcacaactctgtctcaggaaaaaaaaaaaaaaaaaaaagg

SEQ ID NO: 323001 - DNA, 348 bp, Homo sapiens
tctgtagaaaggttgctttgatctttcaagaggggaatttccacagatagattccccatccttgcctgagtccaacttggagtcttccagacctgcagtggctattgtccaatggccccgccagcccagggctaccttgcccaaattggggcccaaatgaggaaaggccctgccccctcagcctttcccagatagggttgcgtgggccaccaggggcacaaggcagcaggtgaggttcctgctgaggcaggtggttcacttgagcccaggagttcaagaccagcttgggcaacatggcgaaaccccgtctctactaagaatacaaaaattagccagatgtgacaggtg

SEQ ID NO: 323002 - DNA, 591 bp, Homo sapiens
aaattgatatggatgagatgggacaagttgggctggtgggcagctgcatgtgccttggagtgctctgttggcctcttcctaagagaacctccccattggagctgggagcctcccccactcatgtgtcctccaccttggggcccctccatccccaggatgacctatgccaagagtgtgaggacatcgtccacatccttaacaagatggccaaggaggccattttccaggacacgatgaggaagttcctggagcaggagtgcaacgtcctccccttgaagctgctcatgccccagtgcaaccaagtgcttgacgactacttccccctggtcatcgactacttccagaaccagactgactcaaacggcatctgtatgcacctgggcctgtgcaaatcccggcagccagagccagagcaggagccagggatgtcagaccccctgcccaaacctctgcgggaccctctgccagaccctctggatctccactttactggctgtgggggcctccctcacctgtgtgtgaggcccaggcctcgcctggagggccccgggcagcacagggaggacgagcttgtccagggtaccgagctcg

SEQ ID NO: 323003 - DNA, 2120 bp, Homo sapiens
tcttctgactaatgcaaaccatgtgtccatagaaccagaagatttttccaggggaaaagagcccccacgccccgcccagctataaggggccatgcaccaagcagggtacccaggctgcagaggtgccatggctgagtcacacctgctgcagtggctgctgctgctgctgcccacgctctgtggcccaggcactgctgcctggaccacctcatccttggcctgtgcccagggccctgagttctggtgccaaagcctggagcaagcattgcagtgcagagccctagggcattgcctacaggaagtctggggacatgtgggagccgatgacctatgccaagagtgtgaggacatcgtccacatccttaacaagatggccaaggaggccattttccaggacacgatgaggaagttcctggagcaggagtgcaacgtcctccccttgaagctgctcatgccccagtgcaaccaagtgcttgacgactacttccccctggtcatcgactacttccagaaccagactgactcaaacggcatctgtatgcacctgggcctgtgcaaatcccggcagccagagccagagcaggagccagggatgtcagaccccctgcccaaacctctgcgggaccctctgccagaccctctgctggacaagctcgtcctccctgtgctgcccggggccctccaggcgaggcctgggcctcacacacaggatctctccgagcagcaattccccattcctctcccctattgctggctctgcagggctctgatcaagcggatccaagccatgattcccaagggtgcgctagctgtggcagtggcccaggtgtgccgcgtggtacctctggtggcgggcggcatctgccagtgcctggctgagcgctactccgtcatcctgctcgacacgctgctgggccgcatgctgccccagctggtctgccgcctcgtcctccggtgctccatggatgacagcgctggcccaaggtcgccgacaggagaatggctgccgcgagactctgagtgccacctctgcatgtccgtgaccacccaggccgggaacagcagcgagcaggccataccacaggcaatgctccaggcctgtgttggctcctggctggacagggaaaagtgcaagcaatttgtggagcagcacacgccccagctgctgaccctggtgcccaggggctgggatgcccacaccacctgccaggccctcggggtgtgtgggaccatgtccagccctctccagtgtatccacagccccgacctttgatgagaactcagctgtccagctgcaaaggaaaagccaagtgagacgggctctgggaccatggtgaccaggctcttcccctgctccctggccctcgccagctgccaggctgaaaagaagcctcagctcccacaccgccctcctcaccgcccttcctcggcagtcacttccactggtggaccacgggcccccagccctgtgtcggccttgtctgtctcagctcaaccacagtctgacaccagagcccacttccatcctctctggtgtgaggcacagcgagggcagcatctggaggagctctgcagcctccacacctaccacgacctcccagggctgggctcaggaaaaaccagccactgctttacaggacagggggttgaagctgagccccgcctcacacccacccccatgcactcaaagattggattttacagctacttgcaattcaaaattcagaagaataaaaaatgggaacatacagaactctaaaagatagacatcagaaattgttaagttaagctttttcaaaaaatcagcaattccccagcgtagtcaagggtggacactgcacgctctggcatgatgggatggcgaccgggcaagctttcttcctcgagatgctctgctgcttgagagctattgctttgttaagatataaaaaggggtttctttttgtctttctgtaaggtggacttccagcttttgattgaaagtcctagggtgattctatttctgctgtgatttatctgctgaaagctcagctggggttgtgcaagctagggacccattcctgtgtaatacaatgtctgcaccaatgctaataaagtcctattctcttttatgagaaaga

SEQ ID NO: 323004 - DNA, 2932 bp, Homo sapiens
tcttctgactaatgcaaaccatgtgtccatagaaccagaagatttttccaggggaaaagagcccccacgccccgcccagctataaggggccatgcaccaagcagggtacccaggctgcagaggtgccatggctgagtcacacctgctgcagtggctgctgctgctgctgcccacgctctgtggcccaggcactgctgcctggaccacctcatccttggcctgtgcccagggccctgagttctggtgccaaagcctggagcaagcattgcagtgcagagccctagggcattgcctacaggaagtctggggacatgtgggagccgatgacctatgccaagagtgtgaggacatcgtccacatccttaacaagatggccaaggaggccattttccaggacacgatgaggaagttcctggagcaggagtgcaacgtcctccccttgaagctgctcatgccccagtgcaaccaagtgcttgacgactacttccccctggtcatcgactacttccagaaccagactgactcaaacggcatctgtatgcacctgggcctgtgcaaatcccggcagccagagccagagcaggagccagggatgtcagaccccctgcccaaacctctgcgggaccctctgccagaccctctgctggacaagctcgtcctccctgtgctgcccggggccctccaggcgaggcctgggcctcacacacaggatctctccgagcagcaattccccattcctctcccctattgctggctctgcagggctctgatcaagcggatccaagccatgattcccaagggtgcgctagctgtggcagtggcccaggtgtgccgcgtggtacctctggtggcgggcggcatctgccagtgcctggctgagcgctactccgtcatcctgctcgacacgctgctgggccgcatgctgccccagctggtctgccgcctcgtcctccggtgctccatggatgacagcgctggcccaaggtcgccgacaggagaatggctgccgcgagactctgagtgccacctctgcatgtccgtgaccacccaggccgggaacagcagcgagcaggccataccacaggcaatgctccaggcctgtgttggctcctggctggacagggaaaagtgcaagcaatttgtggagcagcacacgccccagctgctgaccctggtgcccaggggctgggatgcccacaccacctgccaggccctcggggtgtgtgggaccatgtccagccctctccagtgtatccacagccccgacctttgatgagaactcagctgtccagctgcaaaggaaaagccaagtgagacgggctctgggaccatggtgaccaggctcttcccctgctccctggccctcgccagctgccaggctgaaaagaagcctcagctcccacaccgccctcctcaccgcccttcctcggcagtcacttccactggtggaccacgggcccccagccctgtgtcggccttgtctgtctcagctcaaccacagtctgacaccagagcccacttccatcctctctggtgtgaggcacagcgagggcagcatctggaggagctctgcagcctccacacctaccacgacctcccagggctgggctcaggaaaaaccagccactgctttacaggacagggggttgaagctgagccccgcctcacacccacccccatgcactcaaagattggattttacagctacttgcaattcaaaattcagaagaataaaaaatgggaacatacagaactctaaaagatagacatcagaaattgttaagttaagctttttcaaaaaatcagcaattccccagcgtagtcaagggtggacactgcacgctctggcatgatgggatggcgaccgggcaagctttcttcctcgagatgctctgctgcttgagagctattgctttgttaagatataaaaaggggtttctttttgtctttctgtaaggtggacttccagcttttgattgaaagtcctagggtgattctatttctgctgtgatttatctgctgaaagctcagctggggttgtgcaagctagggacccattcctgtgtaatacaatgtctgcaccaatgctaataaagtcctattctcttttatgagaaagaaaaaagacaccgtcctttaaagtgctgcagtatggccagacgtggtggctcacacctgcaatcccagcaccttaggaggccgaggcaggaggatccttgaggtcaggagttcgagaccagcctcgccaacatggtgaaaccccatttctactaaaaatacaaaaaattagccaagtgtggtggcatatgcctgtaatcccaactactcagaaggccgaggcaggagaattacttgaacgcaggagaatcactgcagcccaggaggcagaggttgcagtgagccgagattgcaccactgcactccagcctgggtgacagagcaagactccatctcagtaaataaataaataaataaaaagcgctgcagtagctgtggcctcaccctgaagtcagcgggcccaggcctacctcactctctcccttggcagagaagcagacgtccatagctcctctccctcacaagcgctcccagcctgccctccagctgctgctctcccctcccagtctctactcactgggatgaggttaggtcatgaggacaccaaaaacctaaaaataaacaaaaagccaaacaagccttagcttttcttaaagactgaaatgcctggaagagttccagaccagcctaacatggtgaaaccacatatctactaaaaaaaatacaaaattagctggatgtggtagtgcatgcctgttatcccagctacttggaaggctgagacaggagaattgcttgaacccaggaggcagaggctgcagtgagccaggattgcgccactgcactccagcctgggcaacaagagcaaaactct

SEQ ID NO: 323005 - DNA, 2673 bp, Homo sapiens
tcttctgactaatgcaaaccatgtgtccatagaaccagaagatttttccaggggaaaagagcccccacgccccgcccagctataaggggccatgcaccaagcagggtacccaggctgcagaggtgccatggctgagtcacacctgctgcagtggctgctgctgctgctgcccacgctctgtggcccaggcactgctgcctggaccacctcatccttggcctgtgcccagggccctgagttctggtgccaaagcctggagcaagcattgcagtgcagagccctagggcattgcctacaggaagtctggggacatgtgggagccgatgacctatgccaagagtgtgaggacatcgtccacatccttaacaagatggccaaggaggccattttccaggacacgatgaggaagttcctggagcaggagtgcaacgtcctccccttgaagctgctcatgccccagtgcaaccaagtgcttgacgactacttccccctggtcatcgactacttccagaaccagactgactcaaacggcatctgtatgcacctgggcctgtgcaaatcccggcagccagagccagagcaggagccagggatgtcagaccccctgcccaaacctctgcgggaccctctgccagaccctctgctggacaagctcgtcctccctgtgctgcccggggccctccaggcgaggcctgggcctcacacacaggatctctccgagcagcaattccccattcctctcccctattgctggctctgcagggctctgatcaagcggatccaagccatgattcccaagggtgcgctagctgtggcagtggcccaggtgtgccgcgtggtacctctggtggcgggcggcatctgccagtgcctggctgagcgctactccgtcatcctgctcgacacgctgctgggccgcatgctgccccagctggtctgccgcctcgtcctccggtgctccatggatgacagcgctggcccaaggtcgccgacaggagaatggctgccgcgagactctgagtgccacctctgcatgtccgtgaccacccaggccgggaacagcagcgagcaggccataccacaggcaatgctccaggcctgtgttggctcctggctggacagggaaaagtgcaagcaatttgtggagcagcacacgccccagctgctgaccctggtgcccaggggctgggatgcccacaccacctgccaggccctcggggtgtgtgggaccatgtccagccctctccagtgtatccacagccccgacctttgatgagaactcagctgtccagctgcaaaggaaaagccaagtgagacgggctctgggaccatggtgaccaggctcttcccctgctccctggccctcgccagctgccaggctgaaaagaagcctcagctcccacaccgccctcctcaccgcccttcctcggcagtcacttccactggtggaccacgggcccccagccctgtgtcggccttgtctgtctcagctcaaccacagtctgacaccagagcccacttccatcctctctggtgtgaggcacagcgagggcagcatctggaggagctctgcagcctccacacctaccacgacctcccagggctgggctcaggaaaaaccagccactgctttacaggacagggggttgaagctgagccccgcctcacacccacccccatgcactcaaagattggattttacagctacttgcaattcaaaattcagaagaataaaaaatgggaacatacagaactctaaaagatagacatcagaaattgttaagttaagctttttcaaaaaatcagcaattccccagcgtagtcaagggtggacactgcacgctctggcatgatgggatggcgaccgggcaagctttcttcctcgagatgctctgctgcttgagagctattgctttgttaagatataaaaaggggtttctttttgtctttctgtaaggtggacttccagcttttgattgaaagtcctagggtgattctatttctgctgtgatttatctgctgaaagctcagctggggttgtgcaagctagggacccattcctgtgtaatacaatgtctgcaccaatgctaataaagtcctattctcttttatgagaaagaaaaaagacaccgtcctttaaagtgctgcagtatggccagacgtggtggctcacacctgcaatcccagcaccttaggaggccgaggcaggaggatccttgaggtcaggagttcgagaccagcctcgccaacatggtgaaaccccatttctactaaaaatacaaaaaattagccaagtgtggtggcatatgcctgtaatcccaactactcagaaggccgaggcaggagaattacttgaacgcaggagaatcactgcagcccaggaggcagaggttgcagtgagccgagattgcaccactgcactccagcctgggtgacagagcaagactccatctcagtaaataaataaataaataaaaagcgctgcagtagctgtggcctcaccctgaagtcagcgggcccaggcctacctcactctctcccttggcagagaagcagacgtccatagctcctctccctcacaagcgctcccagcctgccctccagctgctgctctccccaccactgcctcggctctactctgccttcctcatggctactcctcgtctgatggag

SEQ ID NO: 323006 - DNA, 3629 bp, Homo sapiens
gacacatacccacacagtaccccagccagccagacacacacacacacacacacacacacacacacacagcacacacacagcaccccagctggccacacacacacacacacacaccctgtccacaaagggcctaggaaactacgtgcccttcagccatgcacccgaccatgggcccccaggttcaggtgcacacggtgggcctgtacgctcacacacccttacaccctcactctcacacacatgcttacacacttattcattctcacatatatgctcatgctcattcacacacaatcccggccacctgccctaaagtccccacacagccctatctttgccttttgtccccccacatagagttctaaaccacagcacccccactaggcctgcttcctcccattccagtggtccctgagcccttgggccggcctgaataggggtgggcttccctcccagaccctaacactcccaccctgtgctgtgccccaggactcaaacggcatctgtatgcacctgggcctgtgcaaatcccggcagccagagccagagcaggagccagggatgtcagaccccctgcccaaacctctgcgggaccctctgccagaccctctgctggacaagctcgtcctccctgtgctgcccggggccctccaggcgaggcctgggcctcacacacaggatctctccgagcagcaattccccattcctctcccctattgctggctctgcagggctctgatcaagcggatccaagccatgattcccaagggtgcgctagctgtggcagtggcccaggtgtgccgcgtggtacctctggtggcgggcggcatctgccagtgcctggctgagcgctactccgtcatcctgctcgacacgctgctgggccgcatgctgccccagctggtctgccgcctcgtcctccggtgctccatggatgacagcgctggcccaaggtcgccgacaggagaatggctgccgcgagactctgagtgccacctctgcatgtccgtgaccacccaggccgggaacagcagcgagcaggccataccacaggcaatgctccaggcctgtgttggctcctggctggacagggaaaagtgcaagcaatttgtggagcagcacacgccccagctgctgaccctggtgcccaggggctgggatgcccacaccacctgccaggccctcggggtgtgtgggaccatgtccagccctctccagtgtatccacagccccgacctttgatgagaactcagctgtccagctgcaaaggaaaagccaagtgagacgggctctgggaccatggtgaccaggctcttcccctgctccctggccctcgccagctgccaggctgaaaagaagcctcagctcccacaccgccctcctcaccgcccttcctcggcagtcacttccactggtggaccacgggcccccagccctgtgtcggccttgtctgtctcagctcaaccacagtctgacaccagagcccacttccatcctctctggtgtgaggcacagcgagggcagcatctggaggagctctgcagcctccacacctaccacgacctcccagggctgggctcaggaaaaaccagccactgctttacaggacagggggttgaagctgagccccgcctcacacccacccccatgcactcaaagattggattttacagctacttgcaattcaaaattcagaagaataaaaaatgggaacatacagaactctaaaagatagacatcagaaattgttaagttaagctttttcaaaaaatcagcaattccccagcgtagtcaagggtggacactgcacgctctggcatgatgggatggcgaccgggcaagctttcttcctcgagatgctctgctgcttgagagctattgctttgttaagatataaaaaggggtttctttttgtctttctgtaaggtggacttccagcttttgattgaaagtcctagggtgattctatttctgctgtgatttatctgctgaaagctcagctggggttgtgcaagctagggacccattcctgtgtaatacaatgtctgcaccaatgctaataaagtcctattctcttttatgagaaagaaaaaagacaccgtcctttaaagtgctgcagtatggccagacgtggtggctcacacctgcaatcccagcaccttaggaggccgaggcaggaggatccttgaggtcaggagttcgagaccagcctcgccaacatggtgaaaccccatttctactaaaaatacaaaaaattagccaagtgtggtggcatatgcctgtaatcccaactactcagaaggccgaggcaggagaattacttgaacgcaggagaatcactgcagcccaggaggcagaggttgcagtgagccgagattgcaccactgcactccagcctgggtgacagagcaagactccatctcagtaaataaataaataaataaaaagcgctgcagtagctgtggcctcaccctgaagtcagcgggcccaggcctacctcactctctcccttggcagagaagcagacgtccatagctcctctccctcacaagcgctcccagcctgccctccagctgctgctctcccctcccagtctctactcactgggatgaggttaggtcatgaggacaccaaaaacctaaaaataaacaaaaagccaaacaagccttagcttttcttaaagactgaaatgcctggaagtgtccctttatttataaaataacttttgtcatatttcttatacatgtttcttgtaagaaattcagaaactacagacaaagagagtggaaattacccactgtcaggcctctgagcccaagctaagccatcatatcccctgtgccctgcacgtatacacccagatggcctgaagcaactgaagatccacaaaagaagtgaaaatagccagttcctgccttaactgatgacattccaccattgtgatttgttcctgccccaccctaactgatcaattgaccttgtgacaatacaccttccccacccttgagaaggtgctttgtaatattctccccacccaccccacgcccgcacccccgcacccttaagaaggtattttgtaatattctctccgccattgagaatgtgctttgtaagatccaccccctgcccacaaaaaattgctcctaactccaccgcctatcccaaacctacaagaactaatgataatcccaccaccctttgctgactctttttggactcagcccacctgcacccaggtgattaaaaagctttattgttcacacaaagcctgtttggtagtctcttcacagggaagcatgtgacacccacaatcccacctagcccaggagagagctacggcagggtgtgtgttttgacactgagcttggggctttttccatcttctccccacagcctctggctccacacctccaccgttcaagcgccagaaagagctgtctatgcagcctgctcttgggcctggggatgagacacacaattcattggctcctggattttaagtagacatttgtaaatctatagctaactactgtccttaaagccattgtttccattacaaaatccaactctctgagagaaaagggtgttttaaatttaaaaaaataaaaacaaaaaagtttgattgagac

SEQ ID NO: 323007 - DNA, 3832 bp, Homo sapiens
tcttctgactaatgcaaaccatgtgtccatagaaccagaagatttttccaggggaaaagagcccccacgccccgcccagctataaggggccatgcaccaagcagggtacccaggctgcagaggtgccatggctgagtcacacctgctgcagtggctgctgctgctgctgcccacgctctgtggcccaggcactgctgcctggaccacctcatccttggcctgtgcccagggccctgagttctggtgccaaagcctggagcaagcattgcagtgcagagccctagggcattgcctacaggaagtctggggacatgtgggagccgatgacctatgccaagagtgtgaggacatcgtccacatccttaacaagatggccaaggaggccattttccaggacacgatgaggaagttcctggagcaggagtgcaacgtcctccccttgaagctgctcatgccccagtgcaaccaagtgcttgacgactacttccccctggtcatcgactacttccagaaccagactgactcaaacggcatctgtatgcacctgggcctgtgcaaatcccggcagccagagccagagcaggagccagggatgtcagaccccctgcccaaacctctgcgggaccctctgccagaccctctgctggacaagctcgtcctccctgtgctgcccggggccctccaggcgaggcctgggcctcacacacaggatctctccgagcagcaattccccattcctctcccctattgctggctctgcagggctctgatcaagcggatccaagccatgattcccaagggtgcgctagctgtggcagtggcccaggtgtgccgcgtggtacctctggtggcgggcggcatctgccagtgcctggctgagcgctactccgtcatcctgctcgacacgctgctgggccgcatgctgccccagctggtctgccgcctcgtcctccggtgctccatggatgacagcgctggcccaagtgagcccactgccccctccttagcccaatgcctgctctcctcctccccctaccctgccactgcatgaccctctccctctgtggtcccactgcaatgcaccaaggaggacagaaaccaaacacctctgtagggtggccttgcctgctttccccctaatgctcacatctccagggtcgccgacaggagaatggctgccgcgagactctgagtgccacctctgcatgtccgtgaccacccaggccgggaacagcagcgagcaggccataccacaggcaatgctccaggcctgtgttggctcctggctggacagggaaaagtgcaagcaatttgtggagcagcacacgccccagctgctgaccctggtgcccaggggctgggatgcccacaccacctgccaggccctcggggtgtgtgggaccatgtccagccctctccagtgtatccacagccccgacctttgatgagaactcagctgtccagctgcaaaggaaaagccaagtgagacgggctctgggaccatggtgaccaggctcttcccctgctccctggccctcgccagctgccaggctgaaaagaagcctcagctcccacaccgccctcctcaccgcccttcctcggcagtcacttccactggtggaccacgggcccccagccctgtgtcggccttgtctgtctcagctcaaccacagtctgacaccagagcccacttccatcctctctggtgtgaggcacagcgagggcagcatctggaggagctctgcagcctccacacctaccacgacctcccagggctgggctcaggaaaaaccagccactgctttacaggacagggggttgaagctgagccccgcctcacacccacccccatgcactcaaagattggattttacagctacttgcaattcaaaattcagaagaataaaaaatgggaacatacagaactctaaaagatagacatcagaaattgttaagttaagctttttcaaaaaatcagcaattccccagcgtagtcaagggtggacactgcacgctctggcatgatgggatggcgaccgggcaagctttcttcctcgagatgctctgctgcttgagagctattgctttgttaagatataaaaaggggtttctttttgtctttctgtaaggtggacttccagcttttgattgaaagtcctagggtgattctatttctgctgtgatttatctgctgaaagctcagctggggttgtgcaagctagggacccattcctgtgtaatacaatgtctgcaccaatgctaataaagtcctattctcttttatgagaaagaaaaaagacaccgtcctttaaagtgctgcagtatggccagacgtggtggctcacacctgcaatcccagcaccttaggaggccgaggcaggaggatccttgaggtcaggagttcgagaccagcctcgccaacatggtgaaaccccatttctactaaaaatacaaaaaattagccaagtgtggtggcatatgcctgtaatcccaactactcagaaggccgaggcaggagaattacttgaacgcaggagaatcactgcagcccaggaggcagaggttgcagtgagccgagattgcaccactgcactccagcctgggtgacagagcaagactccatctcagtaaataaataaataaataaaaagcgctgcagtagctgtggcctcaccctgaagtcagcgggcccaggcctacctcactctctcccttggcagagaagcagacgtccatagctcctctccctcacaagcgctcccagcctgccctccagctgctgctctcccctcccagtctctactcactgggatgaggttaggtcatgaggacaccaaaaacctaaaaataaacaaaaagccaaacaagccttagcttttcttaaagactgaaatgcctggaagtgtccctttatttataaaataacttttgtcatatttcttatacatgtttcttgtaagaaattcagaaactacagacaaagagagtggaaattacccactgtcaggcctctgagcccaagctaagccatcatatcccctgtgccctgcacgtatacacccagatggcctgaagcaactgaagatccacaaaagaagtgaaaatagccagttcctgccttaactgatgacattccaccattgtgatttgttcctgccccaccctaactgatcaattgaccttgtgacaatacaccttccccacccttgagaaggtgctttgtaatattctccccacccaccccacgcccgcacccccgcacccttaagaaggtattttgtaatattctctccgccattgagaatgtgctttgtaagatccaccccctgcccacaaaaaattgctcctaactccaccgcctatcccaaacctacaagaactaatgataatcccaccaccctttgctgactctttttggactcagcccacctgcacccaggtgattaaaaagctttattgttcacacaaagcctgtttggtagtctcttcacagggaagcatgtgacacccacaatcccacctagcccaggagagagctacggcagggtgtgtgttttgacactgagcttggggctttttccatcttctccccacagcctctggctccacacctccaccgttcaagcgccagaaagagctgtctatgcagcctgctcttgggcctggggatgagacacacaattcattggctcctggattttaagtagacatttgtaaatctatagctaactactgtccttaaagccattgtttccattacaaaatccaactctctgagagaaaagggtgttttaaatttaaaaaaataaaaacaaaaaagtttgattgagac

SEQ ID NO: 323008 - DNA, 2744 bp, Homo sapiens
ggagctcacagccaagtccacttcttccatctgaggcggggaagccagccctgttcctgaaaccctgcatcacaagcccctgtgggaggcagtggggaggggaggtcctcccccactcagacctgacccacagggaccagtttaatgtgtccttgccccagtgatgacagctggggatctgggggtggggagtcacccaggacccgggcagtcgcctttccccagctcctagggctcccggccttccctgctgaaacagcaagaccagtgggttggcgtgggaggcctgggcttcaaaccacctctgctatcacctggctgtgggtccccaggcaggacatacacacagtccctctctggccctcatcctcctcagctgcaaaggaaaagccaagtgagacgggctctgggaccatggtgaccaggctcttcccctgctccctggccctcgccagctgccaggctgaaaagaagcctcagctcccacaccgccctcctcaccgcccttcctcggcagtcacttccactggtggaccacgggcccccagccctgtgtcggccttgtctgtctcagctcaaccacagtctgacaccagagcccacttccatcctctctggtgtgaggcacagcgagggcagcatctggaggagctctgcagcctccacacctaccacgacctcccagggctgggctcaggaaaaaccagccactgctttacaggacagggggttgaagctgagccccgcctcacacccacccccatgcactcaaagattggattttacagctacttgcaattcaaaattcagaagaataaaaaatgggaacatacagaactctaaaagatagacatcagaaattgttaagttaagctttttcaaaaaatcagcaattccccagcgtagtcaagggtggacactgcacgctctggcatgatgggatggcgaccgggcaagctttcttcctcgagatgctctgctgcttgagagctattgctttgttaagatataaaaaggggtttctttttgtctttctgtaaggtggacttccagcttttgattgaaagtcctagggtgattctatttctgctgtgatttatctgctgaaagctcagctggggttgtgcaagctagggacccattcctgtgtaatacaatgtctgcaccaatgctaataaagtcctattctcttttatgagaaagaaaaaagacaccgtcctttaaagtgctgcagtatggccagacgtggtggctcacacctgcaatcccagcaccttaggaggccgaggcaggaggatccttgaggtcaggagttcgagaccagcctcgccaacatggtgaaaccccatttctactaaaaatacaaaaaattagccaagtgtggtggcatatgcctgtaatcccaactactcagaaggccgaggcaggagaattacttgaacgcaggagaatcactgcagcccaggaggcagaggttgcagtgagccgagattgcaccactgcactccagcctgggtgacagagcaagactccatctcagtaaataaataaataaataaaaagcgctgcagtagctgtggcctcaccctgaagtcagcgggcccaggcctacctcactctctcccttggcagagaagcagacgtccatagctcctctccctcacaagcgctcccagcctgccctccagctgctgctctcccctcccagtctctactcactgggatgaggttaggtcatgaggacaccaaaaacctaaaaataaacaaaaagccaaacaagccttagcttttcttaaagactgaaatgcctggaagtgtccctttatttataaaataacttttgtcatatttcttatacatgtttcttgtaagaaattcagaaactacagacaaagagagtggaaattacccactgtcaggcctctgagcccaagctaagccatcatatcccctgtgccctgcacgtatacacccagatggcctgaagcaactgaagatccacaaaagaagtgaaaatagccagttcctgccttaactgatgacattccaccattgtgatttgttcctgccccaccctaactgatcaattgaccttgtgacaatacaccttccccacccttgagaaggtgctttgtaatattctccccacccaccccacgcccgcacccccgcacccttaagaaggtattttgtaatattctctccgccattgagaatgtgctttgtaagatccaccccctgcccacaaaaaattgctcctaactccaccgcctatcccaaacctacaagaactaatgataatcccaccaccctttgctgactctttttggactcagcccacctgcacccaggtgattaaaaagctttattgttcacacaaagcctgtttggtagtctcttcacagggaagcatgtgacacccacaatcccacctagcccaggagagagctacggcagggtgtgtgttttgacactgagcttggggctttttccatcttctccccacagcctctggctccacacctccaccgttcaagcgccagaaagagctgtctatgcagcctgctcttgggcctggggatgagacacacaattcattggctcctggattttaagtagacatttgtaaatctatagctaactactgtccttaaagccattgtttccattacaaaatccaactctctgagagaaaagggtgttttaaatttaaaaaaataaaaacaaaaaagtttgattgagac

SEQ ID NO: 323009 - DNA, 2416 bp, Homo sapiens
ttccctcgggcttttgcttcccttactccaagccatgcagtttggatggaaggccttcattctgatggtgcctgcatggtgattgcatggtgaccaggctcttcccctgctccctggccctcgccagctgccaggctgaaaagaagcctcagctcccacaccgccctcctcaccgcccttcctcggcagtcacttccactggtggaccacgggcccccagccctgtgtcggccttgtctgtctcagctcaaccacagtctgacaccagagcccacttccatcctctctggtgtgaggcacagcgagggcagcatctggaggagctctgcagcctccacacctaccacgacctcccagggctgggctcaggaaaaaccagccactgctttacaggacagggggttgaagctgagccccgcctcacacccacccccatgcactcaaagattggattttacagctacttgcaattcaaaattcagaagaataaaaaatgggaacatacagaactctaaaagatagacatcagaaattgttaagttaagctttttcaaaaaatcagcaattccccagcgtagtcaagggtggacactgcacgctctggcatgatgggatggcgaccgggcaagctttcttcctcgagatgctctgctgcttgagagctattgctttgttaagatataaaaaggggtttctttttgtctttctgtaaggtggacttccagcttttgattgaaagtcctagggtgattctatttctgctgtgatttatctgctgaaagctcagctggggttgtgcaagctagggacccattcctgtgtaatacaatgtctgcaccaatgctaataaagtcctattctcttttatgagaaagaaaaaagacaccgtcctttaaagtgctgcagtatggccagacgtggtggctcacacctgcaatcccagcaccttaggaggccgaggcaggaggatccttgaggtcaggagttcgagaccagcctcgccaacatggtgaaaccccatttctactaaaaatacaaaaaattagccaagtgtggtggcatatgcctgtaatcccaactactcagaaggccgaggcaggagaattacttgaacgcaggagaatcactgcagcccaggaggcagaggttgcagtgagccgagattgcaccactgcactccagcctgggtgacagagcaagactccatctcagtaaataaataaataaataaaaagcgctgcagtagctgtggcctcaccctgaagtcagcgggcccaggcctacctcactctctcccttggcagagaagcagacgtccatagctcctctccctcacaagcgctcccagcctgccctccagctgctgctctcccctcccagtctctactcactgggatgaggttaggtcatgaggacaccaaaaacctaaaaataaacaaaaagccaaacaagccttagcttttcttaaagactgaaatgcctggaagtgtccctttatttataaaataacttttgtcatatttcttatacatgtttcttgtaagaaattcagaaactacagacaaagagagtggaaattacccactgtcaggcctctgagcccaagctaagccatcatatcccctgtgccctgcacgtatacacccagatggcctgaagcaactgaagatccacaaaagaagtgaaaatagccagttcctgccttaactgatgacattccaccattgtgatttgttcctgccccaccctaactgatcaattgaccttgtgacaatacaccttccccacccttgagaaggtgctttgtaatattctccccacccaccccacgcccgcacccccgcacccttaagaaggtattttgtaatattctctccgccattgagaatgtgctttgtaagatccaccccctgcccacaaaaaattgctcctaactccaccgcctatcccaaacctacaagaactaatgataatcccaccaccctttgctgactctttttggactcagcccacctgcacccaggtgattaaaaagctttattgttcacacaaagcctgtttggtagtctcttcacagggaagcatgtgacacccacaatcccacctagcccaggagagagctacggcagggtgtgtgttttgacactgagcttggggctttttccatcttctccccacagcctctggctccacacctccaccgttcaagcgccagaaagagctgtctatgcagcctgctcttgggcctggggatgagacacacaattcattggctcctggattttaagtagacatttgtaaatctatagctaactactgtccttaaagccattgtttccattacaaaatccaactctctgagagaaaagggtgttttaaatttaaaaaaataaaaacaaaaaagtttgattgagac

SEQ ID NO: 323010 - DNA, 2338 bp, Homo sapiens
tcttctgactaatgcaaaccatgtgtccatagaaccagaagatttttccaggggaaaagagcccccacgccccgcccagctataaggggccatgcaccaagcagggtacccaggctgcagaggtgccatggctgagtcacacctgctgcagtggctgctgctgctgctgcccacgctctgtggcccaggcactgctgcctggaccacctcatccttggcctgtgcccagggccctgagttctggtgccaaagcctggagcaagcattgcagtgcagagccctagggcattgcctacaggaagtctggggacatgtgggagccgatgacctatgccaagagtgtgaggacatcgtccacatccttaacaagatggccaaggaggccattttccaggacacgatgaggaagttcctggagcaggagtgcaacgtcctccccttgaagctgctcatgccccagtgcaaccaagtgcttgacgactacttccccctggtcatcgactacttccagaaccagactgactcaaacggcatctgtatgcacctgggcctgtgcaaatcccggcagccagagccagagcaggagccagggatgtcagaccccctgcccaaacctctgcgggaccctctgccagaccctctgctggacaagctcgtcctccctgtgctgcccggggccctccaggcgaggcctgggcctcacacacaggatctctccgagcagcaattccccattcctctcccctattgctggctctgcagggctctgatcaagcggatccaagccatgattcccaagggtgcgctagctgtggcagtggcccaggtgtgccgcgtggtacctctggtggcgggcggcatctgccagtgcctggctgagcgctactccgtcatcctgctcgacacgctgctgggccgcatgctgccccagctggtctgccgcctcgtcctccggtgctccatggatgacagcgctggcccaaggtcgccgacaggagaatggctgccgcgagactctgagtgccacctctgcatgtccgtgaccacccaggccgggaacagcagcgagcaggccataccacaggcaatgctccaggcctgtgttggctcctggctggacagggaaaagtgcaagcaatttgtggagcagcacacgccccagctgctgaccctggtgcccaggggctgggatgcccacaccacctgccaggccctcggggtgtgtgggaccatgtccagccctctccagtgtatccacagccccgacctttgatgagaactcagctgtccagctgcaaaggaaaagccaagtgagacgggctctgggaccatggtgaccaggctcttcccctgctccctggccctcgccagctgccaggctgaaaagaagcctcagctcccacaccgccctcctcaccgcccttcctcggcagtcacttccactggtggaccacgggcccccagccctgtgtcggccttgtctgtctcagctcaaccacagtctgacaccagagcccacttccatcctctctggtgtgaggcacagcgagggcagcatctggaggagctctgcagcctccacacctaccacgacctcccagggctgggctcaggaaaaaccagccactgctttacaggacagggggttgaagctgagccccgcctcacacccacccccatgcactcaaagattggattttacagctacttgcaattcaaaattcagaagaataaaaaatgggaacatacagaactctaaaaaaaaacaaaaacaaaaaacaacacaaaaaaaaaaaacaaaaaaacaaacaacaagaacaaaaaaacccaacacacacaaaaaacgaggggggggccgccacaagaaatttcccaggaaggggggccaacaaaaagagcgccaacacacaaactagtatgtaactaaacagaggggggccaccaaagaagacgcgacacaacataaaagagacagacacacacgcgccgacggaaaaacacaacacaagcgaagaagaggaaaaaaacacaccacggggacccaaatcttaagaagacgagagaaaccaccccatatcacctgcgggagggcggacggcgacacaaacaactgggtgcgggcggcaccacaaacactccaacccagagaggacaaagtgacaaatagcgatctagacgaggaggtaatataacaagacaatatgtattagtgaagtgtggcatgatgttgggtggcagaaaaagacgccggtgcaataatagataggaagtggggaaggaaaaaaattgtctgtccacggcgatggtgaaggtgaatcggaagaaaaattttttgagc

SEQ ID NO: 323011 - DNA, 1367 bp, Homo sapiens
tcttctgactaatgcaaaccatgtgtccatagaaccagaagatttttccaggggaaaagagcccccacgccccgcccagctataaggggccatgcaccaagcagggtacccaggctgcagaggtgccatggctgagtcacacctgctgcagtggctgctgctgctgctgcccacgctctgtggcccaggcactgctgcctggaccacctcatccttggcctgtgcccagggccctgagttctggtgccaaagcctggagcaagcattgcagtgcagagccctagggcattgcctacaggaagtctggggacatgtgggagccgatgacctatgccaagagtgtgaggacatcgtccacatccttaacaagatggccaaggaggccattttccaggacacgatgaggaagttcctggagcaggagtgcaacgtcctccccttgaagctgctcatgccccagtgcaaccaagtgcttgacgactacttccccctggtcatcgactacttccagaaccagactgactcaaacggcatctgtatgcacctgggcctgtgcaaatcccggcagccagagccagagcaggagccagggatgtcagaccccctgcccaaacctctgcgggaccctctgccagaccctctgctggacaagctcgtcctccctgtgctgcccggggccctccaggcgaggcctgggcctcacacacaggatctctccgagcagcaattccccattcctctcccctattgctggctctgcagggctctgatcaagcggatccaagccatgattcccaagggtgcgctagctgtggcagtggcccaggtgtgccgcgtggtacctctggtggcgggcggcatctgccagtgcctggctgagcgctactccgtcatcctgctcgacacgctgctgggccgcatgctgccccagctggtctgccgcctcgtcctccggtgctccatggatgacagcgctggcccaagtgagcccactgccccctccttagcccaatgcctgctctcctcctccccctaccctgccactgcatgaccctctccctctgtggtcccactgcaatgcaccaaggaggacagaaaccaaacacctctgtagggtggccttgcctgctttccccctaatgctcacatctccagggtcgccgacaggagaatggctgccgcgagactctgagtgccacctctgcatgtccgtgaccacccaggccgggaacagcagcgagcaggccataccacaggcaatgctccaggcctgtgttggctcctggctggacagggaaaagctggctccagtttgttaagggtttcaactgcagccagaggtgttccgtgagggctgatggaggagt

SEQ ID NO: 323012 - DNA, 585 bp, Homo sapiens
tcttctgactaatgcaaaccatgtgtccatagaaccagaagatttttccaggggaaaagagcccccacgccccgcccagctataaggggccatgcaccaagcagggtacccaggctgcagaggtgccatggctgagtcacacctgctgcagtggctgctgctgctgctgcccacgctctgtggcccaggcactgctgcctggaccacctcatccttggcctgtgcccagggccctgagttctggtgccaaagcctggagcaagcattgcagtgcagagccctagggcattgcctacaggaagtctggggacatgtgggagccgatgacctatgccaagagtgtgaggacatcgtccacatccttaacaagatggccaaggaggccattttccaggacacgatgaggaagttcctggagcaggagtgcaacgtcctccccttgaagctgctcatgccccagtgcaaccaagtgcttgacgactacttccccctggtcatcggctcccacatgtccccagacttcctgtaggcaatgccctagggctctgcactgcaatgcttgctccaggctttggcaccagaact

SEQ ID NO: 323013 - DNA, 894 bp, Homo sapiens
ccatgaaataatggagttctaggaaataatgcatcttaggaaaggttgttcttccctctagctatgaattgccctatgggattttagatagcatttcccacttgatgctccttgccctcatcaccattcatcttattactacagtcagtttctgtggactaccaagataatagcgctttcccaaacacaagcactcattttaaagcagttatcttttaatgtgaattctctttgttaaaatgtcaatgttgtgagatttggtagcatattcctatttaaactagtgaatatgattttgatatgaaccttgaaagatggggaatttgagtgcttttaacgtgttgaaagtgtaacacttgaaactttggaggctgggaaatcgaggcgatgaagtgttctataagataggttttctgcccttttaaatatagtggtgctgtctttgtttccaattggaatttcagtgtaatgcactgttctcacttcagatgcagaggaaggataaaatagtgaagttgatatggccctgttcagccaaatttccgaatcataaagtgacatgctaataggatatactgtggcatttctgtgtattacagcttgtatggtttgagttacttttccacacataattttttctcctccacacaagtcattaaatatgttttcctgagagatagtcaagctttgttgtataggaaagtttcgtttgtggaaataaatgagtttcactgtaagctaatgtaattctattacgtgaggaaatgttccttaaaaaataaagaatattatatactgttgttttcctgaatattttttaaaagacacattaactatttcctatttcatccttcatggacatcccacaatagattaccagcaccttaaaaaaaa

SEQ ID NO: 323014 - DNA, 581 bp, Homo sapiens
ggaatattttccatctgctgttggttgaatccacagatgcagaacccaaggatatggagggccaaagaagcatttacagaggaaggacagtgtagattcatgaaaactaaggaaggagatttgaaacaggaagacttgattcacagttttaaaggctgcaaaggaggtaaattgaaaaaaagactaagaggccatgtgaaggtcatcaagcatcatccagagagaaattccgcagagcaatcagtgcaaaatccatgttttcattaccaaaaaccaaaaactttatcacaatatgatatgaacttacctatatgaagtctttcagtggccccaaaacaaatcatatatatttaatgaatagccattattgaaaaaatatatactaaaaagtaactacactggaaaacccatgatgtattgttactattgtaattgggagagaagtcagatgttagaatattttaggaatgaaataggtcaaaagaaagaaaaatgtgaaggatatgaataaacagagaaatgtaggagggacaaaaggacaccctctttaaactgtcaatggcaggctagaactgtttgtg

SEQ ID NO: 323015 - DNA, 478 bp, Homo sapiens
aggcttctgccactgcactcacaaccatgctgtgttgtgacgatttctcagagtagataatttctcagatgggactgggagctccaagagagggtagcagagaatgggggaagatcctccacaaatatgcctctccattcttccagctgccaccccacgcctcccaacacacaatcatatatcaggagataaagacaccatccattgtggcagtatggcatcctcgtaaaaaacatgggctctggagtcccacagtcccagacctgaatagcagcactgccactgatggctagctgtgtgaccttggacaagttgtacattctctgtaagccccagctttatcttctgttaaaggagactgagtgtgtctcccatccatggttgtgggatgattcagtggggtcgtgcacttaaaagcgcttgccttagcacagtgccacacatagagtgctcaataaatactatcctagtaggcttt

SEQ ID NO: 323016 - DNA, 4687 bp, Homo sapiens
  misc_feature (517)..(517): n is a, c, g, or t
  misc_feature (562)..(562): n is a, c, g, or t
  misc_feature (636)..(636): n is a, c, g, or t
cgcccgctgctccgcgcgcagccggctcgggccgctcctcctgactgaggcgcggcggcggcggtggctgtgaccgcgcggaccgagccgagacattcgcgccgggggatcgggcgccgccgccgctgggccccgggcgcgtggatgcggctgggtcgggcggcgccgtacacctgaggcggagaacggggcgcggcgcgggtgacgctgtcagggccgcggttcctgacgcccaggcgctcgccaggacgagccaggcagtgatttgaggcaccggcttcaccttcacccatggtccggagagcctagcggggctcgccaccgcctcccggctccccttccacgcctcatcctgccagcctcgccgccccgccagcgccgggcaaccgcctcgcccgaagccctccctcgttactgtccgcataccccggcggcgccgccgcgggaagcggctccccctcctcttcctccgcgtcctcttccctctttcccccgccggggccgcttgttgcaccgncccgcggcctgcgggagccgctcgccccggccttgtgctcgcgtncgcacccctttcctgtcgccccccggggcccgcaccacagcccggccggcgagaccccggccagaccccgctgnccgcacaaaatgtcggcccggacgccattgccgacggtgaacgagcgggacacggaaaatcatacatctgtggatggatatactgaaccacacatccagcctaccaagtcgagtagcagacagaacatcccccggtgtagaaactccattacgtcagcaacagatgaacagcctcacattggaaattaccgtttacaaaaaacaatagggaagggaaattttgccaaagtcaaattggcaagacacgttctaactggtagagaggttgctgtgaaaataatagacaaaactcagctaaatcctaccagtctacaaaagttatttcgagaagtacgaataatgaagatactgaatcatcctaatataggtgaagtatttgattacttagttgcccatggaagaatgaaagagaaagaggcccgtgcaaaatttaggcagattgtatctgctgtacagtattgtcatcaaaagtacattgttcaccgtgatcttaaggctgaaaaccttctccttgatggtgatatgaatattaaaattgctgactttggttttagtaatgaatttacagttgggaacaaattggacacattttgtggaagcccaccctatgctgctcccgagcttttccaaggaaagaagtatgatgggcctgaagtggatgtgtggagtctgggcgtcattctctatacattagtcagtggctccttgcctttcgatggccagaatttaaaggaactgcgagagcgagttttacgagggaagtaccgtattcccttctatatgtccacagactgtgaaaatcttctgaagaaattattagtcctgaatccaataaagagaggcagcttggaacaaataatgaaagatcgatggatgaatgttggtcatgaagaggaagaactaaagccatatactgagcctgatccggatttcaatgacacaaaaagaatagacattatggtcaccatgggctttgcacgagatgaaataaatgatgccttaataaatcagaagtatgatgaagttatggctacttatattcttctaggtagaaaaccacctgaatttgaaggtggtgaatcgttatccagtggaaacttgtgtcagaggtcccggcccagtagtgacttaaacaacagcactcttcagtcccctgctcacctgaaggtccagagaagtatctcagcaaatcagaagcagcggcgtttcagtgatcatgctggtccatccattcctcctgctgtatcatataccaaaagacctcaggctaacagtgtggaaagtgaacagaaagaggagtgggacaaagatgtggctcgaaaacttggcagcacaacagttggatcaaaaagcgagatgactgcaagccctcttgtagggccagagaggaaaaaatcttcaactattccaagtaacaatgtgtattctggaggtagcatggcaagaaggaatacatatgtctgtgaaaggaccacagatcgatacgtagcattgcagaatggaaaagacagcagccttacggagatgtctgtgagtagcatatcttctgcaggctcttctgtggcctctgctgtcccctcagcacgaccccgccaccagaagtccatgtccacttctggtcatcctattaaagtcacactgccaaccattaaagacggctctgaagcttaccggcctggtacaacccagagagtgcctgctgcttccccatctgctcacagtattagtactgcgactccagaccggacccgttttccccgagggagctcaagccgaagcactttccatggtgaacagctccgggagcgacgcagcgttgcttataatgggccacctgcttcaccatcccatgaaacgggtgcatttgcacatgccagaaggggaacgtcaactggtataataagcaaaatcacatccaaatttgttcgcagaagtacatcaggggaaccaaaagaaagagacaaggaagagggtaaagattctaagccgcgttctttgcggttcacatggagtatgaagaccactagttcaatggaccctaatgacatgatgagagaaatccgaaaagtgttagatgcaaataactgtgattatgagcaaaaagagagatttttgcttttctgtgtccatggagacgctagacaggatagcctcgtgcagtgggagatggaagtctgcaagttgccacgactgtcacttaatggggttcgcttcaagcgaatatctgggacatctattgcctttaagaacattgcatcaaaaatagcaaatgagcttaagctgtaaagaagtccaaatttacaggttcagggaagatacatacatatatgaggtacagtttttgaatgtactggtaatgcctaatgtggtctgcctgtgaatctccccatgtagaatttgcccttaatgcaataaggttatacatagttatgaactgtaaaattaaagtcagtatgaactataataaatatctgtagcttaaaaagtaggttcacatgtacaggtaagtatattgtgtatttctgttcattttctgttcatagagttgtataataaaacatgattgcttaaaaacttgtatagttgtctagatttctgcacctgaatgtatgtttgatgctttgatttgaaaatgttcttccctgttatttacattctggtgggtttttaaaattcttacctccatcatgcaattttgaaaattgtgtccagaattaaaagtgcatagaaatagcctttacaattgtagcatggacctttaaaaattgttttaaaatcttatttaaatttaaaccagaagctgaaaaatagatcagctttattatacacaaaattattactgcttatctttgctcttttccttgttatcccgcaaggtttagttgagaagatacaaaatgtttacagtgttggcacttagagtttttaaattcaagtacatgaaattcagtaatagcattgccttgagctaactaggaagtaccgggaaaaaagttaaatctacatcaagtttcttttgaactttgaagtgttttctgacccactgctaactgtagcaacaaaatttaaaagaaaaaaaacatactttatctggctattataacataaactgtcacgtaggtttgctgccttcagaataccgcaatttaattgcgggaatataataatattgggactgtttcacagcacaaactcatctttacagtgttgatcaatgcatcagttaagaaataatgccacctcaggaattaactggcattgggaacatttgcctcattctcctgctatcctcttcattcacccctgccactgtaatatctataagtacttaagagacttgtgagcaaaacatactatttataacagtatatgattgatttatgcttatgtggttgttcagtttgttcccatgtaactcgtttgttttaaatattttgccagatttcttgtatttattccacatcattatgcctataatgtgccgctttgtgattgggcatttgcctacttttctttcataattagtgatatatgcgatgtaaaaccactagtaaaggtacattttaatacttgttattttatactgaattagccttggaggttgactgtgcaatgttatttactgttgtaattactgtaataccaacatatgggccccatctgcacactcctgaaaaacagaaagtgtattcaaattttatcagtttaaagaaaataaagctgtgataaatactgtaattccaacctacattagaaggtctaagtgtaggtgatgtgccattccataatggcttccagactagggtgaattttatgttctgtactgtactgtgatgtagctttcttctgtaacagttatgttttaaaattaagtgagttttttttttgccttagcaaagggtggtgtttgaaaaaaaaaatgtgtagcccctttttaacctagtgttcattcaaaaaaaaattgatgcaaatctttattcactttcactggtgcacactgaaattttacttgaacagttctcataataaagcacttgtcttttgctcttta

SEQ ID NO: 323017 - DNA, 3318 bp, Homo sapiens
  misc_feature (517)..(517): n is a, c, g, or t
  misc_feature (562)..(562): n is a, c, g, or t
  misc_feature (636)..(636): n is a, c, g, or t
cgcccgctgctccgcgcgcagccggctcgggccgctcctcctgactgaggcgcggcggcggcggtggctgtgaccgcgcggaccgagccgagacattcgcgccgggggatcgggcgccgccgccgctgggccccgggcgcgtggatgcggctgggtcgggcggcgccgtacacctgaggcggagaacggggcgcggcgcgggtgacgctgtcagggccgcggttcctgacgcccaggcgctcgccaggacgagccaggcagtgatttgaggcaccggcttcaccttcacccatggtccggagagcctagcggggctcgccaccgcctcccggctccccttccacgcctcatcctgccagcctcgccgccccgccagcgccgggcaaccgcctcgcccgaagccctccctcgttactgtccgcataccccggcggcgccgccgcgggaagcggctccccctcctcttcctccgcgtcctcttccctctttcccccgccggggccgcttgttgcaccgncccgcggcctgcgggagccgctcgccccggccttgtgctcgcgtncgcacccctttcctgtcgccccccggggcccgcaccacagcccggccggcgagaccccggccagaccccgctgnccgcacaaaatgtcggcccggacgccattgccgacggtgaacgagcgggacacggaaaatcatacatctgtggatggatatactgaaccacacatccagcctaccaagtcgagtagcagacagaacatcccccggtgtagaaactccattacgtcagcaacagatgaacagcctcacattggaaattaccgtttacaaaaaacaatagggaagggaaattttgccaaagtcaaattggcaagacacgttctaactggtagagaggttgctgtgaaaataatagacaaaactcagctaaatcctaccagtctacaaaagttatttcgagaagtacgaataatgaagatactgaatcatcctaatatagtaaaattgtttgaagttattgaaacagagaagactctctatttagtcatggaatacgcgagtgggggtgaagtatttgattacttagttgcccatggaagaatgaaagagaaagaggcccgtgcaaaatttaggcagattgtatctgctgtacagtattgtcatcaaaagtacattgttcaccgtgatcttaaggctgaaaaccttctccttgatggtgatatgaatattaaaattgctgactttggttttagtaatgaatttacagttgggaacaaattggacacattttgtggaagcccaccctatgctgctcccgagcttttccaaggaaagaagtatgatgggcctgaagtggatgtgtggagtctgggcgtcattctctatacattagtcagtggctccttgcctttcgatggccagaatttaaaggaactgcgagagcgagttttacgagggaagtaccgtattcccttctatatgtccacagactgtgaaaatcttctgaagaaattattagtcctgaatccaataaagagaggcagcttggaacaaataatgaaagatcgatggatgaatgttggtcatgaagaggaagaactaaagccatatactgagcctgatccggatttcaatgacacaaaaagaatagacattatggtcaccatgggctttgcacgagatgaaataaatgatgccttaataaatcagaagtatgatgaagttatggctacttatattcttctaggtagaaaaccacctgaatttgaaggtggtgaatcgttatccagtggaaacttgtgtcagaggtcccggcccagtagtgacttaaacaacagcactcttcagtcccctgctcacctgaaggtccagagaagtatctcagcaaatcagaagcagcggcgtttcagtgatcatgctggtccatccattcctcctgctgtatcatataccaaaagacctcaggctaacagtgtggaaagtgaacagaaagaggagtgggacaaagatgtggctcgaaaacttggcagcacaacagttggatcaaaaagcgagatgactgcaagccctcttgtagggccagagaggaaaaaatcttcaactattccaagtaacaatgtgtattctggaggtagcatggcaagaaggaatacatatgtctgtgaaaggaccacagatcgatacgtagcattgcagaatggaaaagacagcagccttacggagatgtctgtgagtagcatatcttctgcaggctcttctgtggcctctgctgtcccctcagcacgaccccgccaccagaagtccatgtccacttctggtcatcctattaaagtcacactgccaaccattaaagacggctctgaagcttaccggcctggtacaacccagagagtgcctgctgcttccccatctgctcacagtattagtactgcgactccagaccggacccgttttccccgagggagctcaagccgaagcactttccatggtgaacagctccgggagcgacgcagcgttgcttataatgggccacctgcttcaccatcccatgaaacgggtgcatttgcacatgccagaaggggaacgtcaactggtataataagcaaaatcacatccaaatttgttcgcagggatccaagtgaaggcgaagccagtggcagaaccgacacctcaagaagtacatcaggggaaccaaaagaaagagacaaggaagagggtaaagattctaagccgcgttctttgcggttcacatggagtatgaagaccactagttcaatggaccctaatgacatgatgagagaaatccgaaaagtgttagatgcaaataactgtgattatgagcaaaaagagagatttttgcttttctgtgtccatggagacgctagacaggatagcctcgtgcagtgggagatggaagtctgcaagttgccacgactgtcacttaatggggttcgcttcaagcgaatatctgggacatctattgcctttaagaacattgcatcaaaaatagcaaatgagcttaagctgtaaagaagtccaaatttacaggttcagggaagatacatacatatatgaggtacagtttttgaatgtactggtaatgcctaatgtggtctgcctgtgaatctccccatgtagaatttgcccttaatgcaataaggttatacatagttatgaactgtaaaattaaagtcagtatgaactataataaatatctgtagcttaaaaagtaggttcacatgtacaggtaagtatattgtgtatttctgttcattttctgttcatagagttgtataataaaacatgattgcttaa

SEQ ID NO: 323018 - DNA, 488 bp, Homo sapiens
  misc_feature (26)..(26): n is a, c, g, or t
  misc_feature (53)..(53): n is a, c, g, or t
  misc_feature (65)..(65): n is a, c, g, or t
  misc_feature (70)..(70): n is a, c, g, or t
aaatccttgaacgcctgctgtggggnctcggccgggtgctgctgaatggtgcnactggtgtaaancccancccacagttcctgtcctcatggaatttgcagccctagtgaggaaagatcctccccaagtcaaataaccacaaggtaactgcagggagagacaccgggataatttctgtgaagagaggacatggggtgctccgagagcccctgacagagggaactttgtggtcctagaaaccaggtggtgttttcctgaggaaatgacattttcctctggatcagagctgaggaaggtgcctctgtgtgtcccgtggccgctgtgacactgaccacacacctggggctggaaaataatactcactttagatttttcattttatgtgttcatgacaacataaatatttttcaaagatttagaggaattttgcaatgtgtttgcataaataaataccagtttatgttcaccggctatgtgataccaggatt

SEQ ID NO: 323019 - DNA, 4844 bp, Homo sapiens
  misc_feature (517)..(517): n is a, c, g, or t
  misc_feature (562)..(562): n is a, c, g, or t
  misc_feature (636)..(636): n is a, c, g, or t
cgcccgctgctccgcgcgcagccggctcgggccgctcctcctgactgaggcgcggcggcggcggtggctgtgaccgcgcggaccgagccgagacattcgcgccgggggatcgggcgccgccgccgctgggccccgggcgcgtggatgcggctgggtcgggcggcgccgtacacctgaggcggagaacggggcgcggcgcgggtgacgctgtcagggccgcggttcctgacgcccaggcgctcgccaggacgagccaggcagtgatttgaggcaccggcttcaccttcacccatggtccggagagcctagcggggctcgccaccgcctcccggctccccttccacgcctcatcctgccagcctcgccgccccgccagcgccgggcaaccgcctcgcccgaagccctccctcgttactgtccgcataccccggcggcgccgccgcgggaagcggctccccctcctcttcctccgcgtcctcttccctctttcccccgccggggccgcttgttgcaccgncccgcggcctgcgggagccgctcgccccggccttgtgctcgcgtncgcacccctttcctgtcgccccccggggcccgcaccacagcccggccggcgagaccccggccagaccccgctgnccgcacaaaatgtcggcccggacgccattgccgacggtgaacgagcgggacacggaaaatcaaagatctggacagcatggacttactcctcagaagtcattctataagggtaccaggagtatgaggatcctaaatcccttcaatttagttacatacatctgtggatggatatactgaaccacacatccagcctaccaagtcgagtagcagacagaacatcccccggtgtagaaactccattacgtcagcaacagatgaacagcctcacattggaaattaccgtttacaaaaaacaatagggaagggaaattttgccaaagtcaaattggcaagacacgttctaactggtagagaggttgctgtgaaaataatagacaaaactcagctaaatcctaccagtctacaaaagttatttcgagaagtacgaataatgaagatactgaatcatcctaatatagtaaaattgtttgaagttattgaaacagagaagactctctatttagtcatggaatacgcgagtgggggtgaagtatttgattacttagttgcccatggaagaatgaaagagaaagaggcccgtgcaaaatttaggcagattgtatctgctgtacagtattgtcatcaaaagtacattgttcaccgtgatcttaaggctgaaaaccttctccttgatggtgatatgaatattaaaattgctgactttggttttagtaatgaatttacagttgggaacaaattggacacattttgtggaagcccaccctatgctgctcccgagcttttccaaggaaagaagtatgatgggcctgaagtggatgtgtggagtctgggcgtcattctctatacattagtcagtggctccttgcctttcgatggccagaatttaaaggaactgcgagagcgagttttacgagggaagtaccgtattcccttctatatgtccacagactgtgaaaatcttctgaagaaattattagtcctgaatccaataaagagaggcagcttggaacaaataatgaaagatcgatggatgaatgttggtcatgaagaggaagaactaaagccatatactgagcctgatccggatttcaatgacacaaaaagaatagacattatggtcaccatgggctttgcacgagatgaaataaatgatgccttaataaatcagaagtatgatgaagttatggctacttatattcttctaggtagaaaaccacctgaatttgaaggtggtgaatcgttatccagtggaaacttgtgtcagaggtcccggcccagtagtgacttaaacaacagcactcttcagtcccctgctcacctgaaggtccagagaagtatctcagcaaatcagaagcagcggcgtttcagtgatcatgctggtccatccattcctcctgctgtatcatataccaaaagacctcaggctaacagtgtggaaagtgaacagaaagaggagtgggacaaagatgtggctcgaaaacttggcagcacaacagttggatcaaaaagcgagatgactgcaagccctcttgtagggccagagaggaaaaaatcttcaactattccaagtaacaatgtgtattctggaggtagcatggcaagaaggaatacatatgtctgtgaaaggaccacagatcgatacgtagcattgcagaatggaaaagacagcagccttacggagatgtctgtgagtagcatatcttctgcaggctcttctgtggcctctgctgtcccctcagcacgaccccgccaccagaagtccatgtccacttctggtcatcctattaaagtcacactgccaaccattaaagacggctctgaagcttaccggcctggtacaacccagagagtgcctgctgcttccccatctgctcacagtattagtactgcgactccagaccggacccgttttccccgagggagctcaagccgaagcactttccatggtgaacagctccgggagcgacgcagcgttgcttataatgggccacctgcttcaccatcccatgaaacgggtgcatttgcacatgccagaaggggaacgtcaactggtataataagcaaaatcacatccaaatttgttcgcagaagtacatcaggggaaccaaaagaaagagacaaggaagagggtaaagattctaagccgcgttctttgcggttcacatggagtatgaagaccactagttcaatggaccctaatgacatgatgagagaaatccgaaaagtgttagatgcaaataactgtgattatgagcaaaaagagagatttttgcttttctgtgtccatggagacgctagacaggatagcctcgtgcagtgggagatggaagtctgcaagttgccacgactgtcacttaatggggttcgcttcaagcgaatatctgggacatctattgcctttaagaacattgcatcaaaaatagcaaatgagcttaagctgtaaagaagtccaaatttacaggttcagggaagatacatacatatatgaggtacagtttttgaatgtactggtaatgcctaatgtggtctgcctgtgaatctccccatgtagaatttgcccttaatgcaataaggttatacatagttatgaactgtaaaattaaagtcagtatgaactataataaatatctgtagcttaaaaagtaggttcacatgtacaggtaagtatattgtgtatttctgttcattttctgttcatagagttgtataataaaacatgattgcttaaaaacttgtatagttgtctagatttctgcacctgaatgtatgtttgatgctttgatttgaaaatgttcttccctgttatttacattctggtgggtttttaaaattcttacctccatcatgcaattttgaaaattgtgtccagaattaaaagtgcatagaaatagcctttacaattgtagcatggacctttaaaaattgttttaaaatcttatttaaatttaaaccagaagctgaaaaatagatcagctttattatacacaaaattattactgcttatctttgctcttttccttgttatcccgcaaggtttagttgagaagatacaaaatgtttacagtgttggcacttagagtttttaaattcaagtacatgaaattcagtaatagcattgccttgagctaactaggaagtaccgggaaaaaagttaaatctacatcaagtttcttttgaactttgaagtgttttctgacccactgctaactgtagcaacaaaatttaaaagaaaaaaaacatactttatctggctattataacataaactgtcacgtaggtttgctgccttcagaataccgcaatttaattgcgggaatataataatattgggactgtttcacagcacaaactcatctttacagtgttgatcaatgcatcagttaagaaataatgccacctcaggaattaactggcattgggaacatttgcctcattctcctgctatcctcttcattcacccctgccactgtaatatctataagtacttaagagacttgtgagcaaaacatactatttataacagtatatgattgatttatgcttatgtggttgttcagtttgttcccatgtaactcgtttgttttaaatattttgccagatttcttgtatttattccacatcattatgcctataatgtgccgctttgtgattgggcatttgcctacttttctttcataattagtgatatatgcgatgtaaaaccactagtaaaggtacattttaatacttgttattttatactgaattagccttggaggttgactgtgcaatgttatttactgttgtaattactgtaataccaacatatgggccccatctgcacactcctgaaaaacagaaagtgtattcaaattttatcagtttaaagaaaataaagctgtgataaatactgtaattccaacctacattagaaggtctaagtgtaggtgatgtgccattccataatggcttccagactagggtgaattttatgttctgtactgtactgtgatgtagctttcttctgtaacagttatgttttaaaattaagtgagttttttttttgccttagcaaagggtggtgtttgaaaaaaaaaatgtgtagcccctttttaacctagtgttcattcaaaaaaaaattgatgcaaatctttattcactttcactggtgcacactgaaattttacttgaacagttctcataataaagcacttgtcttttgctcttta

SEQ ID NO: 323020 - DNA, 4699 bp, Homo sapiens
  misc_feature (517)..(517): n is a, c, g, or t
  misc_feature (562)..(562): n is a, c, g, or t
  misc_feature (636)..(636): n is a, c, g, or t
cgcccgctgctccgcgcgcagccggctcgggccgctcctcctgactgaggcgcggcggcggcggtggctgtgaccgcgcggaccgagccgagacattcgcgccgggggatcgggcgccgccgccgctgggccccgggcgcgtggatgcggctgggtcgggcggcgccgtacacctgaggcggagaacggggcgcggcgcgggtgacgctgtcagggccgcggttcctgacgcccaggcgctcgccaggacgagccaggcagtgatttgaggcaccggcttcaccttcacccatggtccggagagcctagcggggctcgccaccgcctcccggctccccttccacgcctcatcctgccagcctcgccgccccgccagcgccgggcaaccgcctcgcccgaagccctccctcgttactgtccgcataccccggcggcgccgccgcgggaagcggctccccctcctcttcctccgcgtcctcttccctctttcccccgccggggccgcttgttgcaccgncccgcggcctgcgggagccgctcgccccggccttgtgctcgcgtncgcacccctttcctgtcgccccccggggcccgcaccacagcccggccggcgagaccccggccagaccccgctgnccgcacaaaatgtcggcccggacgccattgccgacggtgaacgagcgggacacggaaaatcatacatctgtggatggatatactgaaccacacatccagcctaccaagtcgagtagcagacagaacatcccccggtgtagaaactccattacgtcagcaacagatgaacagcctcacattggaaattaccgtttacaaaaaacaatagggaagggaaattttgccaaagtcaaattggcaagacacgttctaactggtagagaggttgctgtgaaaataatagacaaaactcagctaaatcctaccagtctacaaaagttatttcgagaagtacgaataatgaagatactgaatcatcctaatatagtaaaattgtttgaagttattgaaacagagaagactctctatttagtcatggaatacgcgagtgggggtgaagtatttgattacttagttgcccatggaagaatgaaagagaaagaggcccgtgcaaaatttaggcagattgtatctgctgtacagtattgtcatcaaaagtacattgttcaccgtgatcttaaggctgaaaaccttctccttgatggtgatatgaatattaaaattgctgactttggttttagtaatgaatttacagttgggaacaaattggacacattttgtggaagcccaccctatgctgctcccgagcttttccaaggaaagaagtatgatgggcctgaagtggatgtgtggagtctgggcgtcattctctatacattagtcagtggctccttgcctttcgatggccagaatttaaaggaactgcgagagcgagttttacgagggaagtaccgtattcccttctatatgtccacagactgtgaaaatcttctgaagaaattattagtcctgaatccaataaagagaggcagcttggaacaaataatgaaagatcgatggatgaatgttggtcatgaagaggaagaactaaagccatatactgagcctgatccggatttcaatgacacaaaaagaatagacattatggtcaccatgggctttgcacgagatgaaataaatgatgccttaataaatcagaagtatgatgaagttatggctacttatattcttctaggtagaaaaccacctgaatttgaaggtggtgaatcgttatccagtggaaacttgtgtcagaggtcccggcccagtagtgacttaaacaacagcactcttcagtcccctgctcacctgaaggtccagagaagtatctcagcaaatcagaagcagcggcgtttcagtgatcatgctggtccatccattcctcctgctgtatcatataccaaaagacctcaggctaacagtgtggaaagtgaacagaaagaggagtgggacaaagatgtggctcgaaaacttggcagcacaacagttggatcaaaaagcgagatgactgcaagccctcttgtagggccagagaggaaaaaatcttcaactattccaagtaacaatgtgtattctggaggtagcatggcaagaaggaatacatatgtctgtgaaaggaccacagatcgatacgtagcattgcagaatggaaaagacagcagccttacggagatgtctgtgagtagcatatcttctgcaggctcttctgtggcctctgctgtcccctcagcacgaccccgccaccagaagtccatgtccacttctggtcatcctattaaagtcacactgccaaccattaaagacggctctgaagcttaccggcctggtacaacccagagagtgcctgctgcttccccatctgctcacagtattagtactgcgactccagaccggacccgttttccccgagggagctcaagccgaagcactttccatggtgaacagctccgggagcgacgcagcgttgcttataatgggccacctgcttcaccatcccatgaaacgggtgcatttgcacatgccagaaggggaacgtcaactggtataataagcaaaatcacatccaaatttgttcgcagaagtacatcaggggaaccaaaagaaagagacaaggaagagggtaaagattctaagccgcgttctttgcggttcacatggagtatgaagaccactagttcaatggaccctaatgacatgatgagagaaatccgaaaagtgttagatgcaaataactgtgattatgagcaaaaagagagatttttgcttttctgtgtccatggagacgctagacaggatagcctcgtgcagtgggagatggaagtctgcaagttgccacgactgtcacttaatggggttcgcttcaagcgaatatctgggacatctattgcctttaagaacattgcatcaaaaatagcaaatgagcttaagctgtaaagaagtccaaatttacaggttcagggaagatacatacatatatgaggtacagtttttgaatgtactggtaatgcctaatgtggtctgcctgtgaatctccccatgtagaatttgcccttaatgcaataaggttatacatagttatgaactgtaaaattaaagtcagtatgaactataataaatatctgtagcttaaaaagtaggttcacatgtacaggtaagtatattgtgtatttctgttcattttctgttcatagagttgtataataaaacatgattgcttaaaaacttgtatagttgtctagatttctgcacctgaatgtatgtttgatgctttgatttgaaaatgttcttccctgttatttacattctggtgggtttttaaaattcttacctccatcatgcaattttgaaaattgtgtccagaattaaaagtgcatagaaatagcctttacaattgtagcatggacctttaaaaattgttttaaaatcttatttaaatttaaaccagaagctgaaaaatagatcagctttattatacacaaaattattactgcttatctttgctcttttccttgttatcccgcaaggtttagttgagaagatacaaaatgtttacagtgttggcacttagagtttttaaattcaagtacatgaaattcagtaatagcattgccttgagctaactaggaagtaccgggaaaaaagttaaatctacatcaagtttcttttgaactttgaagtgttttctgacccactgctaactgtagcaacaaaatttaaaagaaaattcagaataccgcaatttaattgcgggaatataataatattgggactgtttcacagcacaaactcatctttacagtgttgatcaatgcatcagttaagaaataatgccacctcaggaattaactggcattgggaacatttgcctcattctcctgctatcctcttcattcacccctgccactgtaatatctataagtacttaagagacttgtgagcaaaacatactatttataacagtatatgattgatttatgcttatgtggttgttcagtttgttcccatgtaactcgtttgttttaaatattttgccagatttcttgtatttattccacatcattatgcctataatgtgccgctttgtgattgggcatttgcctacttttctttcataattagtgatatatgcgatgtaaaaccactagtaaaggtacattttaatacttgttattttatactgaattagccttggaggttgactgtgcaatgttatttactgttgtaattactgtaataccaacatatgggccccatctgcacactcctgaaaaacagaaagtgtattcaaattttatcagtttaaagaaaataaagctgtgataaatactgtaattccaacctacattagaaggtctaagtgtaggtgatgtgccattccataatggcttccagactagggtgaattttatgttctgtactgtactgtgatgtagctttcttctgtaacagttatgttttaaaattaagtgagttttttttttgccttagcaaagggtggtgtttgaaaaaaaaaatgtgtagcccctttttaacctagtgttcattcaaaaaaaaattgatgcaaatctttattcactttcactggtgcacactgaaattttacttgaacagttctcataataaagcacttgtcttttgctcttta

SEQ ID NO: 323021 - DNA, 291 bp, Homo sapiens
atttgcacatgccagaaggggaacgtcaactggtataataagcaaaatcacatccaaatttgttcgcaggtcagtaccaatgtactgtcgtgttttgattcctctagaaattataaaggaaactagactttttaaaaaaatctttataataattttctaaaatggtttcataacatttcattagagctgctcttttacagagttggaagaaaaaaatctaggaagacataaagtatttttccttaagagagagaaaggaaaaaatggacaaaatgagattttaaaaatctg

SEQ ID NO: 323022 - DNA, 4753 bp, Homo sapiens
  misc_feature (517)..(517): n is a, c, g, or t
  misc_feature (562)..(562): n is a, c, g, or t
  misc_feature (636)..(636): n is a, c, g, or t
cgcccgctgctccgcgcgcagccggctcgggccgctcctcctgactgaggcgcggcggcggcggtggctgtgaccgcgcggaccgagccgagacattcgcgccgggggatcgggcgccgccgccgctgggccccgggcgcgtggatgcggctgggtcgggcggcgccgtacacctgaggcggagaacggggcgcggcgcgggtgacgctgtcagggccgcggttcctgacgcccaggcgctcgccaggacgagccaggcagtgatttgaggcaccggcttcaccttcacccatggtccggagagcctagcggggctcgccaccgcctcccggctccccttccacgcctcatcctgccagcctcgccgccccgccagcgccgggcaaccgcctcgcccgaagccctccctcgttactgtccgcataccccggcggcgccgccgcgggaagcggctccccctcctcttcctccgcgtcctcttccctctttcccccgccggggccgcttgttgcaccgncccgcggcctgcgggagccgctcgccccggccttgtgctcgcgtncgcacccctttcctgtcgccccccggggcccgcaccacagcccggccggcgagaccccggccagaccccgctgnccgcacaaaatgtcggcccggacgccattgccgacggtgaacgagcgggacacggaaaatcatacatctgtggatggatatactgaaccacacatccagcctaccaagtcgagtagcagacagaacatcccccggtgtagaaactccattacgtcagcaacagatgaacagcctcacattggaaattaccgtttacaaaaaacaatagggaagggaaattttgccaaagtcaaattggcaagacacgttctaactggtagagaggttgctgtgaaaataatagacaaaactcagctaaatcctaccagtctacaaaagttatttcgagaagtacgaataatgaagatactgaatcatcctaatatagtaaaattgtttgaagttattgaaacagagaagactctctatttagtcatggaatacgcgagtgggggtgaagtatttgattacttagttgcccatggaagaatgaaagagaaagaggcccgtgcaaaatttaggcagattgtatctgctgtacagtattgtcatcaaaagtacattgttcaccgtgatcttaaggctgaaaaccttctccttgatggtgatatgaatattaaaattgctgactttggttttagtaatgaatttacagttgggaacaaattggacacattttgtggaagcccaccctatgctgctcccgagcttttccaaggaaagaagtatgatgggcctgaagtggatgtgtggagtctgggcgtcattctctatacattagtcagtggctccttgcctttcgatggccagaatttaaaggaactgcgagagcgagttttacgagggaagtaccgtattcccttctatatgtccacagactgtgaaaatcttctgaagaaattattagtcctgaatccaataaagagaggcagcttggaacaaataatgaaagatcgatggatgaatgttggtcatgaagaggaagaactaaagccatatactgagcctgatccggatttcaatgacacaaaaagaatagacattatggtcaccatgggctttgcacgagatgaaataaatgatgccttaataaatcagaagtatgatgaagttatggctacttatattcttctaggtagaaaaccacctgaatttgaaggtggtgaatcgttatccagtggaaacttgtgtcagaggtcccggcccagtagtgacttaaacaacagcactcttcagtcccctgctcacctgaaggtccagagaagtatctcagcaaatcagaagcagcggcgtttcagtgatcatgctggtccatccattcctcctgctgtatcatataccaaaagacctcaggctaacagtgtggaaagtgaacagaaagaggagtgggacaaagatgtggctcgaaaacttggcagcacaacagttggatcaaaaagcgagatgactgcaagccctcttgtagggccagagaggaaaaaatcttcaactattccaagtaacaatgtgtattctggaggtagcatggcaagaaggaatacatatgtctgtgaaaggaccacagatcgatacgtagcattgcagaatggaaaagacagcagccttacggagatgtctgtgagtagcatatcttctgcaggctcttctgtggcctctgctgtcccctcagcacgaccccgccaccagaagtccatgtccacttctggtcatcctattaaagtcacactgccaaccattaaagacggctctgaagcttaccggcctggtacaacccagagagtgcctgctgcttccccatctgctcacagtattagtactgcgactccagaccggacccgttttccccgagggagctcaagccgaagcactttccatggtgaacagctccgggagcgacgcagcgttgcttataatgggccacctgcttcaccatcccatgaaacgggtgcatttgcacatgccagaaggggaacgtcaactggtataataagcaaaatcacatccaaatttgttcgcagaagtacatcaggggaaccaaaagaaagagacaaggaagagggtaaagattctaagccgcgttctttgcggttcacatggagtatgaagaccactagttcaatggaccctaatgacatgatgagagaaatccgaaaagtgttagatgcaaataactgtgattatgagcaaaaagagagatttttgcttttctgtgtccatggagacgctagacaggatagcctcgtgcagtgggagatggaagtctgcaagttgccacgactgtcacttaatggggttcgcttcaagcgaatatctgggacatctattgcctttaagaacattgcatcaaaaatagcaaatgagcttaagctgtaaagaagtccaaatttacaggttcagggaagatacatacatatatgaggtacagtttttgaatgtactggtaatgcctaatgtggtctgcctgtgaatctccccatgtagaatttgcccttaatgcaataaggttatacatagttatgaactgtaaaattaaagtcagtatgaactataataaatatctgtagcttaaaaagtaggttcacatgtacaggtaagtatattgtgtatttctgttcattttctgttcatagagttgtataataaaacatgattgcttaaaaacttgtatagttgtctagatttctgcacctgaatgtatgtttgatgctttgatttgaaaatgttcttccctgttatttacattctggtgggtttttaaaattcttacctccatcatgcaattttgaaaattgtgtccagaattaaaagtgcatagaaatagcctttacaattgtagcatggacctttaaaaattgttttaaaatcttatttaaatttaaaccagaagctgaaaaatagatcagctttattatacacaaaattattactgcttatctttgctcttttccttgttatcccgcaaggtttagttgagaagatacaaaatgtttacagtgttggcacttagagtttttaaattcaagtacatgaaattcagtaatagcattgccttgagctaactaggaagtaccgggaaaaaagttaaatctacatcaagtttcttttgaactttgaagtgttttctgacccactgctaactgtagcaacaaaatttaaaagaaaaaaaacatactttatctggctattataacataaactgtcacgtaggtttgctgccttcagaataccgcaatttaattgcgggaatataataatattgggactgtttcacagcacaaactcatctttacagtgttgatcaatgcatcagttaagaaataatgccacctcaggaattaactggcattgggaacatttgcctcattctcctgctatcctcttcattcacccctgccactgtaatatctataagtacttaagagacttgtgagcaaaacatactatttataacagtatatgattgatttatgcttatgtggttgttcagtttgttcccatgtaactcgtttgttttaaatattttgccagatttcttgtatttattccacatcattatgcctataatgtgccgctttgtgattgggcatttgcctacttttctttcataattagtgatatatgcgatgtaaaaccactagtaaaggtacattttaatacttgttattttatactgaattagccttggaggttgactgtgcaatgttatttactgttgtaattactgtaataccaacatatgggccccatctgcacactcctgaaaaacagaaagtgtattcaaattttatcagtttaaagaaaataaagctgtgataaatactgtaattccaacctacattagaaggtctaagtgtaggtgatgtgccattccataatggcttccagactagggtgaattttatgttctgtactgtactgtgatgtagctttcttctgtaacagttatgttttaaaattaagtgagttttttttttgccttagcaaagggtggtgtttgaaaaaaaaaatgtgtagcccctttttaacctagtgttcattcaaaaaaaaattgatgcaaatctttattcactttcactggtgcacactgaaattttacttgaacagttctcataataaagcacttgtcttttgctcttta

SEQ ID NO: 323023 - DNA, 5215 bp, Homo sapiens
  misc_feature (517)..(517): n is a, c, g, or t
  misc_feature (562)..(562): n is a, c, g, or t
  misc_feature (636)..(636): n is a, c, g, or t
cgcccgctgctccgcgcgcagccggctcgggccgctcctcctgactgaggcgcggcggcggcggtggctgtgaccgcgcggaccgagccgagacattcgcgccgggggatcgggcgccgccgccgctgggccccgggcgcgtggatgcggctgggtcgggcggcgccgtacacctgaggcggagaacggggcgcggcgcgggtgacgctgtcagggccgcggttcctgacgcccaggcgctcgccaggacgagccaggcagtgatttgaggcaccggcttcaccttcacccatggtccggagagcctagcggggctcgccaccgcctcccggctccccttccacgcctcatcctgccagcctcgccgccccgccagcgccgggcaaccgcctcgcccgaagccctccctcgttactgtccgcataccccggcggcgccgccgcgggaagcggctccccctcctcttcctccgcgtcctcttccctctttcccccgccggggccgcttgttgcaccgncccgcggcctgcgggagccgctcgccccggccttgtgctcgcgtncgcacccctttcctgtcgccccccggggcccgcaccacagcccggccggcgagaccccggccagaccccgctgnccgcacaaaatgtcggcccggacgccattgccgacggtgaacgagcgggacacggaaaatcatacatctgtggatggatatactgaaccacacatccagcctaccaagtcgagtagcagacagaacatcccccggtgtagaaactccattacgtcagcaacagatgaacagcctcacattggaaattaccgtttacaaaaaacaatagggaagggaaattttgccaaagtcaaattggcaagacacgttctaactggtagagaggttgctgtgaaaataatagacaaaactcagctaaatcctaccagtctacaaaagttatttcgagaagtacgaataatgaagatactgaatcatcctaatatagtaaaattgtttgaagttattgaaacagagaagactctctatttagtcatggaatacgcgagtgggggtgaagtatttgattacttagttgcccatggaagaatgaaagagaaagaggcccgtgcaaaatttaggcagattgtatctgctgtacagtattgtcatcaaaagtacattgttcaccgtgatcttaaggctgaaaaccttctccttgatggtgatatgaatattaaaattgctgactttggttttagtaatgaatttacagttgggaacaaattggacacattttgtggaagcccaccctatgctgctcccgagcttttccaaggaaagaagtatgatgggcctgaagtggatgtgtggagtctgggcgtcattctctatacattagtcagtggctccttgcctttcgatggccagaatttaaaggaactgcgagagcgagttttacgagggaagtaccgtattcccttctatatgtccacagactgtgaaaatcttctgaagaaattattagtcctgaatccaataaagagaggcagcttggaacaaataatgaaagatcgatggatgaatgttggtcatgaagaggaagaactaaagccatatactgagcctgatccggatttcaatgacacaaaaagaatagacattatggtcaccatgggctttgcacgagatgaaataaatgatgccttaataaatcagaagtatgatgaagttatggctacttatattcttctaggtagaaaaccacctgaatttgaaggtggtgaatcgttatccagtggaaacttgtgtcagaggtcccggcccagtagtgacttaaacaacagcactcttcagtcccctgctcacctgaaggtccagagaagtatctcagcaaatcagaagcagcggcgtttcagtgatcatgctggtccatccattcctcctgctgtatcatataccaaaagacctcaggctaacagtgtggaaagtgaacagaaagaggagtgggacaaagatgtggctcgaaaacttggcagcacaacagttggatcaaaaagcgagatgactgcaagccctcttgtagggccagagaggaaaaaatcttcaactattccaagtaacaatgtgtattctggaggtagcatggcaagaaggaatacatatgtctgtgaaaggaccacagatcgatacgtagcattgcagaatggaaaagacagcagccttacggagatgtctgtgagtagcatatcttctgcaggctcttctgtggcctctgctgtcccctcagcacgaccccgccaccagaagtccatgtccacttctggtcatcctattaaagtcacactgccaaccattaaagacggctctgaagcttaccggcctggtacaacccagagagtgcctgctgcttccccatctgctcacagtattagtactgcgactccagaccggacccgttttccccgagggagctcaagccgaagcactttccatggtgaacagctccgggagcgacgcagcgttgcttataatgggccacctgcttcaccatcccatgaaacgggtgcatttgcacatgccagaaggggaacgtcaactggtataataagcaaaatcacatccaaatttgttcgcagaagtacatcaggggaaccaaaagaaagagacaaggaagagggtaaagattctaagccgcgttctttgcggttcacatggagtatgaagaccactagttcaatggaccctaatgacatgatgagagaaatccgaaaagtgttagatgcaaataactgtgattatgagcaaaaagagagatttttgcttttctgtgtccatggagacgctagacaggatagcctcgtgcagtgggagatggaagtctgcaagttgccacgactgtcacttaatggggttcgcttcaagcgaatatctgggacatctattgcctttaagaacattgcatcaaaaatagcaaatgagcttaagctgtaaagaagtccaaatttacaggttcagggaagatacatacatatatgaggtacagtttttgaatgtactggtaatgcctaatgtggtctgcctgtgaatctccccatgtagaatttgcccttaatgcaataaggttatacatagttatgaactgtaaaattaaagtcagtatgaactataataaatatctgtagcttaaaaagtaggttcacatgtacaggtaagtatattgtgtatttctgttcattttctgttcatagagttgtataataaaacatgattgcttaaaaacttgtatagttgtctagatttctgcacctgaatgtatgtttgatgctttgatttgaaaatgttcttccctgttatttacattctggtgggtttttaaaattcttacctccatcatgcaattttgaaaattgtgtccagaattaaaagtgcatagaaatagcctttacaattgtagcatggacctttaaaaattgttttaaaatcttatttaaatttaaaccagaagctgaaaaatagatcagctttattatacacaaaattattactgcttatctttgctcttttccttgttatcccgcaaggtttagttgagaagatacaaaatgtttacagtgttggcacttagagtttttaaattcaagtacatgaaattcagtaatagcattgccttgagctaactaggaagtaccgggaaaaaagttaaatctacatcaagtttcttttgaactttgaagtgttttctgacccactgctaactgtagcaacaaaatttaaaagaaaaaaaacatactttatctggctattataacataaactgtcacgtaggtttgctgccttcagaataccgcaatttaattgcgggaatataataatattgggactgtttcacagcacaaactcatctttacagtgttgatcaatgcatcagttaagaaataatgccacctcaggaattaactggcattgggaacatttgcctcattctcctgctatcctcttcattcacccctgccactgtaatatctataagtacttaagagacttgtgagcaaaacatactatttataacagtatatgattgatttatgcttatgtggttgttcagtttgttcccatgtaactcgtttgttttaaatattttgccagatttcttgtatttattccacatcattatgcctataatgtgccgctttgtgattgggcatttgcctacttttctttcataattagtgatatatgcgatgtaaaaccactagtaaaggtacattttaatacttgttattttatactgaattagccttggaggttgactgtgcaatgttatttactgttgtaattactgtaataccaacatatgggccccatctgcacactcctgaaaaacagaaagtgtattcaaattttatcagtttaaagaaaataaagctgtgataaatactgtaattccaacctacattagaaggtctaagtgtaggtgatgtgccattccataatggcttccagactagggtgaattttatgttctgtactgtactgtgatgtagctttcttctgtaacagttatgttttaaaattaagtgagttttttttttgccttagcaaagggtggtgtttgaaaaaaaaaatgtgtagcccctttttaacctagtgttcattcaaaaaaaaattgatgcaaatctttattcactttcactggtgcacactgaaattttacttgaacagttctcataataaagcacttgtcttttgctctttatcagaatgtgaattacctgttttctggtacaaaagtattctgtatgaggagtttattgtatgtgttctaaatttagttggcaaagggtgaagctgtgaaggttttcaagattattgaaactatgaaggtttcttgtcattatgacaagaaagtttaatctttttataggaattcctgtcactgaaatacgtttttaaaaaaatagactcatgtgttttccacggtagaaactgatatttttttacattttctcactgtggccaactcttctgtgtttgtagaaaggaatttgacttcaatatcttttatgaactaaaaatgaaatcttgatactcactttagatttttcattttatgtgttcatgacaacataaatatttttcaaagatttagaggaattttgcaatgtgtttgcataaataaataccagtttatgttcaccggctatgtgataccaggatt

SEQ ID NO: 323024 - DNA, 501 bp, Homo sapiens
gaagttttttgggctccctcatagtagattctaaccagaaatttaacctaagacactcaagccatttacaaaacaaagtataaatcacgttctgtcacttacaatcacataaaatgtctgatatatagaaatattttaacaccagtagtaaatatagctatcacatttgtagatgtaaattgatcacaaaaaaaatttttgcacagtactattagtttttgttccctgtgaaaaataaaccacagaaacaaacatatgggttaaatactttactgtcatttaatggaaagaaaaagttatttctgatgtctgagacaaggaaaaaaattcctatagtgctcccaattttaaaagaaatcattctagtcttttgaatttaataattaaatagcagaactgaattttcagagtttatgtaagaaacaagggacactagactctttttgttcactatttttattggctatgaagcaataaactgcaccagtattttttaaagtt

SEQ ID NO: 323025 - DNA, 255 bp, Homo sapiens
ctttattggggtataactgataaataaaaatcctataatttcaaggtatatgttttgatatacattgtgaaataccttccacaatcgaatgaattaacatgtcagtcacctcacagttacctttttttgtaggtatagtaagaacaaatttcaagtatgcaatacattattaatatggttaggctttgtgtctccacccaaatcttatcttgaattataatccccataatccacacgtgtcgagagagagagacc

SEQ ID NO: 323026 - DNA, 473 bp, Homo sapiens
ttcaagctattctcctgccacagcctcctgagtagccgggactacaggtgtgcaccaccacacctggctaacttttttgtatttttagtagagatagggtttcaccatgttggtcaggctggtctcaacacctaacctcaaatgatccacccagctcggcatcccaaagtactgggattacaggcgtgagccatcgcatgcagccgctttagccctttttatagatgagcaaacagacccagaaaagtaagtcatcgctcaagggacacagccggtaaataggactggaactgttcagctctttggctctgatcaggattacaactttgcagaccctttgtctagattctaaatgcccaagtgcattttccagaaaaacatccattaatggtagatagggttatcaccatcacctactgttttactttgctaggggcgtcatgacaatgtacgacagactgagtggcttaaac

SEQ ID NO: 323027 - DNA, 192 bp, Homo sapiens
caaatgaggtgaattctttcttccagtttgttgattctatcttctgttatctcattctactactcaacccatccgtgatatttttctttctgttgttgtatttctcatttccataacatccatttggtacttttgcataacttttatttctttgttgagattatccatttgtgacagagattgttcaggaat

SEQ ID NO: 323028 - DNA, 2320 bp, Homo sapiens
tgagacagagtttcactttgttgcccaggctggagtgtagtggcatgatctcagctcactgcaacctccacctccctggttcaagtgatatttgtgcctcagccccctgaatagctaggattacaggcgtgggccaccacgcctggttaatctctgtatttttagtagaggtagagtttcaccattttggccaggctggtttcgaactcctggcctcaagtgatctgccaccttggcctcccaaagtgctgggaatacaggcgtgagccactgtgcccgccctgatgagatattttattaccaatgttagtattgagaaactgaaatgtttgaagaagcacaacccaggatcgtgctggtagcaccacagtacttaaactgttggtcaattaaggccagaaagggaaattgttaatttagctctggtgctttggtttacaggaacataactcttaactgacatctgacatcatgatagccatatgtgctcagctctgggtagagtttctgcagttactcatctgaactaatgaacaataactgaccactagtcactttatgccgtgtaactagctctaggccatactttcactggttactggtgtgaaagctgaaattcattttgttacattctggtgaagacccctcttgataatgggaatgttttaactctcttgatgaaaaaataatctgtatttgtgttgatgttcacatttctgtagcacatttcttatccttttggttgaatgaaaagatcttgtataggggtgtggagatggggagtgggtagaagtgtgtgaaggacgctttgcatttgggatctgttcacaaacagccatatgagtgtgttaatgaatgtcagccagttaccaaccctgctggttgttatgggttgttttgagaagttggcaaccaggcatctaagatgttgcctggtacaggcctcttttcttccctgaggcccatgacatttctctgttactctagagggtttctcagatggccagtaggctcctccctgcttagggtctcatttctctgaaaagaggatgaactgaaaagcaggtagttccagaagctaattgctgctttccatcataattatttttcttgtgagaacatttctcttttaattagctagtgattttgattaagactaattcactaaacatacccttccctcaaatcacctcaggtagcaatctgtaagtaactaaaagcattgaaaaacacacaagaaacatttttaaaaactatttttaaaggcctggccgggtgcagtggctcactcctgtaatcccagcactttgggaggccgagacgggtggatcacctgaggtcaggaatttgagactagcatggccaacatggtgaaaccccgtgtctactaaaaatacaaaaattagctgggcgtggtggcagacgcctgtaatcccagctactcagggaggctgaggcacgagaatcgcttgaacctgggaggcggaggttgcagtgagccaagattgcgccactgcactccaacctgggtgacaagagcaagactccgtctcacaaaaaacaaacaaaactgactgattgaatatactaaaccaaactaaaatcatattcttttgattaagtttatccatggctgtattcttctatgaattcttccatttaattcttccacgattatcttctcctgtaaatacatcacaggagttagaattctctacccatcagctgtaccatgtcgcagaattcatgcaggcacaaagttggagttacagagatgggttgacagcaggcaaacttggcctatgtattataaccacaacttcaagttcttacctcatgtgaatattcaccctttctttagtcttccaaggcaaacagccccgtctcatcaccagatgagcaaggtcttgatatggcatagcagatctccctagacacagatcatgagaaaagatggaagagacttagggattcaggcatcagatgaagttggcttttcccttttatgccttgtttgtatttaccctgtctaatacactaaggatacttactcattgtacttgcagctcaatatgtctttgctgttcagatactaaaatgtacctctgagtcattgtgagctgtgtggtaggttggacattggcatagttggtgatgggactcaaaatgaaaaggtggtctctttaccaggtcacagactgtagcagattgtgcttgttatctgacaatgactgtcactttgagggtcgttgatttgcatgcactactctggggccttgtattggagccttttttaaaaaaaataaaatctgagatagag

SEQ ID NO: 323029 - DNA, 430 bp, Homo sapiens
agaagaaaaagggaggaaggaatgagtgcatggtccagggtagagagatggggctagacccaaaatcaagtggagggcagtgggttagcctcgaaatccataagaacccttcttctgatgcgatggaagagaggataggggaaatggaaaaaaaaaagatgtgatcagaagggatacgaattgagtaagttcactgcaggcggtctgcattgatttatcagtagagtaagaagcagtgaaaggaaattcacagacaagtaactcaggctcctgagaggatggctctggggattattgtcatggaggaaaaatttgaaagaatgacagaagtctctcatctgaacaatacaaactgacacatttgccagaatgtgtctcgaggcaggaagttggtttattgaagtggaaagtagtggttataaaaaaaaaa

SEQ ID NO: 323030 - DNA, 3312 bp, Homo sapiens
agtatgttttgcagacaagacccagagaagtccagactggacttgttgcagactgcaaaactgccattggaaggcctccgtcccagtccttctacagagtagccagtgggactcccagccatgggcgaggtgacagcagaggaggtggagaagttcctggactcgaatattggctttgccaaacagtactacaacctccactaccgggccaagctcatctccgacctccttggggccaaggaggctgccgtggacttcagcaactaccactccccgagcagcatggaggagagcgaaatcatctttgatctcctgcgggactttcaggagaatttacagacagagaaatgcatcttcaatgtcatgaagaagctgtgcttcctcctgcaggcagaccgcatgagcctgttcatgtaccggacccgcaatggcatcgcagagctggccaccaggcttttcaatgtccacaaggatgctgtcctcgaggactgcctggtgatgcccgaccaagagatcgtcttccctttggacatgggcatcgtgggccatgtcgcacactctaagaagattgctaacgtccccaacacagaggaggatgagcatttctgtgactttgtggacatcctcacagagtacaagaccaagaacatcttggcttcccccataatgaatgggaaggatgtggtggccataatcatggctgtgaataaagtggatggatcccacttcaccaagagagatgaagagattcttctcaagtacctcaattttgcaaatctaatcatgaaggtgtaccacctgagttacctgcacaactgtgaaactcgacgtggccagatactgctgtggtctgggagcaaagtctttgaagaacttacggacatcgaacgacagttccacaaagccctgtacacagtccgtgctttcctcaactgtgacagatactctgtgggtctcttagacatgaccaagcagaaggaattttttgatgtgtggccggttctgatgggtgaagttccaccttactctggtcccaggactccggatggaagagaaattaacttttacaaggtcattgactacatcctgcatggcaaagaggacatcaaagtcatcccgaatccacctcctgaccattgggctttagtaagcggtctcccagcttatgttgcccagaatggcctgatttgcaacatcatgaatgcgcctgcggaggacttttttgcatttcagaaagaacctctggatgagtctggatggatgattaaaaatgtgctttcaatgccgattgtgaacaagaaggaagaaattgttggagtggccacattttacaatcgtaaagatgggaagccctttgatgaaatggatgagacgctcatggagtctttgactcaatttctgggctggtctgtcttaaatcctgacacctatgagtcaatgaataaacttgaaaataggaaggatattttccaggacatagtaaaatatcatgtgaagtgtgacaatgaagaaattcagaaaatcttgaaaaccagagaggtgtatgggaaggagccatgggagtgtgaggaagaggagctggctgagatcctgcaagcggagctgccagatgcagataaatacgaaattaataaatttcacttcagtgacttacccctaacagaactggagctggtaaaatgtggaatacagatgtattatgagctcaaagtggtggataaatttcacattccacaagaggccctggtgcggttcatgtactccctgagtaagggctaccgcaagatcacctaccacaactggcggcacggcttcaacgtggggcagaccatgttctccctgctggtgacgggaaagctgaagcgctacttcacggacctagaggccttggccatggtcactgctgctttctgccatgacattgaccacagaggcaccaataacctctaccagatgaaatcccagaacccactggccaagctccatgggtcctctatcttggaaagacaccacttggagtttggcaaaacactgctcagagacgagagcctgaatatctttcaaaacctcaatcgtcgacagcatgagcatgccatccacatgatggacattgcaatcattgccacagacctcgccctgtatttcaagaagaggacgatgttccaaaagatcgtggatcagtctaagacatatgagagtgaacaggagtggacacagtacatgatgctggagcagacacggaaggaaatcgttatggccatgatgatgaccgcctgtgatctctcagccatcaccaaaccctgggaggtgcagagccaggtagctctgctggtggctgctgaattctgggaacaaggtgacctggagcgcacggtgctgcaacagaatcccattcccatgatggacagaaacaaagcagatgaactccctaagcttcaagtcggcttcattgactttgtttgcaccttcgtctacaaggaattctcccgtttccacgaggagatcaccccaatgttggacgggatcaccaacaatcgcaaggagtggaaggcgcttgctgatgagtacgatgccaagatgaaggtgcaggaggagaagaagcagaaacagcagtcggccaagtcagcagccgcaggaaatcagccggggggaaaccccagcccagggggtgcaactacatccaagtcctgctgcatccagtaacaccactggggatgtgctggctggacggcaccaccctttcctgggaagagatgactcaagccagtggaagaccacacaccttgagaagtagaagagtcataggatttgaaagctgttagagaatttagcttccaggactgttcaatcttttggcttccctgggccacattggaagaattgtcttgggtcacacataaaatacagtaacactaatgatagctgttgaacttaaaaaaaaaaatcgccaaaaaaaaaaatttcataatgttttaagaaagtttatgaatttgtgttgggccgcattcaaagccgtcctgggctgcatgtggcccacgggccgtgggttgaacaagcttggcttataccttatccagtggcttttaaacattcttttagtcttgagaactgcctattgagctaaaaccaatattctagctttcatagacatcagttaaacatttaattacatttaattaatgccagattcactggcttgcttagaatcatttttgttcttatactttcagttaatgtattgtaaaaattttcaatcattttcaaaagtagagaattgtacgttgaatccccacatacccatcacccagattc

SEQ ID NO: 323031 - DNA, 2242 bp, Homo sapiens
agaatgtgaatgccttggacaagaacatggtgtttctgaaaatggtatacagtgcttcactgggcaccctctcaggcctaatcacaccttcattattccccttcactgctctcagatttgcaacatcatgaatgcgcctgcggaggacttttttgcatttcagaaagaacctctggatgagtctggatggatgattaaaaatgtgctttcaatgccgattgtgaacaagaaggaagaaattgttggagtggccacattttacaatcgtaaagatgggaagccctttgatgaaatggatgagacgctcatggagtctttgactcaatttctgggctggtctgtcttaaatcctgacacctatgagtcaatgaataaacttgaaaataggaaggatattttccaggacatagtaaaatatcatgtgaagtgtgacaatgaagaaattcagaaaatcttgaaaaccagagaggtgtatgggaaggagccatgggagtgtgaggaagaggagctggctgagatcctgcaagcggagctgccagatgcagataaatacgaaattaataaatttcacttcagtgacttacccctaacagaactggagctggtaaaatgtggaatacagatgtattatgagctcaaagtggtggataaatttcacattccacaagaggccctggtgcggttcatgtactccctgagtaagggctaccgcaagatcacctaccacaactggcggcacggcttcaacgtggggcagaccatgttctccctgctggtgacgggaaagctgaagcgctacttcacggacctagaggccttggccatggtcactgctgctttctgccatgacattgaccacagaggcaccaataacctctaccagatgaaatcccagaacccactggccaagctccatgggtcctctatcttggaaagacaccacttggagtttggcaaaacactgctcagagacgagagcctgaatatctttcaaaacctcaatcgtcgacagcatgagcatgccatccacatgatggacattgcaatcattgccacagacctcgccctgtatttcaagaagaggacgatgttccaaaagatcgtggatcagtctaagacatatgagagtgaacaggagtggacacagtacatgatgctggagcagacacggaaggaaatcgttatggccatgatgatgaccgcctgtgatctctcagccatcaccaaaccctgggaggtgcagagccaggtagctctgctggtggctgctgaattctgggaacaaggtgacctggagcgcacggtgctgcaacagaatcccattcccatgatggacagaaacaaagcagatgaactccctaagcttcaagtcggcttcattgactttgtttgcaccttcgtctacaaggaattctcccgtttccacgaggagatcaccccaatgttggacgggatcaccaacaatcgcaaggagtggaaggcgcttgctgatgagtacgatgccaagatgaaggtgcaggaggagaagaagcagaaacagcagtcggccaagtcagcagccgcaggaaatcagccggggggaaaccccagcccagggggtgcaactacatccaagtcctgctgcatccagtaacaccactggggatgtgctggctggacggcaccaccctttcctgggaagagatgactcaagccagtggaagaccacacaccttgagaagtagaagagtcataggatttgaaagctgttagagaatttagcttccaggactgttcaatcttttggcttccctgggccacattggaagaattgtcttgggtcacacataaaatacagtaacactaatgatagctgttgaacttaaaaaaaaaaatcgccaaaaaaaaaaatttcataatgttttaagaaagtttatgaatttgtgttgggccgcattcaaagccgtcctgggctgcatgtggcccacgggccgtgggttgaacaagcttggcttataccttatccagtggcttttaaacattcttttagtcttgagaactgcctattgagctaaaaccaatattctagctttcatagacatcagttaaacatttaattacatttaattaatgccagattcactggcttgcttagaatcatttttgttcttatactttcagttaatgtattgtaaaaattttcaatcattttcaaaagtagagaattgtacgttgaatccccacatacccatcacccagattc

SEQ ID NO: 323032 - DNA, 1088 bp, Homo sapiens
agtatgttttgcagacaagacccagagaagtccagactggacttgttgcagactgcaaaactgccattggaaggcctccgtcccagtccttctacagagtagccagtgggactcccagccatgggcgaggtgacagcagaggaggtggagaagttcctggactcgaatattggctttgccaaacagtactacaacctccactaccgggccaagctcatctccgacctccttggggccaaggaggctgccgtggacttcagcaactaccactccccgagcagcatggaggagagcgaaatcatctttgatctcctgcgggactttcaggagaatttacagacagagaaatgcatcttcaatgtcatgaagaagctgtgcttcctcctgcaggcagaccgcatgagcctgttcatgtaccggacccgcaatggcatcgcagagctggccaccaggcttttcaatgtccacaaggatgctgtcctcgaggactgcctggtgatgcccgaccaagagatcgtcttccctttggacatgggcatcgtgggccatgtcgcacactctaagaagattgctaacgtccccaacacagaggaggatgagcatttctgtgactttgtggacatcctcacagagtacaagaccaagaacatcttggcttcccccataatgaatgggaaggatgtggtggccataatcatggctgtgaataaagtggatggatcccacttcaccaagagagatgaagagattcttctcaagtacctcaattttgcaaatctaatcatgaaggtgtaccacctgagttacctgcacaactgtgaaactcgacgtggccagatactgctgtggtctgggagcaaagtctttgaagaacttacggacatcgaacgacagttccacaaagccctgtacacagtccgtgctttcctcaactgtgacagatactctgtgggtctcttagacatgaccaagcagaaggaattttttgatgtgtggccggttctgatgggtgaagttccaccttactctggtcccaggactccggatggaagagtacgttctctctgaccttttcagtatgatttaat

SEQ ID NO: 323033 - DNA, 489 bp, Homo sapiens
tcacttgtggagaaggctgaagactgagtcaggagacttgatgtttagtcctaattttctattgtccactccatattgattctctctctttctcattcagatcccagaacccactggccaagctccatgggtcctctatcttggaaagacaccacttggagtttggcaaaacactgctcagagacgaggtaggatgagggccaagggtctacaggccgcggggcctggatcagaggctctatttcacaaggagcctgagtgtgcccagggagcattcttcccattggcctgggctgcctctgccatcatctggggtggccattggtaggtgggtgactttactgccagcatcaattctctcccatctcgcttctctttttttctttagagcctgaatatctttcaaaacctcaatcgtcgacagcatgagcatgccatccacatgatggacattgcaatcattgccacagacctcgccctgtatttcaa

SEQ ID NO: 323034 - DNA, 244 bp, Homo sapiens
ggggaagcccactgcagcctcttgtcacctggtgtgttctttttcctgtttcattgcagcagccgcaggaaatcagccggggggaaaccccagcccagggggtgcaactacatccaagtcctgctgcatccagtaacaccactggggatgtgctggctggacggcaccaccctttcctgggaagagatgactcaagccagtggaagaccacacaccttgagaagtagaagagtcataggatttg

SEQ ID NO: 323035 - DNA, 1555 bp, Homo sapiens
gaaatgtttcactttgaccaaggtctgcaaaataatggggagcttacaaaatggtgcagttgggactaacaccaggtagccgagaccacagacgggaaagctgaagcgctacttcacggacctagaggccttggccatggtcactgctgctttctgccatgacattgaccacagaggcaccaataacctctaccagatgaaatcccagaacccactggccaagctccatgggtcctctatcttggaaagacaccacttggagtttggcaaaacactgctcagagacgagagcctgaatatctttcaaaacctcaatcgtcgacagcatgagcatgccatccacatgatggacattgcaatcattgccacagacctcgccctgtatttcaagaagaggacgatgttccaaaagatcgtggatcagtctaagacatatgagagtgaacaggagtggacacagtacatgatgctggagcagacacggaaggaaatcgttatggccatgatgatgaccgcctgtgatctctcagccatcaccaaaccctgggaggtgcagagccaggtagctctgctggtggctgctgaattctgggaacaaggtgacctggagcgcacggtgctgcaacagaatcccattcccatgatggacagaaacaaagcagatgaactccctaagcttcaagtcggcttcattgactttgtttgcaccttcgtctacaaggaattctcccgtttccacgaggagatcaccccaatgttggacgggatcaccaacaatcgcaaggagtggaaggcgcttgctgatgagtacgatgccaagatgaaggtgcaggaggagaagaagcagaaacagcagtcggccaagtcagcagccgcaggaaatcagccggggggaaaccccagcccagggggtgcaactacatccaagtcctgctgcatccagtaacaccactggggatgtgctggctggacggcaccaccctttcctgggaagagatgactcaagccagtggaagaccacacaccttgagaagtagaagagtcataggatttgaaagctgttagagaatttagcttccaggactgttcaatcttttggcttccctgggccacattggaagaattgtcttgggtcacacataaaatacagtaacactaatgatagctgttgaacttaaaaaaaaaaatcgccaaaaaaaaaaatttcataatgttttaagaaagtttatgaatttgtgttgggccgcattcaaagccgtcctgggctgcatgtggcccacgggccgtgggttgaacaagcttggcttataccttatccagtggcttttaaacattcttttagtcttgagaactgcctattgagctaaaaccaatattctagctttcatagacatcagttaaacatttaattacatttaattaatgccagattcactggcttgcttagaatcatttttgttcttatactttcagttaatgtattgtaaaaattttcaatcattttcaaaagtagagaattgtacgttgaatccccacatacccatcacccagattc

SEQ ID NO: 323036 - DNA, 2340 bp, Homo sapiens
agtatgttttgcagacaagacccagagaagtccagactggacttgttgcagactgcaaaactgccattggaaggcctccgtcccagtccttctacagagtagccagtgggactcccagccatgggcgaggtgacagcagaggaggtggagaagttcctggactcgaatattggctttgccaaacagtactacaacctccactaccgggccaagctcatctccgacctccttggggccaaggaggctgccgtggacttcagcaactaccactccccgagcagcatggaggagagcgaaatcatctttgatctcctgcgggactttcaggagaatttacagacagagaaatgcatcttcaatgtcatgaagaagctgtgcttcctcctgcaggcagaccgcatgagcctgttcatgtaccggacccgcaatggcatcgcagagctggccaccaggcttttcaatgtccacaaggatgctgtcctcgaggactgcctggtgatgcccgaccaagagatcgtcttccctttggacatgggcatcgtgggccatgtcgcacactctaagaagattgctaacgtccccaacacagaggaggatgagcatttctgtgactttgtggacatcctcacagagtacaagaccaagaacatcttggcttcccccataatgaatgggaaggatgtggtggccataatcatggctgtgaataaagtggatggatcccacttcaccaagagagatgaagagattcttctcaagtacctcaattttgcaaatctaatcatgaaggtgtaccacctgagttacctgcacaactgtgaaactcgacgtggccagatactgctgtggtctgggagcaaagtctttgaagaacttacggacatcgaacgacagttccacaaagccctgtacacagtccgtgctttcctcaactgtgacagatactctgtgggtctcttagacatgaccaagcagaaggaattttttgatgtgtggccggttctgatgggtgaagttccaccttactctggtcccaggactccggatggaagagaaattaacttttacaaggtcattgactacatcctgcatggcaaagaggacatcaaagtcatcccgaatccacctcctgaccattgggctttagtaagcggtctcccagcttatgttgcccagaatggcctgatttgcaacatcatgaatgcgcctgcggaggacttttttgcatttcagaaagaacctctggatgagtctggatggatgattaaaaatgtgctttcaatgccgattgtgaacaagaaggaagaaattgttggagtggccacattttacaatcgtaaagatgggaagccctttgatgaaatggatgagacgctcatggagtctttgactcaatttctgggctggtctgtcttaaatcctgacacctatgagtcaatgaataaacttgaaaataggaaggatattttccaggacatagtaaaatatcatgtgaagtgtgacaatgaagaaattcagaaaatcttgaaaaccagagaggtgtatgggaaggagccatgggagtgtgaggaagaggagctggctgagatcctgcaagcggagctgccagatgcagataaatacgaaattaataaatttcacttcagtgacttacccctaacagaactggagctggtaaaatgtggaatacagatgtattatgagctcaaagtggtggataaatttcacattccacaagaggccctggtgcggttcatgtactccctgagtaagggctaccgcaagatcacctaccacaactggcggcacggcttcaacgtggggcagaccatgttctccctgctggtgacgggaaagctgaagcgctacttcacggacctagaggccttggccatggtcactgctgctttctgccatgacattgaccacagaggcaccaataacctctaccagatgaaatcccagaacccactggccaagctccatgggtcctctatcttggaaagacaccacttggagtttggcaaaacactgctcagagacgagagcctgaatatctttcaaaacctcaatcgtcgacagcatgagcatgccatccacatgatggacattgcaatcattgccacagacctcgccctgtatttcaagaagaggacgatgttccaaaagatcgtggatcagtctaagacatatgagagtgaacaggagtggacacagtacatgatgctggagcagacacggaaggaaatcgttatggccatgatgatgaccgcctgtgatctctcagccatcaccaaaccctgggaggtgcagagccaggtatgaactcctgctgaccca

SEQ ID NO: 323037 - DNA, 603 bp, Homo sapiens
aggagaatttacagacagagaaatgcatcttcaatgtcatgaagaagctgtgcttcctcctgcaggcagaccgcatgagcctgttcatgtaccggacccgcaatggcatcgcagagctggccaccaggcttttcaatgtccacaaggatgctgtcctcgaggactgcctggtgatgcccgaccaagagatcgtcttccctttggacatgggcatcgtgggccatgtcgcacactctaagaagattgctaacgtccccaacacagaggaggtactctcttccccatgagagagagggcatggggcattattacatggagttctggggtacaggtggggtgaggggcattggccaccaagacaaggctggtgacaacatggtgcttcttctttatttatttacatatttactcataattctttattttgaaaaaaaaattcaaacttaacagaaaagtttgaaataatacagagaactgtatgtctttcatccaaatttatcattcattaacatcttgccacatttgctttctctctccattttctctgacccatttgggagaaagttgcagacatcatgccctttgtctgtaagtactggcgat

SEQ ID NO: 323038 - DNA, 2105 bp, Homo sapiens
ttttggtgcctgaagcagggagcgcggagtcgttcccgagagaggcggccaggctatgctcgccggtttccggcgttccgctccggccagccagagtctctgtctcaacctgtgtccgtgctccagcagtctcctcagcccggccccgcggcgcggttggcggcggcgccccaggcgcgccccctcctccgatggcggcggagatccagcccaagcctctgacccgcaagccgatcctgctgcagcggatggaggggtcccaggaggtggtgaatatggccgtgatcgtgcccaaagaggagggcgtcatcagcgtctccgaggacaggacagttcgtgtttggttaaagagagacagtggacagtattggccaagcgtataccatgcaatgccttctccatgttcatgcatgtcttttaacccggaaacaagaagactgtccataggtctagacaatggtacaatctcagagtttatattgtcagaagattataacaagatgactcctgtgaaaaactatcaagcgcatcagagcagagtgacgatgatcctgtttgtcctggagctggagtgggtgctgagcacaggacaggacaagcaatttgcctggcactgctctgagagtgggcagcgcctgggaggttatcggaccagtgctgtggcctcaggcctgcaatttgatgttgaaacccggcatgtgtttatcggtgaccactcaggccaagtaacaatcctcaaactggagcaagaaaactgcaccctggtcacaacattcagaggacacacaggtggggtgaccgctctctgttgggacccagtccagcgggtgttgttctcaggcagttcagatcactctgtcatcatgtgggacatcggtgggagaaaaggaacagccatcgagctccaaggacacaacgacagagtccaggccctctcctatgcacagcacacgcgacaattgatctcctgtggcggtgatggtgggattgtcgtctggaacatggacgtggagaggcaggagacccctgaatggttggacagtgattcctgccaaaagtgtgatcagcctttcttctggaacttcaagcaaatgtgggacagtaagaaaattggtctaagacagcaccactgccgcaagtgtgggaaggccgtctgtggcaagtgcagctccaagcgctcctccatccccctgatgggcttcgagtttgaagtgagggtctgtgacagctgccacgaggccatcacagatgaagaacgtgcacccacagccaccttccatgacagtaaacataacattgtgcatgtgcatttcgatgcaaccagaggatggttactgacttctggaactgacaaggttattaagttgtgggatatgaccccagtcgtgtcttgatgactctcccaggaatcagaaagatagtatttactaaagaaacggttgttttaacccaaatcattaccagagtggtaaagcagacatgtgagaagtaagaaagaaactaaagaccctgaatgaatttgcagattacccatgtgcacagtggggacctggccagtgagcactcgcaaggggactcttccaacttgttcatacaatataaaagaagctatttttttaacaaatggtttatacagtctggctgtgctgcattgttttgagtgtaccgaaaaatctgtgtggggtgtttaatttttatacttttcaacaccccattttacttgttgctttgtcagagaaataagggaggtatctactcagagtattttggtcattatactttctgtgtttacttcaacatgtgtcacgtggccagcggctttttcttctcttccctctgcacctacctgcaccttctctgcctttcctggaggggatgtatttatgttatttattcccagtgtttctgctttcatgtcctcctcagtggagagatttggaaactcatcatgtggattcaccagccagctgctggaattgcctgaagagcgatttgtttgtaatgtctgcctcattcacgttcttatgaagtagaaaagactgtgtttctgcctcagttgcctctgtctttcccacattaaaaaaaaaaatgctgtgagaaaaaag

SEQ ID NO: 323039 - DNA, 2338 bp, Homo sapiens
ttttggtgcctgaagcagggagcgcggagtcgttcccgagagaggcggccaggctatgctcgccggtttccggcgttccgctccggccagccagagtctctgtctcaacctgtgtccgtgctccagcagtctcctcagcccggccccgcggcgcggttggcggcggcgccccaggcgcgccccctcctccgatggcggcggagatccagcccaagcctctgacccgcaagccgatcctgctgcagcggatggaggggtcccaggaggtggtgaatatggccgtgatcgtgcccaaagaggagggcgtcatcagcgtctccgaggacaggacagttcgtgtttggttaaagagagacagtggacagtattggccaagcgtataccatgcaatgccttctccatgttcatgcatgtcttttaacccggaaacaagaagactgtccataggtctagacaatggtacaatctcagagtttatattgtcagaagattataacaagatgactcctgtgaaaaactatcaagcgcatcagagcagagtgacgatgatcctgtttgtcctggagctggagtgggtgctgagcacaggacaggacaagcaatttgcctggcactgctctgagagtgggcagcgcctgggaggttatcggaccagtgctgtggcctcaggcctgcaatttgatgttgaaacccggcatgtgtttatcggtgaccactcaggccaagtaacaatcctcaaactggagcaagaaaactgcaccctggtcacaacattcagaggacacacaggtggggtgaccgctctctgttgggacccagtccagcgggtgttgttctcaggcagttcagatcactctgtcatcatgtgggacatcggtgggagaaaaggaacagccatcgagctccaaggacacaacgacagagtccaggccctctcctatgcacagcacacgcgacaattgatctcctgtggcggtgatggtgggattgtcgtctggaacatggacgtggagaggcaggagcctctgtggagctgcttcgtggttatgataagtgctgtgtgatgctcaccttgggaggtctgcgacatatattgaagtcatctctaacctgaagtactgacagactttctggaagaaaaggcttgtaggaggaaacttcagaattctattaaatggtgtaaatgatgaaattatagttgatatatgctagagcatcagtgctgggtattttagaagggatggagtcatcattggctaatgttcccagtgaaggattgagggaggaacattgtgctgaaggatcaacagagtctggatgtgctctgagcaggagcacatgggctttgcaggccacgaaacagcaagagtaaggacaaggtgaacacgataggttgatgcagtgcattaatgctcatgagcggtttagagaagcagtcagagatgagaggatggcagctagctgaaagataaggacagacaatggaagaccttgagtggctggatgtagatcgagtgacattgcataggttgaacaggtgttttatacagttaatgaaatccatttttgttttgttaacttttagcattttttaaaagtatatattgtatataacattcttggtagaaaagttacaaaatgctcattagtaaatagaaaagatgtcaattactcatactaccaccatccagaaatatcactctgaacatgttggcacacatccttcctaacatttttctctacacataacacgtgtgtaagacttttttttgaacaaaaaatagaatcacaaacatgctgatttattttttcccctttattggtctttagctcccaaatgcctcctcacagatacccactgtgatgtgtttgatgtgtgtcctgaacacgcatgcttccttataaaaggtgtgtgtgtgtgtgtatgtgtgtctgtgtgtgtgttttaaagtttacataactcagccgggcacggtggctcacgcctgtaatgccagctgttgggaggccaaggcaggtggatcacttgaggtcaagagtttgagaccagcctggtcaacatggcgaaaccctgtctctactaacaatacaaaaaaaaaagaggcaggagaattgcatgaacctaggaggcggaggttgcagtgagccaagatcgcaccactgcactccagcctgggcaacacagcaaggctgtctcaaataatatttagtgattccataatttttcgggtggggccgctctggcccagtcgattctatgttggagcaggcttttcatgcgggccattttggggttacttggccattcggcctatttgggtctttttcaattcaccgg

SEQ ID NO: 323040 - DNA, 1617 bp, Homo sapiens
ttttggtgcctgaagcagggagcgcggagtcgttcccgagagaggcggccaggctatgctcgccggtttccggcgttccgctccggccagccagagtctctgtctcaacctgtgtccgtgctccagcagtctcctcagcccggccccgcggcgcggttggcggcggcgccccaggcgcgccccctcctccgatggcggcggagatccagcccaagcctctgacccgcaagccgatcctgctgcagcggatggaggggtcccaggaggtggtgaatatggccgtgatcgtgcccaaagaggagggcgtcatcagcgtctccgaggacaggacagttcgtgtttggttaaagagagacagtggacagtattggccaagcgtataccatgcaatgccttctccatgttcatgcatgtcttttaacccggaaacaagaagactgtccataggtctagacaatggtacaatctcagagtttatattgtcagaagattataacaagatgactcctgtgaaaaactatcaagcgcatcagagcagagtgacgatgatcctgtttgtcctggagctggagtgggtgctgagcacaggacaggacaagcaatttgcctggcactgctctgagagtgggcagcgcctgggaggttatcggaccagtgctgtggcctcaggcctgcaatttgatgttgaaacccggcatgtgtttatcggtgaccactcaggccaagtaacaatcctcaaactggagcaagaaaactgcaccctggtcacaacattcagaggacacacaggtggggtgaccgctctctgttgggacccagtccagcgggtgttgttctcaggcagttcagatcactctgtcatcatgtgggacatcggtgggagaaaaggaacagccatcgagctccaaggacacaacgacagagtccaggccctctcctatgcacagcacacgcgacaattgatctcctgtggcggtgatggtgggattgtcgtctggaacatggacgtggagaggcaggagacccctgaatggttggacagtgattcctgccaaaagtgtgatcagcctttcttctggaacttcaagcaaatgtgggacagtaagaaaattggtctaagacagcaccactgccgcaagtgtgggaaggccgtctgtggcaagtgcagctccaagcgctcctccatccccctgatgggcttcgagtttgaagtgagggtctgtgacagctgccacgaggccatcacagatgaagaacgtgcacccacagccaccttccatgacagtaaacataacattgtgcatgtgcatttcgatgcaaccagaggatggttactgacttctggaactgacaaggttattaaggtaagatgccatcttattaagaagctttccatctttggcctcatataaatatacaggagcaccaagaacatgggaggcactgttctaaaggttatccttgggtagccggccatggtggcatgtgtctgtagtcccagctactcaggagatttaggagggaggattgcttgagtccaggagttgaaggctacagtgagctttgatcacatcactgcactctagcctgagcaacaaagcaagacctcatctctta

SEQ ID NO: 323041 - DNA, 2683 bp, Homo sapiens
gccctgtggttctggccctgcctcccttcctgcttatttcttatttcttttatgattaaaccatgaaataaggcatgtaacgttaaagaattgtagcataaaaggagttgtttgggttgttttttttttccctcacaagttggcatgtaacattactgtgatggagagttcataagaattttgactgagactaagctgtttaaatctgttacaccattcacagcaaaagtacaggtgaggaaaagaaaccatctatttcctggtgattagtcctttggtataaaatgcactacaaaaacggaggactcacgtgatttatgtcatggaagtagaaataattattttgtactttataagtcatgttctaaatagttccccagatatcaatatatccttagttttctagcacgtatttacatgttatcagaacattcttttttatgagctttcattttaatctttgagcatcttaacaacaaatatgtttcctgcatatctcttttgacaagtactttgaagttaaccattttccaattacgttagaattattctgggtagactttccctttgacaatgcacattcttataattaatttcttgcaggatacaaaaattacatagaaaagcaacattttaaaaagacaaaaggggtctcccacgttctttctgtgccctcaccccagtctcatttcaagagagtagtcgctattacccacaatgtcatgccttttcaaatgccagtaattatatgcttaagaagattaaagctttatttgctcagatcttaagtccatgggacttctattagtaactaatcaaaatgatcattactgttagaaggtgggaaatggtagaacattgcttttgaaaactatatttggcaccattaatacaaaggctgggatcgttgtgatgagtgctggtcatgctaaccatgttcccgcatggctggtgattatgtcctgggttgggttctgcacggtagcctgctttgggttagggacagtcacacctggtctgtcctgacttctttctgggccctcctaaccaaaccaggggaggggagaaggacccaattcttttcctttggtgcacgtagcctggacccgttatggacagaggccaaaggaagataacagtgtggtgtccagagatgaaaccaagtggttgatgggcagttctttgagcaaccttgtttatgagcctattgatatgcagatatagaggcatccaatactattgactaatttaaaatcttattcagtgagtcaacactctaaataagcaatggagatggttccattcatttttttgcaagtatcatttttataaacataaatttcctgagatttttgttttcatcttagcctctgtggagctgcttcgtggttatgataagtgctgtgtgatgctcaccttgggaggtctgcgacatatattgaagtcatctctaacctgaagtactgacagactttctggaagaaaaggcttgtaggaggaaacttcagaattctattaaatggtgtaaatgatgaaattatagttgatatatgctagagcatcagtgctgggtattttagaagggatggagtcatcattggctaatgttcccagtgaaggattgagggaggaacattgtgctgaaggatcaacagagtctggatgtgctctgagcaggagcacatgggctttgcaggccacgaaacagcaagagtaaggacaaggtgaacacgataggttgatgcagtgcattaatgctcatgagcggtttagagaagcagtcagagatgagaggatggcagctagctgaaagataaggacagacaatggaagaccttgagtggctggatgtagatcgagtgacattgcataggttgaacaggtgttttatacagttaatgaaatccatttttgttttgttaacttttagcattttttaaaagtatatattgtatataacattcttggtagaaaagttacaaaatgctcattagtaaatagaaaagatgtcaattactcatactaccaccatccagaaatatcactctgaacatgttggcacacatccttcctaacatttttctctacacataacacgtgtgtaagacttttttttgaacaaaaaatagaatcacaaacatgctgatttattttttcccctttattggtctttagctcccaaatgcctcctcacagatacccactgtgatgtgtttgatgtgtgtcctgaacacgcatgcttccttataaaaggtgtgtgtgtgtgtgtatgtgtgtctgtgtgtgtgttttaaagtttacataactcagccgggcacggtggctcacgcctgtaatgccagctgttgggaggccaaggcaggtggatcacttgaggtcaagagtttgagaccagcctggtcaacatggcgaaaccctgtctctactaacaatacaaaaaaaaaagaggcaggagaattgcatgaacctaggaggcggaggttgcagtgagccaagatcgcaccactgcactccagcctgggcaacacagcaaggctgtctcaaataatatttagtgattccataatttttcgggtggggccgctctggcccagtcgattctatgttggagcaggcttttcatgcgggccattttggggttacttggccattcggcctatttgggtctttttcaattcaccgg

SEQ ID NO: 323042 - DNA, 1268 bp, Homo sapiens
tcccatccccagggcctgccacagaataggcattcagtaaatattttttgaatgattgactgagaaatcacacctctgtttcttttaaacacatcctgatagctccataagtttcatcagggtcagtggtttccattgtcctgactgctggccacagtgacctgttctgtgctttatttgacaagacccctgaatggttggacagtgattcctgccaaaagtgtgatcagcctttcttctggaacttcaagcaaatgtgggacagtaagaaaattggtctaagacagcaccactgccgcaagtgtgggaaggccgtctgtggcaagtgcagctccaagcgctcctccatccccctgatgggcttcgagtttgaagtgagggtctgtgacagctgccacgaggccatcacagatgaagaacgtgcacccacagccaccttccatgacagtaaacataacattgtgcatgtgcatttcgatgcaaccagaggatggttactgacttctggaactgacaaggttattaagttgtgggatatgaccccagtcgtgtcttgatgactctcccaggaatcagaaagatagtatttactaaagaaacggttgttttaacccaaatcattaccagagtggtaaagcagacatgtgagaagtaagaaagaaactaaagaccctgaatgaatttgcagattacccatgtgcacagtggggacctggccagtgagcactcgcaaggggactcttccaacttgttcatacaatataaaagaagctatttttttaacaaatggtttatacagtctggctgtgctgcattgttttgagtgtaccgaaaaatctgtgtggggtgtttaatttttatacttttcaacaccccattttacttgttgctttgtcagagaaataagggaggtatctactcagagtattttggtcattatactttctgtgtttacttcaacatgtgtcacgtggccagcggctttttcttctcttccctctgcacctacctgcaccttctctgcctttcctggaggggatgtatttatgttatttattcccagtgtttctgctttcatgtcctcctcagtggagagatttggaaactcatcatgtggattcaccagccagctgctggaattgcctgaagagcgatttgtttgtaatgtctgcctcattcacgttcttatgaagtagaaaagactgtgtttctgcctcagttgcctctgtctttcccacattaaaaaaaaaaatgctgtgagaaaaaag

SEQ ID NO: 323043 - DNA, 2629 bp, Homo sapiens
gccctgtggttctggccctgcctcccttcctgcttatttcttatttcttttatgattaaaccatgaaataaggcatgtaacgttaaagaattgtagcataaaaggagttgtttgggttgttttttttttccctcacaagttggcatgtaacattactgtgatggagagttcataagaattttgactgagactaagctgtttaaatctgttacaccattcacagcaaaagtacaggtgaggaaaagaaaccatctatttcctggtgattagtcctttggtataaaatgcactacaaaaacggaggactcacgtgatttatgtcatggaagtagaaataattattttgtactttataagtcatgttctaaatagttccccagatatcaatatatccttagttttctagcacgtatttacatgttatcagaacattcttttttatgagctttcattttaatctttgagcatcttaacaacaaatatgtttcctgcatatctcttttgacaagtactttgaagttaaccattttccaattacgttagaattattctgggtagactttccctttgacaatgcacattcttataattaatttcttgcaggatacaaaaattacatagaaaagcaacattttaaaaagacaaaaggggtctcccacgttctttctgtgccctcaccccagtctcatttcaagagagtagtcgctattacccacaatgtcatgccttttcaaatgccagtaattatatgcttaagaagattaaagctttatttgctcagatcttaagtccatgggacttctattagtaactaatcaaaatgatcattactgttagaaggtgggaaatggtagaacattgcttttgaaaactatatttggcaccattaatacaaaggctgggatcgttgtgatgagtgctggtcatgctaaccatgttcccgcatggctggtgattatgtcctgggttgggttctgcacggtagcctgctttgggttagggacagtcacacctggtctgtcctgacttctttctgggccctcctaaccaaaccaggggaggggagaaggacccaattcttttcctttggtgcacgtagcctggacccgttatggacagaggccttctttgagcaaccttgtttatgagcctattgatatgcagatatagaggcatccaatactattgactaatttaaaatcttattcagtgagtcaacactctaaataagcaatggagatggttccattcatttttttgcaagtatcatttttataaacataaatttcctgagatttttgttttcatcttagcctctgtggagctgcttcgtggttatgataagtgctgtgtgatgctcaccttgggaggtctgcgacatatattgaagtcatctctaacctgaagtactgacagactttctggaagaaaaggcttgtaggaggaaacttcagaattctattaaatggtgtaaatgatgaaattatagttgatatatgctagagcatcagtgctgggtattttagaagggatggagtcatcattggctaatgttcccagtgaaggattgagggaggaacattgtgctgaaggatcaacagagtctggatgtgctctgagcaggagcacatgggctttgcaggccacgaaacagcaagagtaaggacaaggtgaacacgataggttgatgcagtgcattaatgctcatgagcggtttagagaagcagtcagagatgagaggatggcagctagctgaaagataaggacagacaatggaagaccttgagtggctggatgtagatcgagtgacattgcataggttgaacaggtgttttatacagttaatgaaatccatttttgttttgttaacttttagcattttttaaaagtatatattgtatataacattcttggtagaaaagttacaaaatgctcattagtaaatagaaaagatgtcaattactcatactaccaccatccagaaatatcactctgaacatgttggcacacatccttcctaacatttttctctacacataacacgtgtgtaagacttttttttgaacaaaaaatagaatcacaaacatgctgatttattttttcccctttattggtctttagctcccaaatgcctcctcacagatacccactgtgatgtgtttgatgtgtgtcctgaacacgcatgcttccttataaaaggtgtgtgtgtgtgtgtatgtgtgtctgtgtgtgtgttttaaagtttacataactcagccgggcacggtggctcacgcctgtaatgccagctgttgggaggccaaggcaggtggatcacttgaggtcaagagtttgagaccagcctggtcaacatggcgaaaccctgtctctactaacaatacaaaaaaaaaagaggcaggagaattgcatgaacctaggaggcggaggttgcagtgagccaagatcgcaccactgcactccagcctgggcaacacagcaaggctgtctcaaataatatttagtgattccataatttttcgggtggggccgctctggcccagtcgattctatgttggagcaggcttttcatgcgggccattttggggttacttggccattcggcctatttgggtctttttcaattcaccgg

SEQ ID NO: 323044 - DNA, 2629 bp, Homo sapiens
gccctgtggttctggccctgcctcccttcctgcttatttcttatttcttttatgattaaaccatgaaataaggcatgtaacgttaaagaattgtagcataaaaggagttgtttgggttgttttttttttccctcacaagttggcatgtaacattactgtgatggagagttcataagaattttgactgagactaagctgtttaaatctgttacaccattcacagcaaaagtacaggtgaggaaaagaaaccatctatttcctggtgattagtcctttggtataaaatgcactacaaaaacggaggactcacgtgatttatgtcatggaagtagaaataattattttgtactttataagtcatgttctaaatagttccccagatatcaatatatccttagttttctagcacgtatttacatgttatcagaacattcttttttatgagctttcattttaatctttgagcatcttaacaacaaatatgtttcctgcatatctcttttgacaagtactttgaagttaaccattttccaattacgttagaattattctgggtagactttccctttgacaatgcacattcttataattaatttcttgcaggatacaaaaattacatagaaaagcaacattttaaaaagacaaaaggggtctcccacgttctttctgtgccctcaccccagtctcatttcaagagagtagtcgctattacccacaatgtcatgccttttcaaatgccagtaattatatgcttaagaagattaaagctttatttgctcagatcttaagtccatgggacttctattagtaactaatcaaaatgatcattactgttagaaggtgggaaatggtagaacattgcttttgggtcatgctaaccatgttcccgcatggctggtgattatgtcctgggttgggttctgcacggtagcctgctttgggttagggacagtcacacctggtctgtcctgacttctttctgggccctcctaaccaaaccaggggaggggagaaggacccaattcttttcctttggtgcacgtagcctggacccgttatggacagaggccaaaggaagataacagtgtggtgtccagagatgaaaccaagtggttgatgggcagttctttgagcaaccttgtttatgagcctattgatatgcagatatagaggcatccaatactattgactaatttaaaatcttattcagtgagtcaacactctaaataagcaatggagatggttccattcatttttttgcaagtatcatttttataaacataaatttcctgagatttttgttttcatcttagcctctgtggagctgcttcgtggttatgataagtgctgtgtgatgctcaccttgggaggtctgcgacatatattgaagtcatctctaacctgaagtactgacagactttctggaagaaaaggcttgtaggaggaaacttcagaattctattaaatggtgtaaatgatgaaattatagttgatatatgctagagcatcagtgctgggtattttagaagggatggagtcatcattggctaatgttcccagtgaaggattgagggaggaacattgtgctgaaggatcaacagagtctggatgtgctctgagcaggagcacatgggctttgcaggccacgaaacagcaagagtaaggacaaggtgaacacgataggttgatgcagtgcattaatgctcatgagcggtttagagaagcagtcagagatgagaggatggcagctagctgaaagataaggacagacaatggaagaccttgagtggctggatgtagatcgagtgacattgcataggttgaacaggtgttttatacagttaatgaaatccatttttgttttgttaacttttagcattttttaaaagtatatattgtatataacattcttggtagaaaagttacaaaatgctcattagtaaatagaaaagatgtcaattactcatactaccaccatccagaaatatcactctgaacatgttggcacacatccttcctaacatttttctctacacataacacgtgtgtaagacttttttttgaacaaaaaatagaatcacaaacatgctgatttattttttcccctttattggtctttagctcccaaatgcctcctcacagatacccactgtgatgtgtttgatgtgtgtcctgaacacgcatgcttccttataaaaggtgtgtgtgtgtgtgtatgtgtgtctgtgtgtgtgttttaaagtttacataactcagccgggcacggtggctcacgcctgtaatgccagctgttgggaggccaaggcaggtggatcacttgaggtcaagagtttgagaccagcctggtcaacatggcgaaaccctgtctctactaacaatacaaaaaaaaaagaggcaggagaattgcatgaacctaggaggcggaggttgcagtgagccaagatcgcaccactgcactccagcctgggcaacacagcaaggctgtctcaaataatatttagtgattccataatttttcgggtggggccgctctggcccagtcgattctatgttggagcaggcttttcatgcgggccattttggggttacttggccattcggcctatttgggtctttttcaattcaccgg

SEQ ID NO: 323045 - DNA, 1194 bp, Homo sapiens
attagactattttactggcaagtccttctgagctcaaacttagcaaaagccctgtggttttaaaagctcgggtggagattatcacagacaccattggagcaacattctccagaaggacttttagaaattttcatctctttcccattttaaagactataagatttcttgtattttttttttatcataactggtcaccagggaataaaggcagatctgaggagcattcctgtcagtgaagcagttttagccacgaggccaaaatttagagcctaatgtcatcctagatctctctcattcatatgtcaccaccttttcccctcagaagctttctttgctccttctagacgtgcacccacagccaccttccatgacagtaaacataacattgtgcatgtgcatttcgatgcaaccagaggatggttactgacttctggaactgacaaggttattaagttgtgggatatgaccccagtcgtgtcttgatgactctcccaggaatcagaaagatagtatttactaaagaaacggttgttttaacccaaatcattaccagagtggtaaagcagacatgtgagaagtaagaaagaaactaaagaccctgaatgaatttgcagattacccatgtgcacagtggggacctggccagtgagcactcgcaaggggactcttccaacttgttcatacaatataaaagaagctatttttttaacaaatggtttatacagtctggctgtgctgcattgttttgagtgtaccgaaaaatctgtgtggggtgtttaatttttatacttttcaacaccccattttacttgttgctttgtcagagaaataagggaggtatctactcagagtattttggtcattatactttctgtgtttacttcaacatgtgtcacgtggccagcggctttttcttctcttccctctgcacctacctgcaccttctctgcctttcctggaggggatgtatttatgttatttattcccagtgtttctgctttcatgtcctcctcagtggagagatttggaaactcatcatgtggattcaccagccagctgctggaattgcctgaagagcgatttgtttgtaatgtctgcctcattcacgttcttatgaagtagaaaagactgtgtttctgcctcagttgcctctgtctttcccacattaaaaaaaaaaatgctgtgagaaaaaag

SEQ ID NO: 323046 - DNA, 453 bp, Homo sapiens
gatttattttttcccctttattggtctttagctcccaaatgcctcctcacagatacccactgtgatgtgtttgatgtgtgtcctgaacacgcatgcttccttataaaaggtgtgtgtgtgtgtgtatgtgtgtctgtgtgtgtgttttaaagtttacataactcagccgggcacggtggctcacgcctgtaatgccagctgttgggaggccaaggcaggtggatcacttgaggtcaagagtttgagaccagcctggtcaacatggcgaaaccctgtctctactaacaatacaaaaaaaaaaaaattagccaggcatggttgcagacgcctgtaatctcagcttctcaggaggctgaggcaggagaattgcatgaacctaggaggcggaggttgcagtgagccaagatcgcaccactgcactccagcctgggcaacacagcaaggctgtctcaa

SEQ ID NO: 323047 - DNA, 1622 bp, Homo sapiens
ttttggtgcctgaagcagggagcgcggagtcgttcccgagagaggcggccaggctatgctcgccggtttccggcgttccgctccggccagccagagtctctgtctcaacctgtgtccgtgctccagcagtctcctcagcccggccccgcggcgcggttggcggcggcgccccaggcgcgccccctcctccgatggcggcggagatccagcccaagcctctgacccgcaagccgatcctgctgcagcggatggaggggtcccaggaggtggtgaatatggccgtgatcgtgcccaaagaggagggcgtcatcagcgtctccgaggacaggacagttcgtgtttggttaaagagagacagtggacagtattggccaagcgtataccatgcaatgccttctccatgttcatgcatgtcttttaacccggaaacaagaagactgtccataggtctagacaatggtacaatctcagagtttatattgtcagaagattataacaagatgactcctgtgaaaaactatcaagcgcatcagagcagagtgacgatgatcctgtttgtcctggagctggagtgggtgctgagcacaggacaggacaagcaatttgcctggcactgctctgagagtgggcagcgcctgggaggttatcggaccagtgctgtggcctcaggcctgcaatttgatgttgaaacccggcatgtgtttatcggtgaccactcaggccaagtaacaatcctcaaactggagcaagaaaactgcaccctggtcacaacattcagaggacacacaggtggggtgaccgctctctgttgggacccagtccagcgggtgttgttctcaggcagttcagatcactctgtcatcatgtgggacatcggtgggagaaaaggaacagccatcgagctccaaggacacaacgacagagtccaggccctctcctatgcacagcacacgcgacaattgatctcctgtggcggtgatggtgggattgtcgtctggaacatggacgtggagaggcaggagacccctgaatggttggacagtgattcctgccaaaagtgtgatcagcctttcttctggaacttcaagcaaatgtgggacagtaagaaaattggtctaagacagcaccactgccgcaagtgtgggaaggccgtctgtggcaagtgcagctccaagcgctcctccatccccctgatgggcttcgagtttgaagtgagggtctgtgacagctgccacgaggccatcacagatgaagaacgtgcacccacagccaccttccatgacagtaaacataacattgtgcatgtgcatttcgatgcaaccagaggatggttactgacttctggaactgacaaggttattaagttgtgggatatgaccccagtcgtgtcttgatgactctcccaggaatcagaaagatagtatttactaaagaaacggttgttttaacccaaatcattaccagagtggtaaagcagacatgtgagaagtaagaaagaaactaaagaccctgaatgaatttgcagattacccatgtgcacagtggggacctggccagtgagcactcgcaaggggactcttccaacttgttcatacaatataaaagaagctatttttttaaca

SEQ ID NO: 323048 - DNA, 1779 bp, Homo sapiens
ttttggtgcctgaagcagggagcgcggagtcgttcccgagagaggcggccaggctatgctcgccggtttccggcgttccgctccggccagccagagtctctgtctcaacctgtgtccgtgctccagcagtctcctcagcccggccccgcggcgcggttggcggcggcgccccaggcgcgccccctcctccgatggcggcggagatccagcccaagcctctgacccgcaagccgatcctgctgcagcggatggaggggtcccaggaggtggtgaatatggccgtgatcgtgcccaaagaggagggcgtcatcagcgtctccgaggacaggacagttcgtgtttggttaaagagagacagtggacagtattggccaagcgtataccatgcaatgccttctccatgttcatgcatgtcttttaacccggaaacaagaagactgtccataggtctagacaatggtacaatctcagagtttatattgtcagaagattataacaagatgactcctgtgaaaaactatcaagcgcatcagagcagagtgacgatgatcctgtttgtcctggagctggagtgggtgctgagcacaggacaggacaagcaatttgcctggcactgctctgagagtgggcagcgcctgggaggttatcggaccagtgctgtggcctcaggcctgcaatttgatgttgaaacccggcatgtgtttatcggtgaccactcaggccaagtaacaatcctcaaactggagcaagaaaactgcaccctggtcacaacattcagaggacacacaggtggggtgaccgctctctgttgggacccagtccagcgggtgttgttctcaggcagttcagatcactctgtcatcatgtgggacatcggtgggagaaaaggaacagccatcgagctccaaggacacaacgacagagtccaggccctctcctatgcacagcacacgcgacaattgatctcctgtggcggtgatggtgggattgtcgtctggaacatggacgtggagaggcaggagacccctgaatggttggacagtgattcctgccaaaagtgtgatcagcctttcttctggaacttcaagcaaatgtgggacagtaagaaaattggtctaagacagcaccactgccgcaagtgtgggaaggccgtctgtggcaagtgcagctccaagcgctcctccatccccctgatgggcttcgagtttgaagtgagggtctgtgacagctgccacgaggccatcacagatgaagagtaagttcctgcagcctgcagaccgcttcaggttaaggcgagaatttaatctgagccttgcactcagcgccgcaaccatcactcaggttgctctagtttctgctggtttagaatatagtccacggcaagcagtaaaagctctcctttgccaccaagagatttgtggtatcctgtgagatgagagaagagaaaatacactcaaagaattcatctctgtgttctttctaatttctaggttatgtgcctttaaattagctgctcccagaacaaacccttctgtctgctcatttacttgagaattacccaggagtataagggctcaggattcactttctgtcccaagctggtatctttacaggagttgagtgagtccatgggtccagaaggtttcattttccgggaagagctaagtcgctttacccaagaggcaaatattcccagttgcccagttactcagctggctgcttgtcagacctgcccagtaacccaggacataggttacttaccccttggtgtgctgtgga

SEQ ID NO: 323049 - DNA, 1415 bp, Homo sapiens
ttttggtgcctgaagcagggagcgcggagtcgttcccgagagaggcggccaggctatgctcgccggtttccggcgttccgctccggccagccagagtctctgtctcaacctgtgtccgtgctccagcagtctcctcagcccggccccgcggcgcggttggcggcggcgccccaggcgcgccccctcctccgatggcggcggagatccagcccaagcctctgacccgcaagccgatcctgctgcagcggatggaggggtcccaggaggtggtgaatatggccgtgatcgtgcccaaagaggagggcgtcatcagcgtctccgaggacaggacagttcgtgtttggttaaagagagacagtggacagtattggccaagcgtataccatgcaatgccttctccatgttcatgcatgtcttttaacccggaaacaagaagactgtccataggtctagacaatggtacaatctcagagtttatattgtcagaagattataacaagatgactcctgtgaaaaactatcaagcgcatcagagcagagtgacgatgatcctgtttgtcctggagctggagtgggtgctgagcacaggacaggacaagcaatttgcctggcactgctctgagagtgggcagcgcctgggaggttatcggaccagtgctgtggcctcaggcctgcaatttgatgttgaaacccggcatgtgtttatcggtgaccactcaggccaagtaacaatcctcaaactggagcaagaaaactgcaccctggtcacaacattcagaggacacacaggtggggtgaccgctctctgttgggacccagtccagcgggtgttgttctcaggcagttcagatcactctgtcatcatgtgggacatcggtgggagaaaaggaacagccatcgagctccaaggacacaacgacagagtccaggccctctcctatgcacagcacacgcgacaattgatctcctgtggcggtgatggtgggattgtcgtctggaacatggacgtggagaggcaggagacccctgaatggttggacagtgattcctgccaaaagtgtgatcagcctttcttctggaacttcaagcaaatgtgggacagtaagaaaattggtctaagacagcaccactgccgcaagtgtgggaaggccgtctgtggcaagtgcagctccaagcgctcctccatccccctgatgggcttcgagtttgaagtgagggtctgtgacagctgccacgaggccatcacagatgaagaacgtgcacccacagccaccttccatgacagtaaacataacattgtgcatgtgcatttcgatgcaaccagaggatggttactgacttctggaactgacaaggttattaaggtgctgtcgttttgcaaaaggaaatctttatatgaaatgggtaccgagctc

SEQ ID NO: 323050 - DNA, 3902 bp, Homo sapiens
  misc_feature (1)..(1): n is a, c, g, or t
naagtatcaacaacctgcaggctgagttaaacaagatttttgccctgcggaagcaactggagcaggatgtgctttcatatcagaatttgcggaagaccttggaggagcagatcagcgaaattcggaggcgggaagaagaatcattttcactttatagtgatcaaacatcttatctaagtatttgccttgaagaaaacaatcggtttcaagtggaacatttttctcaagaagaacttaagaaaaaggtcagtgaccttatacagctagtgaaggagctgtatacagacaaccagcacctgaagaaaaccatttttgatctctcctgcatgggtttccagggaaatgggtttccagatagacttgcgtctacagaacaaacagagattatgaaagacctttccaaaggaggctgcaaaaatggatacttaaggcacacggagtctaagatttcagattgtgatggggcccacgcacctggctgcctagaagaaggtgcattcataaacctgcttgcccctttgttcaatgagaaggccacattattactggaatccaggccagaccttctgaaagtggtacgggaactgcttctgggacaactattcttgacagagcaggaagtttctggagaacaccttgatggtaaaactgagaagacacctaagcaaaaaggtgaacttgtacattttgtccaaaccaactcattttccaagccacatgatgaactgaagttgtcttgtgaggcccagctagtaaaggcaggcgaagtgcccaaggtaggactgaaagatgcctcagtgcagactgtggccacggagggcgacctgctgagattcaagcatgaagcaacaagagaggcttgggaagagaaaccgatcaacactgcactcagcgcagagcatcggccagagaacctgcacggggtgcctgggtggcaggctgccctcctttccctccctggtattaccaacagagaggctaagaagtcccgcttgccaatcctaataaaaccatcccggtcattaggaaatatgtatcgtctccctgccacccaggaggtggtgacgcagctgcagagccagatcttggagctgcagggggagctgaaggagtttaaaacttgtaataagcaacttcaccaaaagttaattctggctgaagcagtgatggaggggaggccaacgcccgacaaaacgttgctgaatgctcagccccctgtgggagcagcctaccaggacagcccaggagagcagaaaggaattaaaaccacatcttctgtctggagagacaaggaaatggacagtgatcagcaaagaagctacgagattgactctgagatttgcccacctgatgaccttgccagcttgccatcatgcaaagaaaatcctgaagatgttctgagcccaacttcagtagctacttacctgagttccaagagtcagccttctgctaaagtcagtgtgatggggactgatcagtcagagagcattaatacctcaaatgagacagaatacttaaaacagaaaatccatgacttggaaactgagctggaaggctaccagaatttcatatttcagcttcaaaagcactcccagtgcagtgaggccataattacagttttgtgtgggacagaaggggcccaggatggcttgagcaagcccaagaatggttctgatggggaagaaatgaccttttcaagtttgcaccaagtgcgatacgtgaaacacgtgaaaatcctcggtccgctggccccagagatgattgacagcagggtgctggagaacctcaaacagcagctggaggaacaggaatacaagctgcagaaggagcagaatttgaacatgcaacttttcagtgagatccataatctgcagaataagttcagagatctctcacctcccagatacgattcattagttcagtcccaagccagggagctctcccttcaacggcagcagattaaggatggccatggcatctgtgtcatctcccgtcaacacatgaacaccatgattaaggcatttgaggagttgctgcaggccagtgatgtggattactgtgtggccgagggtttccaggaacagctgaatcaatgtgctgagctgctggagaaattggaaaagctatttctcaacggaaaatcagttggagtggaaatgaacacccagaatgaactgatggagaggattgaggaagacaacttaacctaccaacatcttctgcctgaatctcctgagccttcagcctctcatgcgctctctgattatgaaacatctgaaaagtccttcttctcacgagaccagaagcaagataatgagacagagaagacttcagttatggtgaacagtttttctcaagacttactaatggaacacatacaggaaattcgaactttgagaaagcgtttagaagaatctattaaaacaaatgagaagctacggaaacagttggaacggcaaggatctgaatttgttcaaggttctacaagcatttttgcttctggttcagagcttcatagttctctaacatcagaaattcatttcttgaggaagcagaaccaggccctcaatgcaatgctcattaaaggatccagagataaacagaaggagaatgacaaattacgagagtccctctccaggaagaccgtgagcctggagcaccttcagcgggagtatgccagcgtgaaggaagaaaatgaaaggctgcagaaagaaggcagcgagaaggagagacacaaccagcagctgatccaggaggtccgctgcagcggccaggagctgagcagggtgcaggaggagctgaagttgaggcagcagctgctctcacagaatgacaagctattgcagtctctccgagtggagctgaaggcgtatgagaagctggatgaagagcacaggagactgagagaggcgtcgggagaaggctggaaggggcaggatcctttcagggacctgcacagcctcctgatggagatccaggctctgcgcttgcaactagaaaggagcatcgaaaccagcagcactctgcagagcaggctcaaggaacagctggcaaggggggcagagaaggcacaggaaggagccctcactctggctgtccaagccgtgtccatccctgaggtgccccttcagcctgacaaacacgatggtgacaaatatcccatggaaagtgataattcatttgatctgtttgattcctcccaggcagtgacaccaaaatcagtttcagagactcctccactctctgggaatgacacggactccctctcctgcgacagtggcagttcggcaactagcactccgtgtgtgtcccgcctggtcactggccaccacctgtgggccagcaagaatggccgccatgtcctgggcctgattgaggactatgaggccctgctcaaacagatcagccagggacagaggctccttgctgaaatggacattcaaacccaagaggctcccagctccacaagtcaagagctgggaacaaagggtccacacccagcaccactgagcaagtttgtgagcagtgtgagcacggccaagctgaccctggaagaggcctacaggcggctgaagcttctctggagagtctcactccccgaggatggccagtgcccccttcactgtgagcagattggagaaatgaaggcagaggtcaccaaactacataaaaaattgtttgaacaagaaaagaagttgcaaaacaccatgaagcttttgcagctgagcaagcgccaggaaaaagtcatctttgatcaattggtcgtaacccacaaaatccttcggaaggccagaggaaacctggagcttaggcctgggggagcccatccaggaacatgcagtcccagcagaccaggctcctgagaagaactttcagccaataaagcttgtgcttcccccacc

SEQ ID NO: 323051 - DNA, 935 bp, Homo sapiens
tgcttctcagaagccttccctgttctctccctccctgcacagataattgttttttctggctctggcccttcatcactctgctgttgcaccttctgcagtgtctgtgttctgatcagactgtgggctactggaatgcaggcaccagcttgagtcatccttgtgaatctggggtcttctgccgagtgggtggttgataagtgttggttgagttgacttgagcctctcctacaagatgactcataagcccagtgtgggtttcagagactcctccactctctgggaatgacacggactccctctcctgcgacagtggcagttcggcaactagcactccgtgtgtgtcccgcctggtcactggccaccacctgtgggccagcaagaatggccgccatgtcctgggcctgattgaggactatgaggccctgctcaaacagatcagccagggacagaggctccttgctgaaatggacattcaaacccaagaggctcccagctccacaagtcaagagctgggaacaaagggtccacacccagcaccactgagcaagtttgtgagcagtgtgagcacggccaagctgaccctggaagaggcctacaggcggctgaagcttctctggagagtctcactccccgaggatggccagtgcccccttcactgtgagcagattggagaaatgaaggcagaggtcaccaaactacataaaaaattgtttgaacaagaaaagaagttgcaaaacaccatgaagcttttgcagctgagcaagcgccaggaaaaagtcatctttgatcaattggtcgtaacccacaaaatccttcggaaggccagaggaaacctggagcttaggcctgggggagcccatccaggaacatgcagtcccagcagaccaggctcctgagaagaactttcagccaataaagcttgtgcttcccccacc

SEQ ID NO: 323052 - DNA, 369 bp, Homo sapiens
  misc_feature (344)..(344): n is a, c, g, or t
tgcttctcagaagccttccctgttctctccctccctgcacagataattgttttttctggctctggcccttcatcactctgctgttgcaccttctgcagtgtctgtgttctgatcagactgtgggctactggaatgcaggcaccagcttgagtcatccttgtgaatctggggtcttctgccgagtgggtggttgataagtgttggttgagttgacttgagcctctcctacaagcattggaaccttccaatttaacacggccccccccaaagggctggggctgggggcgctttttccacgaagactccatccactctctggggaatgacacggactccctctcctngcgaacaagcttgggggcccaaagc

SEQ ID NO: 323053 - DNA, 4101 bp, Homo sapiens
  misc_feature (1)..(1): n is a, c, g, or t
naagtatcaacaacctgcaggctgagttaaacaagatttttgccctgcggaagcaactggagcaggatgtgctttcatatcagaatttgcggaagaccttggaggagcagatcagcgaaattcggaggcgggaagaagaatcattttcactttatagtgatcaaacatcttatctaagtatttgccttgaagaaaacaatcggtttcaagtggaacatttttctcaagaagaacttaagaaaaaggtcagtgaccttatacagctagtgaaggagctgtatacagacaaccagcacctgaagaaaaccatttttgatctctcctgcatgggtttccagggaaatgggtttccagatagacttgcgtctacagaacaaacagagattatgaaagacctttccaaaggaggctgcaaaaatggatacttaaggcacacggagtctaagatttcagattgtgatggggcccacgcacctggctgcctagaagaaggtgcattcataaacctgcttgcccctttgttcaatgagaaggccacattattactggaatccaggccagaccttctgaaagtggtacgggaactgcttctgggacaactattcttgacagagcaggaagtttctggagaacaccttgatggtaaaactgagaagacacctaagcaaaaaggtgaacttgtacattttgtccaaaccaactcattttccaagccacatgatgaactgaagttgtcttgtgaggcccagctagtaaaggcaggcgaagtgcccaaggtaggactgaaagatgcctcagtgcagactgtggccacggagggcgacctgctgagattcaagcatgaagcaacaagagaggcttgggaagagaaaccgatcaacactgcactcagcgcagagcatcggccagagaacctgcacggggtgcctgggtggcaggctgccctcctttccctccctggtattaccaacagagaggctaagaagtcccgcttgccaatcctaataaaaccatcccggtcattaggaaatatgtatcgtctccctgccacccaggaggtggtgacgcagctgcagagccagatcttggagctgcagggggagctgaaggagtttaaaacttgtaataagcaacttcaccaaaagttaattctggctgaagcagtgatggaggggaggccaacgcccgacaaaacgttgctgaatgactctgagatttgcccacctgatgaccttgccagcttgccatcatgcaaagaaaatcctgaagatgttctgagcccaacttcagtagctacttacctgagttccaagagtcagccttctgctaaagtcagtgtgatggggactgatcagtcagagagcattaatacctcaaatgagacagaatacttaaaacagaaaatccatgacttggaaactgagctggaaggctaccagaatttcatatttcagcttcaaaagcactcccagtgcagtgaggccataattacagttttgtgtgggacagaaggggcccaggatggcttgagcaagcccaagaatggttctgatggggaagaaatgaccttttcaagtttgcaccaagtgcgatacgtgaaacacgtgaaaatcctcggtccgctggccccagagatgattgacagcagggtgctggagaacctcaaacagcagctggaggaacaggaatacaagctgcagaaggagcagaatttgaacatgcaacttttcagtgagatccataatctgcagaataagttcagagatctctcacctcccagatacgattcattagttcagtcccaagccagggagctctcccttcaacggcagcagattaaggatggccatggcatctgtgtcatctcccgtcaacacatgaacaccatgattaaggcatttgaggagttgctgcaggccagtgatgtggattactgtgtggccgagggtttccaggaacagctgaatcaatgtgctgagctgctggagaaattggaaaagctatttctcaacggaaaatcagttggagtggaaatgaacacccagaatgaactgatggagaggattgaggaagacaacttaacctaccaacatcttctgcctgaatctcctgagccttcagcctctcatgcgctctctgattatgaaacatctgaaaagtccttcttctcacgagaccagaagcaagataatgagacagagaagacttcagttatggtgaacagtttttctcaagacttactaatggaacacatacaggaaattcgaactttgagaaagcgtttagaagaatctattaaaacaaatgagaagctacggaaacagttggaacggcaaggatctgaatttgttcaaggttctacaagcatttttgcttctggttcagagcttcatagttctctaacatcagaaattcatttcttgaggaagcagaaccaggccctcaatgcaatgctcattaaaggatccagagataaacagaaggagaatgacaaattacgagagtccctctccaggaagaccgtgagcctggagcaccttcagcgggagtatgccagcgtgaaggaagaaaatgaaaggctgcagaaagaaggcagcgagaaggagagacacaaccagcagctgatccaggaggtccgctgcagcggccaggagctgagcagggtgcaggaggagctgaagttgaggcagcagctgctctcacagaatgacaagctattgcagtctctccgagtggagctgaaggcgtatgagaagctggatgaagagcacaggagactgagagaggcgtcgggagaaggctggaaggggcaggatcctttcagggacctgcacagcctcctgatggagatccaggctctgcgcttgcaactagaaaggagcatcgaaaccagcagcactctgcagagcaggctcaaggaacagctggcaaggggggcagagaaggcacaggaaggagccctcactctggctgtccaagccgtgtccatccctgaggtgccccttcagcctgacaaacacgatggtgacaaatatcccatggaaagtgataattcatttgatctgtttgattcctcccaggcagtgacaccaaaatcagtttcagagactcctccactctctgggaatgacacggactccctctcctgcgacagtggcagttcggcaactagcactccgtgtgtgtcccgcctggtcactggccaccacctgtgggccagcaagaatggccgccatgtcctgggcctgattgaggactatgaggccctgctcaaacagatcagccagggacagaggctccttgctgaaatggacattcaaacccaagaggctcccagctccacaagtcaagagctgggaacaaagggtccacacccagcaccactgagcaagtttgtgagcagtgtgagcacggccaagctgaccctggaagaggcctacaggcggctgaagcttctctggagagtctcactccccgaggatggccagtgcccccttcactgtgagcagattggagaaatgaaggcagaggtcaccaaactacataaaaaattgtttgaacaagaaaagaagttgcaaaacaccatgaagcttttgcagctgagcaagcgccaggaaaaagtcatctttgatcaattggtcgtaacccacaaaatccttcggaaggccagaggaaacctggagcttaggcctgggggagcccatccaggaacatgcagtcccagcagaccaggctcctgagaagaactttcagccaataaagcttgtgcttcccccaccgagctcacgctgtctctttgttccaagtgtggttcctatttattgaggaagaaagagctgtctggccaaaggaaatctattttttcccttcatgttttctctctgaaagttggcttgagagttgttgtcagaaaggtgcaggtgctccacaaacgggtggtaaaaaggcctcgagctcttggatgttgtatttcagatcaggggcaggcaccggagttgaggctgtgcgccttggtgggcttcacgtcttcccctggatttgcttagtactcagccagtgccacagtttgaagattctcattaaatgattcatttcatttca

SEQ ID NO: 323054 - DNA, 3779 bp, Homo sapiens
  misc_feature (1)..(1): n is a, c, g, or t
naagtatcaacaacctgcaggctgagttaaacaagatttttgccctgcggaagcaactggagcaggatgtgctttcatatcagaatttgcggaagaccttggaggagcagatcagcgaaattcggaggcgggaagaagaatcattttcactttatagtgatcaaacatcttatctaagtatttgccttgaagaaaacaatcggtttcaagtggaacatttttctcaagaagaacttaagaaaaaggtcagtgaccttatacagctagtgaaggagctgtatacagacaaccagcacctgaagaaaaccatttttgatctctcctgcatgggtttccagggaaatgggtttccagatagacttgcgtctacagaacaaacagagattatgaaagacctttccaaaggaggctgcaaaaatggatacttaaggcacacggagtctaagatttcagattgtgatggggcccacgcacctggctgcctagaagaaggtgcattcataaacctgcttgcccctttgttcaatgagaaggccacattattactggaatccaggccagaccttctgaaagtggtacgggaactgcttctgggacaactattcttgacagagcaggaagtttctggagaacaccttgatggtaaaactgagaagacacctaagcaaaaaggtgaacttgtacattttgtccaaaccaactcattttccaagccacatgatgaactgaagttgtcttgtgaggcccagctagtaaaggcaggcgaagtgcccaaggtaggactgaaagatgcctcagtgcagactgtggccacggagggcgacctgctgagattcaagcatgaagcaacaagagaggcttgggaagagaaaccgatcaacactgcactcagcgcagagcatcggccagagaacctgcacggggtgcctgggtggcaggctgccctcctttccctccctggtattaccaacagagaggctaagaagtcccgcttgccaatcctaataaaaccatcccggtcattaggaaatatgtatcgtctccctgccacccaggaggtggtgacgcagctgcagagccagatcttggagctgcagggggagctgaaggagtttaaaacttgtaataagcaacttcaccaaaagttaattctggctgaagcagtgatggaggggaggccaacgcccgacaaaacgttgctgaatgactctgagatttgcccacctgatgaccttgccagcttgccatcatgcaaagaaaatcctgaagatgttctgagcccaacttcagtagctacttacctgagttccaagagtcagccttctgctaaagtcagtgtgatggggactgatcagtcagagagcattaatacctcaaatgagacagaatacttaaaacagaaaatccatgacttggaaactgagctggaaggctaccagaatttcatatttcagcttcaaaagcactcccagtgcagtgaggccataattacagttttgtgtgggacagaaggggcccaggatggcttgagcaagcccaagaatggttctgatggggaagaaatgaccttttcaagtttgcaccaagtgcgatacgtgaaacacgtgaaaatcctcggtccgctggccccagagatgattgacagcagggtgctggagaacctcaaacagcagctggaggaacaggaatacaagctgcagaaggagcagaatttgaacatgcaacttttcagtgagatccataatctgcagaataagttcagagatctctcacctcccagatacgattcattagttcagtcccaagccagggagctctcccttcaacggcagcagattaaggatggccatggcatctgtgtcatctcccgtcaacacatgaacaccatgattaaggcatttgaggagttgctgcaggccagtgatgtggattactgtgtggccgagggtttccaggaacagctgaatcaatgtgctgagctgctggagaaattggaaaagctatttctcaacggaaaatcagttggagtggaaatgaacacccagaatgaactgatggagaggattgaggaagacaacttaacctaccaacatcttctgcctgaatctcctgagccttcagcctctcatgcgctctctgattatgaaacatctgaaaagtccttcttctcacgagaccagaagcaagataatgagacagagaagacttcagttatggtgaacagtttttctcaagacttactaatggaacacatacaggaaattcgaactttgagaaagcgtttagaagaatctattaaaacaaatgagaagctacggaaacagttggaacggcaaggatctgaatttgttcaaggttctacaagcatttttgcttctggttcagagcttcatagttctctaacatcagaaattcatttcttgaggaagcagaaccaggccctcaatgcaatgctcattaaaggatccagagataaacagaaggagaatgacaaattacgagagtccctctccaggaagaccgtgagcctggagcaccttcagcgggagtatgccagcgtgaaggaagaaaatgaaaggctgcagaaagaaggcagcgagaaggagagacacaaccagcagctgatccaggaggtccgctgcagcggccaggagctgagcagggtgcaggaggagctgaagttgaggcagcagctgctctcacagaatgacaagctattgcagtctctccgagtggagctgaaggcgtatgagaagctggatgaagagcacaggagactgagagaggcgtcgggagaaggctggaaggggcaggatcctttcagggacctgcacagcctcctgatggagatccaggctctgcgcttgcaactagaaaggagcatcgaaaccagcagcactctgcagagcaggctcaaggaacagctggcaaggggggcagagaaggcacaggaaggagccctcactctggctgtccaagccgtgtccatccctgaggtgccccttcagcctgacaaacacgatggtgacaaatatcccatggaaagtgataattcatttgatctgtttgattcctcccaggcagtgacaccaaaatcagtttcagagactcctccactctctgggaatgacacggactccctctcctgcgacagtggcagttcggcaactagcactccgtgtgtgtcccgcctggtcactggccaccacctgtgggccagcaagaatggccgccatgtcctgggcctgattgaggactatgaggccctgctcaaacagatcagccagggacagaggctccttgctgaaatggacattcaaacccaagaggctcccagctccacaagtcaagagctgggaacaaagggtccacacccagcaccactgagcaagtttgtgagcagtgtgagcacggccaagctgaccctggaagaggcctacaggcggctgaagcttctctggagagtctcactccccgaggatggccagtgcccccttcactgtgagcagattggagaaatgaaggcagaggtcaccaaactacataaaaaattgtttgaacaagaaaagaagttgcaaaacaccatgaagcttttgcagctgagcaagcgccaggaaaaagtcatctttgatcaattggtcgtaacccacaaaatccttcggaaggccagaggaaacctggagcttaggcctgggggagcccatccaggaacatgcagtcccagcagaccaggctcctgagaagaactttcagccaataaagcttgtgcttcccccacc

SEQ ID NO: 323055 - DNA, 1931 bp, Homo sapiens
gatccccatcggcacccaaggagcagagaaatcaaattcagttatggtgaacagtttttttcaagacttactaatggaacacatacaggaaattcgaactttgagaaagcgtttagaagaatctattaaaacaaatgagaagctacggaaacagttggaacggcaaggatctgaatttgttcaaggttctacaagcatttttgcttctggttcagagcttcatagttctctaacatcagaaattcatttcttgaggaagcagaaccaggccctcaatgcaatgctcattaaaggatccagagataaacagaaggagaatgacaaattacgagagtccctctccaggaagaccgtgagcctggagcaccttcagcgggagtatgccagcgtgaaggaagaaaatgaaaggctgcagaaagaaggcagcgagaaggagagacacaaccagcagctgatccaggaggtccgctgcagcggccaggagctgagcagggtgcaggaggagctgaagttgaggcagcagctgctctcacagaatgacaagctattgcagtctctccgagtggagctgaaggcgtatgagaagctggatgaagagcacaggagactgagagaggcgtcgggagaaggctggaaggggcaggatcctttcagggacctgcacagcctcctgatggagatccaggctctgcgcttgcaactagaaaggagcatcgaaaccagcagcactctgcagagcaggctcaaggaacagctggcaaggggggcagagaaggcacaggaaggagccctcactctggctgtccaagccgtgtccatccctgaggtgccccttcagcctgacaaacacgatggtgacaaatatcccatggaaagtgataattcatttgatctgtttgattcctcccaggcagtgacaccaaaatcagtttcagagactcctccactctctgggaatgacacggactccctctcctgcgacagtggcagttcggcaactagcactccgtgtgtgtcccgcctggtcactggccaccacctgtgggccagcaagaatggccgccatgtcctgggcctgattgaggactatgaggccctgctcaaacagatcagccagggacagaggctccttgctgaaatggacattcaaacccaagaggctcccagctccacaagtcaagagctgggaacaaagggtccacacccagcaccactgagcaagtttgtgagcagtgtgagcacggccaagctgaccctggaagaggcctacaggcggctgaagcttctctggagagtctcactccccgaggatggccagtgcccccttcactgtgagcagattggagaaatgaaggcagaggtcaccaaactacataaaaaattgtttgaacaagaaaagaagttgcaaaacaccatgaagcttttgcagctgagcaagcgccaggaaaaagtcatctttgatcaattggtcgtaacccacaaaatccttcggaaggccagaggaaacctggagcttaggcctgggggagcccatccaggaacatgcagtcccagcagaccaggctcctgagaagaactttcagccaataaagcttgtgcttcccccaccgagctcacgctgtctctttgttccaagtgtggttcctatttattgaggaagaaagagctgtctggccaaaggaaatctattttttcccttcatgttttctctctgaaagttggcttgagagttgttgtcagaaaggtgcaggtgctccacaaacgggtggtaaaaaggcctcgagctcttggatgttgtatttcagatcaggggcaggcaccggagttgaggctgtgcgccttggtgggcttcacgtcttcccctggatttgcttagtactcagccagtgccacagtttgaagattctcattaaatgattcatttcatttca

SEQ ID NO: 323056 - DNA, 4159 bp, Homo sapiens
  misc_feature (1)..(1): n is a, c, g, or t
naagtatcaacaacctgcaggctgagttaaacaagatttttgccctgcggaagcaactggagcaggatgtgctttcatatcagaatttgcggaagaccttggaggagcagatcagcgaaattcggaggcgggaagaagaatcattttcactttatagtgatcaaacatcttatctaagtatttgccttgaagaaaacaatcggtttcaagtggaacatttttctcaagaagaacttaagaaaaaggtcagtgaccttatacagctagtgaaggagctgtatacagacaaccagcacctgaagaaaaccatttttgatctctcctgcatgggtttccagggaaatgggtttccagatagacttgcgtctacagaacaaacagagattatgaaagacctttccaaaggaggctgcaaaaatggatacttaaggcacacggagtctaagatttcagattgtgatggggcccacgcacctggctgcctagaagaaggtgcattcataaacctgcttgcccctttgttcaatgagaaggccacattattactggaatccaggccagaccttctgaaagtggtacgggaactgcttctgggacaactattcttgacagagcaggaagtttctggagaacaccttgatggtaaaactgagaagacacctaagcaaaaaggtgaacttgtacattttgtccaaaccaactcattttccaagccacatgatgaactgaagttgtcttgtgaggcccagctagtaaaggcaggcgaagtgcccaaggtaggactgaaagatgcctcagtgcagactgtggccacggagggcgacctgctgagattcaagcatgaagcaacaagagaggcttgggaagagaaaccgatcaacactgcactcagcgcagagcatcggccagagaacctgcacggggtgcctgggtggcaggctgccctcctttccctccctggtattaccaacagagaggctaagaagtcccgcttgccaatcctaataaaaccatcccggtcattaggaaatatgtatcgtctccctgccacccaggaggtggtgacgcagctgcagagccagatcttggagctgcagggggagctgaaggagtttaaaacttgtaataagcaacttcaccaaaagttaattctggctgaagcagtgatggaggggaggccaacgcccgacaaaacgttgctgaatgactctgagatttgcccacctgatgaccttgccagcttgccatcatgcaaagaaaatcctgaagatgttctgagcccaacttcagtagctacttacctgagttccaagagtcagccttctgctaaagtcagtgtgatggggactgatcagtcagagagcattaatacctcaaatgagacagaatacttaaaacagaaaatccatgacttggaaactgagctggaaggctaccagaatttcatatttcagcttcaaaagcactcccagtgcagtgaggccataattacagttttgtgtgggacagaaggggcccaggatggcttgagcaagcccaagaatggttctgatggggaagaaatgaccttttcaagtttgcaccaagtgcgatacgtgaaacacgtgaaaatcctcggtccgctggccccagagatgattgacagcagggtgctggagaacctcaaacagcagctggaggaacaggaatacaagctgcagaaggagcagaatttgaacatgcaacttttcagtgagatccataatctgcagaataagttcagagatctctcacctcccagatacgattcattagttcagtcccaagccagggagctctcccttcaacggcagcagattaaggatggccatggcatctgtgtcatctcccgtcaacacatgaacaccatgattaaggcatttgaggagttgctgcaggccagtgatgtggattactgtgtggccgagggtttccaggaacagctgaatcaatgtgctgagctgctggagaaattggaaaagctatttctcaacggaaaatcagttggagtggaaatgaacacccagaatgaactgatggagaggattgaggaagacaacttaacctaccaacatcttctgcctgaatctcctgagccttcagcctctcatgcgctctctgattatgaaacatctgaaaagtccttcttctcacgagaccagaagcaagataatgagacagagaagacttcagttatggtgaacagtttttctcaagacttactaatggaacacatacaggaaattcgaactttgagaaagcgtttagaagaatctattaaaacaaatgagaagctacggaaacagttggaacggcaaggatctgaatttgttcaaggttctacaagcatttttgcttctggttcagagcttcatagttctctaacatcagaaattcatttcttgaggaagcagaaccaggccctcaatgcaatgctcattaaaggatccagagataaacagaaggagaatgacaaattacgagagtccctctccaggaagaccgtgagcctggagcaccttcagcgggagtatgccagcgtgaaggaagaaaatgaaaggctgcagaaagaaggcagcgagaaggagagacacaaccagcagctgatccaggaggtccgctgcagcggccaggagctgagcagggtgcaggaggagctgaagttgaggcagcagctgctctcacagaatgacaagctattgcagtctctccgagtggagctgaaggcgtatgagaagctggatgaagagcacaggagactgagagaggcgtcgggagaaggctggaaggggcaggatcctttcagggacctgcacagcctcctgatggagatccaggctctgcgcttgcaactagaaaggagcatcgaaaccagcagcactctgcagagcaggctcaaggaacagctggcaaggggggcagagaaggcacaggaaggagccctcactctggctgtccaagccgtgtccatccctgaggtgccccttcagcctgacaaacacgatggtgacaaatatcccatggaaagtgataattcatttgatctgtttgattcctcccaggcagtgacaccaaaatcagtttcagagactcctccactctctgggaatgacacggactccctctcctgcgacagtggcagttcggcaactagcactccgtgtgtgtcccgcctggtcactggccaccacctgtgggccagcaagaatggccgccatgtcctgggcctgattgaggactatgaggccctgctcaaacagatcagccagggacagaggctccttgctgaaatggacattcaaacccaagaggctcccagctccacaagtcaagagctgggaacaaagggtccacacccagcaccactgagcaagtttgtgagcagtgtgagcacggccaagctgaccctggaagaggcctacaggcggctgaagcttctctggagagtctcactccccgaggatggccagtgcccccttcactgtgagcagattggagaaatgaaggcagaggtcaccaaactacataaaaaattgtttgaacaagaaaagaagttgcaaaacaccatgaagcttttgcagctgagcaagcgccaggaaaaagtcatctttgatcaattggtcgtaacccacaaaatccttcggaaggccagaggaaacctggagcttaggcctgggggagcccatccaggaacatgcagtcccagcagaccaggctcctgagaagaactttcagccaataaagcttgtgcttcccccaccgagctcacgctgtctctttgttccaagtgtggttcctatttattgaggaagaaagagctgtctggccaaaggaaatctattttttcccttcatgttttctctctgaaagttggcttgagagttgttgtcagaaaggtgcaggtgctccacaaacgggtggtaaaaaggcctcgagctcttggatgttgtatttcagatcaggggcaggcaccggagttgaggctgtgcgccttggtgggcttcacgtcttcccctggatttgcttagtactcagccagtgccacagtttgaagattctcattaaatgattcatttcatttcaaacacacaccttataacataaaaaaacctcgggccccaaagcgcggcggcgaacaacg

SEQ ID NO: 323057 - DNA, 4085 bp, Homo sapiens
  misc_feature (1)..(1): n is a, c, g, or t
naagtatcaacaacctgcaggctgagttaaacaagatttttgccctgcggaagcaactggagcaggatgtgctttcatatcagaatttgcggaagaccttggaggagcagatcagcgaaattcggaggcgggaagaagaatcattttcactttatagtgatcaaacatcttatctaagtatttgccttgaagaaaacaatcggtttcaagtggaacatttttctcaagaagaacttaagaaaaaggtcagtgaccttatacagctagtgaaggagctgtatacagacaaccagcacctgaagaaaaccatttttgatctctcctgcatgggtttccagggaaatgggtttccagatagacttgcgtctacagaacaaacagagattatgaaagacctttccaaaggaggctgcaaaaatggatacttaaggcacacggagtctaagatttcagattgtgatggggcccacgcacctggctgcctagaagaaggtgcattcataaacctgcttgcccctttgttcaatgagaaggccacattattactggaatccaggccagaccttctgaaagtggtacgggaactgcttctgggacaactattcttgacagagcaggaagtttctggagaacaccttgatggtaaaactgagaagacacctaagcaaaaaggtgaacttgtacattttgtccaaaccaactcattttccaagccacatgatgaactgaagttgtcttgtgaggcccagctagtaaaggcaggcgaagtgcccaaggtaggactgaaagatgcctcagtgcagactgtggccacggagggcgacctgctgagattcaagcatgaagcaacaagagaggcttgggaagagaaaccgatcaacactgcactcagcgcagagcatcggccagagaacctgcacggggtgcctgggtggcaggctgccctcctttccctccctggtattaccaacagagaggctaagaagtcccgcttgccaatcctaataaaaccatcccggtcattaggaaatatgtatcgtctccctgccacccaggaggtggtgacgcagctgcagagccagatcttggagctgcagggggagctgaaggagtttaaaacttgtaataagcaacttcaccaaaagttaattctggctgaagcagtgatggaggggaggccaacgcccgacaaaacgttgctgaatgactctgagatttgcccacctgatgaccttgccagcttgccatcatgcaaagaaaatcctgaagatgttctgagcccaacttcagtagctacttacctgagttccaagagtcagccttctgctaaagtcagtgtgatggggactgatcagtcagagagcattaatacctcaaatgagacagaatacttaaaacagaaaatccatgacttggaaactgagctggaaggctaccagaatttcatatttcagcttcaaaagcactcccagtgcagtgaggccataattacagttttgtgtgggacagaaggggcccaggatggcttgagcaagcccaagaatggttctgatggggaagaaatgaccttttcaagtttgcaccaagtgcgatacgtgaaacacgtgaaaatcctcggtccgctggccccagagatgattgacagcagggtgctggagaacctcaaacagcagctggaggaacaggaatacaagctgcagaaggagcagaatttgaacatgcaacttttcagtgagatccataatctgcagaataagttcagagatctctcacctcccagatacgattcattagttcagtcccaagccagggagctctcccttcaacggcagcagattaaggatggccatggcatctgtgtcatctcccgtcaacacatgaacaccatgattaaggcatttgaggagttgctgcaggccagtgatgtggattactgtgtggccgagggtttccaggaacagctgaatcaatgtgctgagctgctggagaaattggaaaagctatttctcaacggaaaatcagttggagtggaaatgaacacccagaatgaactgatggagaggattgaggaagacaacttaacctaccaacatcttctgcctgaatctcctgagccttcagcctctcatgcgctctctgattatgaaacatctgaaaagtccttcttctcacgagaccagaagcaagataatgagacagagaagacttcagttatggtgaacagtttttctcaagacttactaatggaacacatacaggaaattcgaactttgagaaagcgtttagaagaatctattaaaacaaatgagaagctacggaaacagttggaacggcaaggatctgaatttgttcaaggttctacaagcatttttgcttctggttcagagcttcatagttctctaacatcagaaattcatttcttgaggaagcagaaccaggccctcaatgcaatgctcattaaaggatccagagataaacagaaggagaatgacaaattacgagagtccctctccaggaagaccgtgagcctggagcaccttcagcgggagtatgccagcgtgaaggaagaaaatgaaaggctgcagaaagaaggcagcgagaaggagagacacaaccagcagctgatccaggaggtccgctgcagcggccaggagctgagcagggtgcaggaggagctgaagttgaggcagcagctgctctcacagaatgacaagctattgcagtctctccgagtggagctgaaggcgtatgagaagctggatgaagagcacaggagactgagagaggcgtcgggagaaggctggaaggggcaggatcctttcagggacctgcacagcctcctgatggagatccaggctctgcgcttgcaactagaaaggagcatcgaaaccagcagcactctgcagagcaggctcaaggaacagctggcaaggggggcagagaaggcacaggaaggagccctcactctggctgtccaagccgtgtccatccctgaggtgccccttcagcctgacaaacacgatggtgacaaatatcccatggaaagtgataattcatttgatctgtttgattcctcccaggcagtgacaccaaaatcagtttcagagactcctccactctctgggaatgacacggactccctctcctgcgacagtggcagttcggcaactagcactccgtgtgtgtcccgcctggtcactggccaccacctgtgggccagcaagaatggccgccatgtcctgggcctgattgaggactatgaggccctgctcaaacagatcagccagggacagaggctccttgctgaaatggacattcaaacccaagaggctcccagctccacaagtcaagagctgggaacaaagggtccacacccagcaccactgagcaagtttgtgagcagtgtgagcacggccaagctgaccctggaagaggcctacaggcggctgaagcttctctggagagtctcactccccgaggatggccagtgcccccttcactgtgagcagattggagaaatgaaggcagaggtcaccaaactacataaaaaattgtttgaacaagaaaagaagttgcaaaacaccatgaagcttttgcagctgagcaagcgccaggaaaaagtcatctttgatcaattggtcgtaacccacaaaatccttcggaaggccagaggaaacctggagcttaggcctgggggagcccatccaggaacatgcagtcccagcagaccaggctcctgagaagaactttcagccaataaagcttgtgcttcccccaccgagctcacgctgtctctttgttccaagtgtggttcctatttattgaggaagaaagagctgtctggccaaaggaaatctattttttcccttcatgttttctctctgaaagttggcttgagagttgttgtcagaaaggtgcaggtgctccacaaacgggtggtaaaaaggcctcgagctcttggatgttgtaggcaccggagttgaggctgtgcgccttggtgggcttcacgtcttcccctggatttgcttagtactcagccagtgccacagtttgaagattctcattaaatgattcatttcatttca

SEQ ID NO: 323058 - DNA, 1184 bp, Homo sapiens
tgcttctcagaagccttccctgttctctccctccctgcacagataattgttttttctggctctggcccttcatcactctgctgttgcaccttctgcagtgtctgtgttctgatcagactgtgggctactggaatgcaggcaccagcttgagtcatccttgtgaatctggggtcttctgccgatttcagagactcctccactctctgggaatgacacggactccctctcctgcgacagtggcagttcggcaactagcactccgtgtgtgtcccgcctggtcactggccaccacctgtgggccagcaagaatggccgccatgtcctgggcctgattgaggactatgaggccctgctcaaacagatcagccagggacagaggctccttgctgaaatggacattcaaacccaagaggctcccagctccacaagtcaagagctgggaacaaagggtccacacccagcaccactgagcaagtttgtgagcagtgtgagcacggccaagctgaccctggaagaggcctacaggcggctgaagcttctctggagagtctcactccccgaggatggccagtgcccccttcactgtgagcagattggagaaatgaaggcagaggtcaccaaactacataaaaaattgtttgaacaagaaaagaagttgcaaaacaccatgaagcttttgcagctgagcaagcgccaggaaaaagtcatctttgatcaattggtcgtaacccacaaaatccttcggaaggccagaggaaacctggagcttaggcctgggggagcccatccaggaacatgcagtcccagcagaccaggctcctgagaagaactttcagccaataaagcttgtgcttcccccaccgagctcacgctgtctctttgttccaagtgtggttcctatttattgaggaagaaagagctgtctggccaaaggaaatctattttttcccttcatgttttctctctgaaagttggcttgagagttgttgtcagaaaggtgcaggtgctccacaaacgggtggtaaaaaggcctcgagctcttggatgttgtatttcagatcaggggcaggcaccggagttgaggctgtgcgccttggtgggcttcacgtcttcccctggatttgcttagtactcagccagtgccacagtttgaagattctcattaaatgattcatttcatttca

SEQ ID NO: 323059 - DNA, 641 bp, Homo sapiens
gacgtttactggaaagtgtacaggaaacaggatagaggaaatatagctggaccgggtgaatacgtatgatctcatcgttgtttattaggtaaatatttactgaccaaactatgtttttgaaagcactttgagaataacagtctcgctttcacctctgtcggggtcttacttcagaaacctcctttggacttaaaattctccttttttttcttccttttcctagcttaggcctgggggagcccatccaggaacatgcagtcccagcagaccaggctcctgagaagaactttcagccaataaagcttgtgcttcccccaccgagctcacgctgtctctttgttccaagtgtggttcctatttattgaggaagaaagagctgtctggccaaaggaaatctattttttcccttcatgttttctctctgaaagttggcttgagagttgttgtcagaaaggtgcaggtgctccacaaacgggtggtaaaaaggcctcgagctcttggatgttgtatttcagatcaggggcaggcaccggagttgaggctgtgcgccttggtgggcttcacgtcttcccctggatttgcttagtactcagccagtgccacagtttgaagattctcattaaatgattcatttcatttca

SEQ ID NO: 323060 - DNA, 624 bp, Homo sapiens
acacatagtaggcatttgatgaatatttcttgaatgaatgaatacagtatgatctcatcgttgtttattaggtaaatatttactgaccaaactatgtttttgaaagcactttgagaataacagtctcgctttcacctctgtcggggtcttacttcagaaacctcctttggacttaaaattctccttttttttcttccttttcctagcttaggcctgggggagcccatccaggaacatgcagtcccagcagaccaggctcctgagaagaactttcagccaataaagcttgtgcttcccccaccgagctcacgctgtctctttgttccaagtgtggttcctatttattgaggaagaaagagctgtctggccaaaggaaatctattttttcccttcatgttttctctctgaaagttggcttgagagttgttgtcagaaaggtgcaggtgctccacaaacgggtggtaaaaaggcctcgagctcttggatgttgtatttcagatcaggggcaggcaccggagttgaggctgtgcgccttggtgggcttcacgtcttcccctggatttgcttagtactcagccagtgccacagtttgaagattctcattaaatgattcatttcatttca

SEQ ID NO: 323061 - DNA, 1406 bp, Homo sapiens
  misc_feature (1)..(1): n is a, c, g, or t
naagtatcaacaacctgcaggctgagttaaacaagatttttgccctgcggaagcaactggagcaggatgtgctttcatatcagaatttgcggaagaccttggaggagcagatcagcgaaattcggaggcgggaagaagaatcattttcactttatagtgatcaaacatcttatctaagtatttgccttgaagaaaacaatcggtttcaagtggaacatttttctcaagaagaacttaagaaaaaggtcagtgaccttatacagctagtgaaggagctgtatacagacaaccagcacctgaagaaaaccatttttgatctctcctgcatgggtttccagggaaatgggtttccagatagacttgcgtctacagaacaaacagagattatgaaagacctttccaaaggaggctgcaaaaatggatacttaaggcacacggagtctaagatttcagattgtgatggggcccacgcacctggctgcctagaagaaggtgcattcataaacctgcttgcccctttgttcaatgagaaggccacattattactggaatccaggccagaccttctgaaagtggtacgggaactgcttctgggacaactattcttgacagagcaggaagtttctggagaacaccttgatggtaaaactgagaagacacctaagcaaaaaggtgaacttgtacattttgtccaaaccaactcattttccaagccacatgatgaactgaagttgtcttgtgaggcccagctagtaaaggcaggcgaagtgcccaaggtaggactgaaagatgcctcagtgcagactgtggccacggagggcgacctgctgagattcaagcatgaagcaacaagagaggcttgggaagagaaaccgatcaacactgcactcagcgcagagcatcggccagagaacctgcacggggtgcctgggtggcaggctgccctcctttccctccctggtattaccaacagagaggctaagaagtcccgcttgccaatcctaataaaaccatcccggtcattaggaaatatgtatcgtctccctgccacccaggaggtggtgacgcagctgcagagccagatcttggagctgcagggggagctgaaggagtttaaaacttgtaataagcaacttcaccaaaagttaattctggctgaagcagtgatggaggggaggccaacgcccgacaaaacgttgctgaatgctcagccccctgtgggagcagcctaccaggacagcccaggagagcagaaaggaattaaaaccacatcttctgtctggagagacaaggaaatggacagtgatcagcaaagaagctacgagattggtcagaattcagcccctgtgtgtattgaacagcttccatgtgccaggcaccatttggatgttttatctaaaaattat

SEQ ID NO: 323062 - DNA, 468 bp, Homo sapiens
  misc_feature (1)..(1): n is a, c, g, or t
naagtatcaacaacctgcaggctgagttaaacaagatttttgccctgcggaagcaactggagcaggatgtgctttcatatcagaatttgcggaagaccttggaggagcagatcagcgaaattcggaggcgggaagaagaatcattttcactttatagtgatcaaacatcttatctaagtatttgccttgaagaaaacaatcggtttcaagtggaacatttttctcaagaagaacttaagaaaaaggtcagtgaccttatacagctagtgaaggagctgtatacagacaaccagcacctgaagaaaaccatttttgatctctcctgcatgggtttccagggaaatgggtttccagatagacttgcgtctacagaacaaacagagcttctggctagcaaggaggacgaggacacgatcaaaattggggaggatgacgagattaatttcctgagtgaccagcatttgcagc

SEQ ID NO: 323063 - DNA, 142 bp, Homo sapiens
tcctactttaaatatccaggattgttacagagtgtttaaacaagtggaatagtgcttctgcaaatgtatgagcaggaaattattagggaacacttaaaaacatttttttctcctcctttcttgatgttatttctgcttccag

SEQ ID NO: 323064 - DNA, 372 bp, Homo sapiens
aacatgcagtcccagcagaccaggctcctgagaagaactttcagccaataaagcttgtgcttcccccaccgagctcacgctgtctctttgttccaagtgtggttcctatttattgaggaagaaagagctgtctggccaaaggaaatctattttttcccttcatgttttctctctgaaagttggcttgagagttgttgtcagaaaggtgcaggtgctccacaaacgggtggtaaaaaggcctcgagctcttggatgttgtatttcagatcaggggcaggcaccggagttgaggctgtgcgccttggtgggcttcacgtcttcccctggatttgcttagtactcagccagtgccacagtttgaagattctcatt

SEQ ID NO: 323065 - DNA, 469 bp, Homo sapiens
gggcaggcccaggcctctaccctccctgcgccattgccctccctggcccacagaagtgagcctgagggatacctggacagccaggtggccgtgcacagctgtagggtgttctctgaaccggcatagcatgctgtagcctctgcatcactgtcaggtggtggcttagcggggcctcaaagaggtgttgttgatgcgttatttggccctggggtttgtgatgggtcaggtgggccctttgtacctccctctggtctggatgcttcagacctcgtgttgtctacatgtccgagccctttggggtggggttcatcctccctgcacttggctttcacacagctctcctggatatccatggccctaatcattgcattctttgctctctcctcagtggtcgtaacccacaaaatccttcggaaggccagaggaaacctggaggtatgccctttgagtcttttcactgcaggccagt

SEQ ID NO: 323066 - DNA, 862 bp, Homo sapiens
tgcttctcagaagccttccctgttctctccctccctgcacagataattgttttttctggctctggcccttcatcactctgctgttgcaccttctgcagtgtctgtgttctgatcagactgtgggctactggaatgcaggcaccagcttgagtcatccttgtgaatctggggtcttctgccgatttcagagactcctccactctctgggaatgacacggactccctctcctgcgacagtggcagttcggcaactagcactccgtgtgtgtcccgcctggtcactggccaccacctgtgggccagcaagaatggccgccatgtcctgggcctgattgaggactatgaggccctgctcaaacagatcagccagggacagaggctccttgctgaaatggacattcaaacccaagaggctcccagctccacaagtcaagagctgggaacaaagggtccacacccagcaccactgagcaagtttgtgagcagtgtgagcacggccaagctgaccctggaagaggcctacaggcggctgaagcttctctggagagtctcactccccgaggatggccagtgcccccttcactgtgagcagattggagaaatgaaggcagaggtcaccaaactacataaaaaattgtttgaacaagaaaagaagttgcaaaacaccatgaagcttttgcagctgagcaagcgccaggaaaaagtcatctttgatcaattggtcgtaacccacaaaatccttcggaaggccagaggaaacctggagcttaggcctgggggagcccatccaggaacatgcagtcccagcagaccaggctcctgagaagaactttcagccaataaagcttgtgcttcccccacc

SEQ ID NO: 323067 - DNA, 3366 bp, Homo sapiens
ccaggcagagggcacggcccatgcaaaagcatggaggcatgacacagcacgcaatgtgcagggaatcatggttaattttgtaggaaatctccagagtggtgccagagatattcctggaaaggttgcctggaactagatcatggaaggtctcatgtagatactgggaatgtcgatgaattttagggggtgtgtgtgtgggtttatcatggttaaaattactttttagaacagtcactctgaggaagaggacaactgaggggtaaagagggaaagactagggctttttgagggaggcttgttaggaaagactggaggctttttgagggaagtgtgttaggaaatactagggcctttttgagggaggcttgttaggtcactgcagtggtcttggcttggctagggctgtgaggaaggagagagggtttggattttagtaaaagagatactgacataagtgtatttgattttcagactctgagatttgcccacctgatgaccttgccagcttgccatcatgcaaagaaaatcctgaagatgttctgagcccaacttcagtagctacttacctgagttccaagagtcagccttctgctaaagtcagtgtgatggggactgatcagtcagagagcattaatacctcaaatgagacagaatacttaaaacagaaaatccatgacttggaaactgagctggaaggctaccagaatttcatatttcagcttcaaaagcactcccagtgcagtgaggccataattacagttttgtgtgggacagaaggggcccaggatggcttgagcaagcccaagaatggttctgatggggaagaaatgaccttttcaagtttgcaccaagtgcgatacgtgaaacacgtgaaaatcctcggtccgctggccccagagatgattgacagcagggtgctggagaacctcaaacagcagctggaggaacaggaatacaagctgcagaaggagcagaatttgaacatgcaacttttcagtgagatccataatctgcagaataagttcagagatctctcacctcccagatacgattcattagttcagtcccaagccagggagctctcccttcaacggcagcagattaaggatggccatggcatctgtgtcatctcccgtcaacacatgaacaccatgattaaggcatttgaggagttgctgcaggccagtgatgtggattactgtgtggccgagggtttccaggaacagctgaatcaatgtgctgagctgctggagaaattggaaaagctatttctcaacggaaaatcagttggagtggaaatgaacacccagaatgaactgatggagaggattgaggaagacaacttaacctaccaacatcttctgcctgaatctcctgagccttcagcctctcatgcgctctctgattatgaaacatctgaaaagtccttcttctcacgagaccagaagcaagataatgagacagagaagacttcagttatggtgaacagtttttctcaagacttactaatggaacacatacaggaaattcgaactttgagaaagcgtttagaagaatctattaaaacaaatgagaagctacggaaacagttggaacggcaaggatctgaatttgttcaaggttctacaagcatttttgcttctggttcagagcttcatagttctctaacatcagaaattcatttcttgaggaagcagaaccaggccctcaatgcaatgctcattaaaggatccagagataaacagaaggagaatgacaaattacgagagtccctctccaggaagaccgtgagcctggagcaccttcagcgggagtatgccagcgtgaaggaagaaaatgaaaggctgcagaaagaaggcagcgagaaggagagacacaaccagcagctgatccaggaggtccgctgcagcggccaggagctgagcagggtgcaggaggagctgaagttgaggcagcagctgctctcacagaatgacaagctattgcagtctctccgagtggagctgaaggcgtatgagaagctggatgaagagcacaggagactgagagaggcgtcgggagaaggctggaaggggcaggatcctttcagggacctgcacagcctcctgatggagatccaggctctgcgcttgcaactagaaaggagcatcgaaaccagcagcactctgcagagcaggctcaaggaacagctggcaaggggggcagagaaggcacaggaaggagccctcactctggctgtccaagccgtgtccatccctgaggtgccccttcagcctgacaaacacgatggtgacaaatatcccatggaaagtgataattcatttgatctgtttgattcctcccaggcagtgacaccaaaatcagtttcagagactcctccactctctgggaatgacacggactccctctcctgcgacagtggcagttcggcaactagcactccgtgtgtgtcccgcctggtcactggccaccacctgtgggccagcaagaatggccgccatgtcctgggcctgattgaggactatgaggccctgctcaaacagatcagccagggacagaggctccttgctgaaatggacattcaaacccaagaggctcccagctccacaagtcaagagctgggaacaaagggtccacacccagcaccactgagcaagtttgtgagcagtgtgagcacggccaagctgaccctggaagaggcctacaggcggctgaagcttctctggagagtctcactccccgaggatggccagtgcccccttcactgtgagcagattggagaaatgaaggcagaggtcaccaaactacataaaaaattgtttgaacaagaaaagaagttgcaaaacaccatgaagcttttgcagctgagcaagcgccaggaaaaagtcatctttgatcaattggtcgtaacccacaaaatccttcggaaggccagaggaaacctggagcttaggcctgggggagcccatccaggaacatgcagtcccagcagaccaggctcctgagaagaactttcagccaataaagcttgtgcttcccccaccgagctcacgctgtctctttgttccaagtgtggttcctatttattgaggaagaaagagctgtctggccaaaggaaatctattttttcccttcatgttttctctctgaaagttggcttgagagttgttgtcagaaaggtgcaggtgctccacaaacgggtggtaaaaaggcctcgagctcttggatgttgtatttcagatcaggggcaggcaccggagttgaggctgtgcgccttggtgggcttcacgtcttcccctggatttgcttagtactcagccagtgccacagtttgaagattctcattaaatgattcatttcatttca

SEQ ID NO: 323068 - DNA, 3864 bp, Homo sapiens
  misc_feature (1)..(1): n is a, c, g, or t
naagtatcaacaacctgcaggctgagttaaacaagatttttgccctgcggaagcaactggagcaggatgtgctttcatatcagaatttgcggaagaccttggaggagcagatcagcgaaattcggaggcgggaagaagaatcattttcactttatagtgatcaaacatcttatctaagtatttgccttgaagaaaacaatcggtttcaagtggaacatttttctcaagaagaacttaagaaaaaggtcagtgaccttatacagctagtgaaggagctgtatacagacaaccagcacctgaagaaaaccatttttgatctctcctgcatgggtttccagggaaatgggtttccagatagacttgcgtctacagaacaaacagagattatgaaagacctttccaaaggaggctgcaaaaatggatacttaaggcacacggagtctaagatttcagattgtgatggggcccacgcacctggctgcctagaagaaggtgcattcataaacctgcttgcccctttgttcaatgagaaggccacattattactggaatccaggccagaccttctgaaagtggtacgggaactgcttctgggacaactattcttgacagagcaggaagtttctggagaacaccttgatggtaaaactgagaagacacctaagcaaaaaggtgaacttgtacattttgtccaaaccaactcattttccaagccacatgatgaactgaagttgtcttgtgaggcccagctagtaaaggcaggcgaagtgcccaaggtaggactgaaagatgcctcagtgcagactgtggccacggagggcgacctgctgagattcaagcatgaagcaacaagagaggcttgggaagagaaaccgatcaacactgcactcagcgcagagcatcggccagagaacctgcacggggtgcctgggtggcaggctgccctcctttccctccctggtattaccaacagagaggctaagaagtcccgcttgccaatcctaataaaaccatcccggtcattaggaaatatgtatcgtctccctgccacccaggaggtggtgacgcagctgcagagccagatcttggagctgcagggggagctgaaggagtttaaaacttgtaataagcaacttcaccaaaagttaattctggctgaagcagtgatggaggggaggccaacgcccgacaaaacgttgctgaatgactctgagatttgcccacctgatgaccttgccagcttgccatcatgcaaagaaaatcctgaagatgttctgagcccaacttcagtagctacttacctgagttccaagagtcagccttctgctaaagtcagtgtgatggggactgatcagtcagagagcattaatacctcaaatgagacagaatacttaaaacagaaaatccatgacttggaaactgagctggaaggctaccagaatttcatatttcagcttcaaaagcactcccagtgcagtgaggccataattacagttttgtgtgggacagaaggggcccaggatggcttgagcaagcccaagaatggttctgatggggaagaaatgaccttttcaagtttgcaccaagtgcgatacgtgaaacacgtgaaaatcctcggtccgctggccccagagatgattgacagcagggtgctggagaacctcaaacagcagctggaggaacaggaatacaagctgcagaaggagcagaatttgaacatgcaacttttcagtgagatccataatctgcagaataagttcagagatctctcacctcccagatacgattcattagttcagtcccaagccagggagctctcccttcaacggcagcagattaaggatggccatggcatctgtgtcatctcccgtcaacacatgaacaccatgattaaggcatttgaggagttgctgcaggccagtgatgtggattactgtgtggccgagggtttccaggaacagctgaatcaatgtgctgagctgctggagaaattggaaaagctatttctcaacggaaaatcagttggagtggaaatgaacacccagaatgaactgatggagaggattgaggaagacaacttaacctaccaacatcttctgcctgaatctcctgagccttcagcctctcatgcgctctctgattatgaaacatctgaaaagtccttcttctcacgagaccagaagcaagataatgagacagagaagacttcagttatggtgaacagtttttctcaagacttactaatggaacacatacaggaaattcgaactttgagaaagcgtttagaagaatctattaaaacaaatgagaagctacggaaacagttggaacggcaaggatctgaatttgttcaaggttctacaagcatttttgcttctggttcagagcttcatagttctctaacatcagaaattcatttcttgaggaagcagaaccaggccctcaatgcaatgctcattaaaggatccagagataaacagaaggagaatgacaaattacgagagtccctctccaggaagaccgtgagcctggagcaccttcagcgggagtatgccagcgtgaaggaagaaaatgaaaggctgcagaaagaaggcagcgagaaggagagacacaaccagcagctgatccaggaggtccgctgcagcggccaggagctgagcagggtgcaggaggagctgaagttgaggcagcagctgctctcacagaatgacaagctattgcagtctctccgagtggagctgaaggcgtatgagaagctggatgaagagcacaggagactgagagatggtgacaaatatcccatggaaagtgataattcatttgatctgtttgattcctcccaggcagtgacaccaaaatcagtttcagagactcctccactctctgggaatgacacggactccctctcctgcgacagtggcagttcggcaactagcactccgtgtgtgtcccgcctggtcactggccaccacctgtgggccagcaagaatggccgccatgtcctgggcctgattgaggactatgaggccctgctcaaacagatcagccagggacagaggctccttgctgaaatggacattcaaacccaagaggctcccagctccacaagtcaagagctgggaacaaagggtccacacccagcaccactgagcaagtttgtgagcagtgtgagcacggccaagctgaccctggaagaggcctacaggcggctgaagcttctctggagagtctcactccccgaggatggccagtgcccccttcactgtgagcagattggagaaatgaaggcagaggtcaccaaactacataaaaaattgtttgaacaagaaaagaagttgcaaaacaccatgaagcttttgcagctgagcaagcgccaggaaaaagtcatctttgatcaattggtcgtaacccacaaaatccttcggaaggccagaggaaacctggagcttaggcctgggggagcccatccaggaacatgcagtcccagcagaccaggctcctgagaagaactttcagccaataaagcttgtgcttcccccaccgagctcacgctgtctctttgttccaagtgtggttcctatttattgaggaagaaagagctgtctggccaaaggaaatctattttttcccttcatgttttctctctgaaagttggcttgagagttgttgtcagaaaggtgcaggtgctccacaaacgggtggtaaaaaggcctcgagctcttggatgttgtatttcagatcaggggcaggcaccggagttgaggctgtgcgccttggtgggcttcacgtcttcccctggatttgcttagtactcagccagtgccacagtttgaagattctcattaaatgattcatttcatttca

SEQ ID NO: 323069 - DNA, 4253 bp, Homo sapiens
  misc_feature (1)..(1): n is a, c, g, or t
naagtatcaacaacctgcaggctgagttaaacaagatttttgccctgcggaagcaactggagcaggatgtgctttcatatcagaatttgcggaagaccttggaggagcagatcagcgaaattcggaggcgggaagaagaatcattttcactttatagtgatcaaacatcttatctaagtatttgccttgaagaaaacaatcggtttcaagtggaacatttttctcaagaagaacttaagaaaaaggtcagtgaccttatacagctagtgaaggagctgtatacagacaaccagcacctgaagaaaaccatttttgatctctcctgcatgggtttccagggaaatgggtttccagatagacttgcgtctacagaacaaacagagattatgaaagacctttccaaaggaggctgcaaaaatggatacttaaggcacacggagtctaagatttcagattgtgatggggcccacgcacctggctgcctagaagaaggtgcattcataaacctgcttgcccctttgttcaatgagaaggccacattattactggaatccaggccagaccttctgaaagtggtacgggaactgcttctgggacaactattcttgacagagcaggaagtttctggagaacaccttgatggtaaaactgagaagacacctaagcaaaaaggtgaacttgtacattttgtccaaaccaactcattttccaagccacatgatgaactgaagttgtcttgtgaggcccagctagtaaaggcaggcgaagtgcccaaggtaggactgaaagatgcctcagtgcagactgtggccacggagggcgacctgctgagattcaagcatgaagcaacaagagaggcttgggaagagaaaccgatcaacactgcactcagcgcagagcatcggccagagaacctgcacggggtgcctgggtggcaggctgccctcctttccctccctggtattaccaacagagaggctaagaagtcccgcttgccaatcctaataaaaccatcccggtcattaggaaatatgtatcgtctccctgccacccaggaggtggtgacgcagctgcagagccagatcttggagctgcagggggagctgaaggagtttaaaacttgtaataagcaacttcaccaaaagttaattctggctgaagcagtgatggaggggaggccaacgcccgacaaaacgttgctgaatgactctgagatttgcccacctgatgaccttgccagcttgccatcatgcaaagaaaatcctgaagatgttctgagcccaacttcagtagctacttacctgagttccaagagtcagccttctgctaaagtcagtgtgatggggactgatcagtcagagagcattaatacctcaaatgagacagaatacttaaaacagaaaatccatgacttggaaactgagctggaaggctaccagaatttcatatttcagcttcaaaagcactcccagtgcagtgaggccataattacagttttgtgtgggacagaaggggcccaggatggcttgagcaagcccaagaatggttctgatggggaagaaatgaccttttcaagtttgcaccaagtgcgatacgtgaaacacgtgaaaatcctcggtccgctggccccagagatgattgacagcagggtgctggagaacctcaaacagcagctggaggaacaggaatacaagctgcagaaggagcagaatttgaacatgcaacttttcagtgagatccataatctgcagaataagttcagagatctctcacctcccagatacgattcattagttcagtcccaagccagggagctctcccttcaacggcagcagattaaggatggccatggcatctgtgtcatctcccgtcaacacatgaacaccatgattaaggcatttgaggagttgctgcaggccagtgatgtggattactgtgtggccgagggtttccaggaacagctgaatcaatgtgctgagctgctggagaaattggaaaagctatttctcaacggaaaatcagttggagtggaaatgaacacccagaatgaactgatggagaggattgaggaagacaacttaacctaccaacatcttctgcctgaatctcctgagccttcagcctctcatgcgctctctgattatgaaacatctgaaaagtccttcttctcacgagaccagaagcaagataatgagacagagaagacttcagttatggtgaacagtttttctcaagacttactaatggaacacatacaggaaattcgaactttgagaaagcgtttagaagaatctattaaaacaaatgagaagctacggaaacagttggaacggcaaggatctgaatttgttcaaggttctacaagcatttttgcttctggttcagagcttcatagttctctaacatcagaaattcatttcttgaggaagcagaaccaggccctcaatgcaatgctcattaaaggatccagagataaacagaaggagaatgacaaattacgagagtccctctccaggaagaccgtgagcctggagcaccttcagcgggagtatgccagcgtgaaggaagaaaatgaaaggctgcagaaagaaggcagcgagaaggagagacacaaccagcagctgatccaggaggtccgctgcagcggccaggagctgagcagggtgcaggaggagctgaagttgaggcagcagctgctctcacagaatgacaagctattgcagtctctccgagtggagctgaaggcgtatgagaagctggatgaagagcacaggagactgagagaggcgtcgggagaaggctggaaggggcaggatcctttcagggacctgcacagcctcctgatggagatccaggctctgcgcttgcaactagaaaggagcatcgaaaccagcagcactctgcagagcaggctcaaggaacagctggcaaggggggcagagaaggcacaggaaggagccctcactctggctgtccaagccgtgtccatccctgaggtgccccttcagcctgacaaacacgatggtgacaaatatcccatggaaagtgataattcatttgatctgtttgattcctcccaggcagtgacaccaaaatcagtttcagagactcctccactctctgggaatgacacggactccctctcctgcgacagtggcagttcggcaactagcactccgtgtgtgtcccgcctggtcactggccaccacctgtgggccagcaagaatggccgccatgtcctgggcctgattgaggactatgaggccctgctcaaacagatcagccagggacagaggctccttgctgaaatggacattcaaacccaagaggctcccagctccacaagtcaagagctgggaacaaagggtccacacccagcaccactgagcaagtttgtgagcagtgtgagcacggccaagctgaccctggaagaggcctacaggcggctgaagcttctctggagagtctcactccccgaggatggccagtgcccccttcactgtgagcagattggagaaatgaaggcagaggtcaccaaactacataaaaaattgtttgaacaagaaaagaagttgcaaaacaccatgaagcttttgcagctgagcaagcgccaggaaaaagtcatctttgatcaattggtcgtaacccacaaaatccttcggaaggccagaggaaacctggagcttaggcctgggggagcccatccaggaacatgcagtcccagcagaccaggctcctgagaagaactttcagccaataaagcttgtgcttcccccaccgagctcacgctgtctctttgttccaagtgtggttcctatttattgaggaagaaagagctgtctggccaaaggaaatctattttttcccttcatgttttctctctgaaagttggcttgagagttgttgtcagaaaggtgcaggtgctccacaaacgggtggtaaaaaggcctcgagctcttggatgttgtatttcagatcaggggcaggcaccggagttgaggctgtgcgccttggtgggcttcacgtcttcccctggatttgcttagtactcagccagtgccacagtttgaagattctcattaaatgattcatttcatttcaaaaaaaaaaaaacaaaggggggggcaaaaataccgaaggggcccagtaggttcccgttttgtaaaggggccataagggcgaaataacaaggcggggccgttaaaccggcggaaaaggcgggcttggcggccccctggggggcatgcccccca

SEQ ID NO: 323070 - DNA, 1257 bp, Homo sapiens
tgcttctcagaagccttccctgttctctccctccctgcacagataattgttttttctggctctggcccttcatcactctgctgttgcaccttctgcagtgtctgtgttctgatcagactgtgggctactggaatgcaggcaccagcttgagtcatccttgtgaatctggggtcttctgccgagtgggtggttgataagtgttggttgagttgacttgagcctctcctacaagatgactcataagcccagtgtgggtttcagagactcctccactctctgggaatgacacggactccctctcctgcgacagtggcagttcggcaactagcactccgtgtgtgtcccgcctggtcactggccaccacctgtgggccagcaagaatggccgccatgtcctgggcctgattgaggactatgaggccctgctcaaacagatcagccagggacagaggctccttgctgaaatggacattcaaacccaagaggctcccagctccacaagtcaagagctgggaacaaagggtccacacccagcaccactgagcaagtttgtgagcagtgtgagcacggccaagctgaccctggaagaggcctacaggcggctgaagcttctctggagagtctcactccccgaggatggccagtgcccccttcactgtgagcagattggagaaatgaaggcagaggtcaccaaactacataaaaaattgtttgaacaagaaaagaagttgcaaaacaccatgaagcttttgcagctgagcaagcgccaggaaaaagtcatctttgatcaattggtcgtaacccacaaaatccttcggaaggccagaggaaacctggagcttaggcctgggggagcccatccaggaacatgcagtcccagcagaccaggctcctgagaagaactttcagccaataaagcttgtgcttcccccaccgagctcacgctgtctctttgttccaagtgtggttcctatttattgaggaagaaagagctgtctggccaaaggaaatctattttttcccttcatgttttctctctgaaagttggcttgagagttgttgtcagaaaggtgcaggtgctccacaaacgggtggtaaaaaggcctcgagctcttggatgttgtatttcagatcaggggcaggcaccggagttgaggctgtgcgccttggtgggcttcacgtcttcccctggatttgcttagtactcagccagtgccacagtttgaagattctcattaaatgattcatttcatttca

SEQ ID NO: 323071 - DNA, 3032 bp, Homo sapiens
  misc_feature (1)..(1): n is a, c, g, or t
naagtatcaacaacctgcaggctgagttaaacaagatttttgccctgcggaagcaactggagcaggatgtgctttcatatcagaatttgcggaagaccttggaggagcagatcagcgaaattcggaggcgggaagaagaatcattttcactttatagtgatcaaacatcttatctaagtatttgccttgaagaaaacaatcggtttcaagtggaacatttttctcaagaagaacttaagaaaaaggtcagtgaccttatacagctagtgaaggagctgtatacagacaaccagcacctgaagaaaaccatttttgatctctcctgcatgggtttccagggaaatgggtttccagatagacttgcgtctacagaacaaacagagattatgaaagacctttccaaaggaggctgcaaaaatggatacttaaggcacacggagtctaagatttcagattgtgatggggcccacgcacctggctgcctagaagaaggtgcattcataaacctgcttgcccctttgttcaatgagaaggccacattattactggaatccaggccagaccttctgaaagtggtacgggaactgcttctgggacaactattcttgacagagcaggaagtttctggagaacaccttgatggtaaaactgagaagacacctaagcaaaaaggtgaacttgtacattttgtccaaaccaactcattttccaagccacatgatgaactgaagttgtcttgtgaggcccagctagtaaaggcaggcgaagtgcccaaggtaggactgaaagatgcctcagtgcagactgtggccacggagggcgacctgctgagattcaagcatgaagcaacaagagaggcttgggaagagaaaccgatcaacactgcactcagcgcagagcatcggccagagaacctgcacggggtgcctgggtggcaggctgccctcctttccctccctggtattaccaacagagaggctaagaagtcccgcttgccaatcctaataaaaccatcccggtcattaggaaatatgtatcgtctccctgccacccaggaggtggtgacgcagctgcagagccagatcttggagctgcagggggagctgaaggagtttaaaacttgtaataagcaacttcaccaaaagttaattctggctgaagcagtgatggaggggaggccaacgcccgacaaaacgttgctgaatgactctgagatttgcccacctgatgaccttgccagcttgccatcatgcaaagaaaatcctgaagatgttctgagcccaacttcagtagctacttacctgagttccaagagtcagccttctgctaaagtcagtgtgatggggactgatcagtcagagagcattaatacctcaaatgagacagaatacttaaaacagaaaatccatgacttggaaactgagctggaaggctaccagaatttcatatttcagcttcaaaagcactcccagtgcagtgaggccataattacagttttgtgtgggacagaaggggcccaggatggcttgagcaagcccaagaatggttctgatggggaagaaatgaccttttcaagtttgcaccaagtgcgatacgtgaaacacgtgaaaatcctcggtccgctggccccagagatgattgacagcagggtgctggagaacctcaaacagcagctggaggaacaggaatacaagctgcagaaggagcagaatttgaacatgcaacttttcagtgagatccataatctgcagaataagttcagagatctctcacctcccagatacgattcattagttcagtcccaagccagggagctctcccttcaacggcagcagattaaggatggccatggcatctgtgtcatctcccgtcaacacatgaacaccatgattaaggcatttgaggagttgctgcaggccagtgatgtggattactgtgtggccgagggtttccaggaacagctgaatcaatgtgctgagctgctggagaaattggaaaagctatttctcaacggaaaatcagttggagtggaaatgaacacccagaatgaactgatggagaggattgaggaagacaacttaacctaccaacatcttctgcctgaatctcctgagccttcagcctctcatgcgctctctgattatgaaacatctgaaaagtccttcttctcacgagaccagaagcaagataatgagacagagaagacttcagttatggtgaacagtttttctcaagacttactaatggaacacatacaggaaattcgaactttgagaaagcgtttagaagaatctattaaaacaaatgagaagctacggaaacagttggaacggcaaggatctgaatttgttcaaggttctacaagcatttttgcttctggttcagagcttcatagttctctaacatcagaaattcatttcttgaggaagcagaaccaggccctcaatgcaatgctcattaaaggatccagagataaacagaaggagaatgacaaattacgagagtccctctccaggaagaccgtgagcctggagcaccttcagcgggagtatgccagcgtgaaggaagaaaatgaaaggctgcagaaagaaggcagcgagaaggagagacacaaccagcagctgatccaggaggtccgctgcagcggccaggagctgagcagggtgcaggaggagctgaagttgaggcagcagctgctctcacagaatgacaagctattgcagtctctccgagtggagctgaaggcgtatgagaagctggatgaagagcacaggagactgagagaggcgtcgggagaaggctggaaggggcaggatcctttcagggacctgcacagcctcctgatggagatccaggctctgcgcttgcaactagaaaggagcatcgaaaccagcagcactctgcagagcaggctcaaggaacagctggcaaggggggcagagaaggcacaggaaggagccctcactctggctgtccagcggtcatcctggggccttagctgaaaaacgatgggcaattccccggagggtatc

SEQ ID NO: 323072 - DNA, 674 bp, Homo sapiens
atcctgattaaatgtctgaaaaaagaaccaagaaaaggcgtttttgttttcaacaaactttactaaataaccgaacgcggagagcacgccatgaaggcctcgggcacgctacgagagtacaaggtagtgggtcgctgcctgcccacccccaaatgccacacgccgcccctctaccgcatgcgaatctttgcgcctaatcatgtcgtcgccaagtcccgcttctggtactttgtatctcagttaaagaagatgaagaagtcttcaggggagattgtctactgtgggcaggtgtttgagaagtcccccctgcgggtgaagaacttcgggatctggctgcgctatgactcccggagcggcacccacaacatgtaccgggaataccgggacctgaccaccgcaggcgctgtcacccagtgctaccgagacatgggtgcccggcaccgcgcccgagcccactccattcagatcatgaaggtggaggagatcgcggccagcaagtgccgccggccggctgtcaagcagttccacgactccaagatcaagttcccgctgccccaccgggtcctgcgccgtcagcacaagccacgcttcaccaccaagaggcccaacaccttcttctaggtgcagggccctcgtccgggtgtgccccaaataaactcaggaacgccccggtg

SEQ ID NO: 323073 - DNA, 652 bp, Homo sapiens
tagctagtgagctgggggttatcggcacgaggccttttgcgggtggcggcgaacgcggagagcacgccatgaaggcctcgggcacgctacgagagtacaaggtagtgggtcgctgcctgcccacccccaaatgccacacgccgcccctctaccgcatgcgaatctttgcgcctaatcatgtcgtcgccaagtcccgcttctggtactttgtatctcagttaaagaagatgaagaagtcttcaggggagattgtctactgtgggcaggtgtttgagaagtcccccctgcgggtgaagaacttcgggatctggctgcgctatgactcccggagcggcacccacaacatgtaccgggaataccgggacctgaccaccgcaggcgctgtcacccagtgctaccgagacatgggtgcccggcaccgcgcccgagcccactccattcagatcatgaaggtggaggagatcgcggccagcaagtgccgccggccggctgtcaagcagttccacgactccaagatcaagttcccgctgccccaccgggtcctgcgccgtcagcacaagccacgcttcaccaccaagaggcccaacaccttcttctaggtgcagggccctcgtccgggtgtgccccaaataaactcaggaacgccccggtg

SEQ ID NO: 323074 - DNA, 630 bp, Homo sapiens
  misc_feature (21)..(21): n is a, c, g, or t
acgataggctagtcgaggccnggggttcgaacgcggagagcacgccatgaaggcctcgggcacgctacgagagtacaaggtagtgggtcgctgcctgcccacccccaaatgccacacgccgcccctctaccgcatgcgaatctttgcgcctaatcatgtcgtcgccaagtcccgcttctggtactttgtatctcagttaaagaagatgaagaagtcttcaggggagattgtctactgtgggcaggtgtttgagaagtcccccctgcgggtgaagaacttcgggatctggctgcgctatgactcccggagcggcacccacaacatgtaccgggaataccgggacctgaccaccgcaggcgctgtcacccagtgctaccgagacatgggtgcccggcaccgcgcccgagcccactccattcagatcatgaaggtggaggagatcgcggccagcaagtgccgccggccggctgtcaagcagttccacgactccaagatcaagttcccgctgccccaccgggtcctgcgccgtcagcacaagccacgcttcaccaccaagaggcccaacaccttcttctaggtgcagggccctcgtccgggtgtgccccaaataaactcaggaacgccccggtg

SEQ ID NO: 323075 - DNA, 670 bp, Homo sapiens
  misc_feature (25)..(26): n is a, c, g, or t
ggtggagctcaaggatccttaattnnttaatcccccccccccccccccgcccttttgcgggtggcggcgaacgcggagagcacgccatgaaggcctcgggcacgctacgagagtacaaggtagtgggtcgctgcctgcccacccccaaatgccacacgccgcccctctaccgcatgcgaatctttgcgcctaatcatgtcgtcgccaagtcccgcttctggtactttgtatctcagttaaagaagatgaagaagtcttcaggggagattgtctactgtgggcaggtgtttgagaagtcccccctgcgggtgaagaacttcgggatctggctgcgctatgactcccggagcggcacccacaacatgtaccgggaataccgggacctgaccaccgcaggcgctgtcacccagtgctaccgagacatgggtgcccggcaccgcgcccgagcccactccattcagatcatgaaggtggaggagatcgcggccagcaagtgccgccggccggctgtcaagcagttccacgactccaagatcaagttcccgctgccccaccgggtcctgcgccgtcagcacaagccacgcttcaccaccaagaggcccaacaccttcttctaggtgcagggccctcgtccgggtgtgccccaaataaactcaggaacgccccggtg

SEQ ID NO: 323076 - DNA, 645 bp, Homo sapiens
  misc_feature (18)..(19): n is a, c, g, or t
cggacgcgtgggtcgacnnacgcgtccttttgcgggtggcggcgaacgcggagagcacgccatgaaggcctcgggcacgctacgagagtacaaggtagtgggtcgctgcctgcccacccccaaatgccacacgccgcccctctaccgcatgcgaatctttgcgcctaatcatgtcgtcgccaagtcccgcttctggtactttgtatctcagttaaagaagatgaagaagtcttcaggggagattgtctactgtgggcaggtgtttgagaagtcccccctgcgggtgaagaacttcgggatctggctgcgctatgactcccggagcggcacccacaacatgtaccgggaataccgggacctgaccaccgcaggcgctgtcacccagtgctaccgagacatgggtgcccggcaccgcgcccgagcccactccattcagatcatgaaggtggaggagatcgcggccagcaagtgccgccggccggctgtcaagcagttccacgactccaagatcaagttcccgctgccccaccgggtcctgcgccgtcagcacaagccacgcttcaccaccaagaggcccaacaccttcttctaggtgcagggccctcgtccgggtgtgccccaaataaactcaggaacgccccggtg

SEQ ID NO: 323077 - DNA, 653 bp, Homo sapiens
taaaaaaaaaaacttacggctaggtacgaggctccttttgcgggtggcggcgaacgcggagagcacgccatgaaggcctcgggcacgctacgagagtacaaggtagtgggtcgctgcctgcccacccccaaatgccacacgccgcccctctaccgcatgcgaatctttgcgcctaatcatgtcgtcgccaagtcccgcttctggtactttgtatctcagttaaagaagatgaagaagtcttcaggggagattgtctactgtgggcaggtgtttgagaagtcccccctgcgggtgaagaacttcgggatctggctgcgctatgactcccggagcggcacccacaacatgtaccgggaataccgggacctgaccaccgcaggcgctgtcacccagtgctaccgagacatgggtgcccggcaccgcgcccgagcccactccattcagatcatgaaggtggaggagatcgcggccagcaagtgccgccggccggctgtcaagcagttccacgactccaagatcaagttcccgctgccccaccgggtcctgcgccgtcagcacaagccacgcttcaccaccaagaggcccaacaccttcttctaggtgcagggccctcgtccgggtgtgccccaaataaactcaggaacgccccggtg

SEQ ID NO: 323078 - DNA, 615 bp, Homo sapiens
ggacgcgtgggtcgacccacgcgtcggacccacgcgtcgcggacgcgtgctacgagagtacaaggtagtgggtcgctgcctgcccacccccaaatgccacacgccgcccctctaccgcatgcgaatctttgcgcctaatcatgtcgtcgccaagtcccgcttctggtactttgtatctcagttaaagaagatgaagaagtcttcaggggagattgtctactgtgggcaggtgtttgagaagtcccccctgcgggtgaagaacttcgggatctggctgcgctatgactcccggagcggcacccacaacatgtaccgggaataccgggacctgaccaccgcaggcgctgtcacccagtgctaccgagacatgggtgcccggcaccgcgcccgagcccactccattcagatcatgaaggtggaggagatcgcggccagcaagtgccgccggccggctgtcaagcagttccacgactccaagatcaagttcccgctgccccaccgggtcctgcgccgtcagcacaagccacgcttcaccaccaagaggcccaacaccttcttctaggtgcagggccctcgtccgggtgtgccccaaataaactcaggaacgccccggtg

SEQ ID NO: 323079 - DNA, 845 bp, Homo sapiens
  misc_feature (677)..(677): n is a, c, g, or t
atcctgattaaatgtctgaaaaaagaaccaagaaaaggcgtttttgttttcaacaaactttactaaataaccgaacgcggagagcacgccatgaaggcctcgggcacgctacgagagtacaaggtagtgggtcgctgcctgcccacccccaaatgccacacgccgcccctctaccgcatgcgaatctttgcgcctaatcatgtcgtcgccaagtcccgcttctggtactttgtatctcagttaaagaagatgaagaagtcttcaggggagattgtctactgtgggcaggtgtttgagaagtcccccctgcgggtgaagaacttcgggatctggctgcgctatgactcccggagcggcacccacaacatgtaccgggaataccgggacctgaccaccgcaggcgctgtcacccagtgctaccgagacatgggtgcccggcaccgcgcccgagcccactccattcagatcatgaaggtggaggagatcgcggccagcaagtgccgccggccggctgtcaagcagttccacgactccaagatcaagttcccgctgccccaccgggtcctgcgccgtcagcacaagccacgcttcaccaccaagaggcccaacaccttcttctaggtgcagggccctcgtccgggtgtgccccaaataaactcaggaacgccccggtgggncaaacaaacggaaaaaaaaaagtgtgggccgactcgcgccggaaaacgttattaaacaatcgtgggggccggccccaggttgtgactggccaagggggcgagaacgggcgaaggggggttaccaaagagccggggacgggtgaaacaaggtggccggtaacggcggat

SEQ ID NO: 323080 - DNA, 738 bp, Homo sapiens
  misc_feature (716)..(716): n is a, c, g, or t
  misc_feature (734)..(734): n is a, c, g, or t
taaaaaaaaaaacttacggctaggtacgaggctccttttgcgggtggcggcgaacgcggagagcacgccatgaaggcctcgggcacgctacgagagtacaaggtagtgggtcgctgcctgcccacccccaaatgccacacgccgcccctctaccgcatgcgaatctttgcgcctaatcatgtcgtcgccaagtcccgcttctggtactttgtatctcagttaaagaagatgaagaagtcttcaggggagattgtctactgtgggcaggtgtttgagaagtcccccctgcgggtgaagaacttcgggatctggctgcgctatgactcccggagcggcacccacaacatgtaccgggaataccgggacctgaccaccgcaggcgctgtcacccagtgctaccgagacatgggtgcccggcaccgcgcccgagcccactccattcagatcatgaaggtggaggagatcgcggccagcaagtgccgccggccggctgtcaagcagttccacgactccaagatcaagttcccgctgccccaccgggtcctgcgccgtcagcacaagccacgcttcaccaccaagaggcccaacaccttcttctaggtgcagggccctcgtccgggtgtgccccaaataaactcaggaacgccccggtgaaaaaaaacacaaaaacaaaaaaaaaaaaaaaaaaaaaaaaaaaaaaccggggcgtttttttngggggggggaaaaagggnttta

SEQ ID NO: 323081 - DNA, 941 bp, Homo sapiens
tagctagtgagctgggggttatcggcacgaggccttttgcgggtggcggcgaacgcggagagcacgccatgaaggcctcgggcacgctacgagagtacaaggtagtgggtcgctgcctgcccacccccaaatgccacacgccgcccctctaccgcatgcgaatctttgcgcctaatcatgtcgtcgccaagtcccgcttctggtactttgtatctcagttaaagaagatgaagaagtcttcaggggagattgtctactgtgggcaggtgtttgagaagtcccccctgcgggtgaagaacttcgggatctggctgcgctatgactcccggagcggcacccacaacatgtaccgggaataccgggacctgaccaccgcaggcgctgtcacccagtgctaccgagacatgggtgcccggcaccgcgcccgagcccactccattcagatcatgaaggtggaggagatcgcggccagcaagtgccgccggccggctgtcaagcagttccacgactccaagatcaagttcccgctgccccaccgggtcctgcgccgtcagcacaagccacgcttcaccaccaagaggcccaacaccttcttctaggtgcagggccctcgtccgggtgtgccccaaataaactcaggaacgccccggtgaaaacacacacaatcgtcatgggctactcttcaatcagcacatatgcctcgtagtaacagcattctcatcaaaaccccctggaagttcaccggggccagtcaattctcatactcgcccaggggcttacatcctcattactattcgggcttagaaagtccagaatacagaacgcactcccaaggccggataataatctctctcaaggcgtcaaactgtattcccttaatagtcttggggactttaggaggcctcgtacttcgcttaaccccatttaactcagcgggcgcg

SEQ ID NO: 323082 - DNA, 883 bp, Homo sapiens
  misc_feature (671)..(671): n is a, c, g, or t
  misc_feature (675)..(675): n is a, c, g, or t
  misc_feature (689)..(689): n is a, c, g, or t
  misc_feature (705)..(705): n is a, c, g, or t
  misc_feature (707)..(707): n is a, c, g, or t
  misc_feature (716)..(716): n is a, c, g, or t
  misc_feature (728)..(729): n is a, c, g, or t
  misc_feature (732)..(732): n is a, c, g, or t
  misc_feature (736)..(736): n is a, c, g, or t
  misc_feature (741)..(741): n is a, c, g, or t
  misc_feature (743)..(743): n is a, c, g, or t
  misc_feature (746)..(746): n is a, c, g, or t
  misc_feature (752)..(752): n is a, c, g, or t
  misc_feature (754)..(755): n is a, c, g, or t
  misc_feature (759)..(759): n is a, c, g, or t
  misc_feature (762)..(762): n is a, c, g, or t
  misc_feature (764)..(766): n is a, c, g, or t
  misc_feature (776)..(776): n is a, c, g, or t
  misc_feature (778)..(778): n is a, c, g, or t
  misc_feature (785)..(785): n is a, c, g, or t
  misc_feature (795)..(796): n is a, c, g, or t
  misc_feature (804)..(804): n is a, c, g, or t
  misc_feature (806)..(806): n is a, c, g, or t
  misc_feature (813)..(813): n is a, c, g, or t
  misc_feature (820)..(820): n is a, c, g, or t
ggacgcgtgggtcgacccacgcgtcggacccacgcgtcgcggacgcgtgccttttgcgggtggcggcgaacgcggagagcacgccatgaaggcctcgggcacgctacgagagtacaaggtagtgggtcgctgcctgcccacccccaaatgccacacgccgcccctctaccgcatgcgaatctttgcgcctaatcatgtcgtcgccaagtcccgcttctggtactttgtatctcagttaaagaagatgaagaagtcttcaggggagattgtctactgtgggcaggtgtttgagaagtcccccctgcgggtgaagaacttcgggatctggctgcgctatgactcccggagcggcacccacaacatgtaccgggaataccgggacctgaccaccgcaggcgctgtcacccagtgctaccgagacatgggtgcccggcaccgcgcccgagcccactccattcagatcatgaaggtggaggagatcgcggccagcaagtgccgccggccggctgtcaagcagttccacgactccaagatcaagttcccgctgccccaccgggtcctgcgccgtcagcacaagccacgcttcaccaccaagaggcccaacaccttcttctaggtgcagggccctcgtccgggtgtgccccaaataaactcaggaacgccccggtgancccnccccaccccccccncccccccccccccccncnccccccccncccacccccccnnccncccnccccncnccncccccnannaccnccncnnncccccccccncnccccccncccccacacnnccccaccncncacaccnccccccnccccccccccccctccccgccacccaccccccccccctccccccccaccccccacccccctct

SEQ ID NO: 323083 - DNA, 913 bp, Homo sapiens
taaaaaaaaaaacttacggctaggtacgaggctcggtgtgtaattcggccgaggctactgtgggcaggtgtttgagaagtcccccctgcgggtgaagaacttcgggatctggctgcgctatgactcccggagcggcacccacaacatgtaccgggaataccgggacctgaccaccgcaggcgctgtcacccagtgctaccgagacatgggtgcccggcaccgcgcccgagcccactccattcagatcatgaaggtggaggagatcgcggccagcaagtgccgccggccggctgtcaagcagttccacgactccaagatcaagttcccgctgccccaccgggtcctgcgccgtcagcacaagccacgcttcaccaccaagaggcccaacaccttcttctaggtgcagggccctcgtccgggtgtgccccaaataaactcaggaacgccccggtgcggtgctcgccgcatgttttctttgcacactgcagagctcaaaggggtgctatgagaggccggcccagtcagctcctggggtgcagctgagctgccatttctttgtcctgggaggggtcttcagtgcaaacaaacaaaccctcacatcctcctgtcctggagtgggccctccaggcgcccccacccctgagctccctcttgcttggtcagttctcagccctgctggcagccctgggctatgagctgcaggggtactgtctgtcctgggccctaaatctgtcccaactgccttgtgagacacaggcctcccaggctcccctgctgagtctggaccagggagaatctccctagatagtggggttggcgttcactccctggggattctcctaagtctctggttcccaaagttttcagagtagacacaagtgggcacccgaggggcgctctctgctgcttgggg

SEQ ID NO: 323084 - DNA, 453 bp, Homo sapiens
gcggccgcctactactactactgctcgaattcaagcttctaacgatgtacggggatgtaccgggaataccgggacctgaccaccgcaggcgctgtcacccagtgctaccgagacatgggggaaatcgccagcttcgataaggccaagctgaagaaaacggagacgcaggagaagaacaccctgccgaccaaagagaccattgagcaggagaagcggagtgaaatttcctaagatcctggaggatttcctacccccgtcctcttcgagaccccagtcgtgatgtggaggaagagccacctgcaagatggacacgagccacaagctgcactgtgaacctggggcactcgcgccgatgccaccggcctgtgggtctctgaagggacccccccccaatcggactgccaaattctccggtttgccccgggatattatagaaaattatttgtatgaata

SEQ ID NO: 323085 - DNA, 191 bp, Homo sapiens
gcggccgcctactactactactgctcgaattcaagcttctaacgatgtacggggatgtaccgggaataccgggacctgaccaccgcaggcgctgtcacccagtgctaccgagacatgccccctgccctcgcctggaatcagtgttactgcatctgattaaatgtctccagaaataaagaataattctgcca

SEQ ID NO: 323086 - DNA, 349 bp, Homo sapiens
gcatcctgctgtgactctagagtatcccctgtccggttcgggaaataccgcgactgatcacacgttaccgggcgtcacccagcagtcatgatagctgtgtgccgtgagtcgctcccgaggtcattacttgcaaatcctcgtaagcgaaggtggaggagatcgcggccagcaagtgccgccggccggctgtcaagcagttccacgactccaagatcaagttcccgctgccccaccgggtcctgcgccgtcagcacaagccacgcttcaccaccaagaggcccaacaccttcttctaggtgcagggccctcgtccgggtgtgccccaaataaactcaggaacgccccggtg

SEQ ID NO: 323087 - DNA, 678 bp, Homo sapiens
  misc_feature (12)..(12): n is a, c, g, or t
  misc_feature (16)..(16): n is a, c, g, or t
tcggcacgagcncgtncgaattcgtgcacgacctcgggcacgctacgagagtacaaggtagtgggtcgctgcctgcccacccccaaatgccacacgccgcccctctaccgcatgcgaatctttgcgcctaatcatgtcgtcgccaagtcccgcttctggtactttgtatctcagttaaagaagatgaagaagtcttcaggggagattgtctactgtgggcaggtgtttgagaagtcccccctgcgggtgaagaacttcgggatctggctgcgctatgactcccggagcggcacccacaacatgtaccgggaataccgggacctgaccaccgcaggcgctgtcacccagtgctaccgagacatgggtgcccggcaccgcgcccgagcccactccattcagatcatgaaggtggaggagatcgcggccagcaagtgccgccggccggctgtcaagcagttccacgactccaagatcaagttcccgctgccccaccgggtcctgcgccgtcagcacaagccacgcttcaccaccaagaggcccaacaccttcttctaggtgcagggccctcgtccgggtgtgccccaaataaactcaggaacgccccggtgtctcagagcctgtggtgggggtggtgtggtgttggtgtgggttggggggtgggggggggtgtggtggtta

SEQ ID NO: 323088 - DNA, 930 bp, Homo sapiens
gcatgaggcacgtacaggcagaggattaattaggttttcagtttcagtttcccagaaaggaggtgggctttttttttcaccctgctttaaaagcccttgggcccttcccagctgggtgccagccaactgtggctgcctgggacactccatcttaagtccctgtgcctctgctgtgtgttactgagtgcctaggccgtgccagcctgtattcatctgtactatgacctgaagaggcagaggccatcactgttggtccggtctccacctggggaaactgaggtgtctctgtggtgacgagcagggcttcatccagtgcctctgtccccaccgaggggactatgggagacatggagggtgtgtgagcaacaggtgagactggagccagctgaaaactgggagaccgacccagccaacaaacaatgtcggtctctgtcttggcacctgcaggaaacaagctcctacttccagaaaaagtgctcctgggactccaggataccagagacgcggtggtacatgcctgtaatcccaacacttaggcaggaggatcactcgagcccagaagatcaagactagtgtgagcaacaaaatccttccctggcaccggttccaggaggacctcgttcttaggcagcatctgtgtctctgtttgtaagacacacagagtatccttaacccactgcagatatttccctgggtccacggtcaatcaacaccacctttcagtctccagcctcttaaccagcccagggctgagtgttgtttatagtattaatatgtttctggctgggctcagtggctcatgcctgtaatcccggcactatgggaggctgaggcaggcggatcacttgaggtcaggagttcaagaccagcctggccaacatagtaaaaccccgtctctactaaaaatacaaaatgagccgggtgtggtgg

SEQ ID NO: 323089 - DNA, 1003 bp, Homo sapiens
ttccggcggaagttgctgggcgcggaaagccggcaagacctttttttccgccatcatcgctcacgcgcgcaaccctggcgacgcgtggtggcgaggctccgcctccccacgccattggccagcagctcctcgggcacgcgtatactgcgcttccgggcaatctccgccccccccccccgcatggccttctgggagttgtagttcggtcgcgagcgctgccgtcgggaggcgctccgaggttcgaggctgtgccccgcgaccccgccttcggcgctcggctcgcaggatggatcccgtacccgggacagactcggcgccgctggctggcctggcctggtcgtcggcctctgcacccccgccgcgggggttcagcgcgatctcctgcaccgtcgagggggcacccgccagctttggcaagagcttcgcgcagaaatctggctacttcctgtgccttagttctctgggcagcctagagaacccgcaggagaacgtggtggccgatatccagatcgtggtggacaagagccccctgccgctgggcttctcccccgtctgcgaccccatggattccagctttgcacacgccgcttcctctgcctggggcactttttctctcctttttgtagctcattctccgtcctccgtcagatgtcaccttcacccttccctacccctcctcttctgggcccacaaccctagtgcagccctgggcgacagagtgagactctgtctcaaaaagaaaagaaaagaaaacagaccttgagccagatttggctcatgggtgctagttgtccaacctctataggattagagggctcacggaaagtaagttttgagggccacgatgggcacccagctctgtccgattccacagctagccaccccatgaatgcagcttcatatcaccaaagatcagcctactccagcggttcctaaaggctgcatggaatcccctccttcatctataccattcatgatttaaccactcctcccaccccatccc

SEQ ID NO: 323090 - DNA, 1270 bp, Homo sapiens
  misc_feature (1057)..(1057): n is a, c, g, or t
  misc_feature (1080)..(1080): n is a, c, g, or t
  misc_feature (1083)..(1083): n is a, c, g, or t
  misc_feature (1089)..(1089): n is a, c, g, or t
  misc_feature (1091)..(1091): n is a, c, g, or t
  misc_feature (1097)..(1097): n is a, c, g, or t
  misc_feature (1106)..(1106): n is a, c, g, or t
  misc_feature (1110)..(1111): n is a, c, g, or t
ttccggcggaagttgctgggcgcggaaagccggcaagacctttttttccgccatcatcgctcacgcgcgcaaccctggcgacgcgtggtggcgaggctccgcctccccacgccattggccagcagctcctcgggcacgcgtatactgcgcttccgggcaatctccgccccccccccccgcatggccttctgggagttgtagttcggtcgcgagcgctgccgtcgggaggcgctccgaggttcgaggctgtgccccgcgaccccgccttcggcgctcggctcgcaggatggatcccgtacccgggacagactcggcgccgctggctggcctggcctggtcgtcggcctctgcacccccgccgcgggggttcagcgcgatctcctgcaccgtcgagggggcacccgccagctttggcaagagcttcgcgcagaaatctggctacttcctgtgccttagttctctgggcagcctagagaacccgcaggagaacgtggtggccgatatccagatcgtggtggacaagagccccctgccgctgggcttctcccccgtctgcgaccccatggattccaaggcctctgtgtccaagaagaaacgcatgtgtgtgaagctgttgcccctgggagccacggacacggctgtgtttgatgtccggctgagtgggaagaccaagacagtgcctggataccttcgaataggggacatgggcggctttgccatctggtgcaagaaggccaaggccccgaggccagtgcccaagccccgaggtctcagccgggacatgcagggcctctctctggatgcagccagccagccaagtaagggcggcctcctggagcggacagcgtcaaggctgggctctcgggcatccactctgcggaggaatgactccatctacgaggcctccagcctctatggcatctcagccatggatggggttcccttcacactccacccacgatttgagggcaagagctgcagccccctggccttctctgcttttggggacctgaccatcaagtctctggcggacattgaggaggagtataactacggntcgggtggagaaaccgggtgccngcngccccnangttatntcctcaccntcgnnaaaaggcctaacacaccgaatgggcacaccccacagatactgggactcacgagtgtttaccaggggaatagaggcgagaaagagaatacccaccgggtggacaaaatgtaaaggagggggtaacaaaacaagtggaagcttaacgcaacatcaagttac

SEQ ID NO: 323091 - DNA, 1415 bp, Homo sapiens
ttccggcggaagttgctgggcgcggaaagccggcaagacctttttttccgccatcatcgctcacgcgcgcaaccctggcgacgcgtggtggcgaggctccgcctccccacgccattggccagcagctcctcgggcacgcgtatactgcgcttccgggcaatctccgccccccccccccgcatggccttctgggagttgtagttcggtcgcgagcgctgccgtcgggaggcgctccgaggttcgaggctgtgccccgcgaccccgccttcggcgctcggctcgcaggatggatcccgtacccgggacagactcggcgccgctggctggcctggcctggtcgtcggcctctgcacccccgccgcgggggttcagcgcgatctcctgcaccgtcgagggggcacccgccagctttggcaagagcttcgcgcagaaatctggctacttcctgtgccttagttctctgggcagcctagagaacccgcaggagaacgtggtggccgatatccagatcgtggtggacaagagccccctgccgctgggcttctcccccgtctgcgaccccatggattccaaggcctctgtgtccaagaagaaacgcatgtgtgtgaagctgttgcccctgggagccacggacacggctgtgtttgatgtccggctgagtgggaagaccaagacagtgcctggataccttcgaataggggacatgggcggctttgccatctggtgcaagaaggccaaggccccgaggccagtgcccaagccccgaggtctcagccgggacatgcagggcctctctctggatgcagccagccagccaagtaagggcggcctcctggagcggacagcgtcaaggctgggctctcgggcatccactctgcggaggaatgactccatctacgaggcctccagcctctatggcatctcagccatggatggggttcccttcacactccacccacgatttgagggcaagagctgcagccccctggccttctctgcttttggggacctgaccatcaagtctctggcggacattgaggaggagtataactacggcttcgtggtggagaagaccgcggctgcccgcctgccccccagcgtctcatagtccctcacccttccgcggaaagagcccccttactccacctccccgccagcctggggccacccactgcatcctgggaaccttcgccctgcaaggcgtttgctatcttcagccactgggcggagctgcagccctggaggagggggcgggtcgaggctgcgtggtgatggggtctccgcccccacgccctgccgggcagggctggagctggacagaagccagtgcctttaagtcatttgtgtcaaaaccctctggggtccggaggctgtgcgggtgtcctcctggcaataaacactacccggttctcgcc

SEQ ID NO: 323092 - DNA, 1014 bp, Homo sapiens
atcctgattaaatgtctgaaaaaagaaccaagaaaaggcgtttttgttttcaacaaactttactaaataaccgaacgcggagagcacgccatgaaggcctcgggcacgctacgagagtacaaggtagtgggtcgctgcctgcccacccccaaatgccacacgccgcccctctaccgcatgcgaatctttgcgcctaatcatgtcgtcgccaagtcccgcttctggtactttgtatctcagttaaagaagatgaagaagtcttcaggggagattgtctactgtgggcaggtgtttgagaagtcccccctgcgggtgaagaacttcgggatctggctgcgctatgactcccggagcggcacccacaacatgtaccgggaataccgggacctgaccaccgcaggcgctgtcacccagtgctaccgagacatgggtgcccggcaccgcgcccgagcccactccattcagatcatgaaggtggaggagatcgcggccagcaagtgccgccggccggctgtcaagcagttccacgactccaagatcaagttcccgctgccccaccgggtcctgcgccgtcagcacaagccacgcttcaccaccaagaggcccaacaccttcttctaggtgcagggccctcgtccgggtgtgccccaaataaactcaggaacgccccggtgaaaaaaaaaaaaaaaaaaaaaaacaaaaaaaaaaaaaaaaaaaaaaaacaaaaaaaaaaaacaaacaaaggggggccacggaactaagaaatacaccgcagggggggcgaacagataggacgcgagcacaccaggttgtaggagacaaaacgagaggggcccccaagtgacaggggagccgagcacatacagaaaggaacaggcagcgggagcgcatgaagctgcaaaccaaccgacgtcaggggcgggagcaccccagggccagcgggacacaccgaggggcagcgcaccccaacacaagggggggggggagaacacatggggggcgccacatccacaa

SEQ ID NO: 323093 - DNA, 1106 bp, Homo sapiens
atcctgattaaatgtctgaaaaaagaaccaagaaaaggcgtttttgttttcaacaaactttactaaataaccgaacgcggagagcacgccatgaaggcctcgggcacgctacgagagtacaaggtagtgggtcgctgcctgcccacccccaaatgccacacgccgcccctctaccgcatgcgaatctttgcgcctaatcatgtcgtcgccaagtcccgcttctggtactttgtatctcagttaaagaagatgaagaagtcttcaggggagattgtctactgtgggcaggtgtttgagaagtcccccctgcgggtgaagaacttcgggatctggctgcgctatgactcccggagcggcacccacaacatgtaccgggaataccgggacctgaccaccgcaggcgctgtcacccagtgctaccgagacatgggtgcccggcaccgcgcccgagcccactccattcagatcatgaaggtggaggagatcgcggccagcaagtgccgccggccggctgtcaagcagttccacgactccaagatcaagttcccgctgccccaccgggtcctgcgccgtcagcacaagccacgcttcaccaccaagaggcccaacaccttcttctaggtgcagggccctcgtccgggtgtgccccaaataaactcaggaacgccccggtgaaaaaaaaaaaaaaaaaaaaaaacaaaaaaaaaaaaaaaaaaaaaaaacaaaaaaaaaaaaaaaaaaaacaagaggggagcggcgccacaggtgaaacgtcggcggaggagagggggatctgtggccgcgcggacgtggcgggcggggcacaaggaggtggagggagagtaaagggggcggaggggtggcgtgacatggggggacacggcggacgatgcaaggagggcgcgccggggcatgagggaggcggaggagaaaaggagacggtcggacgcagccacggacgaaggcagccaaatcgacagcgaggcacaacgaccaacagagggcgataccacgaggcaggagcgggacatcgggagggacacaagcgggccgtccacagccgcgccggaaaacacggcacctggacagagaagagcacacgcgtg

SEQ ID NO: 323094 - DNA, 949 bp, Homo sapiens
  misc_feature (798)..(798): n is a, c, g, or t
atcctgattaaatgtctgaaaaaagaaccaagaaaaggcgtttttgttttcaacaaactttactaaataaccgaacgcggagagcacgccatgaaggcctcgggcacgctacgagagtacaaggtagtgggtcgctgcctgcccacccccaaatgccacacgccgcccctctaccgcatgcgaatctttgcgcctaatcatgtcgtcgccaagtcccgcttctggtactttgtatctcagttaaagaagatgaagaagtcttcaggggagattgtctactgtgggcaggtgtttgagaagtcccccctgcgggtgaagaacttcgggatctggctgcgctatgactcccggagcggcacccacaacatgtaccgggaataccgggacctgaccaccgcaggcgctgtcacccagtgctaccgagacatgggtgcccggcaccgcgcccgagcccactccattcagatcatgaaggtggaggagatcgcggccagcaagtgccgccggccggctgtcaagcagttccacgactccaagatcaagttcccgctgccccaccgggtcctgcgccgtcagcacaagccacgcttcaccaccaagaggcccaacaccttcttctaggtgcagggccctcgtccgggtgtgccccaaataaactcaggaacgccccggtgaaaaaaaaaaaaaaaaaaaaaaacccccgggggcctctctatattcggggggcgcggagaaaaagaggggtatctaaaagggcgccctgggcgccaaagggtgtgttcctcgtgaacccccganttttttcttgtgtcaccaaggtcggtgaaacacggggccggggcacccccataagagggaggcggcgtattaacatcgcggaaaacgccgcgggttaaccccggctttaatgaagcttcccgcaaaaccttccaccaccgtgcagccccgc

SEQ ID NO: 323095 - DNA, 718 bp, Homo sapiens
aacaacttatatagtgtgtaaggaactcaagagaaaccagtgagcgagcctttatgtgaaccactgaaacaatctcttaaaaataaggcaattcttttctaagtcaaattcatctcgtgccgaatcggcacgaggtgaaggcctcgggcacgctacgagagtacaaggtagtgggtcgctgcctgcccacccccaaatgccacacgccgcccctctaccgcatgcgaatctttgcgcctaatcatgtcgtcgccaagtcccgcttctggtactttgtatctcagttaaagaagatgaagaagtcttcaggggagattgtctactgtgggcaggtgtttgagaagtcccccctgcgggtgaagaacttcgggatctggctgcgctatgactcccggagcggcacccacaacatgtaccgggaataccgggacctgaccaccgcaggcgctgtcacccagtgctaccgagacatgggtgcccggcaccgcgcccgagcccactccattcagatcatgaaggtggaggagatcgcggccagcaagtgccgccggccggctgtcaagcagttccacgactccaagatcaagttcccgctgccccaccgggtcctgcgccgtcagcacaagccacgcttcaccaccaagaggcccaacaccttcttctaggtgcagggccctcgtccgggtgtgccccaaataaactcaggaacgccccggtg

SEQ ID NO: 323096 - DNA, 842 bp, Homo sapiens
atcctgattaaatgtctgaaaaaagaaccaagaaaaggcgtttttgttttcaacaaactttactaaataaccgaacgcggagagcacgccatgaaggcctcgggcacgctacgagagtacaaggtagtgggtcgctgcctgcccacccccaaatgccacacgccgcccctctaccgcatgcgaatctttgcgcctaatcatgtcgtcgccaagtcccgcttctggtactttgtatctcagttaaagaagatgaagaagtcttcaggggagattgtctactgtgggcaggtgtttgagaagtcccccctgcgggtgaagaacttcgggatctggctgcgctatgactcccggagcggcacccacaacatgtaccgggaataccgggacctgaccaccgcaggcgctgtcacccagtgctaccgagacatgggtgcccggcaccgcgcccgagcccactccattcagatcatgaaggtggaggagatcgcggccagcaagtgccgccggccggctgtcaagcagttccacgactccaagatcaagttcccgctgccccaccgggtcctgcgccgtcagcacaagccacgcttcaccaccaagaggcccaacaccttcttctaggtgcagggccctcgtccgggtgtgccccaaataaactcaggaacgccccggtgaaaaaacaaaaaaaaaaaaaaacaaaaaaaaaaaaaaaaaaaaaaaaaacaaaaaaaaagggggggggggccaaaaaacaaataccccagggggggccaccaaaagagaaacacacaccattatattggagaaaaagaggggcgccacaaagggagcggcaaaaaaga

SEQ ID NO: 323097 - DNA, 759 bp, Homo sapiens
  misc_feature (737)..(737): n is a, c, g, or t
  misc_feature (755)..(755): n is a, c, g, or t
atcctgattaaatgtctgaaaaaagaaccaagaaaaggcgtttttgttttcaacaaactttactaaataaccgaacgcggagagcacgccatgaaggcctcgggcacgctacgagagtacaaggtagtgggtcgctgcctgcccacccccaaatgccacacgccgcccctctaccgcatgcgaatctttgcgcctaatcatgtcgtcgccaagtcccgcttctggtactttgtatctcagttaaagaagatgaagaagtcttcaggggagattgtctactgtgggcaggtgtttgagaagtcccccctgcgggtgaagaacttcgggatctggctgcgctatgactcccggagcggcacccacaacatgtaccgggaataccgggacctgaccaccgcaggcgctgtcacccagtgctaccgagacatgggtgcccggcaccgcgcccgagcccactccattcagatcatgaaggtggaggagatcgcggccagcaagtgccgccggccggctgtcaagcagttccacgactccaagatcaagttcccgctgccccaccgggtcctgcgccgtcagcacaagccacgcttcaccaccaagaggcccaacaccttcttctaggtgcagggccctcgtccgggtgtgccccaaataaactcaggaacgccccggtgaaaaaaaacacaaaaacaaaaaaaaaaaaaaaaaaaaaaaaaaaaaaccggggcgtttttttngggggggggaaaaagggnttta

SEQ ID NO: 323098 - DNA, 857 bp, Homo sapiens
atcctgattaaatgtctgaaaaaagaaccaagaaaaggcgtttttgttttcaacaaactttactaaataaccgaacgcggagagcacgccatgaaggcctcgggcacgctacgagagtacaaggtagtgggtcgctgcctgcccacccccaaatgccacacgccgcccctctaccgcatgcgaatctttgcgcctaatcatgtcgtcgccaagtcccgcttctggtactttgtatctcagttaaagaagatgaagaagtcttcaggggagattgtctactgtgggcaggtgtttgagaagtcccccctgcgggtgaagaacttcgggatctggctgcgctatgactcccggagcggcacccacaacatgtaccgggaataccgggacctgaccaccgcaggcgctgtcacccagtgctaccgagacatgggtgcccggcaccgcgcccgagcccactccattcagatcatgaaggtggaggagatcgcggccagcaagtgccgccggccggctgtcaagcagttccacgactccaagatcaagttcccgctgccccaccgggtcctgcgccgtcagcacaagccacgcttcaccaccaagaggcccaacaccttcttctaggtgcagggccctcgtccgggtgtgccccaaataaactcaggaacgccccggtgaaaaaaaacacaaacaaagagacaacaaaaaaaaaaaacagaacaaaaagaaaaagagagggagaaaaagaacaaagaggaccagaagcagaccagaagtagcagaagacacaagggaggaaagagaacgagggggagaaaagagagggaaacagagaggactagggagagaaagtggacgaa

SEQ ID NO: 323099 - DNA, 963 bp, Homo sapiens
atcctgattaaatgtctgaaaaaagaaccaagaaaaggcgtttttgttttcaacaaactttactaaataaccgaacgcggagagcacgccatgaaggcctcgggcacgctacgagagtacaaggtagtgggtcgctgcctgcccacccccaaatgccacacgccgcccctctaccgcatgcgaatctttgcgcctaatcatgtcgtcgccaagtcccgcttctggtactttgtatctcagttaaagaagatgaagaagtcttcaggggagattgtctactgtgggcaggtgtttgagaagtcccccctgcgggtgaagaacttcgggatctggctgcgctatgactcccggagcggcacccacaacatgtaccgggaataccgggacctgaccaccgcaggcgctgtcacccagtgctaccgagacatgggtgcccggcaccgcgcccgagcccactccattcagatcatgaaggtggaggagatcgcggccagcaagtgccgccggccggctgtcaagcagttccacgactccaagatcaagttcccgctgccccaccgggtcctgcgccgtcagcacaagccacgcttcaccaccaagaggcccaacaccttcttctaggtgcagggccctcgtccgggtgtgccccaaataaactcaggaacgccccggtgaaaacacacacaatcgtcatgggctactcttcaatcagcacatatgcctcgtagtaacagcattctcatcaaaaccccctggaagttcaccggggccagtcaattctcatactcgcccaggggcttacatcctcattactattcgggcttagaaagtccagaatacagaacgcactcccaaggccggataataatctctctcaaggcgtcaaactgtattcccttaatagtcttggggactttaggaggcctcgtacttcgcttaaccccatttaactcagcgggcgcg

SEQ ID NO: 323100 - DNA, 870 bp, Homo sapiens
  misc_feature (714)..(714): n is a, c, g, or t
  misc_feature (718)..(718): n is a, c, g, or t
  misc_feature (722)..(722): n is a, c, g, or t
  misc_feature (724)..(725): n is a, c, g, or t
  misc_feature (735)..(735): n is a, c, g, or t
  misc_feature (741)..(741): n is a, c, g, or t
  misc_feature (750)..(750): n is a, c, g, or t
atcctgattaaatgtctgaaaaaagaaccaagaaaaggcgtttttgttttcaacaaactttactaaataaccgaacgcggagagcacgccatgaaggcctcgggcacgctacgagagtacaaggtagtgggtcgctgcctgcccacccccaaatgccacacgccgcccctctaccgcatgcgaatctttgcgcctaatcatgtcgtcgccaagtcccgcttctggtactttgtatctcagttaaagaagatgaagaagtcttcaggggagattgtctactgtgggcaggtgtttgagaagtcccccctgcgggtgaagaacttcgggatctggctgcgctatgactcccggagcggcacccacaacatgtaccgggaataccgggacctgaccaccgcaggcgctgtcacccagtgctaccgagacatgggtgcccggcaccgcgcccgagcccactccattcagatcatgaaggtggaggagatcgcggccagcaagtgccgccggccggctgtcaagcagttccacgactccaagatcaagttcccgctgccccaccgggtcctgcgccgtcagcacaagccacgcttcaccaccaagaggcccaacaccttcttctaggtgcagggccctcgtccgggtgtgccccaaataaactcaggaacgccccggtgcaaaaaacagaacacaaaccaaaacaaaaactgtggggcncctncccngnnaaaagtttanaaccancgtggggcngggccccacagggaaagacagaggacaaggggccacaagaacaggggcggcaggggggtgtccacaataaaagcggggacagaggtctgacaacagagaggccgggcaagggctcaaggc

SEQ ID NO: 323101 - DNA, 748 bp, Homo sapiens
  misc_feature (726)..(726): n is a, c, g, or t
  misc_feature (744)..(744): n is a, c, g, or t
atcctgattaaatgtctgaaaaaagaaccaagaaaaggcgtttttgttttcaacaaactttactaaataaccgaacgcggagagcacgccatgaaggcctcgggcacgctacgagagtacaaggtagtgggtcgctgcctgcccacccccaaatgccacacgccgcccctctaccgcatgcgaatctttgcgcctaatcatgtcgtcgccaagtcccgcttctggtactttgtatctcagttaaagaagatgaagaagtcttcaggggagattgtctactgtgggcaggtgtttgagaagtcccccctgcgggtgaagaacttcgggatctggctgcgctatgactcccggagcggcacccacaacatgtaccgggaataccgggacctgaccaccgcaggcgctgtcacccagtgctaccgagacatgggtgcccggcaccgcgcccgagcccactccattcagatcatgaaggtggaggagatcgcggccagcaagtgccgccggccggctgtcaagcagttccacgactccaagatcaagttcccgctgccccaccgggtcctgcgccgtcagcacaagccacgcttcaccaccaagaggcccaacaccttcttctaggtgcagggccctcgtccgggtgtgccccaaataaactcaggaacgccccggtgaaaaaaaaaaacaaaaacaagaacaaaaacaaaaaaccggggcgtttttttngggggggggaaaaagggnttta

SEQ ID NO: 323102 - DNA, 873 bp, Homo sapiens
atcctgattaaatgtctgaaaaaagaaccaagaaaaggcgtttttgttttcaacaaactttactaaataaccgaacgcggagagcacgccatgaaggcctcgggcacgctacgagagtacaaggtagtgggtcgctgcctgcccacccccaaatgccacacgccgcccctctaccgcatgcgaatctttgcgcctaatcatgtcgtcgccaagtcccgcttctggtactttgtatctcagttaaagaagatgaagaagtcttcaggggagattgtctactgtgggcaggtgtttgagaagtcccccctgcgggtgaagaacttcgggatctggctgcgctatgactcccggagcggcacccacaacatgtaccgggaataccgggacctgaccaccgcaggcgctgtcacccagtgctaccgagacatgggtgcccggcaccgcgcccgagcccactccattcagatcatgaaggtggaggagatcgcggccagcaagtgccgccggccggctgtcaagcagttccacgactccaagatcaagttcccgctgccccaccgggtcctgcgccgtcagcacaagccacgcttcaccaccaagaggcccaacaccttcttctaggtgcagggccctcgtccgggtgtgccccaaataaactcaggaacgccccggtgtaacaaaaaaaaaaacaaaaaaaataaaaaaaaaaaaaaaaaaaaaaaaaaaaaacaaaaaaaaaaaaaaaaaaaaaaaacaaaaaaaaagggggggggggccaaaaaacaaataccccagggggggccaccaaaagagaaacacacaccattatattggagaaaaagaggggcgccacaaagggagcggcaaaaaaga

SEQ ID NO: 323103 - DNA, 737 bp, Homo sapiens
  misc_feature (715)..(715): n is a, c, g, or t
  misc_feature (733)..(733): n is a, c, g, or t
tagctagtgagctgggggttatcggcacgaggccttttgcgggtggcggcgaacgcggagagcacgccatgaaggcctcgggcacgctacgagagtacaaggtagtgggtcgctgcctgcccacccccaaatgccacacgccgcccctctaccgcatgcgaatctttgcgcctaatcatgtcgtcgccaagtcccgcttctggtactttgtatctcagttaaagaagatgaagaagtcttcaggggagattgtctactgtgggcaggtgtttgagaagtcccccctgcgggtgaagaacttcgggatctggctgcgctatgactcccggagcggcacccacaacatgtaccgggaataccgggacctgaccaccgcaggcgctgtcacccagtgctaccgagacatgggtgcccggcaccgcgcccgagcccactccattcagatcatgaaggtggaggagatcgcggccagcaagtgccgccggccggctgtcaagcagttccacgactccaagatcaagttcccgctgccccaccgggtcctgcgccgtcagcacaagccacgcttcaccaccaagaggcccaacaccttcttctaggtgcagggccctcgtccgggtgtgccccaaataaactcaggaacgccccggtgaaaaaaaacacaaaaacaaaaaaaaaaaaaaaaaaaaaaaaaaaaaaccggggcgtttttttngggggggggaaaaagggnttta

SEQ ID NO: 323104 - DNA, 743 bp, Homo sapiens
  misc_feature (721)..(721): n is a, c, g, or t
  misc_feature (739)..(739): n is a, c, g, or t
ggacgcgtgggtcgacccacgcgtcggacccacgcgtcgcggacgcgtgccttttgcgggtggcggcgaacgcggagagcacgccatgaaggcctcgggcacgctacgagagtacaaggtagtgggtcgctgcctgcccacccccaaatgccacacgccgcccctctaccgcatgcgaatctttgcgcctaatcatgtcgtcgccaagtcccgcttctggtactttgtatctcagttaaagaagatgaagaagtcttcaggggagattgtctactgtgggcaggtgtttgagaagtcccccctgcgggtgaagaacttcgggatctggctgcgctatgactcccggagcggcacccacaacatgtaccgggaataccgggacctgaccaccgcaggcgctgtcacccagtgctaccgagacatgggtgcccggcaccgcgcccgagcccactccattcagatcatgaaggtggaggagatcgcggccagcaagtgccgccggccggctgtcaagcagttccacgactccaagatcaagttcccgctgccccaccgggtcctgcgccgtcagcacaagccacgcttcaccaccaagaggcccaacaccttcttctaggtgcagggccctcgtccgggtgtgccccaaataaactcaggaacgccccggtgaaaaaaaaaaacaaaaacaagaacaaaaacaaaaaaccggggcgtttttttngggggggggaaaaagggnttta

SEQ ID NO: 323105 - DNA, 848 bp, Homo sapiens
  misc_feature (692)..(692): n is a, c, g, or t
  misc_feature (696)..(696): n is a, c, g, or t
  misc_feature (700)..(700): n is a, c, g, or t
  misc_feature (702)..(703): n is a, c, g, or t
  misc_feature (713)..(713): n is a, c, g, or t
  misc_feature (719)..(719): n is a, c, g, or t
  misc_feature (728)..(728): n is a, c, g, or t
tagctagtgagctgggggttatcggcacgaggccttttgcgggtggcggcgaacgcggagagcacgccatgaaggcctcgggcacgctacgagagtacaaggtagtgggtcgctgcctgcccacccccaaatgccacacgccgcccctctaccgcatgcgaatctttgcgcctaatcatgtcgtcgccaagtcccgcttctggtactttgtatctcagttaaagaagatgaagaagtcttcaggggagattgtctactgtgggcaggtgtttgagaagtcccccctgcgggtgaagaacttcgggatctggctgcgctatgactcccggagcggcacccacaacatgtaccgggaataccgggacctgaccaccgcaggcgctgtcacccagtgctaccgagacatgggtgcccggcaccgcgcccgagcccactccattcagatcatgaaggtggaggagatcgcggccagcaagtgccgccggccggctgtcaagcagttccacgactccaagatcaagttcccgctgccccaccgggtcctgcgccgtcagcacaagccacgcttcaccaccaagaggcccaacaccttcttctaggtgcagggccctcgtccgggtgtgccccaaataaactcaggaacgccccggtgcaaaaaacagaacacaaaccaaaacaaaaactgtggggcncctncccngnnaaaagtttanaaccancgtggggcngggccccacagggaaagacagaggacaaggggccacaagaacaggggcggcaggggggtgtccacaataaaagcggggacagaggtctgacaacagagaggccgggcaagggctcaaggc

SEQ ID NO: 323106 - DNA, 866 bp, Homo sapiens
  misc_feature (654)..(654): n is a, c, g, or t
  misc_feature (658)..(658): n is a, c, g, or t
  misc_feature (672)..(672): n is a, c, g, or t
  misc_feature (688)..(688): n is a, c, g, or t
  misc_feature (690)..(690): n is a, c, g, or t
  misc_feature (699)..(699): n is a, c, g, or t
  misc_feature (711)..(712): n is a, c, g, or t
  misc_feature (715)..(715): n is a, c, g, or t
  misc_feature (719)..(719): n is a, c, g, or t
  misc_feature (724)..(724): n is a, c, g, or t
  misc_feature (726)..(726): n is a, c, g, or t
  misc_feature (729)..(729): n is a, c, g, or t
  misc_feature (735)..(735): n is a, c, g, or t
  misc_feature (737)..(738): n is a, c, g, or t
  misc_feature (742)..(742): n is a, c, g, or t
  misc_feature (745)..(745): n is a, c, g, or t
  misc_feature (747)..(749): n is a, c, g, or t
  misc_feature (759)..(759): n is a, c, g, or t
  misc_feature (761)..(761): n is a, c, g, or t
  misc_feature (768)..(768): n is a, c, g, or t
  misc_feature (778)..(779): n is a, c, g, or t
  misc_feature (787)..(787): n is a, c, g, or t
  misc_feature (789)..(789): n is a, c, g, or t
  misc_feature (796)..(796): n is a, c, g, or t
  misc_feature (803)..(803): n is a, c, g, or t
tagctagtgagctgggggttatcggcacgaggccttttgcgggtggcggcgaacgcggagagcacgccatgaaggcctcgggcacgctacgagagtacaaggtagtgggtcgctgcctgcccacccccaaatgccacacgccgcccctctaccgcatgcgaatctttgcgcctaatcatgtcgtcgccaagtcccgcttctggtactttgtatctcagttaaagaagatgaagaagtcttcaggggagattgtctactgtgggcaggtgtttgagaagtcccccctgcgggtgaagaacttcgggatctggctgcgctatgactcccggagcggcacccacaacatgtaccgggaataccgggacctgaccaccgcaggcgctgtcacccagtgctaccgagacatgggtgcccggcaccgcgcccgagcccactccattcagatcatgaaggtggaggagatcgcggccagcaagtgccgccggccggctgtcaagcagttccacgactccaagatcaagttcccgctgccccaccgggtcctgcgccgtcagcacaagccacgcttcaccaccaagaggcccaacaccttcttctaggtgcagggccctcgtccgggtgtgccccaaataaactcaggaacgccccggtgancccnccccaccccccccncccccccccccccccncnccccccccncccacccccccnnccncccnccccncnccncccccnannaccnccncnnncccccccccncnccccccncccccacacnnccccaccncncacaccnccccccnccccccccccccctccccgccacccaccccccccccctccccccccaccccccacccccctct

SEQ ID NO: 323107 - DNA, 758 bp, Homo sapiens
  misc_feature (661)..(661): n is a, c, g, or t
  misc_feature (664)..(664): n is a, c, g, or t
tagctagtgagctgggggttatcggcacgaggccttttgcgggtggcggcgaacgcggagagcacgccatgaaggcctcgggcacgctacgagagtacaaggtagtgggtcgctgcctgcccacccccaaatgccacacgccgcccctctaccgcatgcgaatctttgcgcctaatcatgtcgtcgccaagtcccgcttctggtactttgtatctcagttaaagaagatgaagaagtcttcaggggagattgtctactgtgggcaggtgtttgagaagtcccccctgcgggtgaagaacttcgggatctggctgcgctatgactcccggagcggcacccacaacatgtaccgggaataccgggacctgaccaccgcaggcgctgtcacccagtgctaccgagacatgggtgcccggcaccgcgcccgagcccactccattcagatcatgaaggtggaggagatcgcggccagcaagtgccgccggccggctgtcaagcagttccacgactccaagatcaagttcccgctgccccaccgggtcctgcgccgtcagcacaagccacgcttcaccaccaagaggcccaacaccttcttctaggtgcagggccctcgtccgggtgtgccccaaataaactcaggaacgccccggtgcccaaaaanaanagcattcgactactgggcattcccctataggagcgatacattactgccgcgttacacgcgactggaacctggctacactaatgctggtcccttc

SEQ ID NO: 323108 - DNA, 653 bp, Homo sapiens
  misc_feature (122)..(122): n is a, c, g, or t
  misc_feature (139)..(139): n is a, c, g, or t
atcctgattaaatgtctgaaaaaagaaccaagaaaaggcgtttttgttttcaacaaactttactaaataaccgaacgcggagagcacgccatgaaggcctcgggcacgtgggaaggagtggngtcctcccacccaaatncatcgcccctctaccgcatgcgaatctttgcgcctaatcatgtcgtcgccaagtcccgcttctggtactttgtatctcagttaaagaagatgaagaagtcttcaggggagattgtctactgtgggcaggtgtttgagaagtcccccctgcgggtgaagaacttcgggatctggctgcgctatgactcccggagcggcacccacaacatgtaccgggaataccgggacctgaccaccgcaggcgctgtcacccagtgctaccgagacatgggtgcccggcaccgcgcccgagcccactccattcagatcatgaaggtggaggagatcgcggccagcaagtgccgccggccggctgtcaagcagttccacgactccaagatcaagttcccgctgccccaccgggtcctgcgccgtcagcacaagccacgcttcaccaccaagaggcccaacaccttcttctaggtgcagggccctcgtccgggtgtgccccaaataaactcaggaacgccccggtg

SEQ ID NO: 323109 - DNA, 631 bp, Homo sapiens
atcctgattaaatgtctgaaaaaagaaccaagaaaaggcgtttttgttttcaacaaactttactaaataaccgaacgcggagagcacgccatgaaggcctcgggcacgctacgagagtacaaggtagtgggtcgctgcctgcccacccccaaatgccacacgccgcccctctaccgcatgcgaatctttgcgcctaatcatgtcgtcgccaagtcccgcttctggtactttgtatctcagttaaagaagatgaagaagtcttcaggggagattgtctactgtgggcaggtgtttgagaagtcccccctgcgggtgaagaacttcgggatctggctgcgctatgactcccggagcggcacccacaacatgtaccgggaataccgggacctgaccaccgcaggcgctgtcacccagtgctaccgagacatgggtgcccggcaccgcgcccgagcccactccattcagatcatgaaggtggaggagatcgcggccagcaagtgccgccggccggctgtcaagcagttccacgactccaagatcaagttcccgctgccccaccgggtcctgcgccgtcagcacaagccacgcttcaccaccaagacgaattccggcacgaccacgacgaactccg

SEQ ID NO: 323110 - DNA, 540 bp, Homo sapiens
atcctgattaaatgtctgaaaaaagaaccaagaaaaggcgtttttgttttcaacaaactttactaaataaccgaacgcggagagcacgccatgaaggcctcgggcacgaaagaagatgaagaagtcttcaggggagattgtctactgtgggcaggtgtttgagaagtcccccctgcgggtgaagaacttcgggatctggctgcgctatgactcccggagcggcacccacaacatgtaccgggaataccgggacctgaccaccgcaggcgctgtcacccagtgctaccgagacatgggtgcccggcaccgcgcccgagcccactccattcagatcatgaaggtggaggagatcgcggccagcaagtgccgccggccggctgtcaagcagttccacgactccaagatcaagttcccgctgccccaccgggtcctgcgccgtcagcacaagccacgcttcaccaccaagaggcccaacaccttcttctaggtgcagggccctcgtccgggtgtgccccaaataaactcaggaacgccccggtg

SEQ ID NO: 323111 - DNA, 603 bp, Homo sapiens
  misc_feature (560)..(560): n is a, c, g, or t
atcctgattaaatgtctgaaaaaagaaccaagaaaaggcgtttttgttttcaacaaactttactaaataaccgaacgcggagagcacgccatgaaggcctcgggcacgctacgagagtacaaggtagtgggtcgctgcctgcccacccccaaatgccacacgccgcccctctaccgcatgcgaatctttgcgcctaatcatgtcgtcgccaagtcccgcttctggtactttgtatctcagttaaagaagatgaagaagtcttcaggggagattgtctactgtgggcaggtgtttgagaagtcccccctgcgggtgaagaacttcgggatctggctgcgctatgactcccggagcggcacccacaacatgtaccgggaataccgggacctgaccaccgcaggcgctgtcacccagtgctaccgagacatgggtgcccggcaccgcgcccgagcccactccattcagatcatgaaggtggaggagatcgcggccagcaagtgccgccggccggctgtcaagcagttccactgactccaatgatcacagttccccgctgcccncaccggtgtccctgcgcctgtccagcacacagccacgtcttca

SEQ ID NO: 323112 - DNA, 886 bp, Homo sapiens
aacaacttatatagtgtgtaaggaactcaagagaaaccagtgagcgagcctttatgtgaaccactgaaacaatctcttaaaaataaggcaattcttttctaagtcaaattcatctcgtgccgaatcggcacgaggtgaaggcctcgggcacgctacgagagtacaaggtagtgggtcgctgcctgcccacccccaaatgccacacgccgcccctctaccgcatgcgaatctttgcgcctaatcatgtcgtcgccaagtcccgcttctggtactttgtatctcagttaaagaagatgaagaagtcttcaggggagattgtctactgtgggcaggtgtttgagaagtcccccctgcgggtgaagaacttcgggatctggctgcgctatgactcccggagcggcacccacaacatgtaccgggaataccgggacctgaccaccgcaggcgctgtcacccagtgctaccgagacatgggtgcccggcaccgcgcccgagcccactccattcagatcatgaaggtggaggagatcgcggccagcaagtgccgccggccggctgtcaagcagttccacgactccaagatcaagttcccgctgccccaccgggtcctgcgccgtcagcacaagccacgcttcaccaccaagaggcccaacaccttcttctaggtgcagggccctcgtccgggtgtgccccaaataaactcaggaacgccccggtgaaaaaacaaaaaaaaaaaaaaacaaaaaaaaaaaaaaaaaaaaaaaaaacaaaaaaaaagggggggggggccaaaaaacaaataccccagggggggccaccaaaagagaaacacacaccattatattggagaaaaagaggggcgccacaaagggagcggcaaaaaaga

SEQ ID NO: 323113 - DNA, 624 bp, Homo sapiens
  misc_feature (25)..(26): n is a, c, g, or t
ggtggagctcaaggatccttaattnnttaatcccccccccccccccccgcccttttgcgggtggcggcgaacgcggagagcacgccatgaaggcctcgggcacgctacgagagtacaaggtagtgggtcgctgcctgcccacccccaaatgccacacgccgcccctctaccgcatgcgaatctttgcgcctaatcatgtcgtcgccaagtcccgcttctggtactttgtatctcagttgtgtttgagaagtcccccctgcgggtgaagaacttcgggatctggctgcgctatgactcccggagcggcacccacaacatgtaccgggaataccgggacctgaccaccgcaggcgctgtcacccagtgctaccgagacatgggtgcccggcaccgcgcccgagcccactccattcagatcatgaaggtggaggagatcgcggccagcaagtgccgccggccggctgtcaagcagttccacgactccaagatcaagttcccgctgccccaccgggtcctgcgccgtcagcacaagccacgcttcaccaccaagaggcccaacaccttcttctaggtgcagggccctcgtccgggtgtgccccaaataaactcaggaacgccccggtg

SEQ ID NO: 323114 - DNA, 426 bp, Homo sapiens
tgactctagagtgatcccttgcagtggtgactgtgggcaggtgtttgagaagtcccccctgcgggtgaagaacttcgggatctggctgcgctatgactcccggagcggcacccacaacatgtaccgggaataccgggacctgaccaccgcaggcgctgtcacccagtgctaccgagacatgggtgcccggcaccgcgcccgagcccactccattcagatcatgaaggtggaggagatcgcggccagcaagtgccgccggccggctgtcaagcagttccacgactccaagatcaagttcccgctgccccaccgggtcctgcgccgtcagcacaagccacgcttcaccaccaagaggcccaacaccttcttctaggtgcagggccctcgtccgggtgtgccccaaataaactcaggaacgccccggtg

SEQ ID NO: 323115 - DNA, 616 bp, Homo sapiens
atcctgattaaatgtctgaaaaaagaaccaagaaaaggcgtttttgttttcaacaaactttactaaataaccgaacgcggagagcacgccatgaaggcctcgggcacgctacgagagtacaaggtagtgggtcgctgcctgcccacccccaaatgccacacgccgcccctctaccgcatgcgaatctttgcgcctaatcatgtcgtcgccaagtcccgcttctggtactttgtatctcagttaaagaagatgaagaagtcttcaggggagattgtctactgtgggcaggtgtttgagaagtcccccctgcgggtgaagaacttcgggatctggctgcgctatgactcccggagcggcacccacaacatgtaccgggaataccgggacctgaccaccgcaggcgctgtcacccagtgctaccgagacatgggtgcccggcaccgcgcccgagcccactccattcagatcatgactccaagatcaagttcccgctgccccaccgggtcctgcgccgtcagcacaagccacgcttcaccaccaagaggcccaacaccttcttctaggtgcagggccctcgtccgggtgtgccccaaataaactcaggaacgccccggtg

SEQ ID NO: 323116 - DNA, 813 bp, Homo sapiens
ggacgcgtgggtcgacccacgcgtcggacccacgcgtcgcggacgcgtgccttttgcgggtggcggcgaacgcggagagcacgccatgaaggcctcgggcacgctacgagagtacaaggtagtgggtcgctgcctgcccacccccaaatgccacacgccgcccctctaccgcatgcgaatctttgcgcctaatcatgtcgtcgccaagtcccgcttctggtactttgtatctcagttaaagaagatgaagaagtcttcaggggagattgtctactgtgggcaggtgtttgagaagtcccccctgcgggtgaagaacttcgggatctggctgcgctatgactcccggagcggcacccacaacatgtaccgggaataccgggacctgaccaccgcaggcgctgtcacccagtgctcgcgcccgagcccactccattcagatcatgaaggtggaggagatcgcggccagcaagtgccgccggccggctgtcaagcagttccacgactccaagatcaagttcccgctgccccaccgggtcctgcgccgtcagcacaagccacgcttcaccaccaagaggcccaacaccttcttctaggtgcagggccctcgtccgggtgtgccccaaataaactcaggaacgccccggtgaaaaaaaaaaaaaaaaaaaaaaacaaaaaaaaaaaaaaaaaaaaaaaacaaaaaaaaagggggggggggccaaaaaacaaataccccagggggggccaccaaaagagaaacacacaccattatattggagaaaaagaggggcgccacaaagggagcggcaaaaaaga

SEQ ID NO: 323117 - DNA, 865 bp, Homo sapiens
ggacgcgtgggtcgacccacgcgtcggacccacgcgtcgcggacgcgtgccttttgcgggtggcggcgaacgcggagagcacgccatgaaggcctcgggcacgctacgagagtacaaggtagtgggtcgctgcctgcccacccccaaatgccacacgccgcccctctaccgcatgcgaatctttgcgcctaatcatgtcgtcgccaagtcccgcttctggtactttgtatctcagttaaagaagatgaagaagtcttcaggggagattgtctactgtgggcaggtgtttgagaagtcccccctgcgggtgaagaacttcgggatctggctgcgctatgactcccggagcggcacccacaacatgtaccgggaataccgggacctgaccaccgcaggcgctgtcacccagtgcttcaaccccccaggttggccttaaccccggaatggaaccaaaattggtggtgtgtgtggcccccccccggggggacaaaaccccgtggtcgtggcccgcctcggggaaaagggtccccccccaaaactttttccccccacaaaattttttcccaacgcggaacatttcaaaacattgggaaccacgggggggcgctttgtgggggcgggggggggcacaaaaggggggggggaaaagggaaattccggggccgggggggcccaaggccaaggtggccggccgggccgggctgtcaaggcagttccacgactccaagatcaagttcccgctgccccaccgggtcctgcgccgtcagcacaagccacgcttcaccaccaagaggcccaacaccttcttctaggtgcagggccctcgtccgggtgtgccccaaataaactcaggaacgccccggtg

SEQ ID NO: 323118 - DNA, 150 bp, Homo sapiens
ctctggcacctgttcactctctctctccccatcccccagtataactacggcttcgtggtggagaagaccgcggctgcccgcctgccccccagcgtctcatagtccctcacccttccgcggaaagagcccccttactccacctccccgcca

SEQ ID NO: 323119 - DNA, 729 bp, Homo sapiens
agagttggcaaacttttatgtaaagggccttatagtaaatattttaggctttacagggcagatgatgtgttttgcatattcaatttttttacaattccttaaaaatgtaaaaatcactcttaacacatcagctgtatgaaaccaggccttaggcttggtgtggtggttcacacctgtaatcccagcactttgggagcctgaggcgggcagatcacctgaggtcaggagttccagaccagcctggccaacatggtgaaaccctgtctctactaaaaatacaaaattagctgggcatggtggtgggcgcctgtagtcccagctacttgggaggctgaggcaagagaattgtttgaacctgggaggcggaggttggagtgagctgagattgcgccattgcactccagcctgggcgacagagtgagactctgtctcaaaaagaaaagaaaagaaaacagaccttgagccagatttggctcatgggtgctagttgtccaacctctataggattagagggctcacggaaagtaagttttgagggccacgatgggcacccagctctgtccgattccacagctagccaccccatgaatgcagcttcatatcaccaaagatcagcctactccagcggttcctaaaggctgcatggaatcccctccttcatctataccattcatgatttaaccactcctcccaccccatccccaatgttgtccatgtggctgccttaaa

SEQ ID NO: 323120 - DNA, 724 bp, Homo sapiens
  misc_feature (25)..(26): n is a, c, g, or t
ggtggagctcaaggatccttaattnnttaatcccccccccccccccccgcccttttgcgggtggcggcgaacgcggagagcacgccatgaaggcctcgggcacgctacgagagtacaaggtagtgggtcgctgcctgcccacccccaaatgccacacgccgcccctctaccgcatgcgaatctttgcgcctaatcatgtcgtcgccaagtcccgcttctggtactttgtatctcagttaaagaagatgaagaagtcttcaggggagattgtctactgtgggcaggtgtttgagaagtcccccctgcgggtgaagaacttcgggatctggctgcgctatgactcccggagcggcacccacaacatgtaccgggaataccgggacctgaccaccgcaggcgctgtcacccagtgctaccgagacatgggtgcccggcaccgcgcccgagcccactccattcagatcatgaaggtggaggagatcgcggccagcaagtgccgccggccggctgtcaagcagttccacgactccaagatcaagttcccgctgccccaccgggtcctgcgccgtcagcacaagccacgcttcaccaccaagaggcccaacaccttcttctaggtgcagggccctcgtccgggtgtgccccaaataaactcaggaacgccccggtgaaaaaaacaacaacaaaacaacaccaccacaaaacaaacacaacacacaaaaag

SEQ ID NO: 323121 - DNA, 679 bp, Homo sapiens
  misc_feature (21)..(21): n is a, c, g, or t
acgataggctagtcgaggccnggggttcgaacgcggagagcacgccatgaaggcctcgggcacgctacgagagtacaaggtagtgggtcgctgcctgcccacccccaaatgccacacgccgcccctctaccgcatgcgaatctttgcgcctaatcatgtcgtcgccaagtcccgcttctggtactttgtatctcagttaaagaagatgaagaagtcttcaggggagattgtctactgtgggcaggtgtttgagaagtcccccctgcgggtgaagaacttcgggatctggctgcgctatgactcccggagcggcacccacaacatgtaccgggaataccgggacctgaccaccgcaggcgctgtcacccagtgctaccgagacatgggtgcccggcaccgcgcccgagcccactccattcagatcatgaaggtggaggagatcgcggccagcaagtgccgccggccggctgtcaagcagttccacgactccaagatcaagttcccgctgccccaccgggtcctgcgccgtcagcacaagccacgcttcaccaccaagaggcccaacaccttcttctaggtgcagggccctcgtccgggtgtgccccaaataaactcaggaacgccccggtgaaaaaaaaaaaagtcgacgcggccgcgaatttagtagtagtagtcgacc

SEQ ID NO: 323122 - DNA, 812 bp, Homo sapiens
tctattactactactaaattcgcggccgcgtccgcccttttgcgggtggcggcgaacgcggagagcacgccatgaaggcctcgggcacgctacgagagtacaaggtagtgggtcgctgcctgcccacccccaaatgccacacgccgcccctctaccgcatgcgaatctttgcgcctaatcatgtcgtcgccaagtcccgcttctggtactttgtatctcagttaaagaagatgaagaagtcttcaggggagattgtctactgtgggcaggtgtttgagaagtcccccctgcgggtgaagaacttcgggatctggctgcgctatgactcccggagcggcacccacaacatgtaccgggaataccgggacctgaccaccgcaggcgctgtcacccagtgctaccgagacatgggtgcccggcaccgcgcccgagcccactccattcagatcatgaaggtggaggagatcgcggccagcaagtgccgccggccggctgtcaagcagttccacgactccaagatcaagttcccgctgccccaccgggtcctgcgccgtcagcacaagccacgcttcaccaccaagaggcccaacaccttcttctaggtgcagggccctcgtccgggtgtgccccaaataaactcaggaacgccccggtgaaacaaaaaacaaacacaaacaaaacaaaaaactccgggggctacctatggggggggggggaaaacggggttctggaaggggccttggggccaaacgggtttcctggaccaagttttctggtcccaagggggaaatccggcgggccccctattgggg

SEQ ID NO: 323123 - DNA, 445 bp, Homo sapiens
  misc_feature (18)..(19): n is a, c, g, or t
cggacgcgtgggtcgacnnacgcgtcgagtcttcaggggagattgtctactgtgggcaggtgtttgagaagtcccccctgcgggtgaagaacttcgggatctggctgcgctatgactcccggagcggcacccacaacatgtaccgggaataccgggacctgaccaccgcaggcgctgtcacccagtgctaccgagacatgggtgcccggcaccgcgcccgagcccactccattcagatcatgaaggtggaggagatcgcggccagcaagtgccgccggccggctgtcaagcagttccacgactccaagatcaagttcccgctgccccaccgggtcctgcgccgtcagcacaagccacgcttcaccaccaagaggcccaacaccttcttctaggtgcagggccctcgtccgggtgtgccccaaataaactcaggaacgccccggtg

SEQ ID NO: 323124 - DNA, 258 bp, Homo sapiens
gcggccgcctactactactactgctcgaattcaagcttctaacgatgtacgggggaaggtggaggagatcgcggccagcaagtgccgccggccggctgtcaagcagttccacgactccaagatcaagttcccgctgccccaccgggtcctgcgccgtcagcacaagccacgcttcaccaccaagaggcccaacaccttcttctaggtgcagggccctcgtccgggtgtgccccaaataaactcaggaacgccccggtg

SEQ ID NO: 323125 - DNA, 1008 bp, Homo sapiens
  misc_feature (1008)..(1008): n is a, c, g, or t
acaagcgctgcagaatatgattccacgtcacagcgccaggatttgtctcactgttgtaacagtctgtcggagtccatccgcccgtgcaccatgacctcagttcgggatctggctgcgctatgactcccggagcggcacccacaacatgtaccgggaataccgggacctgaccaccgcaggcgctgtcacccagtgctaccgagacatgggtgcccggcaccgcgcccgagcccactccattcagatcatgaaggtggaggagatcgcggccagcaagtgccgccggccggctgtcaagcagttccacgactccaagatcaagttcccgctgccccaccgggtcctgcgccgtcagcacaagccacgcttcaccaccaagaggcccaacaccttcttctaggtgcagggccctcgtccgggtgtgccccaaataaactcaggaacgccccggtgaaaaaaagaacgaaatactcgaacaatactattaagtatcacacataatgacaaaacactataactactacttattgggtgggcccatatctgtataatacacttcaccccaatgagagccacaacattacagcactacaccacgcgcgttttgttggtgtacacatcggtgcgcgccccaacatagtgaaggaagagcgaaatttattcacagccagcgggccacgcaagagcgcgcaatgagtcagatacttaacacacaaggtccgacacgaagagaatcgttaggcagtaagcacaccacacagtctagaatcaacagccagaaggagaaaatcaactttagttaggaagaaagcagaaaacccaacatacacaactctatcaaagggaggtagcgtaagacaaaaaaatctgggggggtgtagtacactccaatctcccaacacacgaacgagaagctaattacagacaggcacctagtcagtctgagatgatcagcattaattatgtaccaactataaccacaaattcgacaataacatagcgaaggcn

SEQ ID NO: 323126 - DNA, 495 bp, Homo sapiens
attattatggcataaactattagtgctgaggccccagtctgtacacttccatgtaataacttcacagtttcatatcttcgtgagatacttactgatttcaagtcccatcttggtcacaaggagttgtgaattagaggacaagtaatatcaccagaaagaagatgaagaagtcttcaggggagattgtctactgtgggcaggtgtttgagaagtcccccctgcgggtgaagaacttcgggatctggctgcgctatgactcccggagcggcacccacaacatgtaccgggaataccgggacctgaccaccgcaggcgctgtcacccagtgctaccgagacatgggtgcccggcaccgcgcccgagcccactccattcagatcatgaaggtggaggagatcgcggccagcaagtgccgccggccggctgtcaagcagttccacactccaagatcaagtccccgcataactcgcaagatcctgtagatcaccgcagcac

SEQ ID NO: 323127 - DNA, 1447 bp, Homo sapiens
ttccggcggaagttgctgggcgcggaaagccggcaagacctttttttccgccatcatcgctcacgcgcgcaaccctggcgacgcgtggtggcgaggctccgcctccccacgccattggccagcagctcctcgggcacgcgtatactgcgcttccgggcaatctccgccccccccccccgcatggccttctgggagttgtagttcggtcgcgagcgctgccgtcgggaggcgctccgaggttcgaggctgtgccccgcgaccccgccttcggcgctcggctcgcaggatggatcccgtacccgggacagactcggcgccgctggctggcctggcctggtcgtcggcctctgcacccccgccgcgggggttcagcgcgatctcctgcaccgtcgagggggcacccgccagctttggcaagagcttcgcgcagaaatctggctacttcctgtgccttagttctctgggcagcctagagaacccgcaggagaacgtggtggccgatatccagatcgtggtggacaagagccccctgccgctgggcttctcccccgtctgcgaccccatggattccaaggcctctgtgtccaagaagaaacgcatgtgtgtgaagctgttgcccctgggagccacggacacggctgtgtttgatgtccggctgagtgggaagaccaagacagtgcctggataccttcgaataggggacatgggcggctttgccatctggtgcaagaaggccaaggccccgaggccagtgcccaagccccgaggtctcagccgggacatgcagggcctctctctggatgcagccagccagccaagtaagggcggcctcctggagcggacagcgtcaaggctgggctctcgggcatccactctgcggaggaatgactccatctacgaggcctccagcctctatggcatctcagccatggatggggttcccttcacactccacccacgatttgagggcaagagctgcagccccctggccttctctgcttttggggacctgaccatcaagtctctggcggacattgaggaggagtataactacggcttcgtggtggagaagaccgcggctgcccgcctgccccccagcgtctcatagtccctcacccttccgcggaaagagcccccttactccacctccccgccagcctggggccaccccccctcactgcatcctggggccacccccactcactgcatcctgggaaccttcgccctgcaaggcgtttgctatcttcagccactgggcggagctgcagccctggaggagggggcgggtcgaggctgcgtggtgatggggtctccgcccccacgccctgccgggcagggctggagctggacagaagccagtgcctttaagtcatttgtgtcaaaaccctctggggtccggaggctgtgcgggtgtcctcctggcaataaacactacccggttctcgcc

SEQ ID NO: 323128 - DNA, 1602 bp, Homo sapiens
ttccggcggaagttgctgggcgcggaaagccggcaagacctttttttccgccatcatcgctcacgcgcgcaaccctggcgacgcgtggtggcgaggctccgcctccccacgccattggccagcagctcctcgggcacgcgtatactgcgcttccgggcaatctccgccccccccccccgcatggccttctgggagttgtagttcggtcgcgagcgctgccgtcgggaggcgctccgaggttcgaggctgtgccccgcgaccccgccttcggcgctcggctcgcaggatggatcccgtacccgggacagactcggcgccgctggctggcctggcctggtcgtcggcctctgcacccccgccgcgggggttcagcgcgatctcctgcaccgtcgagggggcacccgccagctttggcaagagcttcgcgcagaaatctggctacttcctgtgccttagttctctgggcagcctagagaacccgcaggagaacgtggtggccgatatccagatcgtggtggacaagagccccctgccgctgggcttctcccccgtctgcgaccccatggattccaaggcctctgtgtccaagaagaaacgcatgtgtgtgaagctgttgcccctgggagccacggacacggctgtgtttgatgtccggctgagtgggaagaccaagacagtgcctggataccttcgaatagggtagggccaccccccagtgtctagccaccttccctgccctcccaactcatgatctcaccaatctgaccctcaaggacacccctgaggtctcctgttccttcttctaccttctgagcctcagattctgcatgttaaaaccgggacatatatatcatcttgtaggactgtcattaggagtcagtgacttggtgtctaaagtagacataacaggactgggcgcggtggctcacgcctgtaatcccagcactttgggaggctgaggcgggccgatcacaaggtcaggagatcgagaccatcctgactaacatgttgaaaccccatctctactgaaaatacaaaaaattagccgggtatggtggcacacgcctgtagtcccagctacttgggaggctgaggcaggaaaatcacttgaacctggaaggcggaggttgcagtgagttgagatcgcgccactgcactccagtctggggcgacagagcgagactccgtctcaaaaataaaataaaataaataaaaataaagtagacagaacggtgatttgaacccagcagtattagtttggtgtggtgcttcgggtgtgggtcaagatgctgaaacaaaaatcccccaaaagactgggcacggtggctcacgcctgtagtcccagcactttggaaggccaaggcgggcggatcacctgaggtcaggagttcgagaccagcctggccaacatggtgaaactccgtttctacttaaaaaaaaaaaaaaaaaaaaaaaattagctgggcatggttgcctgtaatcccagctaatccagaggctgaggcaggagaatcgtttgaacctgggaggtggagattgcagtgagtctagattgcgccattgcactccagcctgggcaacatgagcgaaactccgtcccca

SEQ ID NO: 323129 - DNA, 841 bp, Homo sapiens
atcctgattaaatgtctgaaaaaagaaccaagaaaaggcgtttttgttttcaacaaactttactaaataaccgaacgcggagagcacgccatgaaggcctcgggcacgctacgagagtacaaggtagtgggtcgctgcctgcccacccccaaatgccacacgccgcccctctaccgcatgcgaatctttgcgcctaatcatgtcgtcgccaagtcccgcttctggtactttgtatctcagttaaagaagatgaagaagtcttcaggggagattgtctactgtgggcaggtgtttgagaagtcccccctgcgggtgaagaacttcgggatctggctgcgctatgactcccggagcggcacccacaacatgtaccgggaataccgggacctgaccaccgcaggcgctgtcacccagtgctaccgagacatgggtgcccggcaccgcgcccgagcccactccattcagatcatgaaggtggaggagatcgcggccagcaagtgccgccggccggctgtcaagcagttccacgactccaagatcaagttcccgctgccccaccgggtcctgcgccgtcagcacaagccacgcttcaccaccaagaggcccaacaccttcttctaggtgcagggccctcgtccgggtgtgccccaaataaactcaggaacgccccggtgaaaaaaaaaaaaaaaaaaaaaaacaaaaaaaaaaaaaaaaaaaaaaaacaaaaaaaaagggggggggggccaaaaaacaaataccccagggggggccaccaaaagagaaacacacaccattatattggagaaaaagaggggcgccacaaagggagcggcaaaaaaga

SEQ ID NO: 323130 - DNA, 706 bp, Homo sapiens
tagctagtgagctgggggttatcggcacgaggccttttgcgggtggcggcgaacgcggagagcacgccatgaaggcctcgggcacgctacgagagtacaaggtagtgggtcgctgcctgcccacccccaaatgccacacgccgcccctctaccgcatgcgaatctttgcgcctaatcatgtcgtcgccaagtcccgcttctggtactttgtatctcagttaaagaagatgaagaagtcttcaggggagattgtctactgtgggcaggtgtttgagaagtcccccctgcgggtgaagaacttcgggatctggctgcgctatgactcccggagcggcacccacaacatgtaccgggaataccgggacctgaccaccgcaggcgctgtcacccagtgctaccgagacatgggtgcccggcaccgcgcccgagcccactccattcagatcatgaaggtggaggagatcgcggccagcaagtgccgccggccggctgtcaagcagttccacgactccaagatcaagttcccgctgccccaccgggtcctgcgccgtcagcacaagccacgcttcaccaccaagaggcccaacaccttcttctaggtgcagggccctcgtccgggtgtgccccaaataaactcaggaacgccccggtgaaaaaaacaacaacaaaacaacaccaccacaaaacaaacacaacacacaaaaag

SEQ ID NO: 323131 - DNA, 1045 bp, Homo sapiens
atcctgattaaatgtctgaaaaaagaaccaagaaaaggcgtttttgttttcaacaaactttactaaataaccgaacgcggagagcacgccatgaaggcctcgggcacgctacgagagtacaaggtagtgggtcgctgcctgcccacccccaaatgccacacgccgcccctctaccgcatgcgaatctttgcgcctaatcatgtcgtcgccaagtcccgcttctggtactttgtatctcagttaaagaagatgaagaagtcttcaggggagattgtctactgtgggcaggtgtttgagaagtcccccctgcgggtgaagaacttcgggatctggctgcgctatgactcccggagcggcacccacaacatgtaccgggaataccgggacctgaccaccgcaggcgctgtcacccagtgctaccgagacatgggtgcccggcaccgcgcccgagcccactccattcagatcatgaaggtggaggagatcgcggccagcaagtgccgccggccggctgtcaagcagttccacgactccaagatcaagttcccgctgccccaccgggtcctgcgccgtcagcacaagccacgcttcaccaccaagaggcccaacaccttcttctaggtgcagggccctcgtccgggtgtgccccaaataaactcaggaacgccccggtgaaaaaaaaaaaaaaaaaaaaaaaacaaaaaaaaaggggggggggggggaaaaaaaattccccggggggggccccaattttgcgggccccccgtttttttttgtcaccacgggggtgccccccatagggggaggcggtatatataaagcgcagggacagcgggcccgtggtgttaacacaccggttgtggacgggcagacctggcttcgcttggacctttctggtgagggcccccttacttgtggcgctgttgccctgcctcgcggccgcacttcctggggatttaacgcccggggaatttacaattgcggtggtacggtggcaccaccccatttgcttgcgctcgaaatgtgtcacggcttttctgacata

SEQ ID NO: 323132 - DNA, 723 bp, Homo sapiens
atcctgattaaatgtctgaaaaaagaaccaagaaaaggcgtttttgttttcaacaaactttactaaataaccgaacgcggagagcacgccatgaaggcctcgggcacgctacgagagtacaaggtagtgggtcgctgcctgcccacccccaaatgccacacgccgcccctctaccgcatgcgaatctttgcgcctaatcatgtcgtcgccaagtcccgcttctggtactttgtatctcagttaaagaagatgaagaagtcttcaggggagattgtctactgtgggcaggtgtttgagaagtcccccctgcgggtgaagaacttcgggatctggctgcgctatgactcccggagcggcacccacaacatgtaccgggaataccgggacctgaccaccgcaggcgctgtcacccagtgctaccgagacatgggtgcccggcaccgcgcccgagcccactccattcagatcatgaaggtggaggagatcgcggccagcaagtgccgccggccggctgtcaagcagttccacgactccaagatcaagttcccgctgccccaccgggtcctgcgccgtcagcacaagccacgcttcaccaccaagaggcccaacaccttcttctaggtgcagggccctcgtccgggtgtgccccaaataaactcaggaacgccccggtgaaaaaaaaaaaagtcgacgcggccgcgaatttagtagtagtagtcgacc

SEQ ID NO: 323133 - DNA, 770 bp, Homo sapiens
atcctgattaaatgtctgaaaaaagaaccaagaaaaggcgtttttgttttcaacaaactttactaaataaccgaacgcggagagcacgccatgaaggcctcgggcacgctacgagagtacaaggtagtgggtcgctgcctgcccacccccaaatgccacacgccgcccctctaccgcatgcgaatctttgcgcctaatcatgtcgtcgccaagtcccgcttctggtactttgtatctcagttaaagaagatgaagaagtcttcaggggagattgtctactgtgggcaggtgtttgagaagtcccccctgcgggtgaagaacttcgggatctggctgcgctatgactcccggagcggcacccacaacatgtaccgggaataccgggacctgaccaccgcaggcgctgtcacccagtgctaccgagacatgggtgcccggcaccgcgcccgagcccactccattcagatcatgaaggtggaggagatcgcggccagcaagtgccgccggccggctgtcaagcagttccacgactccaagatcaagttcccgctgccccaccgggtcctgcgccgtcagcacaagccacgcttcaccaccaagaggcccaacaccttcttctaggtgcagggccctcgtccgggtgtgccccaaataaactcaggaacgccccggtgctaaactcaggaacgccccggtaaaaaaccacagatacacacaatactaaaaataaactaaaaaaaaaaggggggacctccaacacaccaatcccg

SEQ ID NO: 323134 - DNA, 736 bp, Homo sapiens
atcctgattaaatgtctgaaaaaagaaccaagaaaaggcgtttttgttttcaacaaactttactaaataaccgaacgcggagagcacgccatgaaggcctcgggcacgctacgagagtacaaggtagtgggtcgctgcctgcccacccccaaatgccacacgccgcccctctaccgcatgcgaatctttgcgcctaatcatgtcgtcgccaagtcccgcttctggtactttgtatctcagttaaagaagatgaagaagtcttcaggggagattgtctactgtgggcaggtgtttgagaagtcccccctgcgggtgaagaacttcgggatctggctgcgctatgactcccggagcggcacccacaacatgtaccgggaataccgggacctgaccaccgcaggcgctgtcacccagtgctaccgagacatgggtgcccggcaccgcgcccgagcccactccattcagatcatgaaggtggaggagatcgcggccagcaagtgccgccggccggctgtcaagcagttccacgactccaagatcaagttcccgctgccccaccgggtcctgcgccgtcagcacaagccacgcttcaccaccaagaggcccaacaccttcttctaggtgcagggccctcgtccgggtgtgccccaaataaactcaggaacgccccggtgtaaaattttttttttttttttaatgtcgactggccgctttttttgttgttgtatgggctcgt

SEQ ID NO: 323135 - DNA, 759 bp, Homo sapiens
atcctgattaaatgtctgaaaaaagaaccaagaaaaggcgtttttgttttcaacaaactttactaaataaccgaacgcggagagcacgccatgaaggcctcgggcacgctacgagagtacaaggtagtgggtcgctgcctgcccacccccaaatgccacacgccgcccctctaccgcatgcgaatctttgcgcctaatcatgtcgtcgccaagtcccgcttctggtactttgtatctcagttaaagaagatgaagaagtcttcaggggagattgtctactgtgggcaggtgtttgagaagtcccccctgcgggtgaagaacttcgggatctggctgcgctatgactcccggagcggcacccacaacatgtaccgggaataccgggacctgaccaccgcaggcgctgtcacccagtgctaccgagacatgggtgcccggcaccgcgcccgagcccactccattcagatcatgaaggtggaggagatcgcggccagcaagtgccgccggccggctgtcaagcagttccacgactccaagatcaagttcccgctgccccaccgggtcctgcgccgtcagcacaagccacgcttcaccaccaagaggcccaacaccttcttctaggtgcagggccctcgtccgggtgtgccccaaataaactcaggaacgccccggtgaaaaaaaaaaaaaaaaaaacagcaaaaaaacaaaaaaacaacaacaaaacaacaccaccacaaaacaaacacaacacacaaaaag

SEQ ID NO: 323136 - DNA, 845 bp, Homo sapiens
tagctagtgagctgggggttatcggcacgaggccttttgcgggtggcggcgaacgcggagagcacgccatgaaggcctcgggcacgctacgagagtacaaggtagtgggtcgctgcctgcccacccccaaatgccacacgccgcccctctaccgcatgcgaatctttgcgcctaatcatgtcgtcgccaagtcccgcttctggtactttgtatctcagttaaagaagatgaagaagtcttcaggggagattgtctactgtgggcaggtgtttgagaagtcccccctgcgggtgaagaacttcgggatctggctgcgctatgactcccggagcggcacccacaacatgtaccgggaataccgggacctgaccaccgcaggcgctgtcacccagtgctaccgagacatgggtgcccggcaccgcgcccgagcccactccattcagatcatgaaggtggaggagatcgcggccagcaagtgccgccggccggctgtcaagcagttccacgactccaagatcaagttcccgctgccccaccgggtcctgcgccgtcagcacaagccacgcttcaccaccaagaggcccaacaccttcttctaggtgcagggccctcgtccgggtgtgccccaaataaactcaggaacgccccggtgaaaaaaaaaaaaaaaaattcagaggacatccaatgtcggagttcgcgaacaacgagaggtcctgacatcggcccatgggtcatagctggtaccgtgaccaagtttcttggaccaacgggggtaaatctcgcggatccccaattagagcgtcgataatttcagataagcccggtaacctgttatgctggcgcaa

SEQ ID NO: 323137 - DNA, 835 bp, Homo sapiens
tagctagtgagctgggggttatcggcacgaggccttttgcgggtggcggcgaacgcggagagcacgccatgaaggcctcgggcacgctacgagagtacaaggtagtgggtcgctgcctgcccacccccaaatgccacacgccgcccctctaccgcatgcgaatctttgcgcctaatcatgtcgtcgccaagtcccgcttctggtactttgtatctcagttaaagaagatgaagaagtcttcaggggagattgtctactgtgggcaggtgtttgagaagtcccccctgcgggtgaagaacttcgggatctggctgcgctatgactcccggagcggcacccacaacatgtaccgggaataccgggacctgaccaccgcaggcgctgtcacccagtgctaccgagacatgggtgcccggcaccgcgcccgagcccactccattcagatcatgaaggtggaggagatcgcggccagcaagtgccgccggccggctgtcaagcagttccacgactccaagatcaagttcccgctgccccaccgggtcctgcgccgtcagcacaagccacgcttcaccaccaagaggcccaacaccttcttctaggtgcagggccctcgtccgggtgtgccccaaataaactcaggaacgccccggtgaaaaaaaacacaaacaaagagacaacaaaaaaaaaaaacagaacaaaaagaaaaagagagggagaaaaagaacaaagaggaccagaagcagaccagaagtagcagaagacacaagggaggaaagagaacgagggggagaaaagagagggaaacagagaggactagggagagaaagtggacgaa

SEQ ID NO: 323138 - DNA, 748 bp, Homo sapiens
tagctagtgagctgggggttatcggcacgaggccttttgcgggtggcggcgaacgcggagagcacgccatgaaggcctcgggcacgctacgagagtacaaggtagtgggtcgctgcctgcccacccccaaatgccacacgccgcccctctaccgcatgcgaatctttgcgcctaatcatgtcgtcgccaagtcccgcttctggtactttgtatctcagttaaagaagatgaagaagtcttcaggggagattgtctactgtgggcaggtgtttgagaagtcccccctgcgggtgaagaacttcgggatctggctgcgctatgactcccggagcggcacccacaacatgtaccgggaataccgggacctgaccaccgcaggcgctgtcacccagtgctaccgagacatgggtgcccggcaccgcgcccgagcccactccattcagatcatgaaggtggaggagatcgcggccagcaagtgccgccggccggctgtcaagcagttccacgactccaagatcaagttcccgctgccccaccgggtcctgcgccgtcagcacaagccacgcttcaccaccaagaggcccaacaccttcttctaggtgcagggccctcgtccgggtgtgccccaaataaactcaggaacgccccggtgctaaactcaggaacgccccggtaaaaaaccacagatacacacaatactaaaaataaactaaaaaaaaaaggggggacctccaacacaccaatcccg

SEQ ID NO: 323139 - DNA, 711 bp, Homo sapiens
tagctagtgagctgggggttatcggcacgaggccttttgcgggtggcggcgaacgcggagagcacgccatgaaggcctcgggcacgctacgagagtacaaggtagtgggtcgctgcctgcccacccccaaatgccacacgccgcccctctaccgcatgcgaatctttgcgcctaatcatgtcgtcgccaagtcccgcttctggtactttgtatctcagttaaagaagatgaagaagtcttcaggggagattgtctactgtgggcaggtgtttgagaagtcccccctgcgggtgaagaacttcgggatctggctgcgctatgactcccggagcggcacccacaacatgtaccgggaataccgggacctgaccaccgcaggcgctgtcacccagtgctaccgagacatgggtgcccggcaccgcgcccgagcccactccattcagatcatgaaggtggaggagatcgcggccagcaagtgccgccggccggctgtcaagcagttccacgactccaagatcaagttcccgctgccccaccgggtcctgcgccgtcagcacaagccacgcttcaccaccaagaggcccaacaccttcttctaggtgcagggccctcgtccgggtgtgccccaaataaactcaggaacgccccggtgtctcaggaaccgccccgatacaacttttgcaggcttaagcaatgcggccccgattcgct

SEQ ID NO: 323140 - DNA, 583 bp, Homo sapiens
atcctgattaaatgtctgaaaaaagaaccaagaaaaggcgtttttgttttcaacaaactttactaaataaccgaacgcggagagcacgccatgaaggcctcgggcacgctacgagagtacaaggtagtgggtcgctgcctgcccacccccaaatgccacacgccgcccctctaccgcatgcgaatctttgcgcctaatcatgtcgtcgccaagtcccgcttctggtactttgtatctcagttaaagaagatgaagaagtcttcaggggagattgtctactgtgggcaggtgtttgagaagtcccccctgcgggtgaagaacttcgggatctggctgcgctatgactcccggagcggcacccacaacatgtaccgggaataccgggacctgaccaccgcaggcgctgtcacccagtgctaccgagacatgggtgcccggcaccgcgcccgagcccactccattcagatcatgaaggtggaggagatcgcggccagcaagtgccgccggccggctgtcaagcagttccacactccaagatcaagtccccgcataactcgcaagatcctgtagatcaccgcagcac

SEQ ID NO: 323141 - DNA, 1294 bp, Homo sapiens
  misc_feature (25)..(26): n is a, c, g, or t
ggtggagctcaaggatccttaattnnttaatcccccccccccccccccgcccttttgcgggtggcggcgaacgcggagagcacgccatgaaggcctcgggcacgctacgagagtacaaggtagtgggtcgctgcctgcccacccccaaatgccacacgccgcccctctaccgcatgcgaatctttgcgcctaatcatgtcgtcgccaagtcccgcttctggtactttgtatctcagttaaagaagatgaagaagtcttcaggggagattgtctactgtgggcaggtatggagaggccggggctacgtggggtctggagtggatttgcgcctcttgggacatcgtgcatctcaagaattaatcagacatcgaacgggtgcggtagctcaacgcctgtaatcccatcacatcagacatcagagccccgggttgtgtttctgcctgggtcacgggactggagcagagcttatgtgccatttccctgattagaaagccagggacccagggagcgggtgggtggcatggtgggacaccttggttggtgctgtcttccctgggccctgtctgttaagtgaggagaggtgatggctatctggtcagtgggtggtagctaggttggcccagacaggttccaggagacttgagttcaggaactgcatctggggctgggttggtgtccgtggcagaagcctggacttcaggctgttgccatgggaagttcccttacctcacgctccctgaggatgcctgaaggtaggtggggctgggaaactgaggcacaagagtctggccatagagtaggcctggagcctggggtgtgctttagaggcagagggttcagtgaggatggggctagggcacatcggcttgctgctctcacatctccctgggtgccgtgtgacttggcaggtgtttgagaagtcccccctgcgggtgaagaacttcgggatctggctgcgctatgactcccggagcggcacccacaacatgtaccgggaataccgggacctgaccaccgcaggcgctgtcacccagtgctaccgagacatgggtgcccggcaccgcgcccgagcccactccattcagatcatgaaggtggaggagatcgcggccagcaagtgccgccggccggctgtcaagcagttccacgactccaagatcaagttcccgctgccccaccgggtcctgcgccgtcagcacaagccacgcttcaccaccaagaggcccaacaccttcttctaggtgcagggccctcgtccgggtgtgccccaaataaactcaggaacgccccggtg

SEQ ID NO: 323142 - DNA, 1726 bp, Homo sapiens
  misc_feature (25)..(26): n is a, c, g, or t
ggtggagctcaaggatccttaattnnttaatcccccccccccccccccgcccttttgcgggtggcggcgaacgcggagagcacgccatgaaggcctcgggcacgctacgagagtacaaggtagtgggtcgctgcctgcccacccccaaatgccacacgccgcccctctaccgcatgcgaatctttgcgcctaatcatgtcgtcgccaagtcccgcttctggtactttgtatctcagttaaagaagatgaagaagtcttcaggggagattgtctactgtgggcaggtatggagaggccggggctacgtggggtctggagtggatttgcgcctcttgggacatcgtgcatctcaagaattaatcagacatcgaacgggtgcggtagctcaacgcctgtaatcccatcacatcagacatcagagccccgggttgtgtttctgcctgggtcacgggactggagcagagcttatgtgccatttccctgattagaaagccagggacccagggagcgggtgggtggcatggtgggacaccttggttggtgctgtcttccctgggccctgtctgttaagtgaggagaggtgatggctatctggtcagtgggtggtagctaggttggcccagacaggttccaggagacttgagttcaggaactgcatctggggctgggttggtgtccgtggcagaagcctggacttcaggctgttgccatgggaagttcccttacctcacgctccctgaggatgcctgaaggtaggtggggctgggaaactgaggcacaagagtctggccatagagtaggcctggagcctggggtgtgctttagaggcagagggttcagtgaggatggggctagggcacatcggcttgctgctctcacatctccctgggtgccgtgtgacttggcaggtgtttgagaagtcccccctgcgggtgaagaacttcgggatctggctgcgctatgactcccggagcggcacccacaacatgtaccgggaataccgggacctgaccaccgcaggcgctgtcacccagtgctaccgagacatgggtgcccggcaccgcgcccgagcccactccattcagatcatgaaggtggaggagatcgcggccagcaagtgccgccggccggctgtcaagcagttccacgactccaagatcaagttcccgctgccccaccgggtcctgcgccgtcagcacaagccacgcttcaccaccaagaggcccaacaccttcttctaggtgcagggccctcgtccgggtgtgccccaaataaactcaggaacgccccggtgaaaaaaaaaaaaaaaaaaaaaaacaaaaaaaaaaaaaaaaaaaaaaaacaaaaaaaaaaaaaaaaaaaacaagaggggagcggcgccacaggtgaaacgtcggcggaggagagggggatctgtggccgcgcggacgtggcgggcggggcacaaggaggtggagggagagtaaagggggcggaggggtggcgtgacatggggggacacggcggacgatgcaaggagggcgcgccggggcatgagggaggcggaggagaaaaggagacggtcggacgcagccacggacgaaggcagccaaatcgacagcgaggcacaacgaccaacagagggcgataccacgaggcaggagcgggacatcgggagggacacaagcgggccgtccacagccgcgccggaaaacacggcacctggacagagaagagcacacgcgtg

SEQ ID NO: 323143 - DNA, 669 bp, Homo sapiens
ggacgcgtgggtcgacccacgcgtcggacccacgcgtcgcggacgcgtgccttttgcgggtggcggcgaacgcggagagcacgccatgaaggcctcgggcacgctacgagagtacaaggtagtgggtcgctgcctgcccacccccaaatgccacacgccgcccctctaccgcatgcgaatctttgcgcctaatcatgtcgtcgccaagtcccgcttctggtactttgtatctcagttaaagaagatgaagaagtcttcaggggagattgtctactgtgggcaggtgtttgagaagtcccccctgcgggtgaagaacttcgggatctggctgcgctatgactcccggagcggcacccacaacatgtaccgggaataccgggacctgaccaccgcaggcgctgtcacccagtgctaccgagacatgggtgcccggcaccgcgcccgagcccactccattcagatcatgaaggtggaggagatcgcggccagcaagtgccgccggccggctgtcaagcagttccacgactccaagatcaagttcccgctgccccaccgggtcctgcgccgtcagcacaagccacgcttcaccaccaagaggcccaacaccttcttctaggtgcagggccctcgtccgggtgtgccccaaataaactcaggaacgccccggtg

SEQ ID NO: 323144 - DNA, 655 bp, Homo sapiens
tctattactactactaaattcgcggccgcgtccgcccttttgcgggtggcggcgaacgcggagagcacgccatgaaggcctcgggcacgctacgagagtacaaggtagtgggtcgctgcctgcccacccccaaatgccacacgccgcccctctaccgcatgcgaatctttgcgcctaatcatgtcgtcgccaagtcccgcttctggtactttgtatctcagttaaagaagatgaagaagtcttcaggggagattgtctactgtgggcaggtgtttgagaagtcccccctgcgggtgaagaacttcgggatctggctgcgctatgactcccggagcggcacccacaacatgtaccgggaataccgggacctgaccaccgcaggcgctgtcacccagtgctaccgagacatgggtgcccggcaccgcgcccgagcccactccattcagatcatgaaggtggaggagatcgcggccagcaagtgccgccggccggctgtcaagcagttccacgactccaagatcaagttcccgctgccccaccgggtcctgcgccgtcagcacaagccacgcttcaccaccaagaggcccaacaccttcttctaggtgcagggccctcgtccgggtgtgccccaaataaactcaggaacgccccggtg

SEQ ID NO: 323145 - DNA, 4290 bp, Homo sapiens
gagacattccggtgggggactctggccagcccgagcaacgtggatcctgagagcactcccaggtaggcatttgccccggtgggacgccttgccagagcagtgtgtggcaggcccccgtggaggatcaacacagtggctgaacactgggaaggaactggtacttggagtctggacatctgaaacttggctctgaaactgcggagcggccaccggacgccttctggagcaggtagcagcatgcagccgcctccaagtctgtgcggacgcgccctggttgcgctggttcttgcctgcggcctgtcgcggatctggggagaggagagaggcttcccgcctgacagggccactccgcttttgcaaaccgcagagataatgacgccacccactaagaccttatggcccaagggttccaacgccagtctggcgcggtcgttggcacctgcggaggtgcctaaaggagacaggacggcaggatctccgccacgcaccatctcccctcccccgtgccaaggacccatcgagatcaaggagactttcaaatacatcaacacggttgtgtcctgccttgtgttcgtgctggggatcatcgggaactccacacttctgagaattatctacaagaacaagtgcatgcgaaacggtcccaatatcttgatcgccagcttggctctgggagacctgctgcacatcgtcattgacatccctatcaatgtctacaagctgctggcagaggactggccatttggagctgagatgtgtaagctggtgcctttcatacagaaagcctccgtgggaatcactgtgctgagtctatgtgctctgagtattgacagatatcgagctgttgcttcttggagtagaattaaaggaattggggttccaaaatggacagcagtagaaattgttttgatttgggtggtctctgtggttctggctgtccctgaagccataggttttgatataattacgatggactacaaaggaagttatctgcgaatctgcttgcttcatcccgttcagaagacagctttcatgcagttttacaagacagcaaaagattggtggctgttcagtttctatttctgcttgccattggccatcactgcatttttttatacactaatgacctgtgaaatgttgagaaagaaaagtggcatgcagattgctttaaatgatcacctaaagcagagacgggaagtggccaaaaccgtcttttgcctggtccttgtctttgccctctgctggcttccccttcacctcagcaggattctgaagctcactctttataatcagaatgatcccaatagatgtgaacttttgagctttctgttggtattggactatattggtatcaacatggcttcactgaattcctgcattaacccaattgctctgtatttggtgagcaaaagattcaaaaactgctttaagtcatgcttatgctgctggtgccagtcatttgaagaaaaacagtccttggaggaaaagcagtcgtgcttaaagttcaaagctaatgatcacggatatgacaacttccgttccagtaataaatacagctcatcttgaaagaagaactattcactgtatttcattttctttatattggaccgaagtcattaaaacaaaatgaaacatttgccaaaacaaaacaaaaaactatgtatttgcacagcacactattaaaatattaagtgtaattattttaacactcacagctacatatgacattttatgagctgtttacggcatggaaagaaaatcagtgggaattaagaaagcctcgtcgtgaaagcacttaattttttacagttagcacttcaacatagctcttaacaacttccaggatattcacacaacacttaggcttaaaaatgagctcactcagaatttctattctttctaaaaagagatttatttttaaatcaatgggactctgatataaaggaagaataagtcactgtaaaacagaacttttaaatgaagcttaaattactcaatttaaaattttaaaatcctttaaaacaacttttcaattaatattatcacactattatcagattgtaattagatgcaaatgagagagcagtttagttgttgcatttttcggacactggaaacatttaaatgatcaggagggagtaacagaaagagcaaggctgtttttgaaaatcattacactttcactagaagcccaaacctcagcattctgcaatatgtaaccaacatgtcacaaacaagcagcatgtaacagactggcacatgtgccagctgaatttaaaatataatacttttaaaaagaaaattattacatcctttacattcagttaagatcaaacctcacaaagagaaatagaatgtttgaaaggctatcccaaaagacttttttgaatctgtcattcacataccctgtgaagacaatactatctacaattttttcaggattattaaaatcttcttctttcactatcgtagcttaaactctgtttggttttgtcatctgtaaatacttacctacatacactgcatgtagatgattaaatgagggcaggccctgtgctcatagctttacgatggagagatgccagtgacctcataataaagactgtgaactgcctggtgcagtgtccacatgacaaaggggcaggtagcaccctctctcacccatgctgtggttaaaatggtttctagcatatgtataatgctatagttaaaatactatttttcaaaatcatacagattagtacatttaacagctacctgtaaagcttattactaatttttgtattatttttgtaaatagccaatagaaaagtttgcttgacatggtgcttttctttcatctagaggcaaaactgctttttgagaccgtaagaacctcttagctttgtgcgttcctgcctaatttttatatcttctaagcaaagtgccttaggatagcttgggatgagatgtgtgtgaaagtatgtacaagagaaaacggaagagagaggaaatgaggtggggttggaggaaacccatggggacagattcccattcttagcctaacgttcgtcattgcctcgtcacatcaatgcaaaaggtcctgattttgttccagcaaaacacagtgcaatgttctcagagtgactttcgaaataaattgggcccaagagctttaactcggtcttaaaatatgcccaaatttttactttgtttttcttttaataggctgggccacatgttggaaataagctagtaatgttgttttctgtcaatattgaatgtgatggtacagtaaaccaaaacccaacaatgtggccagaaagaaagagcaataataattaattcacacaccatatggattctatttataaatcacccacaaacttgttctttaatttcatcccaatcactttttcagaggcctgttatcatagaagtcattttagactctcaattttaaattaattttgaatcactaatattttcacagtttattaatatatttaatttctatttaaattttagattatttttattaccatgtactgaatttttacatcctgataccctttccttctccatgtcagtatcatgttctctaattatcttgccaaattttgaaactacacacaaaaagcatacttgcattatttataataaaattgcattcagtggctttttaaaaaaatgtttgattcaaaactttaacatactgataagtaagaaacaattataatttctttacatactcaaaaccaagatagaaaaaggtgctatcgttcaacttcaaaacatgtttcctagtattaaggactttaatatagcaacagacaaaattattgttaacatggatgttacagctcaaaagatttataaaagattttaacctattttctcccttattatccactgctaatgtggatgtatgttcaaacaccttttagtattgatagcttacatatggccaaaggaatacagtttatagcaaaacatgggtatgctgtagctaactttataaaagtgtaatataacaatgtaaaaaattatatatctgggaggattttttggttgcctaaagtggctatagttactgattttttattatgtaagcaaaaccaataaaaatttaagtttttttaacaactaccttatttttcactgtacagacactaattcattaaatactaattgattgtttaaaagaaatataaatgtgacaagtggacattatttatgttaaatatacaattatcaagcaagtatgaagttattcaattaaaatgccacatttctggtctctgggctgga

SEQ ID NO: 323146 - DNA, 4870 bp, Homo sapiens
attcgggcttggtgttgaattaaaatcattgattgaaccttattctggggcttcggtttggcttactagtttgggattttaaaaaaataaaaattaagcctatagagagggcaaattaaaattaggttgggtaaaggaaggagcgcgagtgtttgaagccgtttggagggaacagcggtttccaagttcctgctgacttgagaagtctctgcgggtttccgaatctccggcgcactcctgggcgcgctgcgggagctgtagctcagccagccagggagtagcggctttcatccgccgggaggagtctttcgagttcaatcgcggggtatagaggttcccctgcggggcaaaatgcagagcttgacacaagcccttggcctctaggtgccttaattccgcggttcccacgcacgcttaactaagacgtgtctgtattcctcccgttacgtgaaagagttcggagctttgcctgggacccccatcattccctccctggcacaccccttccagaacgccccgccccactgcatattatttacccctcctggccacgcgggggaagaaaaacagctgagagggcatcaggaaggagtttcgacccgcgctggcgagtcatgagcgccaagtttcccactggcgcgcaaacttgagttacttttgagcgtggatactggcgaagaggctgcgggcggtattagcgtttgcagcgacttggctcgggcagctgacccaagtgtcctgtcttccttcctctgcttgtctctaggctctgaaactgcggagcggccaccggacgccttctggagcaggtagcagcatgcagccgcctccaagtctgtgcggacgcgccctggttgcgctggttcttgcctgcggcctgtcgcggatctggggagaggagagaggcttcccgcctgacagggccactccgcttttgcaaaccgcagagataatgacgccacccactaagaccttatggcccaagggttccaacgccagtctggcgcggtcgttggcacctgcggaggtgcctaaaggagacaggacggcaggatctccgccacgcaccatctcccctcccccgtgccaaggacccatcgagatcaaggagactttcaaatacatcaacacggttgtgtcctgccttgtgttcgtgctggggatcatcgggaactccacacttctgagaattatctacaagaacaagtgcatgcgaaacggtcccaatatcttgatcgccagcttggctctgggagacctgctgcacatcgtcattgacatccctatcaatgtctacaagctgctggcagaggactggccatttggagctgagatgtgtaagctggtgcctttcatacagaaagcctccgtgggaatcactgtgctgagtctatgtgctctgagtattgacagatatcgagctgttgcttcttggagtagaattaaaggaattggggttccaaaatggacagcagtagaaattgttttgatttgggtggtctctgtggttctggctgtccctgaagccataggttttgatataattacgatggactacaaaggaagttatctgcgaatctgcttgcttcatcccgttcagaagacagctttcatgcagttttacaagacagcaaaagattggtggctgttcagtttctatttctgcttgccattggccatcactgcatttttttatacactaatgacctgtgaaatgttgagaaagaaaagtggcatgcagattgctttaaatgatcacctaaagcagagacgggaagtggccaaaaccgtcttttgcctggtccttgtctttgccctctgctggcttccccttcacctcagcaggattctgaagctcactctttataatcagaatgatcccaatagatgtgaacttttgagctttctgttggtattggactatattggtatcaacatggcttcactgaattcctgcattaacccaattgctctgtatttggtgagcaaaagattcaaaaactgctttaagtcatgcttatgctgctggtgccagtcatttgaagaaaaacagtccttggaggaaaagcagtcgtgcttaaagttcaaagctaatgatcacggatatgacaacttccgttccagtaataaatacagctcatcttgaaagaagaactattcactgtatttcattttctttatattggaccgaagtcattaaaacaaaatgaaacatttgccaaaacaaaacaaaaaactatgtatttgcacagcacactattaaaatattaagtgtaattattttaacactcacagctacatatgacattttatgagctgtttacggcatggaaagaaaatcagtgggaattaagaaagcctcgtcgtgaaagcacttaattttttacagttagcacttcaacatagctcttaacaacttccaggatattcacacaacacttaggcttaaaaatgagctcactcagaatttctattctttctaaaaagagatttatttttaaatcaatgggactctgatataaaggaagaataagtcactgtaaaacagaacttttaaatgaagcttaaattactcaatttaaaattttaaaatcctttaaaacaacttttcaattaatattatcacactattatcagattgtaattagatgcaaatgagagagcagtttagttgttgcatttttcggacactggaaacatttaaatgatcaggagggagtaacagaaagagcaaggctgtttttgaaaatcattacactttcactagaagcccaaacctcagcattctgcaatatgtaaccaacatgtcacaaacaagcagcatgtaacagactggcacatgtgccagctgaatttaaaatataatacttttaaaaagaaaattattacatcctttacattcagttaagatcaaacctcacaaagagaaatagaatgtttgaaaggctatcccaaaagacttttttgaatctgtcattcacataccctgtgaagacaatactatctacaattttttcaggattattaaaatcttcttctttcactatcgtagcttaaactctgtttggttttgtcatctgtaaatacttacctacatacactgcatgtagatgattaaatgagggcaggccctgtgctcatagctttacgatggagagatgccagtgacctcataataaagactgtgaactgcctggtgcagtgtccacatgacaaaggggcaggtagcaccctctctcacccatgctgtggttaaaatggtttctagcatatgtataatgctatagttaaaatactatttttcaaaatcatacagattagtacatttaacagctacctgtaaagcttattactaatttttgtattatttttgtaaatagccaatagaaaagtttgcttgacatggtgcttttctttcatctagaggcaaaactgctttttgagaccgtaagaacctcttagctttgtgcgttcctgcctaatttttatatcttctaagcaaagtgccttaggatagcttgggatgagatgtgtgtgaaagtatgtacaagagaaaacggaagagagaggaaatgaggtggggttggaggaaacccatggggacagattcccattcttagcctaacgttcgtcattgcctcgtcacatcaatgcaaaaggtcctgattttgttccagcaaaacacagtgcaatgttctcagagtgactttcgaaataaattgggcccaagagctttaactcggtcttaaaatatgcccaaatttttactttgtttttcttttaataggctgggccacatgttggaaataagctagtaatgttgttttctgtcaatattgaatgtgatggtacagtaaaccaaaacccaacaatgtggccagaaagaaagagcaataataattaattcacacaccatatggattctatttataaatcacccacaaacttgttctttaatttcatcccaatcactttttcagaggcctgttatcatagaagtcattttagactctcaattttaaattaattttgaatcactaatattttcacagtttattaatatatttaatttctatttaaattttagattatttttattaccatgtactgaatttttacatcctgataccctttccttctccatgtcagtatcatgttctctaattatcttgccaaattttgaaactacacacaaaaagcatacttgcattatttataataaaattgcattcagtggctttttaaaaaaatgtttgattcaaaactttaacatactgataagtaagaaacaattataatttctttacatactcaaaaccaagatagaaaaaggtgctatcgttcaacttcaaaacatgtttcctagtattaaggactttaatatagcaacagacaaaattattgttaacatggatgttacagctcaaaagatttataaaagattttaacctattttctcccttattatccactgctaatgtggatgtatgttcaaacaccttttagtattgatagcttacatatggccaaaggaatacagtttatagcaaaacatgggtatgctgtagctaactttataaaagtgtaatataacaatgtaaaaaattatatatctgggaggattttttggttgcctaaagtggctatagttactgattttttattatgtaagcaaaaccaataaaaatttaagtttttttaacaactaccttatttttcactgtacagacactaattcattaaatactaattgattgtttaaaagaaatataaatgtgacaagtggacattatttatgttaaatatacaattatcaagcaagtatgaagttattcaattaaaatgccacatttctggtctctgggctgga

SEQ ID NO: 323147 - DNA, 4815 bp, Homo sapiens
attcgggcttggtgttgaattaaaatcattgattgaaccttattctggggcttcggtttggcttactagtttgggattttaaaaaaataaaaattaagcctatagagagggcaaattaaaattaggttgggtaaaggaaggagcgcgagtgtttgaagccgtttggagggaacagcggtttccaagttcctgctgacttgagaagtctctgcgggtttccgaatctccggcgcactcctgggcgcgctgcgggagctgtagctcagccagccagggagtagcggctttcatccgccgggaggagtctttcgagttcaatcgcggggtatagaggttcccctgcggggcaaaatgcagagcttgacacaagcccttggcctctaggtgccttaattccgcggttcccacgcacgcttaactaagacgtgtctgtattcctcccgttacgtgaaagagttcggagctttgcctgggacccccatcattccctccctggcacaccccttccagaacgccccgccccactgcatattatttacccctcctggccacgcgggggaagaaaaacagctgagagggcatcaggaaggagtttcgacccgcgctggcgagtcatgagcgccaagtttcccactggcgcgcaaacttgagttacttttgagcgtggatactggcgaagaggctgcgggcggtattagcgtttgcagcgacttggctcgggcagctgacccaagtgtcctgtcttccttcctctgcttgtctctaggctctgaaactgcggagcggccaccggacgccttctggagcaggtagcagcatgcagccgcctccaagtctgtgcggacgcgccctggttgcgctggttcttgcctgcggcctgtcgcggatctggggagaggagagaggcttcccgcctgacagggccactccgcttttgcaaaccgcagagataatgacgccacccactaagaccttatggcccaagggttccaacgccagtctggcgcggtcgttggcacctgcggaggtgcctaaaggagacaggacggcaggatctccgccacgcaccatctcccctcccccgtgccaaggacccatcgagatcaaggagactttcaaatacatcaacacggttgtgtcctgccttgtgttcgtgctggggatcatcgggaactccacacttctgagaattatctacaagaacaagtgcatgcgaaacggtcccaatatcttgatcgccagcttggctctgggagacctgctgcacatcgtcattgacatccctatcaatgtctacaagctgctggcagaggactggccatttggagctgagatgtgtaagctggtgcctttcatacagaaagcctccgtgggaatcactgtgctgagtctatgtgctctgagtattgacagatatcgagctgttgcttcttggagtagaattaaaggaattggggttccaaaatggacagcagtagaaattgttttgatttgggtggtctctgtggttctggctgtccctgaagccataggttttgatataattacgatggactacaaaggaagttatctgcgaatctgcttgcttcatcccgttcagaagacagctttcatgcagttttacaagacagcaaaagattggtggctgttcagtttctatttctgcttgccattggccatcactgcatttttttatacactaatgacctgtgaaatgttgagaaagaaaagtggcatgcagattgctttaaatgatcacctaaagcagagacgggaagtggccaaaaccgtcttttgcctggtccttgtctttgccctctgctggcttccccttcacctcagcaggattctgaagctcactctttataatcagaatgatcccaatagatgtgaacttttgagctttctgttggtattggactatattggtatcaacatggcttcactgaattcctgcattaacccaattgctctgtatttggtgagcaaaagattcaaaaactgctttaagtcatgcttatgctgctggtgccagtcatttgaagaaaaacagtccttggaggaaaagcagtcgtgcttaaagttcaaagctaatgatcacggatatgacaacttccgttccagtaataaatacagctcatcttgaaagaagaactattcactgtatttcattttctttatattggaccgaagtcattaaaacaaaatgaaacatttgccaaaacaaaacaaaaaactatgtatttgcacagcacactattaaaatattaagtgtaattattttaacactcacagctacatatgacattttatgagctgtttacggcatggaaagaaaatcagtgggaattaagaaagcctcgtcgtgaaagcacttaattttttacagttagcacttcaacatagctcttaacaacttccaggatattcacacaacacttaggcttaaaaatgagctcactcagaatttctattctttctaaaaagagatttatttttaaatcaatgggactctgatataaaggaagaataagtcactgtaaaacagaacttttaaatgaagcttaaattactcaatttaaaattttaaaatcctttaaaacaacttttcaattaatattatcacactattatcagattgtaattagatgcaaatgagagagcagtttagttgttgcatttttcggacactggaaacatttaaatgatcaggagggagtaacagaaagagcaaggctgtttttgaaaatcattacactttcactagaagcccaaacctcagcattctgcaatatgtaaccaacatgtcacaaacaagcagcatgtaacagactggcacatgtgccagctgaatttaaaatataatacttttaaaaagaaaattattacatcctttacattcagttaagatcaaacctcacaaagagaaatagaatgtttgaaaggctatcccaaaagacttttttgaatctgtcattcacataccctgtgaagacaatactatctacaattttttcaggattattaaaatcttcttctttcactatcgtagcttaaactctgtttggttttgtcatctgtaaatacttacctacatacactgcatgtagatgattaaatgagggcaggccctgtgctcatagctttacgatggagagatgccagtgacctcataataaagactgtgaactgcctggtgcagtgtccacatgacaaaggggcaggtagcaccctctctcacccatgctgtggttaaaatggtttctagcatatgtataatgctatagttaaaatactatttttcaaaatcatacagattagtacatttaacagctacctgtaaagcttattactaatttttgtattatttttgtaaatagccaatagaaaagtttgcttgacatggtgcttttctttcatctagaggcaaaactgctttttgagaccgtaagaacctcttagctttgtgcgttcctgcctaatttttatatcttctaagcaaagtgccttaggatagcttgggatgagatgtgtgtgaaagtatgtacaagagaaaacggaagagagaggaaatgaggtggggttggaggaaacccatggggacagattcccattcttagcctaacgttcgtcattgcctcgtcacatcaatgcaaaaggtcctgattttgttccagcaaaacacagtgcaatgttctcagagtgactttcgaaataaattgggcccaagagctttaactcggtcttaaaatatgcccaaatttttactttgtttttcttttaataggctgggccacatgttggaaataagctagtaatgttgttttctgtcaatattgaatgtgatggtacagtaaaccaaaacccaacaatgtggccagaaagaaagagcaataataattaattcacacaccatatggattctatttataaatcacccacaaacttgttctttaatttcatcccaatcactttttcagaggcctgttatcatagaagtcattttagactctcaattttaaattaattttgaatcactaatattttcacagtttattaatatatttaatttctatttaaattttagattatttttattaccatgtactgaatttttacatcctgataccctttccttctccatgtcagtatcatgttctctaattatcttgccaaattttgaaactacacacaaaaagcatacttgcattatttataataaaattgcattcagtggctttttaaaaaaatgtttgattcaaaactttaacatactgataagtaagaaacaattataatttctttacatactcaaaaccaagatagaaaaaggtgctatcgttcaacttcaaaacatgtttcctagtattaaggactttaatatagcaacagacaaaattattgttaacatggatgttacagctcaaaagatttattcaaacaccttttagtattgatagcttacatatggccaaaggaatacagtttatagcaaaacatgggtatgctgtagctaactttataaaagtgtaatataacaatgtaaaaaattatatatctgggaggattttttggttgcctaaagtggctatagttactgattttttattatgtaagcaaaaccaataaaaatttaagtttttttaacaactaccttatttttcactgtacagacactaattcattaaatactaattgattgtttaaaagaaatataaatgtgacaagtggacattatttatgttaaatatacaattatcaagcaagtatgaagttattcaattaaaatgccacatttctggtctctgggctgga

SEQ ID NO: 323148 - DNA, 4488 bp, Homo sapiens
attcgggcttggtgttgaattaaaatcattgattgaaccttattctggggcttcggtttggcttactagtttgggattttaaaaaaataaaaattaagcctatagagagggcaaattaaaattaggttgggtaaaggaaggagcgcgagtgtttgaagccgtttggagggaacagcggtttccaagttcctgctgacttgagaagtctctgcgggtttccgaatctccggcgcactcctgggcgcgctgcgggagctgtagctcagccagccagggagtagcggctttcatccgccgggaggagtctttcgagttcaatcgcggggtatagaggttcccctgcggggcaaaatgcagagcttgacacaagcccttggcctctaggctctgaaactgcggagcggccaccggacgccttctggagcaggtagcagcatgcagccgcctccaagtctgtgcggacgcgccctggttgcgctggttcttgcctgcggcctgtcgcggatctggggagaggagagaggcttcccgcctgacagggccactccgcttttgcaaaccgcagagataatgacgccacccactaagaccttatggcccaagggttccaacgccagtctggcgcggtcgttggcacctgcggaggtgcctaaaggagacaggacggcaggatctccgccacgcaccatctcccctcccccgtgccaaggacccatcgagatcaaggagactttcaaatacatcaacacggttgtgtcctgccttgtgttcgtgctggggatcatcgggaactccacacttctgagaattatctacaagaacaagtgcatgcgaaacggtcccaatatcttgatcgccagcttggctctgggagacctgctgcacatcgtcattgacatccctatcaatgtctacaagctgctggcagaggactggccatttggagctgagatgtgtaagctggtgcctttcatacagaaagcctccgtgggaatcactgtgctgagtctatgtgctctgagtattgacagatatcgagctgttgcttcttggagtagaattaaaggaattggggttccaaaatggacagcagtagaaattgttttgatttgggtggtctctgtggttctggctgtccctgaagccataggttttgatataattacgatggactacaaaggaagttatctgcgaatctgcttgcttcatcccgttcagaagacagctttcatgcagttttacaagacagcaaaagattggtggctgttcagtttctatttctgcttgccattggccatcactgcatttttttatacactaatgacctgtgaaatgttgagaaagaaaagtggcatgcagattgctttaaatgatcacctaaagcagagacgggaagtggccaaaaccgtcttttgcctggtccttgtctttgccctctgctggcttccccttcacctcagcaggattctgaagctcactctttataatcagaatgatcccaatagatgtgaacttttgagctttctgttggtattggactatattggtatcaacatggcttcactgaattcctgcattaacccaattgctctgtatttggtgagcaaaagattcaaaaactgctttaagtcatgcttatgctgctggtgccagtcatttgaagaaaaacagtccttggaggaaaagcagtcgtgcttaaagttcaaagctaatgatcacggatatgacaacttccgttccagtaataaatacagctcatcttgaaagaagaactattcactgtatttcattttctttatattggaccgaagtcattaaaacaaaatgaaacatttgccaaaacaaaacaaaaaactatgtatttgcacagcacactattaaaatattaagtgtaattattttaacactcacagctacatatgacattttatgagctgtttacggcatggaaagaaaatcagtgggaattaagaaagcctcgtcgtgaaagcacttaattttttacagttagcacttcaacatagctcttaacaacttccaggatattcacacaacacttaggcttaaaaatgagctcactcagaatttctattctttctaaaaagagatttatttttaaatcaatgggactctgatataaaggaagaataagtcactgtaaaacagaacttttaaatgaagcttaaattactcaatttaaaattttaaaatcctttaaaacaacttttcaattaatattatcacactattatcagattgtaattagatgcaaatgagagagcagtttagttgttgcatttttcggacactggaaacatttaaatgatcaggagggagtaacagaaagagcaaggctgtttttgaaaatcattacactttcactagaagcccaaacctcagcattctgcaatatgtaaccaacatgtcacaaacaagcagcatgtaacagactggcacatgtgccagctgaatttaaaatataatacttttaaaaagaaaattattacatcctttacattcagttaagatcaaacctcacaaagagaaatagaatgtttgaaaggctatcccaaaagacttttttgaatctgtcattcacataccctgtgaagacaatactatctacaattttttcaggattattaaaatcttcttctttcactatcgtagcttaaactctgtttggttttgtcatctgtaaatacttacctacatacactgcatgtagatgattaaatgagggcaggccctgtgctcatagctttacgatggagagatgccagtgacctcataataaagactgtgaactgcctggtgcagtgtccacatgacaaaggggcaggtagcaccctctctcacccatgctgtggttaaaatggtttctagcatatgtataatgctatagttaaaatactatttttcaaaatcatacagattagtacatttaacagctacctgtaaagcttattactaatttttgtattatttttgtaaatagccaatagaaaagtttgcttgacatggtgcttttctttcatctagaggcaaaactgctttttgagaccgtaagaacctcttagctttgtgcgttcctgcctaatttttatatcttctaagcaaagtgccttaggatagcttgggatgagatgtgtgtgaaagtatgtacaagagaaaacggaagagagaggaaatgaggtggggttggaggaaacccatggggacagattcccattcttagcctaacgttcgtcattgcctcgtcacatcaatgcaaaaggtcctgattttgttccagcaaaacacagtgcaatgttctcagagtgactttcgaaataaattgggcccaagagctttaactcggtcttaaaatatgcccaaatttttactttgtttttcttttaataggctgggccacatgttggaaataagctagtaatgttgttttctgtcaatattgaatgtgatggtacagtaaaccaaaacccaacaatgtggccagaaagaaagagcaataataattaattcacacaccatatggattctatttataaatcacccacaaacttgttctttaatttcatcccaatcactttttcagaggcctgttatcatagaagtcattttagactctcaattttaaattaattttgaatcactaatattttcacagtttattaatatatttaatttctatttaaattttagattatttttattaccatgtactgaatttttacatcctgataccctttccttctccatgtcagtatcatgttctctaattatcttgccaaattttgaaactacacacaaaaagcatacttgcattatttataataaaattgcattcagtggctttttaaaaaaatgtttgattcaaaactttaacatactgataagtaagaaacaattataatttctttacatactcaaaaccaagatagaaaaaggtgctatcgttcaacttcaaaacatgtttcctagtattaaggactttaatatagcaacagacaaaattattgttaacatggatgttacagctcaaaagatttataaaagattttaacctattttctcccttattatccactgctaatgtggatgtatgttcaaacaccttttagtattgatagcttacatatggccaaaggaatacagtttatagcaaaacatgggtatgctgtagctaactttataaaagtgtaatataacaatgtaaaaaattatatatctgggaggattttttggttgcctaaagtggctatagttactgattttttattatgtaagcaaaaccaataaaaatttaagtttttttaacaactaccttatttttcactgtacagacactaattcattaaatactaattgattgtttaaaagaaatataaatgtgacaagtggacattatttatgttaaatatacaattatcaagcaagtatgaagttattcaattaaaatgccacatttctggtctctgggctgga

SEQ ID NO: 323149 - DNA, 2920 bp, Homo sapiens
gaggaagagttgggaaaggtgactgatgttaacatataatgagttactttgttttgtacagtcatgcttatgctgctggtgccagtcatttgaagaaaaacagtccttggaggaaaagcagtcgtgcttaaagttcaaagctaatgatcacggatatgacaacttccgttccagtaataaatacagctcatcttgaaagaagaactattcactgtatttcattttctttatattggaccgaagtcattaaaacaaaatgaaacatttgccaaaacaaaacaaaaaactatgtatttgcacagcacactattaaaatattaagtgtaattattttaacactcacagctacatatgacattttatgagctgtttacggcatggaaagaaaatcagtgggaattaagaaagcctcgtcgtgaaagcacttaattttttacagttagcacttcaacatagctcttaacaacttccaggatattcacacaacacttaggcttaaaaatgagctcactcagaatttctattctttctaaaaagagatttatttttaaatcaatgggactctgatataaaggaagaataagtcactgtaaaacagaacttttaaatgaagcttaaattactcaatttaaaattttaaaatcctttaaaacaacttttcaattaatattatcacactattatcagattgtaattagatgcaaatgagagagcagtttagttgttgcatttttcggacactggaaacatttaaatgatcaggagggagtaacagaaagagcaaggctgtttttgaaaatcattacactttcactagaagcccaaacctcagcattctgcaatatgtaaccaacatgtcacaaacaagcagcatgtaacagactggcacatgtgccagctgaatttaaaatataatacttttaaaaagaaaattattacatcctttacattcagttaagatcaaacctcacaaagagaaatagaatgtttgaaaggctatcccaaaagacttttttgaatctgtcattcacataccctgtgaagacaatactatctacaattttttcaggattattaaaatcttcttctttcactatcgtagcttaaactctgtttggttttgtcatctgtaaatacttacctacatacactgcatgtagatgattaaatgagggcaggccctgtgctcatagctttacgatggagagatgccagtgacctcataataaagactgtgaactgcctggtgcagtgtccacatgacaaaggggcaggtagcaccctctctcacccatgctgtggttaaaatggtttctagcatatgtataatgctatagttaaaatactatttttcaaaatcatacagattagtacatttaacagctacctgtaaagcttattactaatttttgtattatttttgtaaatagccaatagaaaagtttgcttgacatggtgcttttctttcatctagaggcaaaactgctttttgagaccgtaagaacctcttagctttgtgcgttcctgcctaatttttatatcttctaagcaaagtgccttaggatagcttgggatgagatgtgtgtgaaagtatgtacaagagaaaacggaagagagaggaaatgaggtggggttggaggaaacccatggggacagattcccattcttagcctaacgttcgtcattgcctcgtcacatcaatgcaaaaggtcctgattttgttccagcaaaacacagtgcaatgttctcagagtgactttcgaaataaattgggcccaagagctttaactcggtcttaaaatatgcccaaatttttactttgtttttcttttaataggctgggccacatgttggaaataagctagtaatgttgttttctgtcaatattgaatgtgatggtacagtaaaccaaaacccaacaatgtggccagaaagaaagagcaataataattaattcacacaccatatggattctatttataaatcacccacaaacttgttctttaatttcatcccaatcactttttcagaggcctgttatcatagaagtcattttagactctcaattttaaattaattttgaatcactaatattttcacagtttattaatatatttaatttctatttaaattttagattatttttattaccatgtactgaatttttacatcctgataccctttccttctccatgtcagtatcatgttctctaattatcttgccaaattttgaaactacacacaaaaagcatacttgcattatttataataaaattgcattcagtggctttttaaaaaaatgtttgattcaaaactttaacatactgataagtaagaaacaattataatttctttacatactcaaaaccaagatagaaaaaggtgctatcgttcaacttcaaaacatgtttcctagtattaaggactttaatatagcaacagacaaaattattgttaacatggatgttacagctcaaaagatttataaaagattttaacctattttctcccttattatccactgctaatgtggatgtatgttcaaacaccttttagtattgatagcttacatatggccaaaggaatacagtttatagcaaaacatgggtatgctgtagctaactttataaaagtgtaatataacaatgtaaaaaattatatatctgggaggattttttggttgcctaaagtggctatagttactgattttttattatgtaagcaaaaccaataaaaatttaagtttttttaacaactaccttatttttcactgtacagacactaattcattaaatactaattgattgtttaaaagaaatataaatgtgacaagtggacattatttatgttaaatatacaattatcaagcaagtatgaagttattcaattaaaatgccacatttctggtctctgggctgga

SEQ ID NO: 323150 - DNA, 2284 bp, Homo sapiens
attcgggcttggtgttgaattaaaatcattgattgaaccttattctggggcttcggtttggcttactagtttgggattttaaaaaaataaaaattaagcctatagagagggcaaattaaaattaggttgggtaaaggaaggagcgcgagtgtttgaagccgtttggagggaacagcggtttccaagttcctgctgacttgagaagtctctgcgggtttccgaatctccggcgcactcctgggcgcgctgcgggagctgtagctcagccagccagggagtagcggctttcatccgccgggaggagtctttcgagttcaatcgcggggtatagaggttcccctgcggggcaaaatgcagagcttgacacaagcccttggcctctaggtgccttaattccgcggttcccacgcacgcttaactaagacgtgtctgtattcctcccgttacgtgaaagagttcggagctttgcctgggacccccatcattccctccctggcacaccccttccagaacgccccgccccactgcatattatttacccctcctggccacgcgggggaagaaaaacagctgagagggcatcaggaaggagtttcgacccgcgctggcgagtcatgagcgccaagtttcccactggcgcgcaaacttgagttacttttgagcgtggatactggcgaagaggctgcgggcggtattagcgtttgcagcgacttggctcgggcagctgacccaagtgtcctgtcttccttcctctgcttgtctctaggctctgaaactgcggagcggccaccggacgccttctggagcaggtagcagcatgcagccgcctccaagtctgtgcggacgcgccctggttgcgctggttcttgcctgcggcctgtcgcggatctggggagaggagagaggcttcccgcctgacagggccactccgcttttgcaaaccgcagagataatgacgccacccactaagaccttatggcccaagggttccaacgccagtctggcgcggtcgttggcacctgcggaggtgcctaaaggagacaggacggcaggatctccgccacgcaccatctcccctcccccgtgccaaggacccatcgagatcaaggagactttcaaatacatcaacacggttgtgtcctgccttgtgttcgtgctggggatcatcgggaactccacacttctgagaattatctacaagaacaagtgcatgcgaaacggtcccaatatcttgatcgccagcttggctctgggagacctgctgcacatcgtcattgacatccctatcaatgtctacaagctgctggcagaggactggccatttggagctgagatgtgtaagctggtgcctttcatacagaaagcctccgtgggaatcactgtgctgagtctatgtgctctgagtattgacagatatcgagctgttgcttcttggagtagaattaaaggaattggggttccaaaatggacagcagtagaaattgttttgatttgggtggtctctgtggttctggctgtccctgaagccataggttttgatataattacgatggactacaaaggaagttatctgcgaatctgcttgcttcatcccgttcagaagacagctttcatgcagttttacaagacagcaaaagattggtggctgttcagtttctatttctgcttgccattggccatcactgcatttttttatacactaatgacctgtgaaatgttgagaaagaaaagtggcatgcagattgctttaaatgatcacctaaagcagagacgggaagtggccaaaaccgtcttttgcctggtccttgtctttgccctctgctggcttccccttcacctcagcaggattctgaagctcactctttataatcagaatgatcccaatagatgtgaacttttgagctttctgttggtattggactatattggtatcaacatggcttcactgaattcctgcattaacccaattgctctgtatttggtgagcaaaagattcaaaaactgctttaagtcatgcttatgctgctggtgccagtcatttgaagaaaaacagtccttggaggaaaagcagtcgtgcttaaagttcaaagctaatgatcacggatatgacaacttccgttccagtaataaatacagctcatcttgaaagaagaactattcactgtatttcattttctttatattggaccgaagtcattaaaacaaaatgaaacatttgccaaaacaaaacaaaaaactatgtatttgcacagcacactattaaaatattaagtgtaattatttt

SEQ ID NO: 323151 - DNA, 2154 bp, Homo sapiens
attcgggcttggtgttgaattaaaatcattgattgaaccttattctggggcttcggtttggcttactagtttgggattttaaaaaaataaaaattaagcctatagagagggcaaattaaaattaggttgggtaaaggaaggagcgcgagtgtttgaagccgtttggagggaacagcggtttccaagttcctgctgacttgagaagtctctgcgggtttccgaatctccggcgcactcctgggcgcgctgcgggagctgtagctcagccagccagggagtagcggctttcatccgccgggaggagtctttcgagttcaatcgcggggtatagaggttcccctgcggggcaaaatgcagagcttgacacaagcccttggcctctaggtgccttaattccgcggttcccacgcacgcttaactaagacgtgtctgtattcctcccgttacgtgaaagagttcggagctttgcctgggacccccatcattccctccctggcacaccccttccagaacgccccgccccactgcatattatttacccctcctggccacgcgggggaagaaaaacagctgagagggcatcaggaaggagtttcgacccgcgctggcgagtcatgagcgccaagtttcccactggcgcgcaaacttgagttacttttgagcgtggatactggcgaagaggctgcgggcggtattagcgtttgcagcgacttggctcgggcagctgacccaagtgtcctgtcttccttcctctgcttgtctctaggctctgaaactgcggagcggccaccggacgccttctggagcaggtagcagcatgcagccgcctccaagtctgtgcggacgcgccctggttgcgctggttcttgcctgcggcctgtcgcggatctggggagaggagagaggcttcccgcctgacagggccactccgcttttgcaaaccgcagagataatgacgccacccactaagaccttatggcccaagggttccaacgccagtctggcgcggtcgttggcacctgcggaggtgcctaaaggagacaggacggcaggatctccgccacgcaccatctcccctcccccgtgccaaggacccatcgagatcaaggagactttcaaatacatcaacacggttgtgtcctgccttgtgttcgtgctggggatcatcgggaactccacacttctgagaattatctacaagaacaagtgcatgcgaaacggtcccaatatcttgatcgccagcttggctctgggagacctgctgcacatcgtcattgacatccctatcaatgtctacaagctgctggcagaggactggccatttggagctgagatgtgtaagctggtgcctttcatacagaaagcctccgtgggaatcactgtgctgagtctatgtgctctgagtattgacagatatcgagctgttgcttcttggagtagaattaaaggaattggggttccaaaatggacagcagtagaaattgttttgatttgggtggtctctgtggttctggctgtccctgaagccataggttttgatataattacgatggactacaaaggaagttatctgcgaatctgcttgcttcatcccgttcagaagacagctttcatgcagttttacaagacagcaaaagattggtggctgttcagtttctatttctgcttgccattggccatcactgcatttttttatacactaatgacctgtgaaatgttgagaaagaaaagtggcatgcagattgctttaaatgatcacctaaagcagagacgggaagtggccaaaaccgtcttttgcctggtccttgtctttgccctctgctggcttccccttcacctcagcaggattctgaagctcactctttataatcagaatgatcccaatagatgtgaacttttgagctttctgttggtattggactatattggtatcaacatggcttcactgaattcctgcattaacccaattgctctgtatttggtgagcaaaagattcaaaaactgctttaagtcatgcttatgctgctggtgccagtcatttgaagaaaaacagtccttggaggaaaagcagtcgtgcttaaagttcaaagctaatgatcacggatatgacaacttccgttccagtaataaatacagctcatcttgaaagaagaa

SEQ ID NO: 323152 - DNA, 2795 bp, Homo sapiens
attcgggcttggtgttgaattaaaatcattgattgaaccttattctggggcttcggtttggcttactagtttgggattttaaaaaaataaaaattaagcctatagagagggcaaattaaaattaggttgggtaaaggaaggagcgcgagtgtttgaagccgtttggagggaacagcggtttccaagttcctgctgacttgagaagtctctgcgggtttccgaatctccggcgcactcctgggcgcgctgcgggagctgtagctcagccagccagggagtagcggctttcatccgccgggaggagtctttcgagttcaatcgcggggtatagaggttcccctgcggggcaaaatgcagagcttgacacaagcccttggcctctaggtgccttaattccgcggttcccacgcacgcttaactaagacgtgtctgtattcctcccgttacgtgaaagagttcggagctttgcctgggacccccatcattccctccctggcacaccccttccagaacgccccgccccactgcatattatttacccctcctggccacgcgggggaagaaaaacagctgagagggcatcaggaaggagtttcgacccgcgctggcgagtcatgagcgccaagtttcccactggcgcgcaaacttgagttacttttgagcgtggatactggcgaagaggctgcgggcggtattagcgtttgcagcgacttggctcgggcagctgacccaagtgtcctgtcttccttcctctgcttgtctctaggctctgaaactgcggagcggccaccggacgccttctggagcaggtagcagcatgcagccgcctccaagtctgtgcggacgcgccctggttgcgctggttcttgcctgcggcctgtcgcggatctggggagaggagagaggcttcccgcctgacagggccactccgcttttgcaaaccgcagagataatgacgccacccactaagaccttatggcccaagggttccaacgccagtctggcgcggtcgttggcacctgcggaggtgcctaaaggagacaggacggcaggatctccgccacgcaccatctcccctcccccgtgccaaggacccatcgagatcaaggagactttcaaatacatcaacacggttgtgtcctgccttgtgttcgtgctggggatcatcgggaactccacacttctgagaattatctacaagaacaagtgcatgcgaaacggtcccaatatcttgatcgccagcttggctctgggagacctgctgcacatcgtcattgacatccctatcaatgtctacaagctgctggcagaggactggccatttggagctgagatgtgtaagctggtgcctttcatacagaaagcctccgtgggaatcactgtgctgagtctatgtgctctgagtattgacagatatcgagctgttgcttcttggagtagaattaaaggaattggggttccaaaatggacagcagtagaaattgttttgatttgggtggtctctgtggttctggctgtccctgaagccataggttttgatataattacgatggactacaaaggaagttatctgcgaatctgcttgcttcatcccgttcagaagacagctttcatgcagttttacaagacagcaaaagattggtggctgttcagtttctatttctgcttgccattggccatcactgcatttttttatacactaatgacctgtgaaatgttgagaaagaaaagtggcatgcagattgctttaaatgatcacctaaagcagagacgggaagtggccaaaaccgtcttttgcctggtccttgtctttgccctctgctggcttccccttcacctcagcaggattctgaagctcactctttataatcagaatgatcccaatagatgtgaacttttgagctttctgttggtattggactatattggtatcaacatggcttcactgaattcctgcattaacccaattgctctgtatttggtgagcaaaagattcaaaaactgctttaaggtaagagactatcccaaaataaaaagctctttgtaatatggctcaaatataagctttcaaaactgctaatatatctatccagacagatttagtaaattatcttatagtttcccttttattacatcatggatgatttttttaaatacaacttttgcttgtaaatcactataattgttttttcctataaatcctagtcagccactccctactgcctcagccaatcagttacactcatggaattgttgaccaaaaagtaataaaaattacatgcattgatgtctgataggcatcacataataaaataagggctaaacatgaattaaaggccctgttccctgtttttggtagattctgaacttcgcagctgcaattattattataactaaattagttcctttttcacatggactgtgagaatagcaaggtaaacaaaaaaaaaatagtttaggttttacctctttcttccttttttgtataacagtgatgtgctgttcaatgtgaaatacatataattccttcttcagctgcttgcattttatcatccttctattcattcactccttcaacaatctaacatgaaataaaatatcccctcccctaatgtgaaaatcatccatttgtccatggtatttcactactggaaagctaagaacgtagctcccgcgtaaacactaaggcagcctataacattcttcgcccactcataactcaaattttagagttggaagagaacttccatcaggatcaacaccctcattttataagacataaaacagtggacttc

SEQ ID NO: 323153 - DNA, 2020 bp, Homo sapiens
attcgggcttggtgttgaattaaaatcattgattgaaccttattctggggcttcggtttggcttactagtttgggattttaaaaaaataaaaattaagcctatagagagggcaaattaaaattaggttgggtaaaggaaggagcgcgagtgtttgaagccgtttggagggaacagcggtttccaagttcctgctgacttgagaagtctctgcgggtttccgaatctccggcgcactcctgggcgcgctgcgggagctgtagctcagccagccagggagtagcggctttcatccgccgggaggagtctttcgagttcaatcgcggggtatagaggttcccctgcggggcaaaatgcagagcttgacacaagcccttggcctctaggtgccttaattccgcggttcccacgcacgcttaactaagacgtgtctgtattcctcccgttacgtgaaagagttcggagctttgcctgggacccccatcattccctccctggcacaccccttccagaacgccccgccccactgcatattatttacccctcctggccacgcgggggaagaaaaacagctgagagggcatcaggaaggagtttcgacccgcgctggcgagtcatgagcgccaagtttcccactggcgcgcaaacttgagttacttttgagcgtggatactggcgaagaggctgcgggcggtattagcgtttgcagcgacttggctcgggcagctgacccaagtgtcctgtcttccttcctctgcttgtctctaggctctgaaactgcggagcggccaccggacgccttctggagcaggtagcagcatgcagccgcctccaagtctgtgcggacgcgccctggttgcgctggttcttgcctgcggcctgtcgcggatctggggagaggagagaggcttcccgcctgacagggccactccgcttttgcaaaccgcagagataatgacgccacccactaagaccttatggcccaagggttccaacgccagtctggcgcggtcgttggcacctgcggaggtgcctaaaggagacaggacggcaggatctccgccacgcaccatctcccctcccccgtgccaaggacccatcgagatcaaggagactttcaaatacatcaacacggttgtgtcctgccttgtgttcgtgctggggatcatcgggaactccacacttctgagaattatctacaagaacaagtgcatgcgaaacggtcccaatatcttgatcgccagcttggctctgggagacctgctgcacatcgtcattgacatccctatcaatgtctacaagctgctggcagaggactggccatttggagctgagatgtgtaagctggtgcctttcatacagaaagcctccgtgggaatcactgtgctgagtctatgtgctctgagtattgacagatatcgagctgttgcttcttggagtagaattaaaggaattggggttccaaaatggacagcagtagaaattgttttgatttgggtggtctctgtggttctggctgtccctgaagccataggttttgatataattacgatggactacaaaggaagttatctgcgaatctgcttgcttcatcccgttcagaagacagctttcatgcagttttacaagacagcaaaagattggtggctgttcagtttctatttctgcttgccattggccatcactgcatttttttatacactaatgacctgtgaaatgttgagaaagaaaagtggcatgcagattgctttaaatgatcacctaaagcagctttctgttggtattggactatattggtatcaacatggcttcactgaattcctgcattaacccaattgctctgtatttggtgagcaaaagattcaaaaactgctttaagtcatgcttatgctgctggtgccagtcatttgaagaaaaacagtccttggaggaaaagcagtcgtgcttaaagttcaaagctaatgatcacggatatgacaacttccgttccagtaataaatacagctcatcttgaaagaagaa

SEQ ID NO: 323154 - DNA, 1334 bp, Homo sapiens
  misc_feature (1278)..(1278): n is a, c, g, or t
  misc_feature (1307)..(1307): n is a, c, g, or t
  misc_feature (1313)..(1313): n is a, c, g, or t
attcgggcttggtgttgaattaaaatcattgattgaaccttattctggggcttcggtttggcttactagtttgggattttaaaaaaataaaaattaagcctatagagagggcaaattaaaattaggttgggtaaaggaaggagcgcgagtgtttgaagccgtttggagggaacagcggtttccaagttcctgctgacttgagaagtctctgcgggtttccgaatctccggcgcactcctgggcgcgctgcgggagctgtagctcagccagccagggagtagcggctttcatccgccgggaggagtctttcgagttcaatcgcggggtatagaggttcccctgcggggcaaaatgcagagcttgacacaagcccttggcctctaggtgccttaattccgcggttcccacgcacgcttaactaagacgtgtctgtattcctcccgttacgtgaaagagttcggagctttgcctgggacccccatcattccctccctggcacaccccttccagaacgccccgccccactgcatattatttacccctcctggccacgcgggggaagaaaaacagctgagagggcatcaggaaggagtttcgacccgcgctggcgagtcatgagcgccaagtttcccactggcgcgcaaacttgagttacttttgagcgtggatactggcgaagaggctgcgggcggtattagcgtttgcagcgacttggctcgggcagctgacccaagtgtcctgtcttccttcctctgcttgtctctaggctctgaaactgcggagcggccaccggacgccttctggagcaggtagcagcatgcagccgcctccaagtctgtgcggacgcgccctggttgcgctggttcttgcctgcggcctgtcgcggatctggggagaggagagaggcttcccgcctgacagggccactccgcttttgcaaaccgcagagataatgacgccacccactaagaccttatggcccaagggttccaacgccagtctggcgcggtcgttggcacctgcggaggtgcctaaaggagacaggacggcaggatctccgccacgcaccatctcccctcccccgtgccaaggacccatcgagatcaaggagactttcaaatacatcaacacggttgtgtcctgccttgtgttcgtgctggggatcatcgggaactccacacttctgagaattatctacaagaacaagtgcatgcgaaacggtcccaatatcttgatcgccagcttggctctgggaaaacctggcctggaacaatccgncaattgacaatcccctaatcaaatgtccnacaaanccttggctggggcaaaaggga

SEQ ID NO: 323155 - DNA, 1870 bp, Homo sapiens
aaacagccttttgggacctgtccccggacgaggactgcccccctccctcgggcaactactactgatgctgtccaggcatcgcccaaggggaaaggttgcagcggggtcggaaggcgcgggaggagtctggcggtgattgatgggaagggatgaatgaataaaagtacttgtctgatggcagcagagaccccgagcaaacggtggaggctacactgtctggcattctcgcagcgtttcgtcagagccggacccgcctgcagctcaagggaggcgtgctcctctcccagagcaggctggaacccagctgggttccgcctcccgggaaggtggtctccattcgtcgctctgcatctggtttgtcagatccgagaggctctgaaactgcggagcggccaccggacgccttctggagcaggtagcagcatgcagccgcctccaagtctgtgcggacgcgccctggttgcgctggttcttgcctgcggcctgtcgcggatctggggagaggagagaggcttcccgcctgacagggccactccgcttttgcaaaccgcagagataatgacgccacccactaagaccttatggcccaagggttccaacgccagtctggcgcggtcgttggcacctgcggaggtgcctaaaggagacaggacggcaggatctccgccacgcaccatctcccctcccccgtgccaaggacccatcgagatcaaggagactttcaaatacatcaacacggttgtgtcctgccttgtgttcgtgctggggatcatcgggaactccacacttctgagaattatctacaagaacaagtgcatgcgaaacggtcccaatatcttgatcgccagcttggctctgggagacctgctgcacatcgtcattgacatccctatcaatgtctacaagctgctggcagaggactggccatttggagctgagatgtgtaagctggtgcctttcatacagaaagcctccgtgggaatcactgtgctgagtctatgtgctctgagtattgacagatatcgagctgttgcttcttggagtagaattaaaggaattggggttccaaaatggacagcagtagaaattgttttgatttgggtggtctctgtggttctggctgtccctgaagccataggttttgatataattacgatggactacaaaggaagttatctgcgaatctgcttgcttcatcccgttcagaagacagctttcatgcagttttacaagacagcaaaagattggtggctgttcagtttctatttctgcttgccattggccatcactgcatttttttatacactaatgacctgtgaaatgttgagaaagaaaagtggcatgcagattgctttaaatgatcacctaaagcagagacgggaagtggccaaaaccgtcttttgcctggtccttgtctttgccctctgctggcttccccttcacctcagcaggattctgaagctcactctttataatcagaatgatcccaatagatgtgaacttttgagctttctgttggtattggactatattggtatcaacatggcttcactgaattcctgcattaacccaattgctctgtatttggtgagcaaaagattcaaaaactgctttaagtcatgcttatgctgctggtgccagtcatttgaagaaaaacagtccttggaggaaaagcagtcgtgcttaaagttcaaagctaatgatcacggatatgacaacttccgttccagtaataaatacagctcatcttgaaagaagaaaaaaaaaaattgggggcgggcgaaaatttaaattgtgggggggcgggaataaaggtaggcaaacggggaaggggtcacaaaaacggggggggggaaaggggtgggaaggt

SEQ ID NO: 323156 - DNA, 4429 bp, Homo sapiens
attcgggcttggtgttgaattaaaatcattgattgaaccttattctggggcttcggtttggcttactagtttgggattttaaaaaaataaaaattaagcctatagagagggcaaattaaaattaggttgggtaaaggaaggagcgcgagtgtttgaagccgtttggagggaacagcggtttccaagttcctgctgacttgagaagtctctgcgggtttccgaatctccggcgcactcctgggcgcgctgcgggagctgtagctcagccagccagggagtagcggctttcatccgccgggaggagtctttcgagttcaatcgcggggctctgaaactgcggagcggccaccggacgccttctggagcaggtagcagcatgcagccgcctccaagtctgtgcggacgcgccctggttgcgctggttcttgcctgcggcctgtcgcggatctggggagaggagagaggcttcccgcctgacagggccactccgcttttgcaaaccgcagagataatgacgccacccactaagaccttatggcccaagggttccaacgccagtctggcgcggtcgttggcacctgcggaggtgcctaaaggagacaggacggcaggatctccgccacgcaccatctcccctcccccgtgccaaggacccatcgagatcaaggagactttcaaatacatcaacacggttgtgtcctgccttgtgttcgtgctggggatcatcgggaactccacacttctgagaattatctacaagaacaagtgcatgcgaaacggtcccaatatcttgatcgccagcttggctctgggagacctgctgcacatcgtcattgacatccctatcaatgtctacaagctgctggcagaggactggccatttggagctgagatgtgtaagctggtgcctttcatacagaaagcctccgtgggaatcactgtgctgagtctatgtgctctgagtattgacagatatcgagctgttgcttcttggagtagaattaaaggaattggggttccaaaatggacagcagtagaaattgttttgatttgggtggtctctgtggttctggctgtccctgaagccataggttttgatataattacgatggactacaaaggaagttatctgcgaatctgcttgcttcatcccgttcagaagacagctttcatgcagttttacaagacagcaaaagattggtggctgttcagtttctatttctgcttgccattggccatcactgcatttttttatacactaatgacctgtgaaatgttgagaaagaaaagtggcatgcagattgctttaaatgatcacctaaagcagagacgggaagtggccaaaaccgtcttttgcctggtccttgtctttgccctctgctggcttccccttcacctcagcaggattctgaagctcactctttataatcagaatgatcccaatagatgtgaacttttgagctttctgttggtattggactatattggtatcaacatggcttcactgaattcctgcattaacccaattgctctgtatttggtgagcaaaagattcaaaaactgctttaagtcatgcttatgctgctggtgccagtcatttgaagaaaaacagtccttggaggaaaagcagtcgtgcttaaagttcaaagctaatgatcacggatatgacaacttccgttccagtaataaatacagctcatcttgaaagaagaactattcactgtatttcattttctttatattggaccgaagtcattaaaacaaaatgaaacatttgccaaaacaaaacaaaaaactatgtatttgcacagcacactattaaaatattaagtgtaattattttaacactcacagctacatatgacattttatgagctgtttacggcatggaaagaaaatcagtgggaattaagaaagcctcgtcgtgaaagcacttaattttttacagttagcacttcaacatagctcttaacaacttccaggatattcacacaacacttaggcttaaaaatgagctcactcagaatttctattctttctaaaaagagatttatttttaaatcaatgggactctgatataaaggaagaataagtcactgtaaaacagaacttttaaatgaagcttaaattactcaatttaaaattttaaaatcctttaaaacaacttttcaattaatattatcacactattatcagattgtaattagatgcaaatgagagagcagtttagttgttgcatttttcggacactggaaacatttaaatgatcaggagggagtaacagaaagagcaaggctgtttttgaaaatcattacactttcactagaagcccaaacctcagcattctgcaatatgtaaccaacatgtcacaaacaagcagcatgtaacagactggcacatgtgccagctgaatttaaaatataatacttttaaaaagaaaattattacatcctttacattcagttaagatcaaacctcacaaagagaaatagaatgtttgaaaggctatcccaaaagacttttttgaatctgtcattcacataccctgtgaagacaatactatctacaattttttcaggattattaaaatcttcttctttcactatcgtagcttaaactctgtttggttttgtcatctgtaaatacttacctacatacactgcatgtagatgattaaatgagggcaggccctgtgctcatagctttacgatggagagatgccagtgacctcataataaagactgtgaactgcctggtgcagtgtccacatgacaaaggggcaggtagcaccctctctcacccatgctgtggttaaaatggtttctagcatatgtataatgctatagttaaaatactatttttcaaaatcatacagattagtacatttaacagctacctgtaaagcttattactaatttttgtattatttttgtaaatagccaatagaaaagtttgcttgacatggtgcttttctttcatctagaggcaaaactgctttttgagaccgtaagaacctcttagctttgtgcgttcctgcctaatttttatatcttctaagcaaagtgccttaggatagcttgggatgagatgtgtgtgaaagtatgtacaagagaaaacggaagagagaggaaatgaggtggggttggaggaaacccatggggacagattcccattcttagcctaacgttcgtcattgcctcgtcacatcaatgcaaaaggtcctgattttgttccagcaaaacacagtgcaatgttctcagagtgactttcgaaataaattgggcccaagagctttaactcggtcttaaaatatgcccaaatttttactttgtttttcttttaataggctgggccacatgttggaaataagctagtaatgttgttttctgtcaatattgaatgtgatggtacagtaaaccaaaacccaacaatgtggccagaaagaaagagcaataataattaattcacacaccatatggattctatttataaatcacccacaaacttgttctttaatttcatcccaatcactttttcagaggcctgttatcatagaagtcattttagactctcaattttaaattaattttgaatcactaatattttcacagtttattaatatatttaatttctatttaaattttagattatttttattaccatgtactgaatttttacatcctgataccctttccttctccatgtcagtatcatgttctctaattatcttgccaaattttgaaactacacacaaaaagcatacttgcattatttataataaaattgcattcagtggctttttaaaaaaatgtttgattcaaaactttaacatactgataagtaagaaacaattataatttctttacatactcaaaaccaagatagaaaaaggtgctatcgttcaacttcaaaacatgtttcctagtattaaggactttaatatagcaacagacaaaattattgttaacatggatgttacagctcaaaagatttataaaagattttaacctattttctcccttattatccactgctaatgtggatgtatgttcaaacaccttttagtattgatagcttacatatggccaaaggaatacagtttatagcaaaacatgggtatgctgtagctaactttataaaagtgtaatataacaatgtaaaaaattatatatctgggaggattttttggttgcctaaagtggctatagttactgattttttattatgtaagcaaaaccaataaaaatttaagtttttttaacaactaccttatttttcactgtacagacactaattcattaaatactaattgattgtttaaaagaaatataaatgtgacaagtggacattatttatgttaaatatacaattatcaagcaagtatgaagttattcaattaaaatgccacatttctggtctctgggctgga

SEQ ID NO: 323157 - DNA, 3094 bp, Homo sapiens
attcgggcttggtgttgaattaaaatcattgattgaaccttattctggggcttcggtttggcttactagtttgggattttaaaaaaataaaaattaagcctatagagagggcaaattaaaattaggttgggtaaaggaaggagcgcgagtgtttgaagccgtttggagggaacagcggtttccaagttcctgctgacttgagaagtctctgcgggtttccgaatctccggcgcactcctgggcgcgctgcgggagctgtagctcagccagccagggagtagcggctttcatccgccgggaggagtctttcgagttcaatcgcggggtatagaggttcccctgcggggcaaaatgcagagcttgacacaagcccttggcctctaggtgccttaattccgcggttcccacgcacgcttaactaagacgtgtctgtattcctcccgttacgtgaaagagttcggagctttgcctgggacccccatcattccctccctggcacaccccttccagaacgccccgccccactgcatattatttacccctcctggccacgcgggggaagaaaaacagctgagagggcatcaggaaggagtttcgacccgcgctggcgagtcatgagcgccaagtttcccactggcgcgcaaacttgagttacttttgagcgtggatactggcgaagaggctgcgggcggtattagcgtttgcagcgacttggctcgggcagctgacccaagtgtcctgtcttccttcctctgcttgtctctaggctctgaaactgcggagcggccaccggacgccttctggagcaggtagcagcatgcagccgcctccaagtctgtgcggacgcgccctggttgcgctggttcttgcctgcggcctgtcgcggatctggggagaggagagaggcttcccgcctgacagggccactccgcttttgcaaaccgcagagataatgacgccacccactaagaccttatggcccaagggttccaacgccagtctggcgcggtcgttggcacctgcggaggtgcctaaaggagacaggacggcaggatctccgccacgcaccatctcccctcccccgtgccaaggacccatcgagatcaaggagactttcaaatacatcaacacggttgtgtcctgccttgtgttcgtgctggggatcatcgggaactccacacttctgagaattatctacaagaacaagtgcatgcgaaacggtcccaatatcttgatcgccagcttggctctgggagacctgctgcacatcgtcattgacatccctatcaatgtctacaagctgctggcagaggactggccatttggagctgagatgtgtaagctggtgcctttcatacagaaagcctccgtgggaatcactgtgctgagtctatgtgctctgagtattgacagatatcgagctgttgcttcttggagtagaattaaaggaattggggttccaaaatggacagcagtagaaattgttttgatttgggtggtctctgtggttctggctgtccctgaagccataggttttgatataattacgatggactacaaaggaagttatctgcgaatctgcttgcttcatcccgttcagaagacagctttcatgcagttttacaagacagcaaaagattggtggctgttcagtttctatttctgcttgccattggccatcactgcatttttttatacactaatgacctgtgaaatgttgagaaagaaaagtggcatgcagattgctttaaatgatcacctaaagcagagacgggaagtggccaaaaccgtcttttgcctggtccttgtctttgccctctgctggcttccccttcacctcagcaggattctgaagctcactctttataatcagaatgatcccaatagatgtgaacttttgagctttctgttggtattggactatattggtatcaacatggcttcactgaattcctgcattaacccaattgctctgtatttggtgagcaaaagattcaaaaactgctttaaggctgggccacatgttggaaataagctagtaatgttgttttctgtcaatattgaatgtgatggtacagtaaaccaaaacccaacaatgtggccagaaagaaagagcaataataattaattcacacaccatatggattctatttataaatcacccacaaacttgttctttaatttcatcccaatcactttttcagaggcctgttatcatagaagtcattttagactctcaattttaaattaattttgaatcactaatattttcacagtttattaatatatttaatttctatttaaattttagattatttttattaccatgtactgaatttttacatcctgataccctttccttctccatgtcagtatcatgttctctaattatcttgccaaattttgaaactacacacaaaaagcatacttgcattatttataataaaattgcattcagtggctttttaaaaaaatgtttgattcaaaactttaacatactgataagtaagaaacaattataatttctttacatactcaaaaccaagatagaaaaaggtgctatcgttcaacttcaaaacatgtttcctagtattaaggactttaatatagcaacagacaaaattattgttaacatggatgttacagctcaaaagatttataaaagattttaacctattttctcccttattatccactgctaatgtggatgtatgttcaaacaccttttagtattgatagcttacatatggccaaaggaatacagtttatagcaaaacatgggtatgctgtagctaactttataaaagtgtaatataacaatgtaaaaaattatatatctgggaggattttttggttgcctaaagtggctatagttactgattttttattatgtaagcaaaaccaataaaaatttaagtttttttaacaactaccttatttttcactgtacagacactaattcattaaatactaattgattgtttaaaagaaatataaatgtgacaagtggacattatttatgttaaatatacaattatcaagcaagtatgaagttattcaattaaaatgccacatttctggtctctgggctgga

SEQ ID NO: 323158 - DNA, 2264 bp, Homo sapiens
attcgggcttggtgttgaattaaaatcattgattgaaccttattctggggcttcggtttggcttactagtttgggattttaaaaaaataaaaattaagcctatagagagggcaaattaaaattaggttgggtaaaggaaggagcgcgagtgtttgaagccgtttggagggaacagcggtttccaagttcctgctgacttgagaagtctctgcgggtttccgaatctccggcgcactcctgggcgcgctgcgggagctgtagctcagccagccagggagtagcggctttcatccgccgggaggagtctttcgagttcaatcgcggggtatagaggttcccctgcggggcaaaatgcagagcttgacacaagcccttggcctctaggtgccttaattccgcggttcccacgcacgcttaactaagacgtgtctgtattcctcccgttacgtgaaagagttcggagctttgcctgggacccccatcattccctccctggcacaccccttccagaacgccccgccccactgcatattatttacccctcctggccacgcgggggaagaaaaacagctgagagggcatcaggaaggagtttcgacccgcgctggcgagtcatgagcgccaagtttcccactggcgcgcaaacttgagttacttttgagcgtggatactggcgaagaggctgcgggcggtattagcgtttgcagcgacttggctcgggcagctgacccaagtgtcctgtcttccttcctctgcttgtctctaggctctgaaactgcggagcggccaccggacgccttctggagcaggtagcagcatgcagccgcctccaagtctgtgcggacgcgccctggttgcgctggttcttgcctgcggcctgtcgcggatctggggagaggagagaggcttcccgcctgacagggccactccgcttttgcaaaccgcagagataatgacgccacccactaagaccttatggcccaagggttccaacgccagtctggcgcggtcgttggcacctgcggaggtgcctaaaggagacaggacggcaggatctccgccacgcaccatctcccctcccccgtgccaaggacccatcgagatcaaggagactttcaaatacatcaacacggttgtgtcctgccttgtgttcgtgctggggatcatcgggaactccacacttctgagaattatctacaagaacaagtgcatgcgaaacggtcccaatatcttgatcgccagcttggctctgggagacctgctgcacatcgtcattgacatccctatcaatgtctacaagctgctggcagaggactggccatttggagctgagatgtgtaagctggtgcctttcatacagaaagcctccgtgggaatcactgtgctgagtctatgtgctctgagtattgacagatatcgagctgttgcttcttggagtagaattaaaggaattggggttccaaaatggacagcagtagaaattgttttgatttgggtggtctctgtggttctggctgtccctgaagccataggttttgatataattacgatggactacaaaggaagttatctgcgaatctgcttgcttcatcccgttcagaagacagctttcatgcagttttacaagacagcaaaagattggtggctgttcagtttctatttctgcttgccattggccatcactgcatttttttatacactaatgacctgtgaaatgttgagaaagaaaagtggcatgcagattgctttaaatgatcacctaaagcagagacgggaagtggccaaaaccgtcttttgcctggtccttgtctttgccctctgctggcttccccttcacctcagcaggattctgaagctcactctttataatcagaatgatcccaatagatgtgaacttttgagctttctgttggtattggactatattggtatcaacatggcttcactgaattcctgcattaacccaattgctctgtatttggtgagcaaaagattcaaaaactgctttaagtcatgcttatgctgctggtgccagtcatttgaagaaaaacagtccttggaggaaaagcagtcgtgcttaaagttcaaagctaatgatcacggatatgacaacttccgttccagtaataaatacagctcatcttgaaagaagaaaaaaaaaaattgggggcgggcgaaaatttaaattgtgggggggcgggaataaaggtaggcaaacggggaaggggtcacaaaaacggggggggggaaaggggtgggaaggt

SEQ ID NO: 323159 - DNA, 1380 bp, Homo sapiens
attcgggcttggtgttgaattaaaatcattgattgaaccttattctggggcttcggtttggcttactagtttgggattttaaaaaaataaaaattaagcctatagagagggcaaattaaaattaggttgggtaaaggaaggagcgcgagtgtttgaagccgtttggagggaacagcggtttccaagttcctgctgacttgagaagtctctgcgggtttccgaatctccggcgcactcctgggcgcgctgcgggagctgtagctcagccagccagggagtagcggctttcatccgccgggaggagtctttcgagttcaatcgcggggtatagaggttcccctgcggggcaaaatgcagagcttgacacaagcccttggcctctaggtgccttaattccgcggttcccacgcacgcttaactaagacgtgtctgtattcctcccgttacgtgaaagagttcggagctttgcctgggacccccatcattccctccctggcacaccccttccagaacgccccgccccactgcatattatttacccctcctggccacgcgggggaagaaaaacagctgagagggcatcaggaaggagtttcgacccgcgctggcgagtcatgagcgccaagtttcccactggcgcgcaaacttgagttacttttgagcgtggatactggcgaagaggctgcgggcggtattagcgtttgcagcgacttggctcgggcagctgacccaagtgtcctgtcttccttcctctgcttgtctctaggctctgaaactgcggagcggccaccggacgccttctggagcaggtagcagcatgcagccgcctccaagtctgtgcggacgcgccctggttgcgctggttcttgcctgcggcctgtcgcggatctggggagaggagagaggcttcccgcctgacagggccactccgcttttgcaaaccgcagagataatgacgccacccactaagaccttatggcccaagggttccaacgccagtctggcgcggtcgttggcacctgcggaggtgcctaaaggagacaggacggcaggatctccgccacgcaccatctcccctcccccgtgccaaggacccatcgagatcaaggagactttcaaatacatcaacacggttgtgtcctgccttgtgttcgtgctggggatcatcgggaactccacacttctgagaattatctacaagaacaagtgcatgcgaaacggtcccaatatcttgatcgccagcttggctctgggagacctgctgcacatcgtcattgacatccctatcaatgtctacaagctgctggcagaggacttgccattttgagatcagatgtgccaggtaggagcgttcacccacccagaggagggttgccacag

SEQ ID NO: 323160 - DNA, 186 bp, Homo sapiens
gtccctgtcccccaggttgattggatacaccagttaaaaaagaaaataaaaagaaaaaaaccactggtgtctgggtctcagccccagagatactaactcaattggatcagggtgtagcctacacattgggtttgttagtaaagctccctacctgattctaatgagcacctaagtttgagaactgct

SEQ ID NO: 323161 - DNA, 1000 bp, Homo sapiens
ggaaacccaagaggaaatgactgagcccgtctgggtccccgcccgctcgcgctcccctggccacaccctccgcctggacgcagcagccaccgccgcgtccctctctccacgaggctgccggcttaggacccccagctccgacatgtcgccctctggtcgcctgtgtcttctcaccatcgttggcctgattctccccaccagaggacagacgttgaaagataccacgtccagttcttcagcagactcaactatcatggacattcaggtcccgacacgagccccagatgcagtctacacagaactccagcccacctctccaaccccaacctggcctgctgatgaaacaccacaaccccagacccagacccagcaactggaaggaacggatgggcctctagtgacagatccagagacacacaagagcaccaaagcagctcatcccactgatgacaccacgacgctctctgagagaccatccccaagcacagacgtccagacagacccccagaccctcaagccatctggttttcatgaggatgaccccttcttctatgatgaacacaccctccggaaacgggggctgttggtcgcagctgtgctgttcatcacaggcatcatcatcctcaccagtggcaagtgcaggcagctgtcccggttatgccggaatcattgcaggtgagtccatcagaaacaggagctgacaacctgctgggcacccgaagaccaagccccctgccagctcaccgtgcccagcctcctgcatcccctcgaagagcctggccagagagggaagacacagatgatgaagctggagccagggctgccggtccgagtctcctacctcccccaaccctgcccgcccctgaaggctacctggcgccttgggggctgtccctcaagttatctcctctgttaagacaaaaagtaaagcactgtggtctttgcaaaaaaaaacttaacaaaaaaaaaccgggacaattaaggggacaaaagtaaaagc

SEQ ID NO: 323162 - DNA, 825 bp, Homo sapiens
ggaaacccaagaggaaatgactgagcccgtctgggtccccgcccgctcgcgctcccctggccacaccctccgcctggacgcagcagccaccgccgcgtccctctctccacgaggctgccggcttaggacccccagctccgacatgtcgccctctggtcgcctgtgtcttctcaccatcgttggcctgattctccccaccagaggacagacgttgaaagataccacgtccagttcttcagcagactcaactatcatggacattcaggtcccgacacgagccccagatgcagtctacacagaactccagcccacctctccaaccccaacctggcctgctgatggcgcctatatcacagcttatggagtcacacacttcttgatgaacatgttggctgtttccagctttttctgtctacacacagcaccacaatgagcaactttgtcccttcctccttgagcaaacgcacttggaatatgtactgactatgtgctggtcatggttctaaatattttgcgtatgttaactcattcaaccttcacgcaaaccctaagaggcagaaattaccattgtccccattttacagacaaggaaacagaggctgtgagtaactggttcaaggtctcacaacaagtcagggacgcagctggaatcgaagtccaggaatctggcaccagagcctgtgcttttatccaagacaatacagggcaaaggacatgcatgcttaatgttttaaaatttgccctcctgccgcccaggcacagtggctcatgcctgtcatcccagcacttttggaggctgaggcgggtggatcgcttgagcccagg

SEQ ID NO: 323163 - DNA, 767 bp, Homo sapiens
ggaaacccaagaggaaatgactgagcccgtctgggtccccgcccgctcgcgctcccctggccacaccctccgcctggacgcagcagccaccgccgcgtccctctctccacgaggctgccggcttaggacccccagctccgacatgtcgccctctggtcgcctgtgtcttctcaccatcgttggcctgattctccccaccagaggacagacgttgaaagataccacgtccagttcttcagcagactcaactatcatggacattcaggtcccgacacgagccccaggtgaggaaagggacacatctatcaagatcctgtcattgcaaataacaacagcaacaaaaatcccaaacttggaccaaacaagggaatttatggatttatgtaacgaaaaagtccaggaagagtctcctctcatggggccaagatgatcccttgaagcctggggctgtcatcctgtctgctaagaatcccagcaagagaatttcctttccccagtccagcaaatgtcccagaactgagttatctttggccaggctcaggtcgtatccctgagctggccactgtggccacaggcatagaaagctgattggccaggcctgggttccatgtccaacctccaccagggctggtgtcagccccgctgaataaagtggaccaagagtcagggaaggatggtccctaaaggaagttctgggggcttttatcagagcaggtgcatttgggaagctgagttaaacatgtttttttaggcagcacttctcagag

SEQ ID NO: 323164 - DNA, 1005 bp, Homo sapiens
ggaaacccaagaggaaatgactgagcccgtctgggtccccgcccgctcgcgctcccctggccacaccctccgcctggacgcagcagccaccgccgcgtccctctctccacgaggctgccggcttaggacccccagctccgacgtaagtccctctcgcgcgccacctccatccgctgcccctctgcccacgggccgggctcagatgtcgccctctggtcgcctgtgtcttctcaccatcgttggcctgattctccccaccagaggacagacgttgaaagataccacgtccagttcttcagcagactcaactatcatggacattcaggtcccgacacgagccccagatgcagtctacacagaactccagcccacctctccaaccccaacctggcctgctgatgaaacaccacaaccccagacccagacccagcaactggaaggaacggatgggcctctagtgacagatccagagacacacaagagcaccaaagcagctcatcccactgatgacaccacgacgctctctgagagaccatccccaagcacagacgtccagacagacccccagaccctcaagccatctggttttcatgaggatgaccccttcttctatgatgaacacaccctccggaaacgggggctgttggtcgcagctgtgctgttcatcacaggcatcatcatcctcaccagtggcaagtgcaggcagctgtcccggttatgccggaatcattgcaggtgagtccatcagaaacaggagctgacaacctgctgggcacccgaagaccaagccccctgccagctcaccgtgcccagcctcctgcatcccctcgaagagcctggccagagagggaagacacagatgatgaagctggagccagggctgccggtccgagtctcctacctcccccaaccctgcccgcccctgaaggctacctggcgccttgggggctgtccctcaagttatctcctctgttaagacaaaaagtaaagcactgtggtctttgc

SEQ ID NO: 323165 - DNA, 1108 bp, Homo sapiens
ggaaacccaagaggaaatgactgagcccgtctgggtccccgcccgctcgcgctcccctggccacaccctccgcctggacgcagcagccaccgccgcgtccctctctccacgaggctgccggcttaggacccccagctccgacatgtcgccctctggtcgcctgtgtcttctcaccatcgttggcctgattctccccaccagaggacagacgttgaaagataccacgtccagttcttcagcagactcaactatcatggacattcaggtcccgacacgagccccagatgcagtctacacagaactccagcccacctctccaaccccaacctggcctgctgatgaaacaccacaaccccagacccagacccagcaactggaaggaacggatgggcctctagtgacagatccagagacacacaagagcaccaaagcagctcatcccactgatgacaccacgacgctctctgagagaccatccccaagcacagacgtccagacagacccccagaccctcaagccatctggttttcatgaggatgaccccttcttctatgatgaacacaccctccggaaacgggggctgttggtcgcagctgtgctgttcatcacaggcatcatcatcctcaccagtggcaagtgcaggcagctgtcccggttatgccggaatcattgcaggtgagtccatcagaaacaggagctgacaacctgctgggcacccgaagaccaagccccctgccagctcaccgtgcccagcctcctgcatcccctcgaagagcctggccagagagggaagacacagatgatgaagctggagccagggctgccggtccgagtctcctacctcccccaaccctgcccgcccctgaaggctacctggcgccttgggggctgtccctcaagttatctcctctgttaagacaaaaagtaaagcactgtggtctttgcggcaaaaaaaaaaaacaacaaaaacaacagcggggggcgcaaaaagattcccgagggggccaatagcagcggaccccccttttgtgcacaggggcccaaagagagcttaaaacaggcagggggtttaacctggtgggaacgcatggatggaagaccccctggg

SEQ ID NO: 323166 - DNA, 892 bp, Homo sapiens
atcaggtggtactgagctcaggataagagtaacggcgcagagtagctgaatacggctaatctgtaggaggcatgagcgaccacgcccagctaattttgtatttttagtagagacagggtttctccatgttggtcaggctggtctcgaactcccgacctaaggtaatctgcccgcctcggcctcccaaagtgctgggaatacagacataagccaccgcgcccggccccaattctctttccccagtgactctttcttatccttccctccttgctctcctgacctgaatagaaacaccacaaccccagacccagacccagcaactggaaggaacggatgggcctctagtgacagatccagagacacacaagagcaccaaagcagctcatcccactgatgacaccacgacgctctctgagagaccatccccaagcacagacgtccagacagacccccagaccctcaagccatctggttttcatgaggatgaccccttcttctatgatgaacacaccctccggaaacgggggctgttggtcgcagctgtgctgttcatcacaggcatcatcatcctcaccagtggcaagtgcaggcagctgtcccggttatgccggaatcattgcaggtgagtccatcagaaacaggagctgacaacctgctgggcacccgaagaccaagccccctgccagctcaccgtgcccagcctcctgcatcccctcgaagagcctggccagagagggaagacacagatgatgaagctggagccagggctgccggtccgagtctcctacctcccccaaccctgcccgcccctgaaggctacctggcgccttgggggctgtccctcaagttatctcctctgttaagacaaaaagtaaagcactgtggtctttgc

SEQ ID NO: 323167 - DNA, 1572 bp, Homo sapiens
ggaaacccaagaggaaatgactgagcccgtctgggtccccgcccgctcgcgctcccctggccacaccctccgcctggacgcagcagccaccgccgcgtccctctctccacgaggctgccggcttaggacccccagctccgacgtaagtccctctcgcgcgccacctccatccgctgcccctctgcccacgggccgggctcaggtgggtaggggtttgaccccttccgctcctctccgccccccatccacgcccacatctctctgcctcctctcctgggctacagtgggccgctctgcctcgctcccgcccgcctgcctcagtctccccagctctctgccacccccctcggaccagtgcctcttaggtctctccagcgcgccatccctgcaaggcggcccctgacaccaactcactttttcctctgagcgcgggaggcgttactcactcttcctccttcccctcctcgccgactcccgggctctgggcccctgggggagggaagaggcctcctatctactcctctgccccagtcccctccttgcgtcagtcccagtgagggataagcgcctggcggaaggcgcagggaggtgtttctctgcttcaggagtgcccgccggcccttgcagctgctggaagacccatttatctcatgcttcttgttttctttggggacctgcaggggaaggaagcagggtgacggtttggtatccccacctaagaccctcccctttcccctgaggccagccgtcagcccctggcagggggtcttggaagccagaggtttttgctcagggcagggaaagggctgcaggatccccgggggctgccggaggtcggtctcactgacatcatggctgaccccagcatcgcctggtcccacagatgtcgccctctggtcgcctgtgtcttctcaccatcgttggcctgattctccccaccagaggacagacgttgaaagataccacgtccagttcttcagcagactcaactatcatggacattcaggtcccgacacgagccccagtgacagatccagagacacacaagagcaccaaagcagctcatcccactgatgacaccacgacgctctctgagagaccatccccaagcacagacgtccagacagacccccagaccctcaagccatctggttttcatgaggatgaccccttcttctatgatgaacacaccctccggaaacgggggctgttggtcgcagctgtgctgttcatcacaggcatcatcatcctcaccagtggcaagtgcaggcagctgtcccggttatgccggaatcattgcaggtgagtccatcagaaacaggagctgacaacctgctgggcacccgaagaccaagccccctgccagctcaccgtgcccagcctcctgcatcccctcgaagagcctggccagagagggaagacacagatgatgaagctggagccagggctgccggtccgagtctcctacctcccccaaccctgcccgcccctgaaggctacctggcgccttgggggctgtccctcaagttatctcctctgttaagacaaaaagtaaagcactgtggtctttgc

SEQ ID NO: 323168 - DNA, 852 bp, Homo sapiens
ggaaacccaagaggaaatgactgagcccgtctgggtccccgcccgctcgcgctcccctggccacaccctccgcctggacgcagcagccaccgccgcgtccctctctccacgaggctgccggcttaggacccccagctccgacatgtcgccctctggtcgcctgtgtcttctcaccatcgttggcctgattctccccaccagaggacagacgttgaaagataccacgtccagttcttcagcagactcaactatcatggacattcaggtcccgacacgagccccagatgcagtctacacagaactccagcccacctctccaaccccaacctggcctgctgatgctcatcccactgatgacaccacgacgctctctgagagaccatccccaagcacagacgtccagacagacccccagaccctcaagccatctggttttcatgaggatgaccccttcttctatgatgaacacaccctccggaaacgggggctgttggtcgcagctgtgctgttcatcacaggcatcatcatcctcaccagtggcaagtgcaggcagctgtcccggttatgccggaatcattgcaggtgagtccatcagaaacaggagctgacaacctgctgggcacccgaagaccaagccccctgccagctcaccgtgcccagcctcctgcatcccctcgaagagcctggccagagagggaagacacagatgatgaagctggagccagggctgccggtccgagtctcctacctcccccaaccctgcccgcccctgaaggctacctggcgccttgggggctgtccctcaagttatctcctctgttaagacaaaaagtaaagcactgtggtctttgc

SEQ ID NO: 323169 - DNA, 911 bp, Homo sapiens
ggaaacccaagaggaaatgactgagcccgtctgggtccccgcccgctcgcgctcccctggccacaccctccgcctggacgcagcagccaccgccgcgtccctctctccacgaggctgccggcttaggacccccagctccgacatgtcgccctctggtcgcctgtgtcttctcaccatcgttggcctgattctccccaccagaggacagacgttgaaagataccacgtccagttcttcagcagactcaactatcatggacattcaggtcccgacacgagccccagatgcagtctacacagaactccagcccacctctccaaccccaacctggcctgctgatgaaacaccacaaccccagacccagacccagcaactggaaggaacggatgggcctctagtgacagatccagagacacacaagagcaccaaagcagctcatcccactgatgacaccacgacgctctctgagagaccatccccaagcacagacgtccagacagacccccagaccctcaagccatctggttttcatgaggatgaccccttcttctatgatgaacacaccctccggaaacgggggctgttggtcgcagctgtgctgttcatcacaggcatcatcatcctcaccagtggcaagtgcaggcagctgtcccggttatgccggaatcattgcaggtgagtccatcagaaacaggagctgacaacctgctgggcacccgaagaccgcatcccctcgaagagcctggccagagagggaagacacagatgatgaagctggagccagggctgccggtccgagtctcctacctcccccaaccctgcccgcccctgaaggctacctggcgccttgggggctgtccctcaagttatctcctctgttaagacaaaaagtaaagcactgtggtctttgc

SEQ ID NO: 323170 - DNA, 761 bp, Homo sapiens
ggaaacccaagaggaaatgactgagcccgtctgggtccccgcccgctcgcgctcccctggccacaccctccgcctggacgcagcagccaccgccgcgtccctctctccacgaggctgccggcttaggacccccagctccgacatgtcgccctctggtcgcctgtgtcttctcaccatcgttggcctgattctccccaccagaggacagacgttgaaagataccacgtccagttcttcagcagactcaactatcatggacattcaggtcccgacacgagccccagatgcagtctacacagaactccagcccacctctccaaccccaacctggcctgctgatgaaacaccacaaccccagacccagacccagcaactggaaggaacggatgggcctctagtgacagatccagagacacacaagagcaccaaagcagctcatcccactgatgacaccacgacgctctctgagagaccatccccaagcacagacgtccagacagacccccagaccctcaagccatctggttttcatgaggatgaccccttcttctatgatgaacacaccctccggaaacgggggctgttggtcgcagctgtgctgttcatcacaggcatcatcatcctcaccagtggcaagtgcaggcagctgtcccggttatgccggaatcattgcaggtgagtccatcagaaacaggagctgacaacctgctgggcacccgaagaccagtttgtcacaccaagcaacgtaccgttgttcggga

SEQ ID NO: 323171 - DNA, 656 bp, Homo sapiens
tttctccttgttggtctttccccatagaaagacaactctgccagggcagggatttttttctttgtcctcaactgtgttcttagtgcctgaatgaatgaataagtgagatacaaaataatgggagtttccaaacggctcatctgtgagcctgtgtgggaagggcctctcgcagggccccagcactggctgttctcggtgtgtttctccatcatttgtttatggagttgcctttgagtttcccgaggggcagggttgatcaatctggttccccagccccacaacacacgataagaatcaatatcactctagctcgtgactgaatcatttccttcacccacaggtggcaagtgcaggcagctgtcccggttatgccggaatcattgcaggtgagtccatcagaaacaggagctgacaacctgctgggcacccgaagaccaagccccctgccagctcaccgtgcccagcctcctgcatcccctcgaagagcctggccagagagggaagacacagatgatgaagctggagccagggctgccggtccgagtctcctacctcccccaaccctgcccgcccctgaaggctacctggcgccttgggggctgtccctcaagttatctcctctgttaagacaaaaagtaaagcactgtggtctttgc

SEQ ID NO: 323172 - DNA, 571 bp, Homo sapiens
ggaaacccaagaggaaatgactgagcccgtctgggtccccgcccgctcgcgctcccctggccacaccctccgcctggacgcagcagccaccgccgcgtccctctctccacgaggctgccggcttaggacccccagctccgacatgtcgccctctggtcgcctgtgtcttctcaccatcgttggcctgattctccccaccagaggacagacgttgaaagataccacgtccagttcttcagcagactcaactatcatggacattcaggtcccgacacgagccccagatgcagtctacacagaactccagcccacctctccaaccccaacctggcctgctgatgaaacaccacaaccccagacccagacccagcaactggaaggaacggatgggcctctagtgacagatccagagacacacaagagcaccaaagcagctcatcccactgatgacaccacgacgctctctgagagaccatcttgagcctgtgtctcatcttatatttggaatgactattaaaaaaacaacaatgtgcaatcaaagtcctcggccatcttgagacctggtgccggc

SEQ ID NO: 323173 - DNA, 636 bp, Homo sapiens
ggaaacccaagaggaaatgactgagcccgtctgggtccccgcccgctcgcgctcccctggccacaccctccgcctggacgcagcagccaccgccgcgtccctctctccacgaggctgccggcttaggacccccagctccgacatgtcgccctctggtcgcctgtgtcttctcaccatcgttggcctgattctccccaccagaggacagacgttgaaagataccacgtccagttcttcagcagactcaactatcatggacattcaggtcccgacacgagccccagatgcagtctacacagaactccagcccacctctccaaccccaacctggcctgctgatgaaacaccacaaccccagacccagacccagcaactggaaggaacggatgggcctctagtgacagatccagagacacacaagagcaccaaagcaggtatagcatgggactgagagcagcagcctacgatttttgtttaattctctatctaggtcaacatttccctcagtacgtttctcagtgcccctgtttggggaattgttaatacatttaaaaaaaatgtttttggtttgtggtcaaagttatttggggaaccctgagttaaagttaaccatgtttctttgtggcaggacttctg

SEQ ID NO: 323174 - DNA, 945 bp, Homo sapiens
ggaaacccaagaggaaatgactgagcccgtctgggtccccgcccgctcgcgctcccctggccacaccctccgcctggacgcagcagccaccgccgcgtccctctctccacgaggctgccggcttaggacccccagctccgacatgtcgccctctggtcgcctgtgtcttctcaccatcgttggcctgattctccccaccagaggacagacgttgaaagataccacgtccagttcttcagcagactcaactatcatggacattcaggtcccgacacgagccccagatgcagtctacacagaactccagcccacctctccaaccccaacctggcctgctgatgaaacaccacaaccccagacccagacccagcaactggaaggaacggatgggcctctagtgacagatccagagacacacaagagcaccaaagcagctcatcccactgatgacaccacgacgctctctgagagaccatccccaagcacagacgtccagacagacccccagaccctcaagccatctggttttcatgaggatgaccccttcttctatgatgaacacaccctccggaaacgggggctgttggtcgcagctgtgctgttcatcacaggcatcatcatcctcaccagtggcaagtgcaggcagctgtcccggttatgccggaatcattgcaggtgagtccatcagaaacaggagctgacaacctgctgggcacccgaagaccaagccccctgccagctcaccgtgcccagcctcctgcatcccctcgaagagcctggccagagagggaagacacagatgatgaagctggagccagggctgccggtccgagtctcctacctcccccaaccctgcccgcccctgaaggctacctggcgccttgggggctgtccctcaagttatctcctctgttaagacaaaaagtaaagcactgtggtctttgc

SEQ ID NO: 323175 - DNA, 632 bp, Homo sapiens
tgcacaccagctgtgtagatgtgggagaggggtttcttccagatgcagactctcagtaatatcccttgtttctgcctccatggctcactcctgccctccactgatctggccactctctcagctcatcccactgatgacaccacgacgctctctgagagaccatccccaagcacagacgtccagacagacccccagaccctcaagccatctggttttcatgaggatgaccccttcttctatgatgaacacaccctccggaaacgggggctgttggtcgcagctgtgctgttcatcacaggcatcatcatcctcaccagtggcaagtgcaggcagctgtcccggttatgccggaatcattgcaggtgagtccatcagaaacaggagctgacaacctgctgggcacccgaagaccaagccccctgccagctcaccgtgcccagcctcctgcatcccctcgaagagcctggccagagagggaagacacagatgatgaagctggagccagggctgccggtccgagtctcctacctcccccaaccctgcccgcccctgaaggctacctggcgccttgggggctgtccctcaagttatctcctctgttaagacaaaaagtaaagcactgtggtctttgc

SEQ ID NO: 323176 - DNA, 1686 bp, Homo sapiens
ggaaacccaagaggaaatgactgagcccgtctgggtccccgcccgctcgcgctcccctggccacaccctccgcctggacgcagcagccaccgccgcgtccctctctccacgaggctgccggcttaggacccccagctccgacgtaagtccctctcgcgcgccacctccatccgctgcccctctgcccacgggccgggctcaggtgggtaggggtttgaccccttccgctcctctccgccccccatccacgcccacatctctctgcctcctctcctgggctacagtgggccgctctgcctcgctcccgcccgcctgcctcagtctccccagctctctgccacccccctcggaccagtgcctcttaggtctctccagcgcgccatccctgcaaggcggcccctgacaccaactcactttttcctctgagcgcgggaggcgttactcactcttcctccttcccctcctcgccgactcccgggctctgggcccctgggggagggaagaggcctcctatctactcctctgccccagtcccctccttgcgtcagtcccagtgagggataagcgcctggcggaaggcgcagggaggtgtttctctgcttcaggagtgcccgccggcccttgcagctgctggaagacccatttatctcatgcttcttgttttctttggggacctgcaggggaaggaagcagggtgacggtttggtatccccacctaagaccctcccctttcccctgaggccagccgtcagcccctggcagggggtcttggaagccagaggtttttgctcagggcagggaaagggctgcaggatccccgggggctgccggaggtcggtctcactgacatcatggctgaccccagcatcgcctggtcccacagatgtcgccctctggtcgcctgtgtcttctcaccatcgttggcctgattctccccaccagaggacagacgttgaaagataccacgtccagttcttcagcagactcaactatcatggacattcaggtcccgacacgagccccagatgcagtctacacagaactccagcccacctctccaaccccaacctggcctgctgatgaaacaccacaaccccagacccagacccagcaactggaaggaacggatgggcctctagtgacagatccagagacacacaagagcaccaaagcagctcatcccactgatgacaccacgacgctctctgagagaccatccccaagcacagacgtccagacagacccccagaccctcaagccatctggttttcatgaggatgaccccttcttctatgatgaacacaccctccggaaacgggggctgttggtcgcagctgtgctgttcatcacaggcatcatcatcctcaccagtggcaagtgcaggcagctgtcccggttatgccggaatcattgcaggtgagtccatcagaaacaggagctgacaacctgctgggcacccgaagaccaagccccctgccagctcaccgtgcccagcctcctgcatcccctcgaagagcctggccagagagggaagacacagatgatgaagctggagccagggctgccggtccgagtctcctacctcccccaaccctgcccgcccctgaaggctacctggcgccttgggggctgtccctcaagttatctcctctgttaagacaaaaagtaaagcactgtggtctttgc

SEQ ID NO: 323177 - DNA, 1076 bp, Homo sapiens
ggaaacccaagaggaaatgactgagcccgtctgggtccccgcccgctcgcgctcccctggccacaccctccgcctggacgcagcagccaccgccgcgtccctctctccacgaggctgccggcttaggacccccagctccgacatgtcgccctctggtcgcctgtgtcttctcaccatcgttggcctgattctccccaccagaggttggaacagactgtgggggcggagacaggagcagggagcccaagaaggaggctgctgggatgtccaggctggagggtacagaggcaggaccaggatgggggcagtggagttatccagcactgaccacatggacagacgttgaaagataccacgtccagttcttcagcagactcaactatcatggacattcaggtcccgacacgagccccagatgcagtctacacagaactccagcccacctctccaaccccaacctggcctgctgatgaaacaccacaaccccagacccagacccagcaactggaaggaacggatgggcctctagtgacagatccagagacacacaagagcaccaaagcagctcatcccactgatgacaccacgacgctctctgagagaccatccccaagcacagacgtccagacagacccccagaccctcaagccatctggttttcatgaggatgaccccttcttctatgatgaacacaccctccggaaacgggggctgttggtcgcagctgtgctgttcatcacaggcatcatcatcctcaccagtggcaagtgcaggcagctgtcccggttatgccggaatcattgcaggtgagtccatcagaaacaggagctgacaacctgctgggcacccgaagaccaagccccctgccagctcaccgtgcccagcctcctgcatcccctcgaagagcctggccagagagggaagacacagatgatgaagctggagccagggctgccggtccgagtctcctacctcccccaaccctgcccgcccctgaaggctacctggcgccttgggggctgtccctcaagttatctcctctgttaagacaaaaagtaaagcactgtggtctttgc

SEQ ID NO: 323178 - DNA, 1061 bp, Homo sapiens
ggaaacccaagaggaaatgactgagcccgtctgggtccccgcccgctcgcgctcccctggccacaccctccgcctggacgcagcagccaccgccgcgtccctctctccacgaggctgccggcttaggacccccagctccgacatgtcgccctctggtcgcctgtgtcttctcaccatcgttggcctgattctccccaccagaggacagacgttgaaagataccacgtccagttcttcagcagactcaactatcatggacattcaggtcccgacacgagccccaggtgaggaaagggacacatctatcaagatcctgtcattgcaaataacaacagcaacaaaaatcccaaacttggaccaaacaagggaatttatggatttatgtaacgaaaaagtccagatgcagtctacacagaactccagcccacctctccaaccccaacctggcctgctgatgaaacaccacaaccccagacccagacccagcaactggaaggaacggatgggcctctagtgacagatccagagacacacaagagcaccaaagcagctcatcccactgatgacaccacgacgctctctgagagaccatccccaagcacagacgtccagacagacccccagaccctcaagccatctggttttcatgaggatgaccccttcttctatgatgaacacaccctccggaaacgggggctgttggtcgcagctgtgctgttcatcacaggcatcatcatcctcaccagtggcaagtgcaggcagctgtcccggttatgccggaatcattgcaggtgagtccatcagaaacaggagctgacaacctgctgggcacccgaagaccaagccccctgccagctcaccgtgcccagcctcctgcatcccctcgaagagcctggccagagagggaagacacagatgatgaagctggagccagggctgccggtccgagtctcctacctcccccaaccctgcccgcccctgaaggctacctggcgccttgggggctgtccctcaagttatctcctctgttaagacaaaaagtaaagcactgtggtctttgc

SEQ ID NO: 323179 - DNA, 788 bp, Homo sapiens
ggaaacccaagaggaaatgactgagcccgtctgggtccccgcccgctcgcgctcccctggccacaccctccgcctggacgcagcagccaccgccgcgtccctctctccacgaggctgccggcttaggacccccagctccgacatgtcgccctctggtcgcctgtgtcttctcaccatcgttggcctgattctccccaccagaggacagacgttgaaagataccacgtccagttcttcagcagactcaactatcatggacattcaggtcccgacacgagccccagatgcagtctacacagaactccagcccacctctccaaccccaacctggcctgctgatgaaacaccacaaccccagacccagacccagcaactggaaggaacggatgggcctctagtgacagatccagagacacacaagagcaccaaagcagctcatcccactgatgacaccacgacgctctctgagagaccatccccaagcacagacgtccagacagacccccagaccctcaagccatctggttttcatgaggatgaccccttcttctatgatgaacacaccctccggaaacgggggctgttggtcgcagctgtgctgttcatcacaggcatcatcatcctcaccagtggcaagtgcaggcagctgtcccggttatgccggaatcattgcaggtgagtccatcagaaacaggagctgacaacctgctgggcacccgaagaccaagccccctgccagctcaccgtgcccagcctcctgaagcagtgcacaagatcctctagagtac

SEQ ID NO: 323180 - DNA, 886 bp, Homo sapiens
ggaaacccaagaggaaatgactgagcccgtctgggtccccgcccgctcgcgctcccctggccacaccctccgcctggacgcagcagccaccgccgcgtccctctctccacgaggctgccggcttaggacccccagctccgacatgtcgccctctggtcgcctgtgtcttctcaccatcgttggcctgattctccccaccagaggacagacgttgaaagataccacgtccagttcttcagcagactcaactatcatggacattcaggtcccgacacgagccccagatgcagtctacacagaactccagcccacctctccaaccccaacctggcctgctgatgaaacaccacaaccccagacccagacccagcaactggaaggaacggatgggcctctagtgacagatccagagacacacaagagcaccaaagcagctcatcccactgatgacaccacgacgctctctgagagaccatccccaagcacagacgtccagacagacccccagaccctcaagccatctggttttcatgaggatgaccccttcttctatgatgaacacaccctccggaaacgggggctgttggtcgcagctgtgctgttcatcacaggcatcatcatcctcaccagtggcaagtgcaggcagctgtcccggttatgccggaatcattgcaggtgagtccatcagaaacaggagctgacaacctgctgggcacccgaagaccagagggaagacacagatgatgaagctggagccagggctgccggtccgagtctcctacctcccccaaccctgcccgcccctgaaggctacctggcgccttgggggctgtccctcaagttatctcctctgttaagacaaaaagtaaagcactgtggtctttgc

SEQ ID NO: 323181 - DNA, 825 bp, Homo sapiens
ggaaacccaagaggaaatgactgagcccgtctgggtccccgcccgctcgcgctcccctggccacaccctccgcctggacgcagcagccaccgccgcgtccctctctccacgaggctgccggcttaggacccccagctccgacatgtcgccctctggtcgcctgtgtcttctcaccatcgttggcctgattctccccaccagaggacagacgttgaaagataccacgtccagttcttcagcagactcaactatcatggacattcaggtcccgacacgagccccagatgcagtctacacagaactccagcccacctctccaaccccaacctggcctgctgatgaaacaccacaaccccagacccagacccagcaactggaaggaacggatgggcctctagtgacagatccagagacacacaagagcaccaaagcagatgaacacaccctccggaaacgggggctgttggtcgcagctgtgctgttcatcacaggcatcatcatcctcaccagtggcaagtgcaggcagctgtcccggttatgccggaatcattgcaggtgagtccatcagaaacaggagctgacaacctgctgggcacccgaagaccaagccccctgccagctcaccgtgcccagcctcctgcatcccctcgaagagcctggccagagagggaagacacagatgatgaagctggagccagggctgccggtccgagtctcctacctcccccaaccctgcccgcccctgaaggctacctggcgccttgggggctgtccctcaagttatctcctctgttaagacaaaaagtaaagcactgtggtctttgc

SEQ ID NO: 323182 - DNA, 1396 bp, Homo sapiens
ggaaacccaagaggaaatgactgagcccgtctgggtccccgcccgctcgcgctcccctggccacaccctccgcctggacgcagcagccaccgccgcgtccctctctccacgaggctgccggcttaggacccccagctccgacgtaagtccctctcgcgcgccacctccatccgctgcccctctgcccacgggccgggctcaggtgggtaggggtttgaccccttccgctcctctccgccccccatccacgcccacatctctctgcctcctctcctgggctacagtgggccgctctgcctcgctcccgcccgcctgcctcagtctccccagctctctgccacccccctcggaccagtgcctcttaggtctctccagcgcgccatccctgcaaggcggcccctgacaccaactcactttttcctctgagcgcgggaggcgttactcactcttcctccttcccctcctcgccgactcccgggctctgggcccctgggggagggaagaggcctcctatctactcctctgccccagtcccctccttgcgtcagtcccagtgagggataagcgcctggcggaaggcgcagggaggtgtttctctgcttcaggagtgcccgccggcccttgcagctgctggaagacccatttatctcatgcttcttgttttctttggggacctgcaggggaaggaagcagggtgacggtttggtatccccacctaagaccctcccctttcccctgaggccagccgtcagcccctggcagggggtcttggaagccagaggtttttgctcagggcagggaaagggctgcaggatccccgggggctgccggaggtcggtctcactgacatcatggctgaccccagcatcgcctggtcccacagatgtcgccctctggtcgcctgtgtcttctcaccatcgttggcctgattctccccaccagaggacagacgttgaaagataccacgtccagttcttcagcagactcaactatcatggacattcaggtcccgacacgagccccagatgcagtctacacagaactccagcccacctctccaaccccaacctggcctgctgatgcaggacaatattacaaaagtgaacaaatgcaacctttttctgcttttacagatgacatgtctccatccccggccagcaggggtaggggaggccggttgaaagtgacactccgttaaaaaggcaacaacttttataaaatgaagactaaggaaacagcccagggttcggaagctgagatgctaccctgggggtagagcatagacatgggtcgggcagaccttgtctcctttcacggcattcctgggagggtaagaagggctgtcgtgctcagggccagtggggactgaatccaggaggccccttggagatcccag

SEQ ID NO: 323183 - DNA, 613 bp, Homo sapiens
ttttaaataccccaggcaaagttactaaccagcagtcttagaatgagaatgctttccagtgggacacatcatttatttaattcagttttatcaatctgaaagcctcatagctgaatactaaagaagagttgagctttgaggagaagcagagtatttcatcatggttcaaaccagtatctgaaacaagtaggtttctagggagaaaagataatctcttaccaagcatgtcagttcacctgccttcatcaaaggactgactgcataggtgttaacaatcataattctgaaagttgctctttgatatcagtatattctataatgtattattggcttttaaatacctcaccctcctcacagtctgtaggacatttttatttaacttcttgatttgaatcaaagcagctattacttcattagctcttttgaagtgttcttggttgagaaggaacagcaaggcttatagaagaaagccaacttttcaaatcagtctttcttttgatcagcgctgaatctgatactacactgtactttaatcagaggaaaaaatggagatttgccttttttctatggaaaatttatcccataatgagggaaagggaataaaagatatagc

SEQ ID NO: 323184 - DNA, 1237 bp, Homo sapiens
aaaaagacaagagggaaagtatttctcttgattcttggttaaatttgtttaataataataatatcctaaaaaaaaaaaaaaagggcggccgcagggccatgctagccttgcgcgtggcgcgcggctcgtggggggccctgcgcggcgccgcttgggctccgggaacgcggccgagtaagcgacgcgcctgctgggccctgctgccgcccgtgccctgctgcttgggctgcctggccgaacgctggaggctgcgtccggccgctcttggcttgcggctgcccgggatcggccagcggaaccactgttcgggcgcggggaaggcggctcccaggccagcggccggagcgggcgccgctgccgaagccccgggcggccagtggggcccggcgagcacccccagcctgtatgaaaacccatggacaatcccgaatatgttgtcaatgacgagaattggcttggccccagttctgggctatttgattattgaagaagattttaatattgcactaggagtttttgctttagctggactaacagatttgttggatggatttattgctcgaaactgggccaatcaaagatcagctttgggaagtgctcttgatccacttgctgataaaatacttatcagtatcttatatgttagcttgacctatgcagatcttattccagttccacttacttacatgatcatttcgagagatgtaatgttgattgctgctgttttttatgtcagataccgaactcttccaacaccacgaacacttgccaagtatttcaatccttgctatgccactgctaggttaaaaccaacattcatcagcaaggtgaatacagcagtccagttaatcttggtggcagcttctttggcagctccagttttcaactatgctgacagcatttatcttcagatactatggtgttttacagctttcaccacagctgcatcagcttatagttactatcattatggccggaagactgttcaggtgataaaagactgatgaaagtcatccctcactgttagtaaggaagcagtatacatcaatgggaacagggcccatggaaatgtacaggagtttccctattttggtgttcagcttgaaaaaggacttgtcagaatcaactgtgtcatcaaaatttaagtaatgtgcattgaaaataaggttgatcatgggaatatgcagaatttccaatgtatttttaaatacaaataaaattgtaatttagaattttt

SEQ ID NO: 323185 - DNA, 404 bp, Homo sapiens
caccagagaagatttttttgttctaccaggtgcctaggaatgctaacagtctgggaccacatagaccaccaggtgatgagacaatcctgggagtcctgttttactttggcccatcttttctcccaaccctgtgggaatagtcattcatatcctagctgcaagctagaaggtggtttatcagagcccaacttcgagggctctgggctttagctactgtcaccccatcataactgagcttcatggattgattctctttttatctttcagattttcttttaaaaatctttgttttttttttttcttccgaaagattcccccaacattaccattccccaccttccgttgaatttttttggctctcattttgaatttttcaagagctcatgttctttgtcttcattaaa

SEQ ID NO: 323186 - DNA, 389 bp, Homo sapiens
ttaagggtagtttggtaaagaaagctgaaatttatttaaaatgactcaggtatctttagaattctcaaaagctgcaggaaataagagtctggtaccctgagaagcatggggcagtagaaagagcatgtgggctttagagttcaaaccaagtcaggctcaaacatagttctgtgataagccctgagcaagttacccgggtcttccatttcccccttctggagaagtcctttggaggatgagtccttctggaggatgagtccttctggaggatgaagtccttctggaggatgagttcgttgtaagaataaaatgagaatgtaagacacctagaggatgcccgagtaaaaaatgacagttgctagtagtagtaatttgtagggctcattatc

SEQ ID NO: 323187 - DNA, 2131 bp, Homo sapiens
  misc_feature (2072)..(2072): n is a, c, g, or t
  misc_feature (2118)..(2118): n is a, c, g, or t
cgtacccgctgcttcccaaaacccactgagcctgatgcgcgcgcctccgctgtgccaggggcgccgggaagcccgacgacgacggtgtcgtaaaagcgtcgcgaaggcgtccgcccttggcggcttcctgccacctgtataagtggagcgtgctggggtgtgtaaagtagtatggaggcagcggtagcccagtgtctgagtggttgccgggtctccatggagaagcggctcgccagtgtcccaggctgctgagctctcgccgcccgagaccccgcggcgcggccgcagggccatgctagccttgcgcgtggcgcgcggctcgtggggggccctgcgcggcgccgcttgggctccgggaacgcggccgagtaagcgacgcgcctgctgggccctgctgccgcccgtgccctgctgcttgggctgcctggccgaacgctggaggctgcgtccggccgctcttggcttgcggctgcccgggatcggccagcggaaccactgttcgggcgcggggaaggcggctcccaggccagcggccggagcgggcgccgctgccgaagccccgggcggccagtggggcccggcgagcacccccagcctgtatgaaaacccatggacaatcccgaatatgttgtcaatgacgagaattggcttggccccagttctgggctatttgattattgaagaagattttaatattgcactaggagtttttgctttagctggactaacagatttgttggatggatttattgctcgaaactgggccaatcaaagatcagctttgggaagtgctcttgatccacttgctgataaaatacttatcagtatcttatatgttagcttgacctatgcagatcttattccagttccacttacttacatgatcatttcgagagatgtaatgttgattgctgctgttttttatgtcagataccgaactcttccaacaccacgaacacttgccaagtatttcaatccttgctatgccactgctaggttaaaaccaacattcatcagcaaggtgaatacagcagtccagttaatcttggtggcagcttctttggcagctccagttttcaactatgctgacagcatttatcttcagatactatggtgttttacagctttcaccacagctgcatcagcttatagttactatcattatggccggaagactgttcaggtgataaaagactgatgaaagtcatccctcactgttagtaaggaagcagtatacatcaatgggaacagggcccatggaaatgtacaggagtttccctattttggtgttcagcttgaaaaaggacttgtcagaatcaactgtgtcatcaaaatttaagtaatgtgcattgaaaataaggttgatcatgggaatatgcagaatttccaatgtatttttaaatacaaataaaattgtaatttagaatttttaatcttaggtttcttgattaatttataagagatcaattattgtcagtcttttttgtatgttttttaaaaacatagtccagagcatgggcagaattgacacctctcttttaagtgaaatttggattgctcacaaagcactaggaaatgtcatggggttcaaatatatatcctacacaactgggcaatacatttttgtttgatttttaggtctgtgtatacattaacagttcatgtaattaatacctgatcatttgggataatgaaagtgaagttagttgtagatgaagtaaagttataaaagagattaaaaatgcggtaactttttaagataataatcatacagaaggtatgaagttcattttcggtagtcttccaacctctcaggtgcctaataatttatgtttgaggataacaggtaacaaagatagtcgagataggagaacgtgtctattagtctttgcatctaaaaggcagtgagttacgttcctgccttccactgtgtttctgacatagcaatgtttgtttgatattggaacctggattcatattttatgtaaataatatcaagctgtatatttttcaaaggttttttaaactttggagactctttcttttgttaagcagttaaaggaataaaaatncgtccagttttttttcatcttttatttcccccctctttttcttccntttcttttctctt

SEQ ID NO: 323188 - DNA, 3248 bp, Homo sapiens
cgtacccgctgcttcccaaaacccactgagcctgatgcgcgcgcctccgctgtgccaggggcgccgggaagcccgacgacgacggtgtcgtaaaagcgtcgcgaaggcgtccgcccttggcggcttcctgccacctgtataagtggagcgtgctggggtgtgtaaagtagtatggaggcagcggtagcccagtgtctgagtggttgccgggtctccatggagaagcggctcgccagtgtcccaggctgctgagctctcgccgcccgagaccccgcggcgcggccgcagggccatgctagccttgcgcgtggcgcgcggctcgtggggggccctgcgcggcgccgcttgggctccgggaacgcggccgagtaagcgacgcgcctgctgggccctgctgccgcccgtgccctgctgcttgggctgcctggccgaacgctggaggctgcgtccggccgctcttggcttgcggctgcccgggatcggccagcggaaccactgttcgggcgcggggaaggcggctcccaggccagcggccggagcgggcgccgctgccgaagccccgggcggccagtggggcccggcgagcacccccagcctgtatgaaaacccatggacaatcccgaatatgttgtcaatgacgagaattggcttggccccagttctgggctatttgattattgaagaagattttaatattgcactaggagtttttgctttagctggactaacagatttgttggatggatttattgctcgaaactgggccaatcaaagatcagctttgggaagtgctcttgatccacttgctgataaaatacttatcagtatcttatatgttagcttgacctatgcagatcttattccaggtgcctaggaatgctaacagtctgggaccacatagaccaccagaaattgccacagccaccccagccttcagcaaccaccacactgatcagtcagcagctgtcaacattgagctactcagctctgctgttgtagtgtgaaagcagccacagaaaatatttaaattattccacttacttacatgatcatttcgagagatgtaatgttgattgctgctgttttttatgtcagataccgaactcttccaacaccacgaacacttgccaagtatttcaatccttgctatgccactgctaggttaaaaccaacattcatcagcaaggtgaatacagcagtccagttaatcttggtggcagcttctttggcagctccagttttcaactatgctgacagcatttatcttcagatactatggtgttttacagctttcaccacagctgcatcagcttatagttactatcattatggccggaagactgttcaggtgataaaagactgatgaaagtcatccctcactgttagtaaggaagcagtatacatcaatgggaacagggcccatggaaatgtacaggagtttccctattttggtgttcagcttgaaaaaggacttgtcagaatcaactgtgtcatcaaaatttaagtaatgtgcattgaaaataaggttgatcatgggaatatgcagaatttccaatgtatttttaaatacaaataaaattgtaatttagaatttttaatcttaggtttcttgattaatttataagagatcaattattgtcagtcttttttgtatgttttttaaaaacatagtccagagcatgggcagaattgacacctctcttttaagtgaaatttggattgctcacaaagcactaggaaatgtcatggggttcaaatatatatcctacacaactgggcaatacatttttgtttgatttttaggtctgtgtatacattaacagttcatgtaattaatacctgatcatttgggataatgaaagtgaagttagttgtagatgaagtaaagttataaaagagattaaaaatgcggtaactttttaagataataatcatacagaaggtatgaagttcattttcggtagtcttccaacctctcaggtgcctaataatttatgtttgaggataacaggtaacaaagatagtcgagataggagaacgtgtctattagtctttgcatctaaaaggcagtgagttacgttcctgccttccactgtgtttctgacatagcaatgtttgtttgatattggaacctggattcatattttatgtaaataatatcaagctgtatatttttcaaaggttttttaaactttggagactctttcttttgttaagcagttaaaggaataaaagagctggaaaaaaaattgtaccttcaactcaggttattccatataacatacgtattctctgctgttacgtaagttttccgattcacagagtccattcatgtacatcacttacacttaaattgtaaaaataattagtctgaccatctgactttaaaagactgttgctacacgtacatcatgtttaggagaatgtgggatatggggaaggggagaagaagacagtccagtggtgactagttgctgctgcttaacctatggcctattgctgcccattgtccctggttttaatccaagcctattatggaatactgcagtgagattatccattctcagcctgttgagctgcattaaattagaatgggaggctgtaagtaaaactcatgcctcttggccaggcattctgcaccagcgtgtccctctgtggcttgctggtcctggttgttctcagactggcagctgagctgcgcttggcttgaagcatactgaagcctgcagccagggacaccgccattgaatcagatggagggggatgaaaaagcagagaagggggcatgtggctggctattcttgctctctggagaacagcttcattgttaggagtagttaggctgaaagtggacttcccactgctgagccacccaagaggcacactgagcattagtgacgggtgagccacataagaataatgtttaaaaaagagaggacttgaagtagctatgcgaaaatttagaactttgcactttgttaacgcttatttatggtttagtgttgatgccatttggagtgacctatgggttggacccatatctttttattattaaggtctcaatctggctctggttaataaacgtttcccgcttcatcccttaggaaaatggtccaagtctcctcaggcttttggatactgaattgttataaaacacatcaattctgccagtttataaaacactggaattgtattagacatgtctgagtatgtacttgtttatagactcaaaacatgatgaaaattca

SEQ ID NO: 323189 - DNA, 1892 bp, Homo sapiens
cgtacccgctgcttcccaaaacccactgagcctgatgcgcgcgcctccgctgtgccaggggcgccgggaagcccgacgacgacggtgtcgtaaaagcgtcgcgaaggcgtccgcccttggcggcttcctgccacctgtataagtggagcgtgctggggtgtgtaaagtagtatggaggcagcggtagcccagtgtctgagtggttgccgggtctccatggagaagcggctcgccagtgtcccaggctgctgagctctcgccgcccgagaccccgcggcgcggccgcagggccatgctagccttgcgcgtggcgcgcggctcgtggggggccctgcgcggcgccgcttgggctccgggaacgcggccgagtaagcgacgcgcctgctgggccctgctgccgcccgtgccctgctgcttgggctgcctggccgaacgctggaggctgcgtccggccgctcttggcttgcggctgcccgggatcggccagcggaaccactgttcgggcgcggggaaggcggctcccaggccagcggccggagcgggcgccgctgccgaagccccgggcggccagtggggcccggcgagcacccccagcctgtatgaaaacccatggacaatcccgaatatgttgtcaatgacgagaattggcttggccccagttctgggctatttgattattgaagaagattttaatattgcactaggagtttttgctttagctggactaacagatttgttggatggatttattgctcgaaactgggccaatcaaagatcagctttgggaagtgctcttgatccacttgctgataaaatacttatcagtatcttatatgttagcttgacctatgcagatcttattccagttccacttacttacatgatcatttcgagagatgtaatgttgattgctgctgttttttatgtcagataccgaactcttccaacaccacgaacacttgccaagtatttcaatccttgctatgccactgctaggttaaaaccaacattcatcagcaaggtgaatacagcagtccagttaatcttggtggcagcttctttggcagctccagttttcaactatgctgacagcatttatcttcagatactatggtgttttacagctttcaccacagctgcatcagcttatagttactatcattatggccggaagactgttcaggtgataaaagactgatgaaagtcatccctcactgttagtaaggaagcagtatacatcaatgggaacagggcccatggaaatgtacaggagtttccctattttggtgttcagcttgaaaaaggacttgtcagaatcaactgtgtcatcaaaatttaagtaatgtgcattgaaaataaggttgatcatgggaatatgcagaatttccaatgtatttttaaatacaaataaaattgtaatttagaatttttaatcttaggtttcttgattaatttataagagatcaattattgtcagtcttttttgtatgttttttaaaaacatagtccagagcatgggcagaattgacacctctcttttaagtgaaatttggattgctcacaaagcactaggaaatgtcatggggttcaaatatatatccctttaacaaaacaaaaaaaacttttttgggggggggggggggggccccaaaaaaaaaaattttttttataacacccaataatacttttttttctttgccatttctagaagagaggaggggggggagcaagattttcaacaaagaggacgagggggggggagcacacacacctttttttttaattttgatatcttatttattatctctcaaaaacaaaagcaacggggggggggagaagagaagaggaaaggtattttttctcccccccccatttttttttgggggggggga

SEQ ID NO: 323190 - DNA, 1431 bp, Homo sapiens
cgtacccgctgcttcccaaaacccactgagcctgatgcgcgcgcctccgctgtgccaggggcgccgggaagcccgacgacgacggtgtcgtaaaagcgtcgcgaaggcgtccgcccttggcggcttcctgccacctgtataagtggagcgtgctggggtgtgtaaagtagtatggaggcagcggtagcccagtgtctgagtggttgccgggtctccatggagaagcggctcgccagtgtcccaggctgctgagctctcgccgcccgagaccccgcggcgcggccgcagggccatgctagccttgcgcgtggcgcgcggctcgtggggggccctgcgcggcgccgcttgggctccgggaacgcggccgagtaagcgacgcgcctgctgggccctgctgccgcccgtgccctgctgcttgggctgcctggccgaacgctggaggctgcgtccggccgctcttggcttgcggctgcccgggatcggccagcggaaccactgttcgggcgcggggaaggcggctcccaggccagcggccggagcgggcgccgctgccgaagccccgggcggccagtggggcccggcgagcacccccagcctgtatgaaaacccatggacaatcccgaatatgttgtcaatgacgagaattggcttggccccagttctgggctatttgattattgaagaagattttaatattgcactaggagtttttgctttagctggactaacagatttgttggatggatttattgctcgaaactgggccaatcaaagatcagctttgggaagtgctcttgatccacttgctgataaaatacttatcagtatcttatatgttagcttgacctatgcagatcttattccagttccacttacttacatgatcatttcgagagatgtaatgttgattgctgctgttttttatgtcagataccgaactcttccaacaccacgaacacttgccaagtatttcaatccttgctatgccactgctaggttaaaaccaacattcatcagcaaggtgaatacagcagtccagttaatcttggtggcagcttctttggcagctccagttttcaactatgctgacagcatttatcttcagatactatggtgttttacagctttcaccacagctgcatcagcttatagttactatcattatggccggaagactgttcaggtgataaaagactgatgaaagtcatccctcactgttagtaaggaagcagtatacatcaatgggaacagggcccatggaaatgtacaggagtttccctattttggtgttcagcttgaaaaaggacttgtcagaatcaactgtgtcatcaaaatttaagtaatgtgcattgaaaataaggttgatcatgggaatatgcagaatttccaatgtatttttaaatacaaataaaattgtaatttagaattttt

SEQ ID NO: 323191 - DNA, 3365 bp, Homo sapiens
cgtacccgctgcttcccaaaacccactgagcctgatgcgcgcgcctccgctgtgccaggggcgccgggaagcccgacgacgacggtgtcgtaaaagcgtcgcgaaggcgtccgcccttggcggcttcctgccacctgtataagtggagcgtgctggggtgtgtaaagtagtatggaggcagcggtagcccagtgtctgagtggttgccgggtctccatggagaagcggctcgccagtgtcccaggctgctgagctctcgccgcccgagaccccgcggcgcggccgcagggccatgctagccttgcgcgtggcgcgcggctcgtggggggccctgcgcggcgccgcttgggctccgggaacgcggccgagtaagcgacgcgcctgctgggccctgctgccgcccgtgccctgctgcttgggctgcctggccgaacgctggaggctgcgtccggccgctcttggcttgcggctgcccgggatcggccagcggaaccactgttcgggcgcggggaaggcggctcccaggccagcggccggagcgggcgccgctgccgaagccccgggcggccagtggggcccggcgagcacccccagcctggtacgtaccgatgaggcggcggcgggccggccctgggctggggtcgccgcccctgcactcaggtaacaagctctgggtggtgcagctcggacgcttccgtttcctaacttttagactcttccctgaaaagaagttactggcaggtcattcggtcgggatgaatttcagggtcaccagcggggtccacctacggtctctgtggtcaagttagaaatcctctcatcccccttctatctgcacccgttgctggaagggccgcctctgcatattgcattgataaagtatgaaaacccatggacaatcccgaatatgttgtcaatgacgagaattggcttggccccagttctgggctatttgattattgaagaagattttaatattgcactaggagtttttgctttagctggactaacagatttgttggatggatttattgctcgaaactgggccaatcaaagatcagctttgggaagtgctcttgatccacttgctgataaaatacttatcagtatcttatatgttagcttgacctatgcagatcttattccagttccacttacttacatgatcatttcgagagatgtaatgttgattgctgctgttttttatgtcagataccgaactcttccaacaccacgaacacttgccaagtatttcaatccttgctatgccactgctaggttaaaaccaacattcatcagcaaggtgaatacagcagtccagttaatcttggtggcagcttctttggcagctccagttttcaactatgctgacagcatttatcttcagatactatggtgttttacagctttcaccacagctgcatcagcttatagttactatcattatggccggaagactgttcaggtgataaaagactgatgaaagtcatccctcactgttagtaaggaagcagtatacatcaatgggaacagggcccatggaaatgtacaggagtttccctattttggtgttcagcttgaaaaaggacttgtcagaatcaactgtgtcatcaaaatttaagtaatgtgcattgaaaataaggttgatcatgggaatatgcagaatttccaatgtatttttaaatacaaataaaattgtaatttagaatttttaatcttaggtttcttgattaatttataagagatcaattattgtcagtcttttttgtatgttttttaaaaacatagtccagagcatgggcagaattgacacctctcttttaagtgaaatttggattgctcacaaagcactaggaaatgtcatggggttcaaatatatatcctacacaactgggcaatacatttttgtttgatttttaggtctgtgtatacattaacagttcatgtaattaatacctgatcatttgggataatgaaagtgaagttagttgtagatgaagtaaagttataaaagagattaaaaatgcggtaactttttaagataataatcatacagaaggtatgaagttcattttcggtagtcttccaacctctcaggtgcctaataatttatgtttgaggataacaggtaacaaagatagtcgagataggagaacgtgtctattagtctttgcatctaaaaggcagtgagttacgttcctgccttccactgtgtttctgacatagcaatgtttgtttgatattggaacctggattcatattttatgtaaataatatcaagctgtatatttttcaaaggttttttaaactttggagactctttcttttgttaagcagttaaaggaataaaagagctggaaaaaaaattgtaccttcaactcaggttattccatataacatacgtattctctgctgttacgtaagttttccgattcacagagtccattcatgtacatcacttacacttaaattgtaaaaataattagtctgaccatctgactttaaaagactgttgctacacgtacatcatgtttaggagaatgtgggatatggggaaggggagaagaagacagtccagtggtgactagttgctgctgcttaacctatggcctattgctgcccattgtccctggttttaatccaagcctattatggaatactgcagtgagattatccattctcagcctgttgagctgcattaaattagaatgggaggctgtaagtaaaactcatgcctcttggccaggcattctgcaccagcgtgtccctctgtggcttgctggtcctggttgttctcagactggcagctgagctgcgcttggcttgaagcatactgaagcctgcagccagggacaccgccattgaatcagatggagggggatgaaaaagcagagaagggggcatgtggctggctattcttgctctctggagaacagcttcattgttaggagtagttaggctgaaagtggacttcccactgctgagccacccaagaggcacactgagcattagtgacgggtgagccacataagaataatgtttaaaaaagagaggacttgaagtagctatgcgaaaatttagaactttgcactttgttaacgcttatttatggtttagtgttgatgccatttggagtgacctatgggttggacccatatctttttattattaaggtctcaatctggctctggttaataaacgtttcccgcttcatcccttaggaaaatggtccaagtctcctcaggcttttggatactgaattgttataaaacacatcaattctgccagtttataaaacactggaattgtattagacatgtctgagtatgtacttgtttatagactcaaaacatgatgaaaattca

SEQ ID NO: 323192 - DNA, 3235 bp, Homo sapiens
cgtacccgctgcttcccaaaacccactgagcctgatgcgcgcgcctccgctgtgccaggggcgccgggaagcccgacgacgacggtgtcgtaaaagcgtcgcgaaggcgtccgcccttggcggcttcctgccacctgtataagtggagcgtgctggggtgtgtaaagtagtatggaggcagcggtagcccagtgtctgagtggttgccgggtctccatggagaagcggctcgccagtgtcccaggctgctgagctctcgccgcccgagaccccgcggcgcggccgcagggccatgctagccttgcgcgtggcgcgcggctcgtggggggccctgcgcggcgccgcttgggctccgggaacgcggccgagtaagcgacgcgcctgctgggccctgctgccgcccgtgccctgctgcttgggctgcctggccgaacgctggaggctgcgtccggccgctcttggcttgcggctgcccgggatcggccagcggaaccactgttcgggcgcggggaaggcggctcccaggccagcggccggagcgggcgccgctgccgaagccccgggcggccagtggggcccggcgagcacccccagcctgaagttactggcaggtcattcggtcgggatgaatttcagggtcaccagcggggtccacctacggtctctgtggtcaagttagaaatcctctcatcccccttctatctgcacccgttgctggaagggccgcctctgcatattgcattgataaagtatgaaaacccatggacaatcccgaatatgttgtcaatgacgagaattggcttggccccagttctgggctatttgattattgaagaagattttaatattgcactaggagtttttgctttagctggactaacagatttgttggatggatttattgctcgaaactgggccaatcaaagatcagctttgggaagtgctcttgatccacttgctgataaaatacttatcagtatcttatatgttagcttgacctatgcagatcttattccagttccacttacttacatgatcatttcgagagatgtaatgttgattgctgctgttttttatgtcagataccgaactcttccaacaccacgaacacttgccaagtatttcaatccttgctatgccactgctaggttaaaaccaacattcatcagcaaggtgaatacagcagtccagttaatcttggtggcagcttctttggcagctccagttttcaactatgctgacagcatttatcttcagatactatggtgttttacagctttcaccacagctgcatcagcttatagttactatcattatggccggaagactgttcaggtgataaaagactgatgaaagtcatccctcactgttagtaaggaagcagtatacatcaatgggaacagggcccatggaaatgtacaggagtttccctattttggtgttcagcttgaaaaaggacttgtcagaatcaactgtgtcatcaaaatttaagtaatgtgcattgaaaataaggttgatcatgggaatatgcagaatttccaatgtatttttaaatacaaataaaattgtaatttagaatttttaatcttaggtttcttgattaatttataagagatcaattattgtcagtcttttttgtatgttttttaaaaacatagtccagagcatgggcagaattgacacctctcttttaagtgaaatttggattgctcacaaagcactaggaaatgtcatggggttcaaatatatatcctacacaactgggcaatacatttttgtttgatttttaggtctgtgtatacattaacagttcatgtaattaatacctgatcatttgggataatgaaagtgaagttagttgtagatgaagtaaagttataaaagagattaaaaatgcggtaactttttaagataataatcatacagaaggtatgaagttcattttcggtagtcttccaacctctcaggtgcctaataatttatgtttgaggataacaggtaacaaagatagtcgagataggagaacgtgtctattagtctttgcatctaaaaggcagtgagttacgttcctgccttccactgtgtttctgacatagcaatgtttgtttgatattggaacctggattcatattttatgtaaataatatcaagctgtatatttttcaaaggttttttaaactttggagactctttcttttgttaagcagttaaaggaataaaagagctggaaaaaaaattgtaccttcaactcaggttattccatataacatacgtattctctgctgttacgtaagttttccgattcacagagtccattcatgtacatcacttacacttaaattgtaaaaataattagtctgaccatctgactttaaaagactgttgctacacgtacatcatgtttaggagaatgtgggatatggggaaggggagaagaagacagtccagtggtgactagttgctgctgcttaacctatggcctattgctgcccattgtccctggttttaatccaagcctattatggaatactgcagtgagattatccattctcagcctgttgagctgcattaaattagaatgggaggctgtaagtaaaactcatgcctcttggccaggcattctgcaccagcgtgtccctctgtggcttgctggtcctggttgttctcagactggcagctgagctgcgcttggcttgaagcatactgaagcctgcagccagggacaccgccattgaatcagatggagggggatgaaaaagcagagaagggggcatgtggctggctattcttgctctctggagaacagcttcattgttaggagtagttaggctgaaagtggacttcccactgctgagccacccaagaggcacactgagcattagtgacgggtgagccacataagaataatgtttaaaaaagagaggacttgaagtagctatgcgaaaatttagaactttgcactttgttaacgcttatttatggtttagtgttgatgccatttggagtgacctatgggttggacccatatctttttattattaaggtctcaatctggctctggttaataaacgtttcccgcttcatcccttaggaaaatggtccaagtctcctcaggcttttggatactgaattgttataaaacacatcaattctgccagtttataaaacactggaattgtattagacatgtctgagtatgtacttgtttatagactcaaaacatgatgaaaattca

SEQ ID NO: 323193 - DNA, 2749 bp, Homo sapiens
  misc_feature (55)..(55): n is a, c, g, or t
gggccctgccccgggcgcggggctccgatggacaaacaataatgacactccttcngaaacttcttgtattttctttgctgcttgggctgcctggccgaacgctggaggctgcgtccggccgctcttggcttgcggctgcccgggatcggccagcggaaccactgttcgggcgcggggaaggcggctcccaggccagcggccggagcgggcgccgctgccgaagccccgggcggccagtggggcccggcgagcacccccagcctgtatgaaaacccatggacaatcccgaatatgttgtcaatgacgagaattggcttggccccagttctgggctatttgattattgaagaagattttaatattgcactaggagtttttgctttagctggactaacagatttgttggatggatttattgctcgaaactgggccaatcaaagatcagctttgggaagtgctcttgatccacttgctgataaaatacttatcagtatcttatatgttagcttgacctatgcagatcttattccagttccacttacttacatgatcatttcgagagatgtaatgttgattgctgctgttttttatgtcagataccgaactcttccaacaccacgaacacttgccaagtatttcaatccttgctatgccactgctaggttaaaaccaacattcatcagcaaggtgaatacagcagtccagttaatcttggtggcagcttctttggcagctccagttttcaactatgctgacagcatttatcttcagatactatggtgttttacagctttcaccacagctgcatcagcttatagttactatcattatggccggaagactgttcaggtgataaaagactgatgaaagtcatccctcactgttagtaaggaagcagtatacatcaatgggaacagggcccatggaaatgtacaggagtttccctattttggtgttcagcttgaaaaaggacttgtcagaatcaactgtgtcatcaaaatttaagtaatgtgcattgaaaataaggttgatcatgggaatatgcagaatttccaatgtatttttaaatacaaataaaattgtaatttagaatttttaatcttaggtttcttgattaatttataagagatcaattattgtcagtcttttttgtatgttttttaaaaacatagtccagagcatgggcagaattgacacctctcttttaagtgaaatttggattgctcacaaagcactaggaaatgtcatggggttcaaatatatatcctacacaactgggcaatacatttttgtttgatttttaggtctgtgtatacattaacagttcatgtaattaatacctgatcatttgggataatgaaagtgaagttagttgtagatgaagtaaagttataaaagagattaaaaatgcggtaactttttaagataataatcatacagaaggtatgaagttcattttcggtagtcttccaacctctcaggtgcctaataatttatgtttgaggataacaggtaacaaagatagtcgagataggagaacgtgtctattagtctttgcatctaaaaggcagtgagttacgttcctgccttccactgtgtttctgacatagcaatgtttgtttgatattggaacctggattcatattttatgtaaataatatcaagctgtatatttttcaaaggttttttaaactttggagactctttcttttgttaagcagttaaaggaataaaagagctggaaaaaaaattgtaccttcaactcaggttattccatataacatacgtattctctgctgttacgtaagttttccgattcacagagtccattcatgtacatcacttacacttaaattgtaaaaataattagtctgaccatctgactttaaaagactgttgctacacgtacatcatgtttaggagaatgtgggatatggggaaggggagaagaagacagtccagtggtgactagttgctgctgcttaacctatggcctattgctgcccattgtccctggttttaatccaagcctattatggaatactgcagtgagattatccattctcagcctgttgagctgcattaaattagaatgggaggctgtaagtaaaactcatgcctcttggccaggcattctgcaccagcgtgtccctctgtggcttgctggtcctggttgttctcagactggcagctgagctgcgcttggcttgaagcatactgaagcctgcagccagggacaccgccattgaatcagatggagggggatgaaaaagcagagaagggggcatgtggctggctattcttgctctctggagaacagcttcattgttaggagtagttaggctgaaagtggacttcccactgctgagccacccaagaggcacactgagcattagtgacgggtgagccacataagaataatgtttaaaaaagagaggacttgaagtagctatgcgaaaatttagaactttgcactttgttaacgcttatttatggtttagtgttgatgccatttggagtgacctatgggttggacccatatctttttattattaaggtctcaatctggctctggttaataaacgtttcccgcttcatcccttaggaaaatggtccaagtctcctcaggcttttggatactgaattgttataaaacacatcaattctgccagtttataaaacactggaattgtattagacatgtctgagtatgtacttgtttatagactcaaaacatgatgaaaattca

SEQ ID NO: 323194 - DNA, 2620 bp, Homo sapiens
ctggcaggggtctcaactccactgatagctaaagcatgttggggtttgaatgctggatactttgaagttgccatatcctgactgaagtccttcccagaacggcagtagttggtcgagtatgccacaggttatctgtatgaaaacccatggacaatcccgaatatgttgtcaatgacgagaattggcttggccccagttctgggctatttgattattgaagaagattttaatattgcactaggagtttttgctttagctggactaacagatttgttggatggatttattgctcgaaactgggccaatcaaagatcagctttgggaagtgctcttgatccacttgctgataaaatacttatcagtatcttatatgttagcttgacctatgcagatcttattccagttccacttacttacatgatcatttcgagagatgtaatgttgattgctgctgttttttatgtcagataccgaactcttccaacaccacgaacacttgccaagtatttcaatccttgctatgccactgctaggttaaaaccaacattcatcagcaaggtgaatacagcagtccagttaatcttggtggcagcttctttggcagctccagttttcaactatgctgacagcatttatcttcagatactatggtgttttacagctttcaccacagctgcatcagcttatagttactatcattatggccggaagactgttcaggtgataaaagactgatgaaagtcatccctcactgttagtaaggaagcagtatacatcaatgggaacagggcccatggaaatgtacaggagtttccctattttggtgttcagcttgaaaaaggacttgtcagaatcaactgtgtcatcaaaatttaagtaatgtgcattgaaaataaggttgatcatgggaatatgcagaatttccaatgtatttttaaatacaaataaaattgtaatttagaatttttaatcttaggtttcttgattaatttataagagatcaattattgtcagtcttttttgtatgttttttaaaaacatagtccagagcatgggcagaattgacacctctcttttaagtgaaatttggattgctcacaaagcactaggaaatgtcatggggttcaaatatatatcctacacaactgggcaatacatttttgtttgatttttaggtctgtgtatacattaacagttcatgtaattaatacctgatcatttgggataatgaaagtgaagttagttgtagatgaagtaaagttataaaagagattaaaaatgcggtaactttttaagataataatcatacagaaggtatgaagttcattttcggtagtcttccaacctctcaggtgcctaataatttatgtttgaggataacaggtaacaaagatagtcgagataggagaacgtgtctattagtctttgcatctaaaaggcagtgagttacgttcctgccttccactgtgtttctgacatagcaatgtttgtttgatattggaacctggattcatattttatgtaaataatatcaagctgtatatttttcaaaggttttttaaactttggagactctttcttttgttaagcagttaaaggaataaaagagctggaaaaaaaattgtaccttcaactcaggttattccatataacatacgtattctctgctgttacgtaagttttccgattcacagagtccattcatgtacatcacttacacttaaattgtaaaaataattagtctgaccatctgactttaaaagactgttgctacacgtacatcatgtttaggagaatgtgggatatggggaaggggagaagaagacagtccagtggtgactagttgctgctgcttaacctatggcctattgctgcccattgtccctggttttaatccaagcctattatggaatactgcagtgagattatccattctcagcctgttgagctgcattaaattagaatgggaggctgtaagtaaaactcatgcctcttggccaggcattctgcaccagcgtgtccctctgtggcttgctggtcctggttgttctcagactggcagctgagctgcgcttggcttgaagcatactgaagcctgcagccagggacaccgccattgaatcagatggagggggatgaaaaagcagagaagggggcatgtggctggctattcttgctctctggagaacagcttcattgttaggagtagttaggctgaaagtggacttcccactgctgagccacccaagaggcacactgagcattagtgacgggtgagccacataagaataatgtttaaaaaagagaggacttgaagtagctatgcgaaaatttagaactttgcactttgttaacgcttatttatggtttagtgttgatgccatttggagtgacctatgggttggacccatatctttttattattaaggtctcaatctggctctggttaataaacgtttcccgcttcatcccttaggaaaatggtccaagtctcctcaggcttttggatactgaattgttataaaacacatcaattctgccagtttataaaacactggaattgtattagacatgtctgagtatgtacttgtttatagactcaaaacatgatgaaaattca

SEQ ID NO: 323195 - DNA, 2642 bp, Homo sapiens
cgtacccgctgcttcccaaaacccactgagcctgatgcgcgcgcctccgctgtgccaggggcgccgggaagcccgacgacgacggtgtcgtaaaagcgtcgcgaaggcgtccgcccttggcggcttcctgccacctgtataagtggagcgtgctgggtatgaaaacccatggacaatcccgaatatgttgtcaatgacgagaattggcttggccccagttctgggctatttgattattgaagaagattttaatattgcactaggagtttttgctttagctggactaacagatttgttggatggatttattgctcgaaactgggccaatcaaagatcagctttgggaagtgctcttgatccacttgctgataaaatacttatcagtatcttatatgttagcttgacctatgcagatcttattccagttccacttacttacatgatcatttcgagagatgtaatgttgattgctgctgttttttatgtcagataccgaactcttccaacaccacgaacacttgccaagtatttcaatccttgctatgccactgctaggttaaaaccaacattcatcagcaaggtgaatacagcagtccagttaatcttggtggcagcttctttggcagctccagttttcaactatgctgacagcatttatcttcagatactatggtgttttacagctttcaccacagctgcatcagcttatagttactatcattatggccggaagactgttcaggtgataaaagactgatgaaagtcatccctcactgttagtaaggaagcagtatacatcaatgggaacagggcccatggaaatgtacaggagtttccctattttggtgttcagcttgaaaaaggacttgtcagaatcaactgtgtcatcaaaatttaagtaatgtgcattgaaaataaggttgatcatgggaatatgcagaatttccaatgtatttttaaatacaaataaaattgtaatttagaatttttaatcttaggtttcttgattaatttataagagatcaattattgtcagtcttttttgtatgttttttaaaaacatagtccagagcatgggcagaattgacacctctcttttaagtgaaatttggattgctcacaaagcactaggaaatgtcatggggttcaaatatatatcctacacaactgggcaatacatttttgtttgatttttaggtctgtgtatacattaacagttcatgtaattaatacctgatcatttgggataatgaaagtgaagttagttgtagatgaagtaaagttataaaagagattaaaaatgcggtaactttttaagataataatcatacagaaggtatgaagttcattttcggtagtcttccaacctctcaggtgcctaataatttatgtttgaggataacaggtaacaaagatagtcgagataggagaacgtgtctattagtctttgcatctaaaaggcagtgagttacgttcctgccttccactgtgtttctgacatagcaatgtttgtttgatattggaacctggattcatattttatgtaaataatatcaagctgtatatttttcaaaggttttttaaactttggagactctttcttttgttaagcagttaaaggaataaaagagctggaaaaaaaattgtaccttcaactcaggttattccatataacatacgtattctctgctgttacgtaagttttccgattcacagagtccattcatgtacatcacttacacttaaattgtaaaaataattagtctgaccatctgactttaaaagactgttgctacacgtacatcatgtttaggagaatgtgggatatggggaaggggagaagaagacagtccagtggtgactagttgctgctgcttaacctatggcctattgctgcccattgtccctggttttaatccaagcctattatggaatactgcagtgagattatccattctcagcctgttgagctgcattaaattagaatgggaggctgtaagtaaaactcatgcctcttggccaggcattctgcaccagcgtgtccctctgtggcttgctggtcctggttgttctcagactggcagctgagctgcgcttggcttgaagcatactgaagcctgcagccagggacaccgccattgaatcagatggagggggatgaaaaagcagagaagggggcatgtggctggctattcttgctctctggagaacagcttcattgttaggagtagttaggctgaaagtggacttcccactgctgagccacccaagaggcacactgagcattagtgacgggtgagccacataagaataatgtttaaaaaagagaggacttgaagtagctatgcgaaaatttagaactttgcactttgttaacgcttatttatggtttagtgttgatgccatttggagtgacctatgggttggacccatatctttttattattaaggtctcaatctggctctggttaataaacgtttcccgcttcatcccttaggaaaatggtccaagtctcctcaggcttttggatactgaattgttataaaacacatcaattctgccagtttataaaacactggaattgtattagacatgtctgagtatgtacttgtttatagactcaaaacatgatgaaaattca

SEQ ID NO: 323196 - DNA, 2339 bp, Homo sapiens
taaaatttctatttgtgaaaacagcagtttgtggtaaggctgaatgacatattattgtattcataatgcatattagtactcttcagaatcccagttaaaattattttatgtttgattttcagttccacttacttacatgatcatttcgagagatgtaatgttgattgctgctgttttttatgtcagataccgaactcttccaacaccacgaacacttgccaagtatttcaatccttgctatgccactgctaggttaaaaccaacattcatcagcaaggtgaatacagcagtccagttaatcttggtggcagcttctttggcagctccagttttcaactatgctgacagcatttatcttcagatactatggtgttttacagctttcaccacagctgcatcagcttatagttactatcattatggccggaagactgttcaggtgataaaagactgatgaaagtcatccctcactgttagtaaggaagcagtatacatcaatgggaacagggcccatggaaatgtacaggagtttccctattttggtgttcagcttgaaaaaggacttgtcagaatcaactgtgtcatcaaaatttaagtaatgtgcattgaaaataaggttgatcatgggaatatgcagaatttccaatgtatttttaaatacaaataaaattgtaatttagaatttttaatcttaggtttcttgattaatttataagagatcaattattgtcagtcttttttgtatgttttttaaaaacatagtccagagcatgggcagaattgacacctctcttttaagtgaaatttggattgctcacaaagcactaggaaatgtcatggggttcaaatatatatcctacacaactgggcaatacatttttgtttgatttttaggtctgtgtatacattaacagttcatgtaattaatacctgatcatttgggataatgaaagtgaagttagttgtagatgaagtaaagttataaaagagattaaaaatgcggtaactttttaagataataatcatacagaaggtatgaagttcattttcggtagtcttccaacctctcaggtgcctaataatttatgtttgaggataacaggtaacaaagatagtcgagataggagaacgtgtctattagtctttgcatctaaaaggcagtgagttacgttcctgccttccactgtgtttctgacatagcaatgtttgtttgatattggaacctggattcatattttatgtaaataatatcaagctgtatatttttcaaaggttttttaaactttggagactctttcttttgttaagcagttaaaggaataaaagagctggaaaaaaaattgtaccttcaactcaggttattccatataacatacgtattctctgctgttacgtaagttttccgattcacagagtccattcatgtacatcacttacacttaaattgtaaaaataattagtctgaccatctgactttaaaagactgttgctacacgtacatcatgtttaggagaatgtgggatatggggaaggggagaagaagacagtccagtggtgactagttgctgctgcttaacctatggcctattgctgcccattgtccctggttttaatccaagcctattatggaatactgcagtgagattatccattctcagcctgttgagctgcattaaattagaatgggaggctgtaagtaaaactcatgcctcttggccaggcattctgcaccagcgtgtccctctgtggcttgctggtcctggttgttctcagactggcagctgagctgcgcttggcttgaagcatactgaagcctgcagccagggacaccgccattgaatcagatggagggggatgaaaaagcagagaagggggcatgtggctggctattcttgctctctggagaacagcttcattgttaggagtagttaggctgaaagtggacttcccactgctgagccacccaagaggcacactgagcattagtgacgggtgagccacataagaataatgtttaaaaaagagaggacttgaagtagctatgcgaaaatttagaactttgcactttgttaacgcttatttatggtttagtgttgatgccatttggagtgacctatgggttggacccatatctttttattattaaggtctcaatctggctctggttaataaacgtttcccgcttcatcccttaggaaaatggtccaagtctcctcaggcttttggatactgaattgttataaaacacatcaattctgccagtttataaaacactggaattgtattagacatgtctgagtatgtacttgtttatagactcaaaacatgatgaaaattca

SEQ ID NO: 323197 - DNA, 2672 bp, Homo sapiens
gagaaggatgaaaacaaattctttggcttatatgttaattagagagtggaaggcaaatccaagttaatttctacttagatttatgtccactgaacttagatctgtgtgtatttgttctgccacatttttgtattattttatttttattattttatttattttgtattattatattttgtattattatattgtttctggtttaccatctggtaaattcttatttctggtttaagtcaatttctagaatattctgttaagtttaccgttttcagtgtaaaaacctatagtgttgatgttaaccatttttaatatgtaaacgattttatgaactatttccctttaatgctaataaaacttgtccatgatgtctggctttgtgggctatgtgatctctgttacagctactcagctctgctgttgtagtgtgaaagcagccacagaaaatatttaaattattccacttacttacatgatcatttcgagagatgtaatgttgattgctgctgttttttatgtcagataccgaactcttccaacaccacgaacacttgccaagtatttcaatccttgctatgccactgctaggttaaaaccaacattcatcagcaaggtgaatacagcagtccagttaatcttggtggcagcttctttggcagctccagttttcaactatgctgacagcatttatcttcagatactatggtgttttacagctttcaccacagctgcatcagcttatagttactatcattatggccggaagactgttcaggtgataaaagactgatgaaagtcatccctcactgttagtaaggaagcagtatacatcaatgggaacagggcccatggaaatgtacaggagtttccctattttggtgttcagcttgaaaaaggacttgtcagaatcaactgtgtcatcaaaatttaagtaatgtgcattgaaaataaggttgatcatgggaatatgcagaatttccaatgtatttttaaatacaaataaaattgtaatttagaatttttaatcttaggtttcttgattaatttataagagatcaattattgtcagtcttttttgtatgttttttaaaaacatagtccagagcatgggcagaattgacacctctcttttaagtgaaatttggattgctcacaaagcactaggaaatgtcatggggttcaaatatatatcctacacaactgggcaatacatttttgtttgatttttaggtctgtgtatacattaacagttcatgtaattaatacctgatcatttgggataatgaaagtgaagttagttgtagatgaagtaaagttataaaagagattaaaaatgcggtaactttttaagataataatcatacagaaggtatgaagttcattttcggtagtcttccaacctctcaggtgcctaataatttatgtttgaggataacaggtaacaaagatagtcgagataggagaacgtgtctattagtctttgcatctaaaaggcagtgagttacgttcctgccttccactgtgtttctgacatagcaatgtttgtttgatattggaacctggattcatattttatgtaaataatatcaagctgtatatttttcaaaggttttttaaactttggagactctttcttttgttaagcagttaaaggaataaaagagctggaaaaaaaattgtaccttcaactcaggttattccatataacatacgtattctctgctgttacgtaagttttccgattcacagagtccattcatgtacatcacttacacttaaattgtaaaaataattagtctgaccatctgactttaaaagactgttgctacacgtacatcatgtttaggagaatgtgggatatggggaaggggagaagaagacagtccagtggtgactagttgctgctgcttaacctatggcctattgctgcccattgtccctggttttaatccaagcctattatggaatactgcagtgagattatccattctcagcctgttgagctgcattaaattagaatgggaggctgtaagtaaaactcatgcctcttggccaggcattctgcaccagcgtgtccctctgtggcttgctggtcctggttgttctcagactggcagctgagctgcgcttggcttgaagcatactgaagcctgcagccagggacaccgccattgaatcagatggagggggatgaaaaagcagagaagggggcatgtggctggctattcttgctctctggagaacagcttcattgttaggagtagttaggctgaaagtggacttcccactgctgagccacccaagaggcacactgagcattagtgacgggtgagccacataagaataatgtttaaaaaagagaggacttgaagtagctatgcgaaaatttagaactttgcactttgttaacgcttatttatggtttagtgttgatgccatttggagtgacctatgggttggacccatatctttttattattaaggtctcaatctggctctggttaataaacgtttcccgcttcatcccttaggaaaatggtccaagtctcctcaggcttttggatactgaattgttataaaacacatcaattctgccagtttataaaacactggaattgtattagacatgtctgagtatgtacttgtttatagactcaaaacatgatgaaaattca

SEQ ID NO: 323198 - DNA, 2469 bp, Homo sapiens
cacaatgtgaattgcagaatgggtttagtctgggacacagtgttgaacaaaatttttaattggattgtttatccatttgttggagttcttaatatattattttgagggctgtacatgctgcaaatgtattttccctctgtgtggcttgccattttagtctcttaatggtgtcttctggacaccaaaagttaaacgtagtcaaatatattagtcttttcctttatgattattgcttcttaattttcatttaagacatctttttctaatttgatgacctgaggttacttttatgttactttttagagcagtgctgttcaataaaagtatgagctgagccactcatgtagtttaaaacattctagtatctgcattaagagagcaagacgcatcttgctcccatcagcaaggtgaatacagcagtccagttaatcttggtggcagcttctttggcagctccagttttcaactatgctgacagcatttatcttcagatactatggtgttttacagctttcaccacagctgcatcagcttatagttactatcattatggccggaagactgttcaggtgataaaagactgatgaaagtcatccctcactgttagtaaggaagcagtatacatcaatgggaacagggcccatggaaatgtacaggagtttccctattttggtgttcagcttgaaaaaggacttgtcagaatcaactgtgtcatcaaaatttaagtaatgtgcattgaaaataaggttgatcatgggaatatgcagaatttccaatgtatttttaaatacaaataaaattgtaatttagaatttttaatcttaggtttcttgattaatttataagagatcaattattgtcagtcttttttgtatgttttttaaaaacatagtccagagcatgggcagaattgacacctctcttttaagtgaaatttggattgctcacaaagcactaggaaatgtcatggggttcaaatatatatcctacacaactgggcaatacatttttgtttgatttttaggtctgtgtatacattaacagttcatgtaattaatacctgatcatttgggataatgaaagtgaagttagttgtagatgaagtaaagttataaaagagattaaaaatgcggtaactttttaagataataatcatacagaaggtatgaagttcattttcggtagtcttccaacctctcaggtgcctaataatttatgtttgaggataacaggtaacaaagatagtcgagataggagaacgtgtctattagtctttgcatctaaaaggcagtgagttacgttcctgccttccactgtgtttctgacatagcaatgtttgtttgatattggaacctggattcatattttatgtaaataatatcaagctgtatatttttcaaaggttttttaaactttggagactctttcttttgttaagcagttaaaggaataaaagagctggaaaaaaaattgtaccttcaactcaggttattccatataacatacgtattctctgctgttacgtaagttttccgattcacagagtccattcatgtacatcacttacacttaaattgtaaaaataattagtctgaccatctgactttaaaagactgttgctacacgtacatcatgtttaggagaatgtgggatatggggaaggggagaagaagacagtccagtggtgactagttgctgctgcttaacctatggcctattgctgcccattgtccctggttttaatccaagcctattatggaatactgcagtgagattatccattctcagcctgttgagctgcattaaattagaatgggaggctgtaagtaaaactcatgcctcttggccaggcattctgcaccagcgtgtccctctgtggcttgctggtcctggttgttctcagactggcagctgagctgcgcttggcttgaagcatactgaagcctgcagccagggacaccgccattgaatcagatggagggggatgaaaaagcagagaagggggcatgtggctggctattcttgctctctggagaacagcttcattgttaggagtagttaggctgaaagtggacttcccactgctgagccacccaagaggcacactgagcattagtgacgggtgagccacataagaataatgtttaaaaaagagaggacttgaagtagctatgcgaaaatttagaactttgcactttgttaacgcttatttatggtttagtgttgatgccatttggagtgacctatgggttggacccatatctttttattattaaggtctcaatctggctctggttaataaacgtttcccgcttcatcccttaggaaaatggtccaagtctcctcaggcttttggatactgaattgttataaaacacatcaattctgccagtttataaaacactggaattgtattagacatgtctgagtatgtacttgtttatagactcaaaacatgatgaaaattca

SEQ ID NO: 323199 - DNA, 1241 bp, Homo sapiens
cgtacccgctgcttcccaaaacccactgagcctgatgcgcgcgcctccgctgtgccaggggcgccgggaagcccgacgacgacggtgtcgtaaaagcgtcgcgaaggcgtccgcccttggcggcttcctgccacctgtataagtggagcgtgctggggtgtgtaaagtagtatggaggcagcggtagcccagtgtctgagtggttgccgggtctccatggagaagcggctcgccagtgtcccaggctgctgagctctcgccgcccgagaccccgcggcgcggccgcagggccatgctagccttgcgcgtggcgcgcggctcgtggggggccctgcgcggcgccgcttgggctccgggaacgcggccgagtaagcgacgcgcctgctgggccctgctgccgcccgtgccctgctgcttgggctgcctggccgaacgctggaggctgcgtccggccgctcttggcttgcggctgcccgggatcggccagcggaaccactgttcgggcgcggggaaggcggctcccaggccagcggccggagcgggcgccgctgccgaagccccgggcggccagtggggcccggcgagcacccccagcctgtatgaaaacccatggacaatcccgaatatgttgtcaatgacgagaattggcttggccccagttctgggctatttgattattgaagaagattttaatattgcactaggagtttttgctttagctggactaacagatttgttggatggatttattgctcgaaactgggccaatcaaagatcagctttgggaagtgctcttgatccacttgctgataaaatacttatcagtatcttatatgttagcttgacctatgcagatcttattccaggtgcctaggaatgctaacagtctgggaccacatagaccaccaggtgatgagacaatcctgggagtcctgttttactttggcccatcttttctcccaaccctgtgggaatagtcattcatatcctagctgcaagctagaaggtggtttatcagagcccaacttcgagggctctgggctttagctactgtcaccccatcataactgagcttcatggattgattctctttttatctttcagattttcttttaaaaatctttgttttttttttttcttccgaaagattcccccaacattaccattccccaccttccgttgaatttttttggctctcattttgaatttttcaagagctcatgttctttgtcttcattaaa

SEQ ID NO: 323200 - DNA, 539 bp, Homo sapiens
attgtattcataatgcatattagtactcttcagaatcccagttaaaattattttatgtttgattttcagttccacttacttacatgatcatttcgagagatgtaatgttgattgctgctgttttttatgtcagataccgaactcttccaacaccagtgagtttgtttccaaaaagtattcttttagcattatatatgatttaaggaaaaagcaaaaagacatatttttgcgtcaacatcttttcaattgatggcacgtgaaacccagactagccagcccctatccctagaagcaaattctttaaaggtgtttcatataggtccaggccatattgtctaatttaacctctaccatggatagtctagaattggttttaaaaatcacagttgtatgaacatgggatggtttgtttgcatatttattcacaggctctataaatacttgaacacatacgcatagcatattaacctcttttggctcccaatgtactgaaaatagagcagtagagcagtattttgttcattttattttttaattca

SEQ ID NO: 323201 - DNA, 3083 bp, Homo sapiens
cgtacccgctgcttcccaaaacccactgagcctgatgcgcgcgcctccgctgtgccaggggcgccgggaagcccgacgacgacggtgtcgtaaaagcgtcgcgaaggcgtccgcccttggcggcttcctgccacctgtataagtggagcgtgctggggtgtgtaaagtagtatggaggcagcggtagcccagtgtctgagtggttgccgggtctccatggagaagcggctcgccagtgtcccaggctgctgagctctcgccgcccgagaccccgcggcgcggccgcagggccatgctagccttgcgcgtggcgcgcggctcgtggggggccctgcgcggcgccgcttgggctccgggaacgcggccgagtaagcgacgcgcctgctgggccctgctgccgcccgtgccctgctgcttgggctgcctggccgaacgctggaggctgcgtccggccgctcttggcttgcggctgcccgggatcggccagcggaaccactgttcgggcgcggggaaggcggctcccaggccagcggccggagcgggcgccgctgccgaagccccgggcggccagtggggcccggcgagcacccccagcctgtatgaaaacccatggacaatcccgaatatgttgtcaatgacgagaattggcttggccccagttctgggctatttgattattgaagaagattttaatattgcactaggagtttttgctttagctggactaacagatttgttggatggatttattgctcgaaactgggccaatcaaagatcagctttgggaagtgctcttgatccacttgctgataaaatacttatcagtatcttatatgttagcttgacctatgcagatcttattccagttccacttacttacatgatcatttcgagagatgtaatgttgattgctgctgttttttatgtcagataccgaactcttccaacaccacgaacacttgccaagtatttcaatccttgctatgccactgctaggttaaaaccaacattcatcagcaaggtgaatacagcagtccagttaatcttggtggcagcttctttggcagctccagttttcaactatgctgacagcatttatcttcagatactatggtgttttacagctttcaccacagctgcatcagcttatagttactatcattatggccggaagactgttcaggtgataaaagactgatgaaagtcatccctcactgttagtaaggaagcagtatacatcaatgggaacagggcccatggaaatgtacaggagtttccctattttggtgttcagcttgaaaaaggacttgtcagaatcaactgtgtcatcaaaatttaagtaatgtgcattgaaaataaggttgatcatgggaatatgcagaatttccaatgtatttttaaatacaaataaaattgtaatttagaatttttaatcttaggtttcttgattaatttataagagatcaattattgtcagtcttttttgtatgttttttaaaaacatagtccagagcatgggcagaattgacacctctcttttaagtgaaatttggattgctcacaaagcactaggaaatgtcatggggttcaaatatatatcctacacaactgggcaatacatttttgtttgatttttaggtctgtgtatacattaacagttcatgtaattaatacctgatcatttgggataatgaaagtgaagttagttgtagatgaagtaaagttataaaagagattaaaaatgcggtaactttttaagataataatcatacagaaggtatgaagttcattttcggtagtcttccaacctctcaggtgcctaataatttatgtttgaggataacaggtaacaaagatagtcgagataggagaacgtgtctattagtctttgcatctaaaaggcagtgagttacgttcctgccttccactgtgtttctgacatagcaatgtttgtttgatattggaacctggattcatattttatgtaaataatatcaagctgtatatttttcaaaggttttttaaactttggagactctttcttttgttaagcagttaaaggaataaaagagctggaaaaaaaattgtaccttcaactcaggttattccatataacatacgtattctctgctgttacgtaagttttccgattcacagagtccattcatgtacatcacttacacttaaattgtaaaaataattagtctgaccatctgactttaaaagactgttgctacacgtacatcatgtttaggagaatgtgggatatggggaaggggagaagaagacagtccagtggtgactagttgctgctgcttaacctatggcctattgctgcccattgtccctggttttaatccaagcctattatggaatactgcagtgagattatccattctcagcctgttgagctgcattaaattagaatgggaggctgtaagtaaaactcatgcctcttggccaggcattctgcaccagcgtgtccctctgtggcttgctggtcctggttgttctcagactggcagctgagctgcgcttggcttgaagcatactgaagcctgcagccagggacaccgccattgaatcagatggagggggatgaaaaagcagagaagggggcatgtggctggctattcttgctctctggagaacagcttcattgttaggagtagttaggctgaaagtggacttcccactgctgagccacccaagaggcacactgagcattagtgacgggtgagccacataagaataatgtttaaaaaagagaggacttgaagtagctatgcgaaaatttagaactttgcactttgttaacgcttatttatggtttagtgttgatgccatttggagtgacctatgggttggacccatatctttttattattaaggtctcaatctggctctggttaataaacgtttcccgcttcatcccttaggaaaatggtccaagtctcctcaggcttttggatactgaattgttataaaacacatcaattctgccagtttataaaacactggaattgtattagacatgtctgagtatgtacttgtttatagactcaaaacatgatgaaaattca

SEQ ID NO: 323202 - DNA, 2884 bp, Homo sapiens
cgcctcccccccccccccaggagcgggggggaaggactaacaagacgagcgctctggatcttactaaaggaataagcgtgcggccgcagggccatgctagccttgcgcgtggcgcgcggctcgtggggggccctgcgcggcgccgcttgggctccgggaacgcggccgagtaagcgacgcgcctgctgggccctgctgccgcccgtgccctgctgcttgggctgcctggccgaacgctggaggctgcgtccggccgctcttggcttgcggctgcccgggatcggccagcggaaccactgttcgggcgcggggaaggcggctcccaggccagcggccggagcgggcgccgctgccgaagccccgggcggccagtggggcccggcgagcacccccagcctgtatgaaaacccatggacaatcccgaatatgttgtcaatgacgagaattggcttggccccagttctgggctatttgattattgaagaagattttaatattgcactaggagtttttgctttagctggactaacagatttgttggatggatttattgctcgaaactgggccaatcaaagatcagctttgggaagtgctcttgatccacttgctgataaaatacttatcagtatcttatatgttagcttgacctatgcagatcttattccagttccacttacttacatgatcatttcgagagatgtaatgttgattgctgctgttttttatgtcagataccgaactcttccaacaccacgaacacttgccaagtatttcaatccttgctatgccactgctaggttaaaaccaacattcatcagcaaggtgaatacagcagtccagttaatcttggtggcagcttctttggcagctccagttttcaactatgctgacagcatttatcttcagatactatggtgttttacagctttcaccacagctgcatcagcttatagttactatcattatggccggaagactgttcaggtgataaaagactgatgaaagtcatccctcactgttagtaaggaagcagtatacatcaatgggaacagggcccatggaaatgtacaggagtttccctattttggtgttcagcttgaaaaaggacttgtcagaatcaactgtgtcatcaaaatttaagtaatgtgcattgaaaataaggttgatcatgggaatatgcagaatttccaatgtatttttaaatacaaataaaattgtaatttagaatttttaatcttaggtttcttgattaatttataagagatcaattattgtcagtcttttttgtatgttttttaaaaacatagtccagagcatgggcagaattgacacctctcttttaagtgaaatttggattgctcacaaagcactaggaaatgtcatggggttcaaatatatatcctacacaactgggcaatacatttttgtttgatttttaggtctgtgtatacattaacagttcatgtaattaatacctgatcatttgggataatgaaagtgaagttagttgtagatgaagtaaagttataaaagagattaaaaatgcggtaactttttaagataataatcatacagaaggtatgaagttcattttcggtagtcttccaacctctcaggtgcctaataatttatgtttgaggataacaggtaacaaagatagtcgagataggagaacgtgtctattagtctttgcatctaaaaggcagtgagttacgttcctgccttccactgtgtttctgacatagcaatgtttgtttgatattggaacctggattcatattttatgtaaataatatcaagctgtatatttttcaaaggttttttaaactttggagactctttcttttgttaagcagttaaaggaataaaagagctggaaaaaaaattgtaccttcaactcaggttattccatataacatacgtattctctgctgttacgtaagttttccgattcacagagtccattcatgtacatcacttacacttaaattgtaaaaataattagtctgaccatctgactttaaaagactgttgctacacgtacatcatgtttaggagaatgtgggatatggggaaggggagaagaagacagtccagtggtgactagttgctgctgcttaacctatggcctattgctgcccattgtccctggttttaatccaagcctattatggaatactgcagtgagattatccattctcagcctgttgagctgcattaaattagaatgggaggctgtaagtaaaactcatgcctcttggccaggcattctgcaccagcgtgtccctctgtggcttgctggtcctggttgttctcagactggcagctgagctgcgcttggcttgaagcatactgaagcctgcagccagggacaccgccattgaatcagatggagggggatgaaaaagcagagaagggggcatgtggctggctattcttgctctctggagaacagcttcattgttaggagtagttaggctgaaagtggacttcccactgctgagccacccaagaggcacactgagcattagtgacgggtgagccacataagaataatgtttaaaaaagagaggacttgaagtagctatgcgaaaatttagaactttgcactttgttaacgcttatttatggtttagtgttgatgccatttggagtgacctatgggttggacccatatctttttattattaaggtctcaatctggctctggttaataaacgtttcccgcttcatcccttaggaaaatggtccaagtctcctcaggcttttggatactgaattgttataaaacacatcaattctgccagtttataaaacactggaattgtattagacatgtctgagtatgtacttgtttatagactcaaaacatgatgaaaattca

SEQ ID NO: 323203 - DNA, 2889 bp, Homo sapiens
aaaaagacaagagggaaagtatttctcttgattcttggttaaatttgtttaataataataatatcctaaaaaaaaaaaaaaagggcggccgcagggccatgctagccttgcgcgtggcgcgcggctcgtggggggccctgcgcggcgccgcttgggctccgggaacgcggccgagtaagcgacgcgcctgctgggccctgctgccgcccgtgccctgctgcttgggctgcctggccgaacgctggaggctgcgtccggccgctcttggcttgcggctgcccgggatcggccagcggaaccactgttcgggcgcggggaaggcggctcccaggccagcggccggagcgggcgccgctgccgaagccccgggcggccagtggggcccggcgagcacccccagcctgtatgaaaacccatggacaatcccgaatatgttgtcaatgacgagaattggcttggccccagttctgggctatttgattattgaagaagattttaatattgcactaggagtttttgctttagctggactaacagatttgttggatggatttattgctcgaaactgggccaatcaaagatcagctttgggaagtgctcttgatccacttgctgataaaatacttatcagtatcttatatgttagcttgacctatgcagatcttattccagttccacttacttacatgatcatttcgagagatgtaatgttgattgctgctgttttttatgtcagataccgaactcttccaacaccacgaacacttgccaagtatttcaatccttgctatgccactgctaggttaaaaccaacattcatcagcaaggtgaatacagcagtccagttaatcttggtggcagcttctttggcagctccagttttcaactatgctgacagcatttatcttcagatactatggtgttttacagctttcaccacagctgcatcagcttatagttactatcattatggccggaagactgttcaggtgataaaagactgatgaaagtcatccctcactgttagtaaggaagcagtatacatcaatgggaacagggcccatggaaatgtacaggagtttccctattttggtgttcagcttgaaaaaggacttgtcagaatcaactgtgtcatcaaaatttaagtaatgtgcattgaaaataaggttgatcatgggaatatgcagaatttccaatgtatttttaaatacaaataaaattgtaatttagaatttttaatcttaggtttcttgattaatttataagagatcaattattgtcagtcttttttgtatgttttttaaaaacatagtccagagcatgggcagaattgacacctctcttttaagtgaaatttggattgctcacaaagcactaggaaatgtcatggggttcaaatatatatcctacacaactgggcaatacatttttgtttgatttttaggtctgtgtatacattaacagttcatgtaattaatacctgatcatttgggataatgaaagtgaagttagttgtagatgaagtaaagttataaaagagattaaaaatgcggtaactttttaagataataatcatacagaaggtatgaagttcattttcggtagtcttccaacctctcaggtgcctaataatttatgtttgaggataacaggtaacaaagatagtcgagataggagaacgtgtctattagtctttgcatctaaaaggcagtgagttacgttcctgccttccactgtgtttctgacatagcaatgtttgtttgatattggaacctggattcatattttatgtaaataatatcaagctgtatatttttcaaaggttttttaaactttggagactctttcttttgttaagcagttaaaggaataaaagagctggaaaaaaaattgtaccttcaactcaggttattccatataacatacgtattctctgctgttacgtaagttttccgattcacagagtccattcatgtacatcacttacacttaaattgtaaaaataattagtctgaccatctgactttaaaagactgttgctacacgtacatcatgtttaggagaatgtgggatatggggaaggggagaagaagacagtccagtggtgactagttgctgctgcttaacctatggcctattgctgcccattgtccctggttttaatccaagcctattatggaatactgcagtgagattatccattctcagcctgttgagctgcattaaattagaatgggaggctgtaagtaaaactcatgcctcttggccaggcattctgcaccagcgtgtccctctgtggcttgctggtcctggttgttctcagactggcagctgagctgcgcttggcttgaagcatactgaagcctgcagccagggacaccgccattgaatcagatggagggggatgaaaaagcagagaagggggcatgtggctggctattcttgctctctggagaacagcttcattgttaggagtagttaggctgaaagtggacttcccactgctgagccacccaagaggcacactgagcattagtgacgggtgagccacataagaataatgtttaaaaaagagaggacttgaagtagctatgcgaaaatttagaactttgcactttgttaacgcttatttatggtttagtgttgatgccatttggagtgacctatgggttggacccatatctttttattattaaggtctcaatctggctctggttaataaacgtttcccgcttcatcccttaggaaaatggtccaagtctcctcaggcttttggatactgaattgttataaaacacatcaattctgccagtttataaaacactggaattgtattagacatgtctgagtatgtacttgtttatagactcaaaacatgatgaaaattca

SEQ ID NO: 323204 - DNA, 2123 bp, Homo sapiens
cgtacccgctgcttcccaaaacccactgagcctgatgcgcgcgcctccgctgtgccaggggcgccgggaagcccgacgacgacggtgtcgtaaaagcgtcgcgaaggcgtccgcccttggcggcttcctgccacctgtataagtggagcgtgctggggtgtgtaaagtagtatggaggcagcggtagcccagtgtctgagtggttgccgggtctccatggagaagcggctcgccagtgtcccaggctgctgagctctcgccgcccgagaccccgcggcgcggccgcagggccatgctagccttgcgcgtggcgcgcggctcgtggggggccctgcgcggcgccgcttgggctccgggaacgcggccgagtaagcgacgcgcctgctgggccctgctgccgcccgtgccctgctgcttgggctgcctggccgaacgctggaggctgcgtccggccgctcttggcttgcggctgcccgggatcggccagcggaaccactgttcgggcgcggggaaggcggctcccaggccagcggccggagcgggcgccgctgccgaagccccgggcggccagtggggcccggcgagcacccccagcctgtatgaaaacccatggacaatcccgaatatgttgtcaatgacgagaattggcttggccccagttctgggctatttgattattgaagaagattttaatattgcactaggagtttttgctttagctggactaacagatttgttggatggatttattgctcgaaactgggccaatcaaagatcagctttgggaagtgctcttgatccacttgctgataaaatacttatcagtatcttatatgttagcttgacctatgcagatcttattccagttccacttacttacatgatcatttcgagagatgtaatgttgattgctgctgttttttatgtcagataccgaactcttccaacaccacgaacacttgccaagtatttcaatccttgctatgccactgctaggttaaaaccaacattcatcagcaaggtgaatacagcagtccagttaatcttggtggcagcttctttggcagctccagttttcaactatgctgacagcatttatcttcagatactatggtgttttacagctttcaccacagctgcatcagcttatagttactatcattatggccggaagactgttcaggtgataaaagactgatgaaagtcatccctcactgttagtaaggaagcagtatacatcaatgggaacagggcccatggaaatgtacaggagtttccctattttggtgttcagcttgaaaaaggacttgtcagaatcaactgtgtcatcaaaatttaagtaatgtgcattgaaaataaggttgatcatgggaatatgcagaatttccaatgtatttttaaatacaaataaaattgtaatttagaatttttaatcttaggtttcttgattaatttataagagatcaattattgtcagtcttttttgtatgttttttaaaaacatagtccagagcatgggcagaattgacacctctcttttaagtgaaatttggattgctcacaaagcactaggaaatgtcatggggttcaaatatatatcctacacaactgggcaatacatttttgtttgatttttaggtctgtgtatacattaacagttcatgtaattaatacctgatcatttgggataatgaaagtgaagttagttgtagatgaagtaaagttataaaagagattaaaaatgcggtaactttttaagataataatcatacagaaggtatgaagttcattttcggtagtcttccaacctctcaggtgcctaataatttatgtttgaggataacaggtaacaaagatagtcgagataggagaacgtgtctattagtctttgcatctaaaaggcagtgagttacgttcctgccttccactgtgtttctgacatagcaatgtttgtttgatattggaacctggattcatattttatgtaaataatatcaagctgtatatttttcaaaggttttttaaactttggagactctttcttttgttaagcagttaaaggaataaaacccgatgcgtccaacggtctttcttctgtagggtgttagtttgctactacgtgc

SEQ ID NO: 323205 - DNA, 2130 bp, Homo sapiens
cgtacccgctgcttcccaaaacccactgagcctgatgcgcgcgcctccgctgtgccaggggcgccgggaagcccgacgacgacggtgtcgtaaaagcgtcgcgaaggcgtccgcccttggcggcttcctgccacctgtataagtggagcgtgctggggtgtgtaaagtagtatggaggcagcggtagcccagtgtctgagtggttgccgggtctccatggagaagcggctcgccagtgtcccaggctgctgagctctcgccgcccgagaccccgcggcgcggccgcagggccatgctagccttgcgcgtggcgcgcggctcgtggggggccctgcgcggcgccgcttgggctccgggaacgcggccgagtaagcgacgcgcctgctgggccctgctgccgcccgtgccctgctgcttgggctgcctggccgaacgctggaggctgcgtccggccgctcttggcttgcggctgcccgggatcggccagcggaaccactgttcgggcgcggggaaggcggctcccaggccagcggccggagcgggcgccgctgccgaagccccgggcggccagtggggcccggcgagcacccccagcctgtatgaaaacccatggacaatcccgaatatgttgtcaatgacgagaattggcttggccccagttctgggctatttgattattgaagaagattttaatattgcactaggagtttttgctttagctggactaacagatttgttggatggatttattgctcgaaactgggccaatcaaagatcagctttgggaagtgctcttgatccacttgctgataaaatacttatcagtatcttatatgttagcttgacctatgcagatcttattccagttccacttacttacatgatcatttcgagagatgtaatgttgattgctgctgttttttatgtcagataccgaactcttccaacaccacgaacacttgccaagtatttcaatccttgctatgccactgctaggttaaaaccaacattcatcagcaaggtgaatacagcagtccagttaatcttggtggcagcttctttggcagctccagttttcaactatgctgacagcatttatcttcagatactatggtgttttacagctttcaccacagctgcatcagcttatagttactatcattatggccggaagactgttcaggtgataaaagactgatgaaagtcatccctcactgttagtaaggaagcagtatacatcaatgggaacagggcccatggaaatgtacaggagtttccctattttggtgttcagcttgaaaaaggacttgtcagaatcaactgtgtcatcaaaatttaagtaatgtgcattgaaaataaggttgatcatgggaatatgcagaatttccaatgtatttttaaatacaaataaaattgtaatttagaatttttaatcttaggtttcttgattaatttataagagatcaattattgtcagtcttttttgtatgttttttaaaaacatagtccagagcatgggcagaattgacacctctcttttaagtgaaatttggattgctcacaaagcactaggaaatgtcatggggttcaaatatatatcctacacaactgggcaatacatttttgtttgatttttaggtctgtgtatacattaacagttcatgtaattaatacctgatcatttgggataatgaaagtgaagttagttgtagatgaagtaaagttataaaagagattaaaaatgcggtaactttttaagataataatcatacagaaggtatgaagttcattttcggtagtcttccaacctctcaggtgcctaataatttatgtttgaggataacaggtaacaaagatagtcgagataggagaacgtgtctattagtctttgcatctaaaaggcagtgagttacgttcctgccttccactgtgtttctgacatagcaatgtttgtttgatattggaacctggattcatattttatgtaaataatatcaagctgtatatttttcaaaggttttttaaactttggagactctttcttttgttaagcagttaaaggaataaaagcccgatgcggcacagctcttttgtgttacttcctctattaaactatatctattataagct

SEQ ID NO: 323206 - DNA, 3029 bp, Homo sapiens
cgtacccgctgcttcccaaaacccactgagcctgatgcgcgcgcctccgctgtgccaggggcgccgggaagcccgacgacgacggtgtcgtaaaagcgtcgcgaaggcgtccgcccttggcggcttcctgccacctgtataagtggagcgtgctggggtgtgtaaagtagtatggaggcagcggtagcccagtgtctgagtggttgccgggtctccatggagaagcggctcgccagtgtcccaggctgctgagctctcgccgcccgagaccccgcggcgcggccgcagggccatgctagccttgcgcgtggcgcgcggctcgtggggggccctgcgcggcgccgcttgggctccgggaacgcggccgagtaagcgacgcgcctgctgggccctgctgccgcccgtgccctgctgcttgggctgcctggccgaacgctggaggctgcgtccggccgctcttggcttgcggctgcccgggatcggccagcggaaccactgttcgggcgcggggaaggcggctcccaggccagcggccggagcgggcgccgctgccgaagccccgggcggccagtggggcccggcgagcacccccagcctgtatgaaaacccatggacaatcccgaatatgttgtcaatgacgagaattggcttggccccagttctgggctatttgattattgaagaagattttaatattgcactaggagtttttgctttagctggactaacagatttgttggatggatttattgctcgaaactgggccaatcaaagatcagctttgggaagtgctcttgatccacttgctgataaaatacttatcagtatcttatatgttagcttgacctatgcagatcttattccagttccacttacttacatgatcatttcgagagatgtaatgttgattgctgctgttttttatgtcagataccgaactcttccaacaccacgaacacttgccaagtatttcaatccttgctatgccactgctaggttaaaaccaacattcatcagcaaggtgaatacagcagtccagttaatcttggtggcagcttctttggcagctccagttttcaactatgctgacagcatttatcttcagatactatggtgttttacagctttcaccacagctgcatcagcttatagttactatcattatggccggaagactgttcaggtgataaaagactgatgaaagtcatccctcactgttagtaaggaagcagtatacatcaatgggaacagggcccatggaaatgtacaggagtttccctattttggtgttcagcttgaaaaaggacttgtcagaatcaactgtgtcatcttccaatgtatttttaaatacaaataaaattgtaatttagaatttttaatcttaggtttcttgattaatttataagagatcaattattgtcagtcttttttgtatgttttttaaaaacatagtccagagcatgggcagaattgacacctctcttttaagtgaaatttggattgctcacaaagcactaggaaatgtcatggggttcaaatatatatcctacacaactgggcaatacatttttgtttgatttttaggtctgtgtatacattaacagttcatgtaattaatacctgatcatttgggataatgaaagtgaagttagttgtagatgaagtaaagttataaaagagattaaaaatgcggtaactttttaagataataatcatacagaaggtatgaagttcattttcggtagtcttccaacctctcaggtgcctaataatttatgtttgaggataacaggtaacaaagatagtcgagataggagaacgtgtctattagtctttgcatctaaaaggcagtgagttacgttcctgccttccactgtgtttctgacatagcaatgtttgtttgatattggaacctggattcatattttatgtaaataatatcaagctgtatatttttcaaaggttttttaaactttggagactctttcttttgttaagcagttaaaggaataaaagagctggaaaaaaaattgtaccttcaactcaggttattccatataacatacgtattctctgctgttacgtaagttttccgattcacagagtccattcatgtacatcacttacacttaaattgtaaaaataattagtctgaccatctgactttaaaagactgttgctacacgtacatcatgtttaggagaatgtgggatatggggaaggggagaagaagacagtccagtggtgactagttgctgctgcttaacctatggcctattgctgcccattgtccctggttttaatccaagcctattatggaatactgcagtgagattatccattctcagcctgttgagctgcattaaattagaatgggaggctgtaagtaaaactcatgcctcttggccaggcattctgcaccagcgtgtccctctgtggcttgctggtcctggttgttctcagactggcagctgagctgcgcttggcttgaagcatactgaagcctgcagccagggacaccgccattgaatcagatggagggggatgaaaaagcagagaagggggcatgtggctggctattcttgctctctggagaacagcttcattgttaggagtagttaggctgaaagtggacttcccactgctgagccacccaagaggcacactgagcattagtgacgggtgagccacataagaataatgtttaaaaaagagaggacttgaagtagctatgcgaaaatttagaactttgcactttgttaacgcttatttatggtttagtgttgatgccatttggagtgacctatgggttggacccatatctttttattattaaggtctcaatctggctctggttaataaacgtttcccgcttcatcccttaggaaaatggtccaagtctcctcaggcttttggatactgaattgttataaaacacatcaattctgccagtttataaaacactggaattgtattagacatgtctgagtatgtacttgtttatagactcaaaacatgatgaaaattca

SEQ ID NO: 323207 - DNA, 3083 bp, Homo sapiens
  misc_feature (1416)..(1416): n is a, c, g, or t
  misc_feature (1447)..(1447): n is a, c, g, or t
  misc_feature (1460)..(1460): n is a, c, g, or t
  misc_feature (1492)..(1494): n is a, c, g, or t
  misc_feature (1527)..(1527): n is a, c, g, or t
  misc_feature (1537)..(1537): n is a, c, g, or t
  misc_feature (1540)..(1540): n is a, c, g, or t
  misc_feature (1549)..(1551): n is a, c, g, or t
  misc_feature (1570)..(1570): n is a, c, g, or t
  misc_feature (1577)..(1577): n is a, c, g, or t
  misc_feature (1595)..(1595): n is a, c, g, or t
  misc_feature (1597)..(1597): n is a, c, g, or t
  misc_feature (1610)..(1610): n is a, c, g, or t
  misc_feature (1622)..(1625): n is a, c, g, or t
  misc_feature (1636)..(1636): n is a, c, g, or t
  misc_feature (1639)..(1639): n is a, c, g, or t
  misc_feature (1642)..(1642): n is a, c, g, or t
cgtacccgctgcttcccaaaacccactgagcctgatgcgcgcgcctccgctgtgccaggggcgccgggaagcccgacgacgacggtgtcgtaaaagcgtcgcgaaggcgtccgcccttggcggcttcctgccacctgtataagtggagcgtgctggggtgtgtaaagtagtatggaggcagcggtagcccagtgtctgagtggttgccgggtctccatggagaagcggctcgccagtgtcccaggctgctgagctctcgccgcccgagaccccgcggcgcggccgcagggccatgctagccttgcgcgtggcgcgcggctcgtggggggccctgcgcggcgccgcttgggctccgggaacgcggccgagtaagcgacgcgcctgctgggccctgctgccgcccgtgccctgctgcttgggctgcctggccgaacgctggaggctgcgtccggccgctcttggcttgcggctgcccgggatcggccagcggaaccactgttcgggcgcggggaaggcggctcccaggccagcggccggagcgggcgccgctgccgaagccccgggcggccagtggggcccggcgagcacccccagcctgtatgaaaacccatggacaatcccgaatatgttgtcaatgacgagaattggcttggccccagttctgggctatttgattattgaagaagattttaatattgcactaggagtttttgctttagctggactaacagatttgttggatggatttattgctcgaaactgggccaatcaaagatcagctttgggaagtgctcttgatccacttgctgataaaatacttatcagtatcttatatgttagcttgacctatgcagatcttattccagttccacttacttacatgatcatttcgagagatgtaatgttgattgctgctgttttttatgtcagataccgaactcttccaacaccacgaacacttgccaagtatttcaatccttgctatgccactgctaggttaaaaccaacattcatcagcaaggtgaatacagcagtccagttaatcttggtggcagcttctttggcagctccagttttcaactatgctgacagcatttatcttcagatactatggtgttttacagctttcaccacagctgcatcagcttatagttactatcattatggccggaagactgttcaggtgataaaagactgatgaaagtcatccctcactgttagtaaggaagcagtatacatcaatgggaacagggcccatggaaatgtacaggagtttccctattttggtgttcagcttgaaaaaggacttgtcagaatcaactgtgtcatcaaaatttaagtaatgtgcattgaaaataaggttgatcatgggaatatgcagaatttccaatgtatttttaaacccccccccccttntcctcccccccccccccccctcggtcccccnccccccccctccncgcccccctcttcccccccccctttgtctccnnnccccccccccccccccgcgcctgggccgcattncccccccccnccnccccccccnnnggatcgccccccccgcccncggcccncccctggggcccccctcncnccccccccccccngggccccccccnnnngcccccccccncgnccngtgtcccccttccccgttcatgtaattaatacctgatcatttgggataatgaaagtgaagttagttgtagatgaagtaaagttataaaagagattaaaaatgcggtaactttttaagataataatcatacagaaggtatgaagttcattttcggtagtcttccaacctctcaggtgcctaataatttatgtttgaggataacaggtaacaaagatagtcgagataggagaacgtgtctattagtctttgcatctaaaaggcagtgagttacgttcctgccttccactgtgtttctgacatagcaatgtttgtttgatattggaacctggattcatattttatgtaaataatatcaagctgtatatttttcaaaggttttttaaactttggagactctttcttttgttaagcagttaaaggaataaaagagctggaaaaaaaattgtaccttcaactcaggttattccatataacatacgtattctctgctgttacgtaagttttccgattcacagagtccattcatgtacatcacttacacttaaattgtaaaaataattagtctgaccatctgactttaaaagactgttgctacacgtacatcatgtttaggagaatgtgggatatggggaaggggagaagaagacagtccagtggtgactagttgctgctgcttaacctatggcctattgctgcccattgtccctggttttaatccaagcctattatggaatactgcagtgagattatccattctcagcctgttgagctgcattaaattagaatgggaggctgtaagtaaaactcatgcctcttggccaggcattctgcaccagcgtgtccctctgtggcttgctggtcctggttgttctcagactggcagctgagctgcgcttggcttgaagcatactgaagcctgcagccagggacaccgccattgaatcagatggagggggatgaaaaagcagagaagggggcatgtggctggctattcttgctctctggagaacagcttcattgttaggagtagttaggctgaaagtggacttcccactgctgagccacccaagaggcacactgagcattagtgacgggtgagccacataagaataatgtttaaaaaagagaggacttgaagtagctatgcgaaaatttagaactttgcactttgttaacgcttatttatggtttagtgttgatgccatttggagtgacctatgggttggacccatatctttttattattaaggtctcaatctggctctggttaataaacgtttcccgcttcatcccttaggaaaatggtccaagtctcctcaggcttttggatactgaattgttataaaacacatcaattctgccagtttataaaacactggaattgtattagacatgtctgagtatgtacttgtttatagactcaaaacatgatgaaaattca

SEQ ID NO: 323208 - DNA, 1709 bp, Homo sapiens
cgtacccgctgcttcccaaaacccactgagcctgatgcgcgcgcctccgctgtgccaggggcgccgggaagcccgacgacgacggtgtcgtaaaagcgtcgcgaaggcgtccgcccttggcggcttcctgccacctgtataagtggagcgtgctggggtgtgtaaagtagtatggaggcagcggtagcccagtgtctgagtggttgccgggtctccatggagaagcggctcgccagtgtcccaggctgctgagctctcgccgcccgagaccccgcggcgcggccgcagggccatgctagccttgcgcgtggcgcgcggctcgtggggggccctgcgcggcgccgcttgggctccgggaacgcggccgagtaagcgacgcgcctgctgggccctgctgccgcccgtgccctgctgcttgggctgcctggccgaacgctggaggctgcgtccggccgctcttggcttgcggctgcccgggatcggccagcggaaccactgttcgggcgcggggaaggcggctcccaggccagcggccggagcgggcgccgctgccgaagccccgggcggccagtggggcccggcgagcacccccagcctgtatgaaaacccatggacaatcccgaatatgttgtcaatgacgagaattggcttggccccagttctgggctatttgattattgaagaagattttaatattgcactaggagtttttgctttagctggactaacagatttgttggatggatttattgctcgaaactgggccaatcaaagatcagctttgggaagtgctcttgatccacttgctgataaaatacttatcagtatcttatatgttagcttgacctatgcagatcttattccagttccacttacttacatgatcatttcgagagatgtaatgttgattgctgctgttttttatgtcagataccgaactcttccaacaccacgaacacttgccaagtatttcaatccttgctatgccactgctaggttaaaaccaacattcatcagcaaggtgaatacagcagtccagttaatcttggtggcagcttctttggcagctccagttttcaactatgctgacagcatttatcttcagatactatggtgttttacagctttcaccacagctgcatcagcttatagttactatcattatggccggaagactgttcaggtgataaaagactgatgaaagtcatccctcactgttagtaaggaagcagtatacatcaatgggaacagggcccatggaaatgtacaggagtttccctattttggtgttcagcttgaaaaaggacttgtcagaatcaactgtgtcatcaaaatttaagtaatgtgcattgaaaataaggttgatcatgggaatatgcagaatttccaatgtatttttaaatacaaataaaattgtaatttagaatttttaatcttaggtttcttgattaatttataagagatcaattattgtcagtcttttttgtatgttttttaaaaacatagtccagagcatgggcagaattgacacctctctttagtgaattggtgttcccagcctagaagtctgggtcctttttctccccactggcatacttgttgattagcggtactacagcggtttaccgtctggcgacgagggcgtgacgtaaaaggcgtaaacagggtgggccccgccttgtcgccaccgcttcctccttttttctttt

SEQ ID NO: 323209 - DNA, 3145 bp, Homo sapiens
cgtacccgctgcttcccaaaacccactgagcctgatgcgcgcgcctccgctgtgccaggggcgccgggaagcccgacgacgacggtgtcgtaaaagcgtcgcgaaggcgtccgcccttggcggcttcctgccacctgtataagtggagcgtgctggggtgtgtaaagtagtatggaggcagcggtagcccagtgtctgagtggttgccgggtctccatggagaagcggctcgccagtgtcccaggctgctgagctctcgccgcccgagaccccgcggcgcggccgcagggccatgctagccttgcgcgtggcgcgcggctcgtggggggccctgcgcggcgccgcttgggctccgggaacgcggccgagtaagcgacgcgcctgctgggccctgctgccgcccgtgccctgctgcttgggctgcctggccgaacgctggaggctgcgtccggccgctcttggcttgcggctgcccgggatcggccagcggaaccactgttcgggcgcggggaaggcggctcccaggccagcggccggagcgggcgccgctgccgaagccccgggcggccagtggggcccggcgagcacccccagcctggtacgtaccgatgaggcggcggcgggccggccctgggctggggtcgccgcccctgcactcagtatgaaaacccatggacaatcccgaatatgttgtcaatgacgagaattggcttggccccagttctgggctatttgattattgaagaagattttaatattgcactaggagtttttgctttagctggactaacagatttgttggatggatttattgctcgaaactgggccaatcaaagatcagctttgggaagtgctcttgatccacttgctgataaaatacttatcagtatcttatatgttagcttgacctatgcagatcttattccagttccacttacttacatgatcatttcgagagatgtaatgttgattgctgctgttttttatgtcagataccgaactcttccaacaccacgaacacttgccaagtatttcaatccttgctatgccactgctaggttaaaaccaacattcatcagcaaggtgaatacagcagtccagttaatcttggtggcagcttctttggcagctccagttttcaactatgctgacagcatttatcttcagatactatggtgttttacagctttcaccacagctgcatcagcttatagttactatcattatggccggaagactgttcaggtgataaaagactgatgaaagtcatccctcactgttagtaaggaagcagtatacatcaatgggaacagggcccatggaaatgtacaggagtttccctattttggtgttcagcttgaaaaaggacttgtcagaatcaactgtgtcatcaaaatttaagtaatgtgcattgaaaataaggttgatcatgggaatatgcagaatttccaatgtatttttaaatacaaataaaattgtaatttagaatttttaatcttaggtttcttgattaatttataagagatcaattattgtcagtcttttttgtatgttttttaaaaacatagtccagagcatgggcagaattgacacctctcttttaagtgaaatttggattgctcacaaagcactaggaaatgtcatggggttcaaatatatatcctacacaactgggcaatacatttttgtttgatttttaggtctgtgtatacattaacagttcatgtaattaatacctgatcatttgggataatgaaagtgaagttagttgtagatgaagtaaagttataaaagagattaaaaatgcggtaactttttaagataataatcatacagaaggtatgaagttcattttcggtagtcttccaacctctcaggtgcctaataatttatgtttgaggataacaggtaacaaagatagtcgagataggagaacgtgtctattagtctttgcatctaaaaggcagtgagttacgttcctgccttccactgtgtttctgacatagcaatgtttgtttgatattggaacctggattcatattttatgtaaataatatcaagctgtatatttttcaaaggttttttaaactttggagactctttcttttgttaagcagttaaaggaataaaagagctggaaaaaaaattgtaccttcaactcaggttattccatataacatacgtattctctgctgttacgtaagttttccgattcacagagtccattcatgtacatcacttacacttaaattgtaaaaataattagtctgaccatctgactttaaaagactgttgctacacgtacatcatgtttaggagaatgtgggatatggggaaggggagaagaagacagtccagtggtgactagttgctgctgcttaacctatggcctattgctgcccattgtccctggttttaatccaagcctattatggaatactgcagtgagattatccattctcagcctgttgagctgcattaaattagaatgggaggctgtaagtaaaactcatgcctcttggccaggcattctgcaccagcgtgtccctctgtggcttgctggtcctggttgttctcagactggcagctgagctgcgcttggcttgaagcatactgaagcctgcagccagggacaccgccattgaatcagatggagggggatgaaaaagcagagaagggggcatgtggctggctattcttgctctctggagaacagcttcattgttaggagtagttaggctgaaagtggacttcccactgctgagccacccaagaggcacactgagcattagtgacgggtgagccacataagaataatgtttaaaaaagagaggacttgaagtagctatgcgaaaatttagaactttgcactttgttaacgcttatttatggtttagtgttgatgccatttggagtgacctatgggttggacccatatctttttattattaaggtctcaatctggctctggttaataaacgtttcccgcttcatcccttaggaaaatggtccaagtctcctcaggcttttggatactgaattgttataaaacacatcaattctgccagtttataaaacactggaattgtattagacatgtctgagtatgtacttgtttatagactcaaaacatgatgaaaattca

SEQ ID NO: 323210 - DNA, 3026 bp, Homo sapiens
cgtacccgctgcttcccaaaacccactgagcctgatgcgcgcgcctccgctgtgccaggggcgccgggaagcccgacgacgacggtgtcgtaaaagcgtcgcgaaggcgtccgcccttggcggcttcctgccacctgtataagtggagcgtgctggggtgtgtaaagtagtatggaggcagcggtagcccagtgtctgagtggttgccgggtctccatggagaagcggctcgccagtgtcccaggctgctgagctctcgccgcccgagaccccgcggcgcggccgcagggccatgctagccttgcgcgtggcgcgcggctcgtggggggccctgcgcggcgccgcttgggctccgggaacgcggccgagtaagcgacgcgcctgctgggccctgctgccgcccgtgccctgctgcttgggctgcctggccgaacgctggaggctgcgtccggccgctcttggcttgcggctgcccgggatcggccagcggaaccactgttcgggcgcggggaaggcggctcccaggccagcggccggagcgggcgccgctgccgaagccccgggcggccagtggggcccggcgagcacccccagcctgccagttctgggctatttgattattgaagaagattttaatattgcactaggagtttttgctttagctggactaacagatttgttggatggatttattgctcgaaactgggccaatcaaagatcagctttgggaagtgctcttgatccacttgctgataaaatacttatcagtatcttatatgttagcttgacctatgcagatcttattccagttccacttacttacatgatcatttcgagagatgtaatgttgattgctgctgttttttatgtcagataccgaactcttccaacaccacgaacacttgccaagtatttcaatccttgctatgccactgctaggttaaaaccaacattcatcagcaaggtgaatacagcagtccagttaatcttggtggcagcttctttggcagctccagttttcaactatgctgacagcatttatcttcagatactatggtgttttacagctttcaccacagctgcatcagcttatagttactatcattatggccggaagactgttcaggtgataaaagactgatgaaagtcatccctcactgttagtaaggaagcagtatacatcaatgggaacagggcccatggaaatgtacaggagtttccctattttggtgttcagcttgaaaaaggacttgtcagaatcaactgtgtcatcaaaatttaagtaatgtgcattgaaaataaggttgatcatgggaatatgcagaatttccaatgtatttttaaatacaaataaaattgtaatttagaatttttaatcttaggtttcttgattaatttataagagatcaattattgtcagtcttttttgtatgttttttaaaaacatagtccagagcatgggcagaattgacacctctcttttaagtgaaatttggattgctcacaaagcactaggaaatgtcatggggttcaaatatatatcctacacaactgggcaatacatttttgtttgatttttaggtctgtgtatacattaacagttcatgtaattaatacctgatcatttgggataatgaaagtgaagttagttgtagatgaagtaaagttataaaagagattaaaaatgcggtaactttttaagataataatcatacagaaggtatgaagttcattttcggtagtcttccaacctctcaggtgcctaataatttatgtttgaggataacaggtaacaaagatagtcgagataggagaacgtgtctattagtctttgcatctaaaaggcagtgagttacgttcctgccttccactgtgtttctgacatagcaatgtttgtttgatattggaacctggattcatattttatgtaaataatatcaagctgtatatttttcaaaggttttttaaactttggagactctttcttttgttaagcagttaaaggaataaaagagctggaaaaaaaattgtaccttcaactcaggttattccatataacatacgtattctctgctgttacgtaagttttccgattcacagagtccattcatgtacatcacttacacttaaattgtaaaaataattagtctgaccatctgactttaaaagactgttgctacacgtacatcatgtttaggagaatgtgggatatggggaaggggagaagaagacagtccagtggtgactagttgctgctgcttaacctatggcctattgctgcccattgtccctggttttaatccaagcctattatggaatactgcagtgagattatccattctcagcctgttgagctgcattaaattagaatgggaggctgtaagtaaaactcatgcctcttggccaggcattctgcaccagcgtgtccctctgtggcttgctggtcctggttgttctcagactggcagctgagctgcgcttggcttgaagcatactgaagcctgcagccagggacaccgccattgaatcagatggagggggatgaaaaagcagagaagggggcatgtggctggctattcttgctctctggagaacagcttcattgttaggagtagttaggctgaaagtggacttcccactgctgagccacccaagaggcacactgagcattagtgacgggtgagccacataagaataatgtttaaaaaagagaggacttgaagtagctatgcgaaaatttagaactttgcactttgttaacgcttatttatggtttagtgttgatgccatttggagtgacctatgggttggacccatatctttttattattaaggtctcaatctggctctggttaataaacgtttcccgcttcatcccttaggaaaatggtccaagtctcctcaggcttttggatactgaattgttataaaacacatcaattctgccagtttataaaacactggaattgtattagacatgtctgagtatgtacttgtttatagactcaaaacatgatgaaaattca

SEQ ID NO: 323211 - DNA, 2953 bp, Homo sapiens
cgtacccgctgcttcccaaaacccactgagcctgatgcgcgcgcctccgctgtgccaggggcgccgggaagcccgacgacgacggtgtcgtaaaagcgtcgcgaaggcgtccgcccttggcggcttcctgccacctgtataagtggagcgtgctggggtgtgtaaagtagtatggaggcagcggtagcccagtgtctgagtggttgccgggtctccatggagaagcggctcgccagtgtcccaggctgctgagctctcgccgcccgagaccccgcggcgcggccgcagggccatgctagccttgcgcgtggcgcgcggctcgtggggggccctgcgcggcgccgcttgggctccgggaacgcggccgagtaagcgacgcgcctgctgggccctgctgccgcccgtgccctgctgcttgggctgcctggccgaacgctggaggctgcgtccggccgctcttggcttgcggctgcccgggatcggccagcggaaccactgttcgggcgcggggaaggcggctcccaggccagcggccggagcgggcgccgctgccgaagccccgggcggccagtggggcccggcgagcacccccagcctgtatgaaaacccatggacaatcccgaatatgttgtcaatgacgagaattggcttggccccagttctgggctatttgattattgaagaagattttaatattgcactaggagtttttgctttagctggactaacagatttgttccacttacttacatgatcatttcgagagatgtaatgttgattgctgctgttttttatgtcagataccgaactcttccaacaccacgaacacttgccaagtatttcaatccttgctatgccactgctaggttaaaaccaacattcatcagcaaggtgaatacagcagtccagttaatcttggtggcagcttctttggcagctccagttttcaactatgctgacagcatttatcttcagatactatggtgttttacagctttcaccacagctgcatcagcttatagttactatcattatggccggaagactgttcaggtgataaaagactgatgaaagtcatccctcactgttagtaaggaagcagtatacatcaatgggaacagggcccatggaaatgtacaggagtttccctattttggtgttcagcttgaaaaaggacttgtcagaatcaactgtgtcatcaaaatttaagtaatgtgcattgaaaataaggttgatcatgggaatatgcagaatttccaatgtatttttaaatacaaataaaattgtaatttagaatttttaatcttaggtttcttgattaatttataagagatcaattattgtcagtcttttttgtatgttttttaaaaacatagtccagagcatgggcagaattgacacctctcttttaagtgaaatttggattgctcacaaagcactaggaaatgtcatggggttcaaatatatatcctacacaactgggcaatacatttttgtttgatttttaggtctgtgtatacattaacagttcatgtaattaatacctgatcatttgggataatgaaagtgaagttagttgtagatgaagtaaagttataaaagagattaaaaatgcggtaactttttaagataataatcatacagaaggtatgaagttcattttcggtagtcttccaacctctcaggtgcctaataatttatgtttgaggataacaggtaacaaagatagtcgagataggagaacgtgtctattagtctttgcatctaaaaggcagtgagttacgttcctgccttccactgtgtttctgacatagcaatgtttgtttgatattggaacctggattcatattttatgtaaataatatcaagctgtatatttttcaaaggttttttaaactttggagactctttcttttgttaagcagttaaaggaataaaagagctggaaaaaaaattgtaccttcaactcaggttattccatataacatacgtattctctgctgttacgtaagttttccgattcacagagtccattcatgtacatcacttacacttaaattgtaaaaataattagtctgaccatctgactttaaaagactgttgctacacgtacatcatgtttaggagaatgtgggatatggggaaggggagaagaagacagtccagtggtgactagttgctgctgcttaacctatggcctattgctgcccattgtccctggttttaatccaagcctattatggaatactgcagtgagattatccattctcagcctgttgagctgcattaaattagaatgggaggctgtaagtaaaactcatgcctcttggccaggcattctgcaccagcgtgtccctctgtggcttgctggtcctggttgttctcagactggcagctgagctgcgcttggcttgaagcatactgaagcctgcagccagggacaccgccattgaatcagatggagggggatgaaaaagcagagaagggggcatgtggctggctattcttgctctctggagaacagcttcattgttaggagtagttaggctgaaagtggacttcccactgctgagccacccaagaggcacactgagcattagtgacgggtgagccacataagaataatgtttaaaaaagagaggacttgaagtagctatgcgaaaatttagaactttgcactttgttaacgcttatttatggtttagtgttgatgccatttggagtgacctatgggttggacccatatctttttattattaaggtctcaatctggctctggttaataaacgtttcccgcttcatcccttaggaaaatggtccaagtctcctcaggcttttggatactgaattgttataaaacacatcaattctgccagtttataaaacactggaattgtattagacatgtctgagtatgtacttgtttatagactcaaaacatgatgaaaattca

SEQ ID NO: 323212 - DNA, 2621 bp, Homo sapiens
cgtacccgctgcttcccaaaacccactgagcctgatgcgcgcgcctccgctgtgccaggggcgccgggaagcccgacgacgacggtgtcgtaaaagcgtcgcgaaggcgtccgcccttggcggcttcctgccaccttatgaaaacccatggacaatcccgaatatgttgtcaatgacgagaattggcttggccccagttctgggctatttgattattgaagaagattttaatattgcactaggagtttttgctttagctggactaacagatttgttggatggatttattgctcgaaactgggccaatcaaagatcagctttgggaagtgctcttgatccacttgctgataaaatacttatcagtatcttatatgttagcttgacctatgcagatcttattccagttccacttacttacatgatcatttcgagagatgtaatgttgattgctgctgttttttatgtcagataccgaactcttccaacaccacgaacacttgccaagtatttcaatccttgctatgccactgctaggttaaaaccaacattcatcagcaaggtgaatacagcagtccagttaatcttggtggcagcttctttggcagctccagttttcaactatgctgacagcatttatcttcagatactatggtgttttacagctttcaccacagctgcatcagcttatagttactatcattatggccggaagactgttcaggtgataaaagactgatgaaagtcatccctcactgttagtaaggaagcagtatacatcaatgggaacagggcccatggaaatgtacaggagtttccctattttggtgttcagcttgaaaaaggacttgtcagaatcaactgtgtcatcaaaatttaagtaatgtgcattgaaaataaggttgatcatgggaatatgcagaatttccaatgtatttttaaatacaaataaaattgtaatttagaatttttaatcttaggtttcttgattaatttataagagatcaattattgtcagtcttttttgtatgttttttaaaaacatagtccagagcatgggcagaattgacacctctcttttaagtgaaatttggattgctcacaaagcactaggaaatgtcatggggttcaaatatatatcctacacaactgggcaatacatttttgtttgatttttaggtctgtgtatacattaacagttcatgtaattaatacctgatcatttgggataatgaaagtgaagttagttgtagatgaagtaaagttataaaagagattaaaaatgcggtaactttttaagataataatcatacagaaggtatgaagttcattttcggtagtcttccaacctctcaggtgcctaataatttatgtttgaggataacaggtaacaaagatagtcgagataggagaacgtgtctattagtctttgcatctaaaaggcagtgagttacgttcctgccttccactgtgtttctgacatagcaatgtttgtttgatattggaacctggattcatattttatgtaaataatatcaagctgtatatttttcaaaggttttttaaactttggagactctttcttttgttaagcagttaaaggaataaaagagctggaaaaaaaattgtaccttcaactcaggttattccatataacatacgtattctctgctgttacgtaagttttccgattcacagagtccattcatgtacatcacttacacttaaattgtaaaaataattagtctgaccatctgactttaaaagactgttgctacacgtacatcatgtttaggagaatgtgggatatggggaaggggagaagaagacagtccagtggtgactagttgctgctgcttaacctatggcctattgctgcccattgtccctggttttaatccaagcctattatggaatactgcagtgagattatccattctcagcctgttgagctgcattaaattagaatgggaggctgtaagtaaaactcatgcctcttggccaggcattctgcaccagcgtgtccctctgtggcttgctggtcctggttgttctcagactggcagctgagctgcgcttggcttgaagcatactgaagcctgcagccagggacaccgccattgaatcagatggagggggatgaaaaagcagagaagggggcatgtggctggctattcttgctctctggagaacagcttcattgttaggagtagttaggctgaaagtggacttcccactgctgagccacccaagaggcacactgagcattagtgacgggtgagccacataagaataatgtttaaaaaagagaggacttgaagtagctatgcgaaaatttagaactttgcactttgttaacgcttatttatggtttagtgttgatgccatttggagtgacctatgggttggacccatatctttttattattaaggtctcaatctggctctggttaataaacgtttcccgcttcatcccttaggaaaatggtccaagtctcctcaggcttttggatactgaattgttataaaacacatcaattctgccagtttataaaacactggaattgtattagacatgtctgagtatgtacttgtttatagactcaaaacatgatgaaaattca

SEQ ID NO: 323213 - DNA, 2319 bp, Homo sapiens
ccccgggctgcaggattcagcacgagttggatggatttattgctcgaaactgggccaatcaaagatcagctttgggaagtgctcttgatccacttgctgataaaatacttatcagtatcttatatgttagcttgacctatgcagatcttattccagttccacttacttacatgatcatttcgagagatgtaatgttgattgctgctgttttttatgtcagataccgaactcttccaacaccacgaacacttgccaagtatttcaatccttgctatgccactgctaggttagcttctttggcagctccagttttcaactatgctgacagcatttatcttcagatactatggtgttttacagctttcaccacagctgcatcagcttatagttactatcattatggccggaagactgttcaggtgataaaagactgatgaaagtcatccctcactgttagtaaggaagcagtatacatcaatgggaacagggcccatggaaatgtacaggagtttccctattttggtgttcagcttgaaaaaggacttgtcagaatcaactgtgtcatcaaaatttaagtaatgtgcattgaaaataaggttgatcatgggaatatgcagaatttccaatgtatttttaaatacaaataaaattgtaatttagaatttttaatcttaggtttcttgattaatttataagagatcaattattgtcagtcttttttgtatgttttttaaaaacatagtccagagcatgggcagaattgacacctctcttttaagtgaaatttggattgctcacaaagcactaggaaatgtcatggggttcaaatatatatcctacacaactgggcaatacatttttgtttgatttttaggtctgtgtatacattaacagttcatgtaattaatacctgatcatttgggataatgaaagtgaagttagttgtagatgaagtaaagttataaaagagattaaaaatgcggtaactttttaagataataatcatacagaaggtatgaagttcattttcggtagtcttccaacctctcaggtgcctaataatttatgtttgaggataacaggtaacaaagatagtcgagataggagaacgtgtctattagtctttgcatctaaaaggcagtgagttacgttcctgccttccactgtgtttctgacatagcaatgtttgtttgatattggaacctggattcatattttatgtaaataatatcaagctgtatatttttcaaaggttttttaaactttggagactctttcttttgttaagcagttaaaggaataaaagagctggaaaaaaaattgtaccttcaactcaggttattccatataacatacgtattctctgctgttacgtaagttttccgattcacagagtccattcatgtacatcacttacacttaaattgtaaaaataattagtctgaccatctgactttaaaagactgttgctacacgtacatcatgtttaggagaatgtgggatatggggaaggggagaagaagacagtccagtggtgactagttgctgctgcttaacctatggcctattgctgcccattgtccctggttttaatccaagcctattatggaatactgcagtgagattatccattctcagcctgttgagctgcattaaattagaatgggaggctgtaagtaaaactcatgcctcttggccaggcattctgcaccagcgtgtccctctgtggcttgctggtcctggttgttctcagactggcagctgagctgcgcttggcttgaagcatactgaagcctgcagccagggacaccgccattgaatcagatggagggggatgaaaaagcagagaagggggcatgtggctggctattcttgctctctggagaacagcttcattgttaggagtagttaggctgaaagtggacttcccactgctgagccacccaagaggcacactgagcattagtgacgggtgagccacataagaataatgtttaaaaaagagaggacttgaagtagctatgcgaaaatttagaactttgcactttgttaacgcttatttatggtttagtgttgatgccatttggagtgacctatgggttggacccatatctttttattattaaggtctcaatctggctctggttaataaacgtttcccgcttcatcccttaggaaaatggtccaagtctcctcaggcttttggatactgaattgttataaaacacatcaattctgccagtttataaaacactggaattgtattagacatgtctgagtatgtacttgtttatagactcaaaacatgatgaaaattca

SEQ ID NO: 323214 - DNA, 841 bp, Homo sapiens
cgtacccgctgcttcccaaaacccactgagcctgatgcgcgcgcctccgctgtgccaggggcgccgggaagcccgacgacgacggtgtcgtaaaagcgtcgcgaaggcgtccgcccttggcggcttcctgccacctgtataagtggagcgtgctggggtgtgtaaagtagtatggaggcagcggtagcccagtgtctgagtggttgccgggtctccatggagaagcggctcgccagtgtcccaggctgctgagctctcgccgcccgagaccccgcggcgcggccgcagggccatgctagccttgcgcgtggcgcgcggctcgtggggggccctgcgcggcgccgcttgggctccgggaacgcggccgagtaagcgacgcgcctgctgggccctgctgccgcccgtgccctgctgcttgggctgcctggccgaacgctggaggctgcgtccggccgctcttggcttgcggctgcccgggatcactcactggtagcactgtacgatctcgactatggcggctcccatgcccgttgccgctactggcgccgctgatgatgacgaggccgagacaagttgcccatcctgcgcacagacgctgcatgagctgccatgagctctagcacgttagcgataaacgacatgattggcgatggccgagcactggtggatagagttatggcgtagctatattaactggctatagcatttgcgtcatgcaggctgacttattccgtggttggaatgctttggagacgctgctgcaagcaatgatgggccctgttgcaggaactggtcccagtctaattttcagtgacattttgcattatgtcttccgggtggg

SEQ ID NO: 323215 - DNA, 1651 bp, Homo sapiens
  misc_feature (759)..(759): n is a, c, g, or t
  misc_feature (805)..(805): n is a, c, g, or t
  misc_feature (1120)..(1120): n is a, c, g, or t
aacttaaatatattctttcccccaacagggttaatcatctcattttagtggagccttggggtttccctgaacgaccagaccttgctgatcaagacagaccaattccagtttggatcagagccttgggagcagcattgactccctttaaccctttagctggcctaaggattgcaggaccctttggtgagtgcttatgttctaggaaagcaaaatgtttgtaagttatgagaagagcagaattcactattgttagtcaaaatcttaaaaacaaacaagaaaaccctgaacccttactttttctcctcttcctctaataagtaccatgtcttgcacaaagacgaatgcaactaggttcttctcctcaaaggagagtctttatattgtaaacattgtgaataattagcaaagtagaaaaggagggaatgctgaggataaggttagtcagtcctcaacactctaaaaaaagccaggcaagcagagtgttttggggagtatataaggacctctgctagtccagggcctgggagaagtgtagcatgttgccctgctggtgagcactggagagcgtttggccaattgatgataccatttggtaccataaaacctgatttgattgaccctggggataacaggtaccaccacactcacagattcttcccttatccatgtcagagtgttggaaagataaagttattttttccacaacattttggggactcctgatatatatttctggtcatattttgaggcaccagtgtntagtccctgattgacttttatttgactctcagcagttctgtctcanccccatagccatgggaatttccttccctcattgtcacagataatgatgttctgaacttctgcctttcccccgtacaacttgtatgaatttggagtacttttagttgtaagtaactgaatacccaagaggcttaaactagaaggacttttattatttccttaataagcaatctggagataggttttagcacttgttctggttgcttgctcattgatgttagggtttgggtctgtgtctgtgattttcttgacttttttcctcacggtggtttgatgcctgccatagcattaagcatcatctcacaaatcagcgccntgagcaaaaagaaataaaagcacgaaaaatggtccttctctccataatgctttgtcagggaagaaagtcctctctggaaggctccacctgacctctgcttatgactcggcccactcctagtccttccaccagcaaagaagaaatttctgtgatgcaccaatcatgatttgtttccagggcctgctttcctgggcatgttgctgcctaattgatactatagaaaagatgcgttctaaccaggtgctgtggctcacacctgtaataccagcactttgggaggctgaggtaggcagatcacttgaggccaggctttgagacaagcccggccaacatgacaaaaccccatctctactaaaaatacaaaaaaattagccaggcatagtggcacacacctgtaatcccagctactcaggagaggaggctgagacatgagaattactcaaacctgggaggtggaggttgtggcgagccaagatcgcaccactattctccagcctgggcaacagtgcaagaccctgtctcaaaaaaaac

SEQ ID NO: 323216 - DNA, 897 bp, Homo sapiens
agcgggagtgcgcggaagacgcatgcgctggcggcctgcgccgccttaagtgccgcgccagcccggggcggcccagtcggcctgtcagccggcttcgagataagtcccggcgcttgcgcggcggcggctatggcggcggaggaggaggaggtggactctgccgacaccggagagaggtcaggatggctaactggttggctccccacatggtgccctacgtctatatcacaccttaaagaagctgaagagaagatgttaaaatgtgtgccttgcacatacaaaaaagaacctgttcgtatatctaatggaaataaaatatggacactgaagttctctcataatatttcaaataagactccacttgtccttctccatggttttggaggaggtcttgggctctgggcactgaattttggagatctttgcaccaacagacctgtctatgcttttgacctattgggttttggacgaagtagtagacccaggtttgacagtgatgcagaagaagtggagaatcagtttgtggaatccattgaagagtggagatgtgccctaggattggacaaaatgatcttgcttgggcacaacctaggtggattcttggctgctgcttactcgctgaagtacccatcaagggttaatcatctcattttagtggagccttggggtttccctgaacgaccagaccttgctgatcaagacagaccaattccagtttggatcagagccttgggagcagcattgactccctttaaccctttagctggcctaaggattgcaggaccctttgttacgcagtgccgtaacgggcgacccagcaggctctcgggtccgcaacgtgacgaacatcccgtatgtcacctgggcatgcatctgggtaggggcatccatggttcg

SEQ ID NO: 323217 - DNA, 995 bp, Homo sapiens
gtgtgtgcctgtaatcccagctactcaggagactgaggcaggagaatcacttgaacctgggagacggaggttgaagtgaactgagattgtgtcactgcactccagcctgggcgacagagtgagactccatctcaaaacaaaacaaatgcaaaataaaataaaataatggaaatacctttcttacctgtgagattggggaaaatccaagttaggcaatgcactctgttgagacaatagggaaacaggcactccaaaaattacaaatccctgtggatggtatttgttaactagcaaagttaaatgagtatatccttcaacctggcagacccagttctaagaatccatatgagatgcacttgcaagaatatgaaatagtatatgcacaaagatcttgattacagcactgtttctaatagctacagactggaagccagccaaatctccattgatagggaattgatggaaggaactagggtatatctatacaatgggatactacacagctgtagaaaggactgcgaactatttttgtagttctggtctggagaaatctccagaatataggaaatgaaaaatgtaaagcacagaagagaatgtatggtgtgctgtctgttgtataacgaagagacaaatggaaaaaatatgtatttgctttttttgtaaagcaatagaagaattagttataccaataactaataaaatgatctccttgttagtggtggtagggagctagacaaggatggcaactatttctgtatcttacataccttttattttgaggccctgtcaatgttttatataataaacattttttgaaaaggcaactcttaaaactaaaacaaacttaacagtctgtcaagttggtgatataaccccacagaagacttacttcaagtgacttgaaaacttagtattttgtctgtactttgctaatggaatatatcctacagaccaaacaaccacaaataaatcttaaactgcattcagtagtttta

SEQ ID NO: 323218 - DNA, 5385 bp, Homo sapiens
agcgggagtgcgcggaagacgcatgcgctggcggcctgcgccgccttaagtgccgcgccagcccggggcggcccagtcggcctgtcagccggcttcgagataagtcccggcgcttgcgcggcggcggctatggcggcggaggaggaggaggtggactctgccgacaccggagagaggtcaggatggctaactggttggctccccacatggtgccctacgtctatatcacaccttaaagaagctgaagagaagatgttaaaatgtgtgccttgcacatacaaaaaagaacctgttcgtatatctaatggaaataaaatatggacactgaagttctctcataatatttcaaataagactccacttgtccttctccatggttttggaggaggtcttgggctctgggcactgaattttggagatctttgcaccaacagacctgtctatgcttttgacctattgggttttggacgaagtagtagacccaggtttgacagtgatgcagaagaagtggagaatcagtttgtggaatccattgaagagtggagatgtgccctaggattggacaaaatgatcttgcttgggcacaacctaggtggattcttggctgctgcttactcgctgaagtacccatcaagggttaatcatctcattttagtggagccttggggtttccctgaacgaccagaccttgctgatcaagacagaccaattccagtttggatcagagccttgggagcagcattgactccctttaaccctttagctggcctaaggattgcaggaccctttggtttaagtctagtgcagcgtttaaggcctgatttcaaacgaaagtattcttcaatgttcgaagacgatactgtgacagaatacatctaccactgtaatgtgcagactccaagtggtgagacagctttcaagaatatgactattccttatggatgggcaaaaaggccaatgctccagcgaattggtaaaatgcaccctgacattccagtttcagtgatctttggcgcccgatcctgcatagatggcaattctggcaccagcatccagtccttacgaccacattcatatgtgaagacaatagctattcttggggcaggacattatgtatatgcagatcaaccagaagaattcaaccagaaagtaaaggagatctgcgacactgtggactgaacacactgaagctctgatgggaaaacctggtgactgatatagttgttcagcaataattcatagtctgtgatgaagagtagtgaatacaacacacaaccaggcagccttcttgactatactttgcacatgttttctttaggaattcactcacacatttaaaccagttagtgccttctagaagaatggctttcctttctcctacacaaaattgaaatatacaagtctctaaatataatacctttaaataaaaggttatttgtccctctgatgtactgaaaaactgtaatttttcagctgaaaattttttaatctaactttgctagttatttttatattgcaatctatattaccaatttaggaagtgatttctgagtctcttacactgtaaaggtgcactttattttctttgtcttccccatcatgtatttattgtgtcttgataactgatattaatctaaattcaatgtgtttttatgtaaaaatttgtcagttgtttagaatatttcactttgtttttgaaacggagtgacaaggcagatttttggttagaggacgggagttgatcactatcattactttttctagtttacctgttttttatatttaaggctgctaagccatgttcagcattttaaatgtggtctatcctgacatacagtgtataacaacataactccttggaacctcctatgtgtggtataattctactcttccaaggaacatgacttcaatactttcagtgattcaggtactgaaaagccttacctaaaaggctgttctttgtttccccctttcatactattcttttccatgacccaggatgcagcaaatgaaacagatttcttctcttaaggggatattaagactgttacttcctagtaagccaagtaataccatatttttattaacatctaacttttgtagatgggtgctaaaattgcatacattttaaccactaaaatagaaaaacaagtggtgctattatgtctcatggcaccagaaatgagctagcacttgggtttgttgttgctgttgtttattaagagtattgtgttaattaaatcattacatacttgaagttatattacaaaaattctagaaggttgattgaactatttttttaggaactaccatcaagtgtagcattttcttgcagttttaaaatgaggaaaacttctttgaaactgtgaaatgctccatgtggtaactggctgctgagaaaacccttcaccaaaaaaataaataaaaattgaataggattgtcatcaagaaggcatctttcgctaacgttgcttgtctaggagaaaggtagctatgtaaataaaaacagtgaactagagcaaatagtggtttaatggttttgttattgcatttttaaaatggttaattagggaatttgtagttgttaggaaatgtaaggttgtgtcactgttgattaactgccagaaagactgaatgttctattttcaacatttctcccctataaaagaatagacaaattatactgaagcatgatataaacatcttcccaatgaacaatttgtctcacttgtcagattaactaggttagtgcaggaagcaacatgagcgccaagatgtgttgtctgatttctctaccttaagaacaataatagtctttttagttagtattttggatggccaggtttcaaacctgtatgtggtacaaataatttgggtaatatttttgtatttttgttttacacactctctaatctcaattatcctttgctgggagaatgacaggtttcacttatacaggaaggtttttgcacaggaaatttggtcccagcccttggaaggaagaagttccttcgtttacttagtgaatggagtttctggccgcagatgtgccaagtgattgaagaaagatataccccaatatcaagtgataatttattttcctacagactgaatttgctttatttgaaagatgttgtaactctttttaaagttagattttaccctgaggtatagtatatgtaattttgtgaagattgagctggaagggaagttcacaatcctcacatttaaaaaaatatagtgggtgctaaatgttttcttaaaaatctagtacagcatttgatctttgttatgcacagcatacttttattttacagaataaattttcctgtgatagtcacaacaagacagctgtatagtttcttgagtcttttgtatggaccagtctctgtataatagttaactacaggactgtggatccagcaaatgttcagtaaatgctgctgttgttcttagggaaggctactctgggtgttgtggccgccatacatggctttacctgggtccatgcattcccttaagatgacttctgttttcttcttttttcttctgattttccaaaaaaaaaaagccttgcctaaggttggttttagaatatgatttgcagaacacttttgaaatgtcttcattcatatatgtaatatatatttatacttaaagggccatacgcgatttcaataaaacaagaagtactggaaagaataaacaaaaatagccagaagatgcctagaaaagaacaatgtggaaggagggataaccctattaaatattataacataatgtttacaatatgagaaagtctaggaatttagtacatgataaagcatctcattcagagaaaaaggctttaaaaatggtgttgagagaagtgtggttaaccatttggaaaaaaaaataaaattgaatcgatttctcacaggatacacaggataaaatctgaatagaacaaagacccaatttttaaaatgaaaccctctttctaactagaagaaaacatagatgaattattgtataatctgacagtgagaaaaactttcctaggactgaaaattcagaagcaataaaaagagaagtctatagaagaattttcagccagatggaatggctcatggctgtaatcccagcattttgggaggctgaggcagaaggactgcttgagaccaggaattcaaaaccaacctgggcaacctagtaggactggctctaccaaaaaaaaaaaaaaaaaaaaaattaagtacctggcctgggttccacctacttgggaggctgaggtaggaggactgtgagcccaggagtttgaggatgcagtaagccactgcactccagcctgggtgacagagaagaaaaaagatttttttggatagctgaaaatatttgcagcatttatcacagagggctaattgtagccctatatatgaagaattttaaactatgagaagaacccgaagaataggcaaaaggatgtgaacagacagttaacagaaaatagaatgcaaatggtctttaaacatacaaggatatgcataaaaagacaaatgcaaaataaaataaaataatggaaatacctttcttacctgtgagattggggaaaatccaagttaggcaatgcactctgttgagacaatagggaaacaggcactccaaaaattacaaatccctgtggatggtatttgttaactagcaaagttaaatgagtatatccttcaacctggcagacccagttctaagaatccatatgagatgcacttgcaagaatatgaaatagtatatgcacaaagatcttgattacagcactgtttctaatagctacagactggaagccagccaaatctccattgatagggaattgatggaaggaactagggtatatctatacaatgggatactacacagctgtagaaaggactgcgaactatttttgtagttctggtctggagaaatctccagaatataggaaatgaaaaatgtaaagcacagaagagaatgtatggtgtgctgtctgttgtataacgaagagacaaatggaaaaaatatgtatttgctttttttgtaaagcaatagaagaattagttataccaataactaataaaatgatctccttgttagtggtggtagggagctagacaaggatggcaactatttctgtatcttacataccttttattttgaggccctgtcaatgttttatataataaacattttttgaaaaggcaactcttaaaactaaaacaaacttaacagtctgtcaagttggtgatataaccccacagaagacttacttcaagtgacttgaaaacttagtattttgtctgtactttgctaatggaatatatcctacagaccaaacaaccacaaataaatcttaaactgcattcagtagtttta

SEQ ID NO: 323219 - DNA, 5333 bp, Homo sapiens
agcgggagtgcgcggaagacgcatgcgctggcggcctgcgccgccttaagtgccgcgccagcccggggcggcccagtcggcctgtcagccggcttcgagataagtcccggcgcttgcgcggcggcggctatggcggcggaggaggaggaggtggactctgccgacaccggagagaggtcaggatggctaactggttggctccccacatggtgccctacgtctatatcacaccttaaagaagctgaagagaagatgttaaaatgtgtgccttgcacatacaaaaaagaacctgttcgtatatctaatggaaataaaatatggacactgaagttctctcataatatttcaaataagactccacttgtccttctccatggttttggaggaggtcttgggctctgggcactgaattttggagatctttgcaccaacagacctgtctatgcttttgacctattgggttttggacgaagtagtagacccaggtttgacagtgatgcagaagaagtggagaatcagtttgtggaatccattgaagagtggagatgtgccctaggattggacaaaatgatcttgcttgggcacaacctaggtggattcttggctgctgcttactcgctgaagtacccatcaagggttaatcatctcattttagtggagccttggggtttccctgaacgaccagaccttgctgatcaagacagaccaattccagtttggatcagagccttgggagcagcattgactccctttaaccctttagctggcctaaggattgcaggaccctttggtttaagtctagtgcagcgtttaaggcctgatttcaaacgaaagtattcttcaatgttcgaagacgatactgtgacagaatacatctaccactgtaatgtgcagactccaagtggtgagacagctttcaagaatatgactattccttatggatgggcacagtgatctttggcgcccgatcctgcatagatggcaattctggcaccagcatccagtccttacgaccacattcatatgtgaagacaatagctattcttggggcaggacattatgtatatgcagatcaaccagaagaattcaaccagaaagtaaaggagatctgcgacactgtggactgaacacactgaagctctgatgggaaaacctggtgactgatatagttgttcagcaataattcatagtctgtgatgaagagtagtgaatacaacacacaaccaggcagccttcttgactatactttgcacatgttttctttaggaattcactcacacatttaaaccagttagtgccttctagaagaatggctttcctttctcctacacaaaattgaaatatacaagtctctaaatataatacctttaaataaaaggttatttgtccctctgatgtactgaaaaactgtaatttttcagctgaaaattttttaatctaactttgctagttatttttatattgcaatctatattaccaatttaggaagtgatttctgagtctcttacactgtaaaggtgcactttattttctttgtcttccccatcatgtatttattgtgtcttgataactgatattaatctaaattcaatgtgtttttatgtaaaaatttgtcagttgtttagaatatttcactttgtttttgaaacggagtgacaaggcagatttttggttagaggacgggagttgatcactatcattactttttctagtttacctgttttttatatttaaggctgctaagccatgttcagcattttaaatgtggtctatcctgacatacagtgtataacaacataactccttggaacctcctatgtgtggtataattctactcttccaaggaacatgacttcaatactttcagtgattcaggtactgaaaagccttacctaaaaggctgttctttgtttccccctttcatactattcttttccatgacccaggatgcagcaaatgaaacagatttcttctcttaaggggatattaagactgttacttcctagtaagccaagtaataccatatttttattaacatctaacttttgtagatgggtgctaaaattgcatacattttaaccactaaaatagaaaaacaagtggtgctattatgtctcatggcaccagaaatgagctagcacttgggtttgttgttgctgttgtttattaagagtattgtgttaattaaatcattacatacttgaagttatattacaaaaattctagaaggttgattgaactatttttttaggaactaccatcaagtgtagcattttcttgcagttttaaaatgaggaaaacttctttgaaactgtgaaatgctccatgtggtaactggctgctgagaaaacccttcaccaaaaaaataaataaaaattgaataggattgtcatcaagaaggcatctttcgctaacgttgcttgtctaggagaaaggtagctatgtaaataaaaacagtgaactagagcaaatagtggtttaatggttttgttattgcatttttaaaatggttaattagggaatttgtagttgttaggaaatgtaaggttgtgtcactgttgattaactgccagaaagactgaatgttctattttcaacatttctcccctataaaagaatagacaaattatactgaagcatgatataaacatcttcccaatgaacaatttgtctcacttgtcagattaactaggttagtgcaggaagcaacatgagcgccaagatgtgttgtctgatttctctaccttaagaacaataatagtctttttagttagtattttggatggccaggtttcaaacctgtatgtggtacaaataatttgggtaatatttttgtatttttgttttacacactctctaatctcaattatcctttgctgggagaatgacaggtttcacttatacaggaaggtttttgcacaggaaatttggtcccagcccttggaaggaagaagttccttcgtttacttagtgaatggagtttctggccgcagatgtgccaagtgattgaagaaagatataccccaatatcaagtgataatttattttcctacagactgaatttgctttatttgaaagatgttgtaactctttttaaagttagattttaccctgaggtatagtatatgtaattttgtgaagattgagctggaagggaagttcacaatcctcacatttaaaaaaatatagtgggtgctaaatgttttcttaaaaatctagtacagcatttgatctttgttatgcacagcatacttttattttacagaataaattttcctgtgatagtcacaacaagacagctgtatagtttcttgagtcttttgtatggaccagtctctgtataatagttaactacaggactgtggatccagcaaatgttcagtaaatgctgctgttgttcttagggaaggctactctgggtgttgtggccgccatacatggctttacctgggtccatgcattcccttaagatgacttctgttttcttcttttttcttctgattttccaaaaaaaaaaagccttgcctaaggttggttttagaatatgatttgcagaacacttttgaaatgtcttcattcatatatgtaatatatatttatacttaaagggccatacgcgatttcaataaaacaagaagtactggaaagaataaacaaaaatagccagaagatgcctagaaaagaacaatgtggaaggagggataaccctattaaatattataacataatgtttacaatatgagaaagtctaggaatttagtacatgataaagcatctcattcagagaaaaaggctttaaaaatggtgttgagagaagtgtggttaaccatttggaaaaaaaaataaaattgaatcgatttctcacaggatacacaggataaaatctgaatagaacaaagacccaatttttaaaatgaaaccctctttctaactagaagaaaacatagatgaattattgtataatctgacagtgagaaaaactttcctaggactgaaaattcagaagcaataaaaagagaagtctatagaagaattttcagccagatggaatggctcatggctgtaatcccagcattttgggaggctgaggcagaaggactgcttgagaccaggaattcaaaaccaacctgggcaacctagtaggactggctctaccaaaaaaaaaaaaaaaaaaaaaattaagtacctggcctgggttccacctacttgggaggctgaggtaggaggactgtgagcccaggagtttgaggatgcagtaagccactgcactccagcctgggtgacagagaagaaaaaagatttttttggatagctgaaaatatttgcagcatttatcacagagggctaattgtagccctatatatgaagaattttaaactatgagaagaacccgaagaataggcaaaaggatgtgaacagacagttaacagaaaatagaatgcaaatggtctttaaacatacaaggatatgcataaaaagacaaatgcaaaataaaataaaataatggaaatacctttcttacctgtgagattggggaaaatccaagttaggcaatgcactctgttgagacaatagggaaacaggcactccaaaaattacaaatccctgtggatggtatttgttaactagcaaagttaaatgagtatatccttcaacctggcagacccagttctaagaatccatatgagatgcacttgcaagaatatgaaatagtatatgcacaaagatcttgattacagcactgtttctaatagctacagactggaagccagccaaatctccattgatagggaattgatggaaggaactagggtatatctatacaatgggatactacacagctgtagaaaggactgcgaactatttttgtagttctggtctggagaaatctccagaatataggaaatgaaaaatgtaaagcacagaagagaatgtatggtgtgctgtctgttgtataacgaagagacaaatggaaaaaatatgtatttgctttttttgtaaagcaatagaagaattagttataccaataactaataaaatgatctccttgttagtggtggtagggagctagacaaggatggcaactatttctgtatcttacataccttttattttgaggccctgtcaatgttttatataataaacattttttgaaaaggcaactcttaaaactaaaacaaacttaacagtctgtcaagttggtgatataaccccacagaagacttacttcaagtgacttgaaaacttagtattttgtctgtactttgctaatggaatatatcctacagaccaaacaaccacaaataaatcttaaactgcattcagtagtttta

SEQ ID NO: 323220 - DNA, 5287 bp, Homo sapiens
agcgggagtgcgcggaagacgcatgcgctggcggcctgcgccgccttaagtgccgcgccagcccggggcggcccagtcggcctgtcagccggcttcgagataagtcccggcgcttgcgcggcggcggctatggcggcggaggaggaggaggtggactctgccgacaccggagagaggtcaggatggctaactggttggctccccacatggtgccctacgtctatatcacaccttaaagaagctgaagagaagatgttaaaatgtgtgccttgcacatacaaaaaagaacctgttcgtatatctaatggaaataaaatatggacactgaagttctctcataatatttcaaataagactccacttgtccttctccatggttttggaggaggtcttgggctctgggcactgaattttggagatctttgcaccaacagacctgtctatgcttttgacctattgggttttggacgaagtagtagacccaggtttgacagtgatgcagaagaagtggagaatcagtttgtggaatccattgaagagtggagatgtgccctaggattggacaaaatgatcttgcttgggcacaacctaggtggattcttggctgctgcttactcgctgaagtacccatcaagggttaatcatctcattttagtggagccttggggtttccctgaacgaccagaccttgctgatcaagacagaccaattccagtttggatcagagccttgggagcagcattgactccctttaaccctttagctggcctaaggattgcaggaccctttggtttaagtctagtgcagcgtttaaggcctgatttcaaacgaaagtattcttcaatgttcgaagacgatactgtgacagaatacatctaccactgtaatgtgcagactccaagcagtgatctttggcgcccgatcctgcatagatggcaattctggcaccagcatccagtccttacgaccacattcatatgtgaagacaatagctattcttggggcaggacattatgtatatgcagatcaaccagaagaattcaaccagaaagtaaaggagatctgcgacactgtggactgaacacactgaagctctgatgggaaaacctggtgactgatatagttgttcagcaataattcatagtctgtgatgaagagtagtgaatacaacacacaaccaggcagccttcttgactatactttgcacatgttttctttaggaattcactcacacatttaaaccagttagtgccttctagaagaatggctttcctttctcctacacaaaattgaaatatacaagtctctaaatataatacctttaaataaaaggttatttgtccctctgatgtactgaaaaactgtaatttttcagctgaaaattttttaatctaactttgctagttatttttatattgcaatctatattaccaatttaggaagtgatttctgagtctcttacactgtaaaggtgcactttattttctttgtcttccccatcatgtatttattgtgtcttgataactgatattaatctaaattcaatgtgtttttatgtaaaaatttgtcagttgtttagaatatttcactttgtttttgaaacggagtgacaaggcagatttttggttagaggacgggagttgatcactatcattactttttctagtttacctgttttttatatttaaggctgctaagccatgttcagcattttaaatgtggtctatcctgacatacagtgtataacaacataactccttggaacctcctatgtgtggtataattctactcttccaaggaacatgacttcaatactttcagtgattcaggtactgaaaagccttacctaaaaggctgttctttgtttccccctttcatactattcttttccatgacccaggatgcagcaaatgaaacagatttcttctcttaaggggatattaagactgttacttcctagtaagccaagtaataccatatttttattaacatctaacttttgtagatgggtgctaaaattgcatacattttaaccactaaaatagaaaaacaagtggtgctattatgtctcatggcaccagaaatgagctagcacttgggtttgttgttgctgttgtttattaagagtattgtgttaattaaatcattacatacttgaagttatattacaaaaattctagaaggttgattgaactatttttttaggaactaccatcaagtgtagcattttcttgcagttttaaaatgaggaaaacttctttgaaactgtgaaatgctccatgtggtaactggctgctgagaaaacccttcaccaaaaaaataaataaaaattgaataggattgtcatcaagaaggcatctttcgctaacgttgcttgtctaggagaaaggtagctatgtaaataaaaacagtgaactagagcaaatagtggtttaatggttttgttattgcatttttaaaatggttaattagggaatttgtagttgttaggaaatgtaaggttgtgtcactgttgattaactgccagaaagactgaatgttctattttcaacatttctcccctataaaagaatagacaaattatactgaagcatgatataaacatcttcccaatgaacaatttgtctcacttgtcagattaactaggttagtgcaggaagcaacatgagcgccaagatgtgttgtctgatttctctaccttaagaacaataatagtctttttagttagtattttggatggccaggtttcaaacctgtatgtggtacaaataatttgggtaatatttttgtatttttgttttacacactctctaatctcaattatcctttgctgggagaatgacaggtttcacttatacaggaaggtttttgcacaggaaatttggtcccagcccttggaaggaagaagttccttcgtttacttagtgaatggagtttctggccgcagatgtgccaagtgattgaagaaagatataccccaatatcaagtgataatttattttcctacagactgaatttgctttatttgaaagatgttgtaactctttttaaagttagattttaccctgaggtatagtatatgtaattttgtgaagattgagctggaagggaagttcacaatcctcacatttaaaaaaatatagtgggtgctaaatgttttcttaaaaatctagtacagcatttgatctttgttatgcacagcatacttttattttacagaataaattttcctgtgatagtcacaacaagacagctgtatagtttcttgagtcttttgtatggaccagtctctgtataatagttaactacaggactgtggatccagcaaatgttcagtaaatgctgctgttgttcttagggaaggctactctgggtgttgtggccgccatacatggctttacctgggtccatgcattcccttaagatgacttctgttttcttcttttttcttctgattttccaaaaaaaaaaagccttgcctaaggttggttttagaatatgatttgcagaacacttttgaaatgtcttcattcatatatgtaatatatatttatacttaaagggccatacgcgatttcaataaaacaagaagtactggaaagaataaacaaaaatagccagaagatgcctagaaaagaacaatgtggaaggagggataaccctattaaatattataacataatgtttacaatatgagaaagtctaggaatttagtacatgataaagcatctcattcagagaaaaaggctttaaaaatggtgttgagagaagtgtggttaaccatttggaaaaaaaaataaaattgaatcgatttctcacaggatacacaggataaaatctgaatagaacaaagacccaatttttaaaatgaaaccctctttctaactagaagaaaacatagatgaattattgtataatctgacagtgagaaaaactttcctaggactgaaaattcagaagcaataaaaagagaagtctatagaagaattttcagccagatggaatggctcatggctgtaatcccagcattttgggaggctgaggcagaaggactgcttgagaccaggaattcaaaaccaacctgggcaacctagtaggactggctctaccaaaaaaaaaaaaaaaaaaaaaattaagtacctggcctgggttccacctacttgggaggctgaggtaggaggactgtgagcccaggagtttgaggatgcagtaagccactgcactccagcctgggtgacagagaagaaaaaagatttttttggatagctgaaaatatttgcagcatttatcacagagggctaattgtagccctatatatgaagaattttaaactatgagaagaacccgaagaataggcaaaaggatgtgaacagacagttaacagaaaatagaatgcaaatggtctttaaacatacaaggatatgcataaaaagacaaatgcaaaataaaataaaataatggaaatacctttcttacctgtgagattggggaaaatccaagttaggcaatgcactctgttgagacaatagggaaacaggcactccaaaaattacaaatccctgtggatggtatttgttaactagcaaagttaaatgagtatatccttcaacctggcagacccagttctaagaatccatatgagatgcacttgcaagaatatgaaatagtatatgcacaaagatcttgattacagcactgtttctaatagctacagactggaagccagccaaatctccattgatagggaattgatggaaggaactagggtatatctatacaatgggatactacacagctgtagaaaggactgcgaactatttttgtagttctggtctggagaaatctccagaatataggaaatgaaaaatgtaaagcacagaagagaatgtatggtgtgctgtctgttgtataacgaagagacaaatggaaaaaatatgtatttgctttttttgtaaagcaatagaagaattagttataccaataactaataaaatgatctccttgttagtggtggtagggagctagacaaggatggcaactatttctgtatcttacataccttttattttgaggccctgtcaatgttttatataataaacattttttgaaaaggcaactcttaaaactaaaacaaacttaacagtctgtcaagttggtgatataaccccacagaagacttacttcaagtgacttgaaaacttagtattttgtctgtactttgctaatggaatatatcctacagaccaaacaaccacaaataaatcttaaactgcattcagtagtttta

SEQ ID NO: 323221 - DNA, 5467 bp, Homo sapiens
agcgggtctgagccggactccggccgcgccgggaggccgccttgaccccgcgcggagggtccgccccgttgttgtataagccaccccgcgggccggcgacggagctggccgcggcggccgcaccggctcgggctctgccaagggacccggcctgccccaatgccgccggcgggcggtgcccggtcgaccctgcacctgactgcgaggcgcgggaaatgaccgggtctgtcagcctcccatcgcggcttccgtctacaggtcaggatggctaactggttggctccccacatggtgccctacgtctatatcacaccttaaagaagctgaagagaagatgttaaaatgtgtgccttgcacatacaaaaaagaacctgttcgtatatctaatggaaataaaatatggacactgaagttctctcataatatttcaaataagactccacttgtccttctccatggttttggaggaggtcttgggctctgggcactgaattttggagatctttgcaccaacagacctgtctatgcttttgacctattgggttttggacgaagtagtagacccaggtttgacagtgatgcagaagaagtggagaatcagtttgtggaatccattgaagagtggagatgtgccctaggattggacaaaatgatcttgcttgggcacaacctaggtggattcttggctgctgcttactcgctgaagtacccatcaagggttaatcatctcattttagtggagccttggggtttccctgaacgaccagaccttgctgatcaagacagaccaattccagtttggatcagagccttgggagcagcattgactccctttaaccctttagctggcctaaggattgcaggaccctttggtttaagtctagtgcagcgtttaaggcctgatttcaaacgaaagtattcttcaatgttcgaagacgatactgtgacagaatacatctaccactgtaatgtgcagactccaagtggtgagacagctttcaagaatatgactattccttatggatgggcaaaaaggccaatgctccagcgaattggtaaaatgcaccctgacattccagtttcagtgatctttggcgcccgatcctgcatagatggcaattctggcaccagcatccagtccttacgaccacattcatatgtgaagacaatagctattcttggggcaggacattatgtatatgcagatcaaccagaagaattcaaccagaaagtaaaggagatctgcgacactgtggactgaacacactgaagctctgatgggaaaacctggtgactgatatagttgttcagcaataattcatagtctgtgatgaagagtagtgaatacaacacacaaccaggcagccttcttgactatactttgcacatgttttctttaggaattcactcacacatttaaaccagttagtgccttctagaagaatggctttcctttctcctacacaaaattgaaatatacaagtctctaaatataatacctttaaataaaaggttatttgtccctctgatgtactgaaaaactgtaatttttcagctgaaaattttttaatctaactttgctagttatttttatattgcaatctatattaccaatttaggaagtgatttctgagtctcttacactgtaaaggtgcactttattttctttgtcttccccatcatgtatttattgtgtcttgataactgatattaatctaaattcaatgtgtttttatgtaaaaatttgtcagttgtttagaatatttcactttgtttttgaaacggagtgacaaggcagatttttggttagaggacgggagttgatcactatcattactttttctagtttacctgttttttatatttaaggctgctaagccatgttcagcattttaaatgtggtctatcctgacatacagtgtataacaacataactccttggaacctcctatgtgtggtataattctactcttccaaggaacatgacttcaatactttcagtgattcaggtactgaaaagccttacctaaaaggctgttctttgtttccccctttcatactattcttttccatgacccaggatgcagcaaatgaaacagatttcttctcttaaggggatattaagactgttacttcctagtaagccaagtaataccatatttttattaacatctaacttttgtagatgggtgctaaaattgcatacattttaaccactaaaatagaaaaacaagtggtgctattatgtctcatggcaccagaaatgagctagcacttgggtttgttgttgctgttgtttattaagagtattgtgttaattaaatcattacatacttgaagttatattacaaaaattctagaaggttgattgaactatttttttaggaactaccatcaagtgtagcattttcttgcagttttaaaatgaggaaaacttctttgaaactgtgaaatgctccatgtggtaactggctgctgagaaaacccttcaccaaaaaaataaataaaaattgaataggattgtcatcaagaaggcatctttcgctaacgttgcttgtctaggagaaaggtagctatgtaaataaaaacagtgaactagagcaaatagtggtttaatggttttgttattgcatttttaaaatggttaattagggaatttgtagttgttaggaaatgtaaggttgtgtcactgttgattaactgccagaaagactgaatgttctattttcaacatttctcccctataaaagaatagacaaattatactgaagcatgatataaacatcttcccaatgaacaatttgtctcacttgtcagattaactaggttagtgcaggaagcaacatgagcgccaagatgtgttgtctgatttctctaccttaagaacaataatagtctttttagttagtattttggatggccaggtttcaaacctgtatgtggtacaaataatttgggtaatatttttgtatttttgttttacacactctctaatctcaattatcctttgctgggagaatgacaggtttcacttatacaggaaggtttttgcacaggaaatttggtcccagcccttggaaggaagaagttccttcgtttacttagtgaatggagtttctggccgcagatgtgccaagtgattgaagaaagatataccccaatatcaagtgataatttattttcctacagactgaatttgctttatttgaaagatgttgtaactctttttaaagttagattttaccctgaggtatagtatatgtaattttgtgaagattgagctggaagggaagttcacaatcctcacatttaaaaaaatatagtgggtgctaaatgttttcttaaaaatctagtacagcatttgatctttgttatgcacagcatacttttattttacagaataaattttcctgtgatagtcacaacaagacagctgtatagtttcttgagtcttttgtatggaccagtctctgtataatagttaactacaggactgtggatccagcaaatgttcagtaaatgctgctgttgttcttagggaaggctactctgggtgttgtggccgccatacatggctttacctgggtccatgcattcccttaagatgacttctgttttcttcttttttcttctgattttccaaaaaaaaaaagccttgcctaaggttggttttagaatatgatttgcagaacacttttgaaatgtcttcattcatatatgtaatatatatttatacttaaagggccatacgcgatttcaataaaacaagaagtactggaaagaataaacaaaaatagccagaagatgcctagaaaagaacaatgtggaaggagggataaccctattaaatattataacataatgtttacaatatgagaaagtctaggaatttagtacatgataaagcatctcattcagagaaaaaggctttaaaaatggtgttgagagaagtgtggttaaccatttggaaaaaaaaataaaattgaatcgatttctcacaggatacacaggataaaatctgaatagaacaaagacccaatttttaaaatgaaaccctctttctaactagaagaaaacatagatgaattattgtataatctgacagtgagaaaaactttcctaggactgaaaattcagaagcaataaaaagagaagtctatagaagaattttcagccagatggaatggctcatggctgtaatcccagcattttgggaggctgaggcagaaggactgcttgagaccaggaattcaaaaccaacctgggcaacctagtaggactggctctaccaaaaaaaaaaaaaaaaaaaaaattaagtacctggcctgggttccacctacttgggaggctgaggtaggaggactgtgagcccaggagtttgaggatgcagtaagccactgcactccagcctgggtgacagagaagaaaaaagatttttttggatagctgaaaatatttgcagcatttatcacagagggctaattgtagccctatatatgaagaattttaaactatgagaagaacccgaagaataggcaaaaggatgtgaacagacagttaacagaaaatagaatgcaaatggtctttaaacatacaaggatatgcataaaaagacaaatgcaaaataaaataaaataatggaaatacctttcttacctgtgagattggggaaaatccaagttaggcaatgcactctgttgagacaatagggaaacaggcactccaaaaattacaaatccctgtggatggtatttgttaactagcaaagttaaatgagtatatccttcaacctggcagacccagttctaagaatccatatgagatgcacttgcaagaatatgaaatagtatatgcacaaagatcttgattacagcactgtttctaatagctacagactggaagccagccaaatctccattgatagggaattgatggaaggaactagggtatatctatacaatgggatactacacagctgtagaaaggactgcgaactatttttgtagttctggtctggagaaatctccagaatataggaaatgaaaaatgtaaagcacagaagagaatgtatggtgtgctgtctgttgtataacgaagagacaaatggaaaaaatatgtatttgctttttttgtaaagcaatagaagaattagttataccaataactaataaaatgatctccttgttagtggtggtagggagctagacaaggatggcaactatttctgtatcttacataccttttattttgaggccctgtcaatgttttatataataaacattttttgaaaaggcaactcttaaaactaaaacaaacttaacagtctgtcaagttggtgatataaccccacagaagacttacttcaagtgacttgaaaacttagtattttgtctgtactttgctaatggaatatatcctacagaccaaacaaccacaaataaatcttaaactgcattcagtagtttta

SEQ ID NO: 323222 - DNA, 4580 bp, Homo sapiens
gaaaagctaaatatgaatgtgttttgatagaagtgacagtgcaatgcatactcattcccaaaaatcatacatcgtgattttctccttgccgttaaagtggtgagacagctttcaagaatatgactattccttatggatgggcaaaaaggccaatgctccagcgaattggtaaaatgcaccctgacattccagtttcagtgatctttggcgcccgatcctgcatagatggcaattctggcaccagcatccagtccttacgaccacattcatatgtgaagacaatagctattcttggggcaggacattatgtatatgcagatcaaccagaagaattcaaccagaaagtaaaggagatctgcgacactgtggactgaacacactgaagctctgatgggaaaacctggtgactgatatagttgttcagcaataattcatagtctgtgatgaagagtagtgaatacaacacacaaccaggcagccttcttgactatactttgcacatgttttctttaggaattcactcacacatttaaaccagttagtgccttctagaagaatggctttcctttctcctacacaaaattgaaatatacaagtctctaaatataatacctttaaataaaaggttatttgtccctctgatgtactgaaaaactgtaatttttcagctgaaaattttttaatctaactttgctagttatttttatattgcaatctatattaccaatttaggaagtgatttctgagtctcttacactgtaaaggtgcactttattttctttgtcttccccatcatgtatttattgtgtcttgataactgatattaatctaaattcaatgtgtttttatgtaaaaatttgtcagttgtttagaatatttcactttgtttttgaaacggagtgacaaggcagatttttggttagaggacgggagttgatcactatcattactttttctagtttacctgttttttatatttaaggctgctaagccatgttcagcattttaaatgtggtctatcctgacatacagtgtataacaacataactccttggaacctcctatgtgtggtataattctactcttccaaggaacatgacttcaatactttcagtgattcaggtactgaaaagccttacctaaaaggctgttctttgtttccccctttcatactattcttttccatgacccaggatgcagcaaatgaaacagatttcttctcttaaggggatattaagactgttacttcctagtaagccaagtaataccatatttttattaacatctaacttttgtagatgggtgctaaaattgcatacattttaaccactaaaatagaaaaacaagtggtgctattatgtctcatggcaccagaaatgagctagcacttgggtttgttgttgctgttgtttattaagagtattgtgttaattaaatcattacatacttgaagttatattacaaaaattctagaaggttgattgaactatttttttaggaactaccatcaagtgtagcattttcttgcagttttaaaatgaggaaaacttctttgaaactgtgaaatgctccatgtggtaactggctgctgagaaaacccttcaccaaaaaaataaataaaaattgaataggattgtcatcaagaaggcatctttcgctaacgttgcttgtctaggagaaaggtagctatgtaaataaaaacagtgaactagagcaaatagtggtttaatggttttgttattgcatttttaaaatggttaattagggaatttgtagttgttaggaaatgtaaggttgtgtcactgttgattaactgccagaaagactgaatgttctattttcaacatttctcccctataaaagaatagacaaattatactgaagcatgatataaacatcttcccaatgaacaatttgtctcacttgtcagattaactaggttagtgcaggaagcaacatgagcgccaagatgtgttgtctgatttctctaccttaagaacaataatagtctttttagttagtattttggatggccaggtttcaaacctgtatgtggtacaaataatttgggtaatatttttgtatttttgttttacacactctctaatctcaattatcctttgctgggagaatgacaggtttcacttatacaggaaggtttttgcacaggaaatttggtcccagcccttggaaggaagaagttccttcgtttacttagtgaatggagtttctggccgcagatgtgccaagtgattgaagaaagatataccccaatatcaagtgataatttattttcctacagactgaatttgctttatttgaaagatgttgtaactctttttaaagttagattttaccctgaggtatagtatatgtaattttgtgaagattgagctggaagggaagttcacaatcctcacatttaaaaaaatatagtgggtgctaaatgttttcttaaaaatctagtacagcatttgatctttgttatgcacagcatacttttattttacagaataaattttcctgtgatagtcacaacaagacagctgtatagtttcttgagtcttttgtatggaccagtctctgtataatagttaactacaggactgtggatccagcaaatgttcagtaaatgctgctgttgttcttagggaaggctactctgggtgttgtggccgccatacatggctttacctgggtccatgcattcccttaagatgacttctgttttcttcttttttcttctgattttccaaaaaaaaaaagccttgcctaaggttggttttagaatatgatttgcagaacacttttgaaatgtcttcattcatatatgtaatatatatttatacttaaagggccatacgcgatttcaataaaacaagaagtactggaaagaataaacaaaaatagccagaagatgcctagaaaagaacaatgtggaaggagggataaccctattaaatattataacataatgtttacaatatgagaaagtctaggaatttagtacatgataaagcatctcattcagagaaaaaggctttaaaaatggtgttgagagaagtgtggttaaccatttggaaaaaaaaataaaattgaatcgatttctcacaggatacacaggataaaatctgaatagaacaaagacccaatttttaaaatgaaaccctctttctaactagaagaaaacatagatgaattattgtataatctgacagtgagaaaaactttcctaggactgaaaattcagaagcaataaaaagagaagtctatagaagaattttcagccagatggaatggctcatggctgtaatcccagcattttgggaggctgaggcagaaggactgcttgagaccaggaattcaaaaccaacctgggcaacctagtaggactggctctaccaaaaaaaaaaaaaaaaaaaaaattaagtacctggcctgggttccacctacttgggaggctgaggtaggaggactgtgagcccaggagtttgaggatgcagtaagccactgcactccagcctgggtgacagagaagaaaaaagatttttttggatagctgaaaatatttgcagcatttatcacagagggctaattgtagccctatatatgaagaattttaaactatgagaagaacccgaagaataggcaaaaggatgtgaacagacagttaacagaaaatagaatgcaaatggtctttaaacatacaaggatatgcataaaaagacaaatgcaaaataaaataaaataatggaaatacctttcttacctgtgagattggggaaaatccaagttaggcaatgcactctgttgagacaatagggaaacaggcactccaaaaattacaaatccctgtggatggtatttgttaactagcaaagttaaatgagtatatccttcaacctggcagacccagttctaagaatccatatgagatgcacttgcaagaatatgaaatagtatatgcacaaagatcttgattacagcactgtttctaatagctacagactggaagccagccaaatctccattgatagggaattgatggaaggaactagggtatatctatacaatgggatactacacagctgtagaaaggactgcgaactatttttgtagttctggtctggagaaatctccagaatataggaaatgaaaaatgtaaagcacagaagagaatgtatggtgtgctgtctgttgtataacgaagagacaaatggaaaaaatatgtatttgctttttttgtaaagcaatagaagaattagttataccaataactaataaaatgatctccttgttagtggtggtagggagctagacaaggatggcaactatttctgtatcttacataccttttattttgaggccctgtcaatgttttatataataaacattttttgaaaaggcaactcttaaaactaaaacaaacttaacagtctgtcaagttggtgatataaccccacagaagacttacttcaagtgacttgaaaacttagtattttgtctgtactttgctaatggaatatatcctacagaccaaacaaccacaaataaatcttaaactgcattcagtagtttta

SEQ ID NO: 323223 - DNA, 1447 bp, Homo sapiens
agcgggagtgcgcggaagacgcatgcgctggcggcctgcgccgccttaagtgccgcgccagcccggggcggcccagtcggcctgtcagccggcttcgagataagtcccggcgcttgcgcggcggcggctatggcggcggaggaggaggaggtggactctgccgacaccggagagaggtcaggatggctaactggttggctccccacatggtgccctacgtctatatcacaccttaaagaagctgaagagaagatgttaaaatgtgtgccttgcacatacaaaaaagaacctgttcgtatatctaatggaaataaaatatggacactgaagttctctcataatatttcaaataagactccacttgtccttctccatggttttggaggaggtcttgggctctgggcactgaattttggagatctttgcaccaacagacctgtctatgcttttgacctattgggttttggacgaagtagtagacccaggtttgacagtgatgcagaagaagtggagaatcagtttgtggaatccattgaagagtggagatgtgccctaggattggacaaaatgatcttgcttgggcacaacctaggtggattcttggctgctgcttactcgctgaagtacccatcaagggttaatcatctcattttagtggagccttggggtttccctgaacgaccagaccttgctgatcaagacagaccaattccagtttggatcagagccttgggagcagcattgactccctttaaccctttagctggcctaaggattgcaggaccctttggtttaagtctagtgcagcgtttaaggcctgatttcaaacgaaagtattcttcaatgttcgaagacgatactgtgacagaatacatctaccactgtaatgtgcagactccaagtggtgagacagctttcaagaatatgactattccttatggatgggcaaaaaggccaatgctccagcgaattggtaaaatgcaccctgacattccagtttcagtgatctttggcgcccgatcctgcatagatggcaattctggcaccagcatccagtccttacgaccacattcatatgtgaagacaatagctattcttggggcaggacattatgtatatgcagatcaaccagaagaattcaaccagaaagtaaaggagatctgcgacactgtggactgaacacactgaagctctgatgggaaaacctggtgactgatatagttgttcagcaataattcatagtctgtgatgaagagtagtgaatacaacacacaaccaggcagccttcttgactatactttgcacatgttttctttaggaattcactcacacatttaaaccagttagtgccttctagaagaatggctttcctttctcctacacaaaattgaaatatacaagtctctaaatataatacctttaaataaaaggttatttgtccctctga

SEQ ID NO: 323224 - DNA, 1661 bp, Homo sapiens
tgattgcatttagactattcatttagactacctacttcataaacagccccaaatcgcgatcccgatataaaccatttaggtctaaatgcaatcatgattgcatttagaccagagaaaaaggctttaaaaatggtgttgagagaagtgtggttaaccatttggaaaaaaaaataaaattgaatcgatttctcacaggatacacaggataaaatctgaatagaacaaagacccaatttttaaaatgaaaccctctttctaactagaagaaaacatagatgaattattgtataatctgacagtgagaaaaactttcctaggactgaaaattcagaagcaataaaaagagaagtctatagaagaattttcagccagatggaatggctcatggctgtaatcccagcattttgggaggctgaggcagaaggactgcttgagaccaggaattcaaaaccaacctgggcaacctagtaggactggctctaccaaaaaaaaaaaaaaaaaaaaaattaagtacctggcctgggttccacctacttgggaggctgaggtaggaggactgtgagcccaggagtttgaggatgcagtaagccactgcactccagcctgggtgacagagaagaaaaaagatttttttggatagctgaaaatatttgcagcatttatcacagagggctaattgtagccctatatatgaagaattttaaactatgagaagaacccgaagaataggcaaaaggatgtgaacagacagttaacagaaaatagaatgcaaatggtctttaaacatacaaggatatgcataaaaagacaaatgcaaaataaaataaaataatggaaatacctttcttacctgtgagattggggaaaatccaagttaggcaatgcactctgttgagacaatagggaaacaggcactccaaaaattacaaatccctgtggatggtatttgttaactagcaaagttaaatgagtatatccttcaacctggcagacccagttctaagaatccatatgagatgcacttgcaagaatatgaaatagtatatgcacaaagatcttgattacagcactgtttctaatagctacagactggaagccagccaaatctccattgatagggaattgatggaaggaactagggtatatctatacaatgggatactacacagctgtagaaaggactgcgaactatttttgtagttctggtctggagaaatctccagaatataggaaatgaaaaatgtaaagcacagaagagaatgtatggtgtgctgtctgttgtataacgaagagacaaatggaaaaaatatgtatttgctttttttgtaaagcaatagaagaattagttataccaataactaataaaatgatctccttgttagtggtggtagggagctagacaaggatggcaactatttctgtatcttacataccttttattttgaggccctgtcaatgttttatataataaacattttttgaaaaggcaactcttaaaactaaaacaaacttaacagtctgtcaagttggtgatataaccccacagaagacttacttcaagtgacttgaaaacttagtattttgtctgtactttgctaatggaatatatcctacagaccaaacaaccacaaataaatcttaaactgcattcagtagtttta

SEQ ID NO: 323225 - DNA, 915 bp, Homo sapiens
agcgggagtgcgcggaagacgcatgcgctggcggcctgcgccgccttaagtgccgcgccagcccggggcggcccagtcggcctgtcagccggcttcgagataagtcccggcgcttgcgcggcggcggctatggcggcggaggaggaggaggtggactctgccgacaccggagagaggtcaggatggctaactggttggctccccacatggtgccctacgtctatatcacaccttaaagaagctgaagagaagatgttaaaatgtgtgccttgcacatacaaaaaagaacctgttcgtatatctaatggaaataaaatatggacactgaagttctctcataatatttcaaataagactccacttgtccttctccatggttttggaggaggtcttgggctctgggcactgaattttggagatctttgcaccaacagacctgtctatgcttttgacctattgggttttggacgaagtagtagacccaggtttgacagtgatgcagaagaagtggagaatcagtttgtggaatccattgaagagtggagatgtgccctaggattggacaaaatgatcttgcttgggcacaacctaggtggattcttggctgctgcttactcgctgaagtacccatcaaggtaagtggtggtgacagaagagagggattataactgtgcttccaagtaccagactctagttcccatctttggtggttgttagtgtctgagccacaaggcagacattctcttaaaggaccctatagaccacaccacaactgatgaccaatatagtagctgaaataatcatgtcagatcttcctattacacgtactacatgttaataggcttgggaaaggggtttctatttgttaagcttagaattgtagaaactttaatgtataattttaagccacaagta

SEQ ID NO: 323226 - DNA, 844 bp, Homo sapiens
aaatttaatttcatttttaggcaatttttgggagtgtttaaagtatttagttccacaacattaaaggtaaaaaagagttttggtctataaaattgtgactatttgctttttctaggagattactagagttggacccaagttacctggtgtgtcatgctgaggagttcctacaatactttgtcaacctttttttgaaatgacttaaggtttcacttacatgtttaacatagataccagtaatccttccctaaattcatgactactttttaaggaaaaatgatgcctttaagcctgacttcaactcaaagttaaccaaagaataccaccttgaaattgtagaacacctgacagtattctacaaattctctgcaaagctagagaccttaaaataatgggttcggtaaccactaagttccttttcacttctaggagtataataccctcatttgacagatgtggaaagaagttagaaggtaatatgacttgccaaagaccttgatcacaggttacttgaggtttgtctgaggtaggtcttcccctttaggtgtaaaacatggtcatttaggattatttacttcaataaaatgtgtactttttaaaaatagctgacaatacaagctaaaatcatgagattggatactagatgatttgtaatttttggttgctctgagaatacttcccttctcagaagtaataaaatgaaacagaatttctcttttatgttttcattaggtgtgccttgcacatacaaaaaagaacctgttcgtatatctaatggaaataaaatatggacactgaagttctctcataatatttcaaataagactccacttgtccttctcca

SEQ ID NO: 323227 - DNA, 1349 bp, Homo sapiens
agcgggagtgcgcggaagacgcatgcgctggcggcctgcgccgccttaagtgccgcgccagcccggggcggcccagtcggcctgtcagccggcttcgagataagtcccggcgcttgcgcggcggcggctatggcggcggaggaggaggaggtggactctgccgacaccggagagaggtcaggatggctaactggttggctccccacatggtgccctacgtctatatcacaccttaaagaagctgaagagaagatgttaaaatgtgtgccttgcacatacaaaaaagaacctgttcgtatatctaatggaaataaaatatggacactgaagttctctcataatatttcaaataagactccacttgtccttctccatggttttggaggaggtcttgggctctgggcactgaattttggagatctttgcaccaacagacctgtctatgcttttgacctattgggttttggacgaagtagtagacccaggtttgacagtgatgcagaagaagtggagaatcagtttgtggaatccattgaagagtggagatgtgccctaggattggacaaaatgatcttgcttgggcacaacctaggtggattcttggctgctgcttactcgctgaagtacccatcaagggttaatcatctcattttagtggagccttggggtttccctgaacgaccagaccttgctgatcaagacagaccaattccagtttggatcagagccttgggagcagcattgactccctttaaccctttagctggcctaaggattgcaggaccctttggtttaagtctagtgcagcgtttaaggcctgatttcaaacgaaagtattcttcaatgttcgaagacgatactgtgacagaatacatctaccactgtaatgtgcagactccaagcagtgatctttggcgcccgatcctgcatagatggcaattctggcaccagcatccagtccttacgaccacattcatatgtgaagacaatagctattcttggggcaggacattatgtatatgcagatcaaccagaagaattcaaccagaaagtaaaggagatctgcgacactgtggactgaacacactgaagctctgatgggaaaacctggtgactgatatagttgttcagcaataattcatagtctgtgatgaagagtagtgaatacaacacacaaccaggcagccttcttgactatactttgcacatgttttctttaggaattcactcacacatttaaaccagttagtgccttctagaagaatggctttcctttctcctacacaaaattgaaatatacaagtctctaaatataatacctttaaataaaaggttatttgtccctctga

SEQ ID NO: 323228 - DNA, 2192 bp, Homo sapiens
gaattccggttctcactcttgacgttgtccagctccagcaccttggcaactcccccagcttggacggccggcccgccgctccatgggggagtcatctgagctggccgcagtctgacaggaaagggacggagccaagatggcggcggccgacggcgacgactcgctgtaccccatcgcggtgctcatagacgaactccgcaatgaggacgttcagcttcgcctcaacagcatcaagaagctgtccaccatcgccttggcccttggggttgaaaggacccgaagtgagcttctgcctttccttacagataccatctatgatgaagatgaggtcctcctggccctggcagaacagctgggaaccttcactaccctggtgggaggcccagagtacgtgcactgcctgctgccaccgctggagtcgctggccacagtggaggagacagtggtgcgggacaaggcagtggagtccttacgggccatctcacacgagcactcgccctctgacctggaggcgcactttgtgccgctagtgaagcggctggcgggcggcgactggttcacctcccgcacctcggcctgcggcctcttctccgtctgctacccccgagtgtccagtgctgtgaaggcggaacttcgacagtacttccggaacctgtgctcagatgacacccccatggtgcggcgggccgcagcctccaagctgggggagtttgccaaggtgctggagctggacaacgtcaagagtgagatcatccccatgttctccaacctggcctctgacgagcaggactcggtgcggctgctggcggtggaggcgtgcgtgaacatcgcccagcttctgccccaggaggatctggaggccctggtgatgcccactctgcgccaggccgctgaagacaagtcctggcgcgtccgctacatggtggctgacaagttcacagagctccagaaagcagtggggcctgagatcaccaagacagacctggtccctgccttccagaacctgatgaaagactgtgaggccgaggtgagggccgcagcctcccacaaggtcaaagagttctgtgaaaacctctcagctgactgtcgggagaatgtgatcatgtcccagatcttgccctgcatcaaggagctggtgtccgatgccaaccaacatgtcaagtctgccctggcctcagtcatcatgggtctctctcccatcttgggcaaagacaacaccatcgagcacctcttgcccctcttcctggctcagctgaaggatgagtgccctgaggtacggctgaacatcatctctaacctggactgtgtgaacgaggtgattggcatccggcagctgtcccagtccctgctccctgccattgtggagctggctgaggacgccaagtggcgggtgcggctggccatcattgagtacatgcccctcctggctggacagctgggagtggagttctttgatgagaaacttaactccttgtgcatggcctggcttgtggatcatgtatatgccatccgcgaggcagccaccagcaacctgaagaagctagtggaaaagtttgggaaggagtgggcccatgccacaatcatccccaaggtcttggccatgtccggagaccccaactacctgcaccgcatgactacgctcttctgcatcaatgtgctgtctgaggtctgtgggcaggacatcaccaccaagcacatgctacccacggttctgcgcatggctggggacccggttgccaatgtccgcttcaatgtggccaagtctctgcagaagatagggcccatcctggacaacagcaccttgcagagtgaagtcaagcccatcctagagaagctgacccaggaccaggatgtggacgtcaaatactttgcccaggaggctctgactgttctgtctctcgcctgatgctggaagaggagcaaacactggcctctggtgtccaccctccaacccccacaagtccctctttggggagacactggggggcctttggctgtcactccctgtgcatggtctgaccccaggccccttcccccagcacggttcctcctctccccagcctgggaagatgtctcactgtccacctcccaacgggctaggggagcacggggttggacaggacagtgaccttgggaggaaggggctacatccttaaaagccatggagccggaggtggcaattcaccgaattc

SEQ ID NO: 323229 - DNA, 994 bp, Homo sapiens
aataggctaggtacgaggctgggtttgaatcggccgctggccgcagtctgacaggaaagggacggagccaagatggcggcggccgacggcgacgactcgctgtaccccatcgcggtgctcatagacgaactccgcaatgaggacgttcagcttcgcctcaacagcatcaagaagctgtccaccatcgccttggcccttggggttgaaaggacccgaagtgagcttctgcctttccttacagataccatctatgatgaagatgaggtcctcctggccctggcagaacagctgggaaccttcactaccctggtgggaggcccagagtacgtgcactgcctgctgccaccgctggagtcgctggccacagtggaggagacagtggtgcgggacaaggcagtggagtccttacgggccatctcacacgagcactcgccctctgacctggaggcgcactttgtgccgctagtgaagcggctggcgggcggcgactggttcacctcccgcacctcggcctgcggcctcttctccgtctgctacccccgagtgtccagtgctgtgaaggcggaacttcgacagtacttccggaacctgtgctcagatgacacccccatggtgcggcgggccgcagcctccaagctgggggagtttgccaaggtgctggagctggacaacgtcaagagtgagatcatccccatgttctccaacctggcctctgacgagcaggactcggtgcggctgctggcggtggaggcgtgcgtgaacatcgcccagcttctgccccaggaggatctggaggccctggtgatgcccactctgcgccaggccgctgaagagtaatgggtgcagtccgagtccgaaggtgggctggtccagaagactgtctgctcgactgtagattggggcggggggggctccaggtgagtgggctccggggggatgtttgccctccgcggggggcccacgttgtggcgctggtcctggagagccgcggggg

SEQ ID NO: 323230 - DNA, 533 bp, Homo sapiens
  misc_feature (16)..(16): n is a, c, g, or t
  misc_feature (23)..(23): n is a, c, g, or t
  misc_feature (25)..(26): n is a, c, g, or t
  misc_feature (37)..(37): n is a, c, g, or t
  misc_feature (44)..(44): n is a, c, g, or t
  misc_feature (49)..(50): n is a, c, g, or t
  misc_feature (63)..(63): n is a, c, g, or t
  misc_feature (74)..(74): n is a, c, g, or t
gctgactgagctgtcntgtcagntnntgtatataccntcctcgntgcannatccaacgtcttnaagatccgcgnggcaaagtacgggccggcgttttaccatgccacaatcatccccaaggtcttggccatgtccggagaccccaactacctgcaccgcatgactacgctcttctgcatcaatgtgctgtctgaggtctgtgggcaggacatcaccaccaagcacatgctacccacggttctgcgcatggctggggacccggttgccaatgtccgcttcaatgtggcgtctgtccggacagacgccacgtccaccgactgaccggcattgcgcccggtaccagcgttcgataggtcgccggtacggatggcggatggcgcagaaccggcgatcccattcatcgccggcgcaacagattcggcatccagccgatgccttgtgcatgcaggctctggatgtataaccgctccggcgtatcggtcacgccggtggtttccggatatttgccgccgggtcctgcggtcccgtgtata

SEQ ID NO: 323231 - DNA, 2466 bp, Homo sapiens
gtggagcagcccctgtaaactggctcgggcgcccccacgcccgcccttccttcttctcccagcattgcccccccccacgtttcagcacagcgctggccgcagtctgacaggaaagggacggagccaagatggcggcggccgacggcgacgactcgctgtaccccatcgcggtgctcatagacgaactccgcaatgaggacgttcagcttcgcctcaacagcatcaagaagctgtccaccatcgccttggcccttggggttgaaaggacccgaagtgagcttctgcctttccttacagataccatctatgatgaagatgaggtcctcctggccctggcagaacagctgggaaccttcactaccctggtgggaggcccagagtacgtgcactgcctgctgccaccgctggagtcgctggccacagtggaggagacagtggtgcgggacaaggcagtggagtccttacgggccatctcacacgagcactcgccctctgacctggaggcgcactttgtgccgctagtgaagcggctggcgggcggcgactggttcacctcccgcacctcggcctgcggcctcttctccgtctgctacccccgagtgtccagtgctgtgaaggcggaacttcgacagtacttccggaacctgtgctcagatgacacccccatggtgcggcgggccgcagcctccaagctgggggagtttgccaaggtgctggagctggacaacgtcaagagtgagatcatccccatgttctccaacctggcctctgacgagcaggactcggtgcggctgctggcggtggaggcgtgcgtgaacatcgcccagcttctgccccaggaggatctggaggccctggtgatgcccactctgcgccaggccgctgaagacaagtcctggcgcgtccgctacatggtggctgacaagttcacagagctccagaaagcagtggggcctgagatcaccaagacagacctggtccctgccttccagaacctgatgaaagactgtgaggccgaggtgagggccgcagcctcccacaaggtcaaagagttctgtgaaaacctctcagctgactgtcgggagaatgtgatcatgtcccagatcttgccctgcatcaaggagctggtgtccgatgccaaccaacatgtcaagtctgccctggcctcagtcatcatgggtctctctcccatcttgggcaaagacaacaccatcgagcacctcttgcccctcttcctggctcagctgaaggatgagtgccctgaggtacggctgaacatcatctctaacctggactgtgtgaacgaggtgattggcatccggcagctgtcccagtccctgctccctgccattgtggagctggctgaggacgccaagtggcgggtgcggctggccatcattgagtacatgcccctcctggctggacagctgggagtggagttctttgatgagaaacttaactccttgtgcatggcctggcttgtggatcatgtatatgccatccgcgaggcagccaccagcaacctgaagaagctagtggaaaagtttgggaaggagtgggcccatgccacaatcatccccaaggtcttggccatgtccggagaccccaactacctgcaccgcatgactacgctcttctgcatcaatgtgctgtctgaggtctgtgggcaggacatcaccaccaagcacatgctacccacggttctgcgcatggctggggacccggttgccaatgtccgcttcaatgtggccaagtctctgcagaagatagggcccatcctggacaacagcaccttgcagagtgaagtcaagcccatcctagagaagctgacccaggaccaggatgtggacgtcaaatactttgcccaggaggctctgactgttctgtctctcgcctgatgctggaagaggagcaaacactggcctctggtgtccaccctccaacccccacaagtccctctttggggagacactggggggcctttggctgtcactccctgtgcatggtctgaccccaggccccttcccccagcacggttcctcctctccccagcctgggaagatgtctcactgtccacctcccaacgggctaggggagcacggggttggacaggacagtgaccttgggaggaaggggctactccgcccacgtcagggagagatgtgagcatcccgggtcactggatcctgctgctgtaatgggaacccctcccccatttacttctccacctcccgtcctccccatcattggtttttttttgtgtgtcaactgtgccgtttttattttattccttttattttcccccttttcacagagaaataaaggtctagaagtaaaaaaaaaaaaaaagaaagaaaaacaaaaaaaaggggggggggagaaaaaagaatcaccaagagagggggcaaattacagggcaaaccacttttgtggaaaaaaggggaccatatagagagaaggaagaaa

SEQ ID NO: 323232 - DNA, 2263 bp, Homo sapiens
gtggagcagcccctgtaaactggctcgggcgcccccacgcccgcccttccttcttctcccagcattgcccccccccacgtttcagcacagcgctggccgcagtctgacaggaaagggacggagccaagatggcggcggccgacggcgacgactcgctgtaccccatcgcggtgctcatagacgaactccgcaatgaggacgttcagcttcgcctcaacagcatcaagaagctgtccaccatcgccttggcccttggggttgaaaggacccgaagtgagcttctgcctttccttacagataccatctatgatgaagatgaggtcctcctggccctggcagaacagctgggaaccttcactaccctggtgggaggcccagagtacgtgcactgcctgctgccaccgctggagtcgctggccacagtggaggagacagtggtgcgggacaaggcagtggagtccttacgggccatctcacacgagcactcgccctctgacctggaggcgcactttgtgccgctagtgaagcggctggcgggcggcgactggttcacctcccgcacctcggcctgcggcctcttctccgtctgctacccccgagtgtccagtgctgtgaaggcggaacttcgacagtacttccggaacctgtgctcagatgacacccccatggtgcggcgggccgcagcctccaagctgggggagtttgccaaggtgctggagctggacaacgtcaagagtgagatcatccccatgttctccaacctggcctctgacgagcaggactcggtgcggctgctggcggtggaggcgtgcgtgaacatcgcccagcttctgccccaggaggatctggaggccctggtgatgcccactctgcgccaggccgctgaagacaagtcctggcgcgtccgctacatggtggctgacaagttcacagagctccagaaagcagtggggcctgagatcaccaagacagacctggtccctgccttccagaacctgatgaaagactgtgaggccgaggtgagggccgcagcctcccacaaggtcaaagagttctgtgaaaacctctcagctgactgtcgggagaatgtgatcatgtcccagatcttgccctgcatcaaggagctggtgtccgatgccaaccaacatgtcaagtctgccctggcctcagtcatcatgggtctctctcccatcttgggcaaagacaacaccatcgagcacctcttgcccctcttcctggctcagctgaaggatgagtgccctgaggtacggctgaacatcatctctaacctggactgtgtgaacgaggtgattggcatccggcagctgtcccagtccctgctccctgccattgtggagctggctgaggacgccaagtggcgggtgcggctggccatcattgagtacatgcccctcctggctggacagctgggagtggagttctttgatgagaaacttaactccttgtgcatggcctggcttgtggatcatgtatatgccatccgcgaggcagccaccagcaacctgaagaagctagtggaaaagtttgggaaggagtgggcccatgccacaatcatccccaaggtcttggccatgtccggagaccccaactacctgcaccgcatgactacgctcttctgcatcaatgtgctgtctgaggtctgtgggcaggacatcaccaccaagcacatgctacccacggttctgcgcatggctggggacccggttgccaatgtccgcttcaatgtggccaagtctctgcagaagatagggcccatcctggacaacagcaccttgcagagtgaagtcaagcccatcctagagaagctgacccaggaccaggatgtggacgtcaaatactttgcccaggaggctctgactgttctgtctctcgcctgatgctggaagaggagcaaacactggcctctggtgtccaccctccaacccccacaagtccctctttggggagacactggggggcctttggctgtcactccctgtgcatggtctgaccccaggccccttcccccagcacggttcctcctctccccagcctgggaagatgtctcactgtccacctcccaacgggctaggggagcacggggttggacaggacagtgaccttgggaggaaggggctaccaaaccggccagtcacgagagaattagcatccggtacaggacccgcggggaaggaaacctcccaataaattaaacccggacccaaaaagggaaaagggcggcgcatatcacctctcccctcgc

SEQ ID NO: 323233 - DNA, 2276 bp, Homo sapiens
ggctaggagaggccgtgggtgaatcggccgaggctggccgcagtctgacaggaaagggacggagccaagatggcggcggccgacggcgacgactcgctgtaccccatcgcggtgctcatagacgaactccgcaatgaggacgttcagcttcgcctcaacagcatcaagaagctgtccaccatcgccttggcccttggggttgaaaggacccgaagtgagcttctgcctttccttacagataccatctatgatgaagatgaggtcctcctggccctggcagaacagctgggaaccttcactaccctggtgggaggcccagagtacgtgcactgcctgctgccaccgctggagtcgctggccacagtggaggagacagtggtgcgggacaaggcagtggagtccttacgggccatctcacacgagcactcgccctctgacctggaggcgcactttgtgccgctagtgaagcggctggcgggcggcgactggttcacctcccgcacctcggcctgcggcctcttctccgtctgctacccccgagtgtccagtgctgtgaaggcggaacttcgacagtacttccggaacctgtgctcagatgacacccccatggtgcggcgggccgcagcctccaagctgggggagtttgccaaggtgctggagctggacaacgtcaagagtgagatcatccccatgttctccaacctggcctctgacgagcaggactcggtgcggctgctggcggtggaggcgtgcgtgaacatcgcccagcttctgccccaggaggatctggaggccctggtgatgcccactctgcgccaggccgctgaagacaagtcctggcgcgtccgctacatggtggctgacaagttcacagagctccagaaagcagtggggcctgagatcaccaagacagacctggtccctgccttccagaacctgatgaaagactgtgaggccgaggtgagggccgcagcctcccacaaggtcaaagagttctgtgaaaacctctcagctgactgtcgggagaatgtgatcatgtcccagatcttgccctgcatcaaggagctggtgtccgatgccaaccaacatgtcaagtctgccctggcctcagtcatcatgggtctctctcccatcttgggcaaagacaacaccatcgagcacctcttgcccctcttcctggctcagctgaaggatgagtgccctgaggtacggctgaacatcatctctaacctggactgtgtgaacgaggtgattggcatccggcagctgtcccagtccctgctccctgccattgtggagctggctgaggacgccaagtggcgggtgcggctggccatcattgagtacatgcccctcctggctggacagctgggagtggagttctttgatgagaaacttaactccttgtgcatggcctggcttgtggatcatgtatatgccatccgcgaggcagccaccagcaacctgaagaagctagtggaaaagtttgggaaggagtgggcccatgccacaatcatccccaaggtcttggccatgtccggagaccccaactacctgcaccgcatgactacgctcttctgcatcaatgtgctgtctgaggtctgtgggcaggacatcaccaccaagcacatgctacccacggttctgcgcatggctggggacccggttgccaatgtccgcttcaatgtggccaagtctctgcagaagatagggcccatcctggacaacagcaccttgcagagtgaagtcaagcccatcctagagaagctgacccaggaccaggatgtggacgtcaaatactttgcccaggaggctctgactgttctgtctctcgcctgatgctggaagaggagcaaacactggcctctggtgtccaccctccaacccccacaagtccctctttggggagacactggggggcctttggctgtcactccctgtgcatggtctgaccccaggccccttcccccagcacggttcctcctctccccagcctgggaagatgtctcactgtccacctcccaacgggctaggggagcacggggttggacaggacagtgaccttgggaggaaggggctactccgcccacgtcagggagagatgtgagcatcccgggtcactggatcctgctgctgtaatgggaacccctcccccatttacttctccacctcccgtcctccccatcattggtttttttttgtgtgtcaactgtgccgtttttattttattccttttattttcccccttttcacagagaaataaaggtctagaagta

SEQ ID NO: 323234 - DNA, 2324 bp, Homo sapiens
aaacagcaacaacacgcacaacacccgtcgaagcattatcatggtcggtcctggtttattcggtcgaggagtgctttcgtgctggccgcagtctgacaggaaagggacggagccaagatggcggcggccgacggcgacgactcgctgtaccccatcgcggtgctcatagacgaactccgcaatgaggacgttcagcttcgcctcaacagcatcaagaagctgtccaccatcgccttggcccttggggttgaaaggacccgaagtgagcttctgcctttccttacagataccatctatgatgaagatgaggtcctcctggccctggcagaacagctgggaaccttcactaccctggtgggaggcccagagtacgtgcactgcctgctgccaccgctggagtcgctggccacagtggaggagacagtggtgcgggacaaggcagtggagtccttacgggccatctcacacgagcactcgccctctgacctggaggcgcactttgtgccgctagtgaagcggctggcgggcggcgactggttcacctcccgcacctcggcctgcggcctcttctccgtctgctacccccgagtgtccagtgctgtgaaggcggaacttcgacagtacttccggaacctgtgctcagatgacacccccatggtgcggcgggccgcagcctccaagctgggggagtttgccaaggtgctggagctggacaacgtcaagagtgagatcatccccatgttctccaacctggcctctgacgagcaggactcggtgcggctgctggcggtggaggcgtgcgtgaacatcgcccagcttctgccccaggaggatctggaggccctggtgatgcccactctgcgccaggccgctgaagacaagtcctggcgcgtccgctacatggtggctgacaagttcacagagctccagaaagcagtggggcctgagatcaccaagacagacctggtccctgccttccagaacctgatgaaagactgtgaggccgaggtgagggccgcagcctcccacaaggtcaaagagttctgtgaaaacctctcagctgactgtcgggagaatgtgatcatgtcccagatcttgccctgcatcaaggagctggtgtccgatgccaaccaacatgtcaagtctgccctggcctcagtcatcatgggtctctctcccatcttgggcaaagacaacaccatcgagcacctcttgcccctcttcctggctcagctgaaggatgagtgccctgaggtacggctgaacatcatctctaacctggactgtgtgaacgaggtgattggcatccggcagctgtcccagtccctgctccctgccattgtggagctggctgaggacgccaagtggcgggtgcggctggccatcattgagtacatgcccctcctggctggacagctgggagtggagttctttgatgagaaacttaactccttgtgcatggcctggcttgtggatcatgtatatgccatccgcgaggcagccaccagcaacctgaagaagctagtggaaaagtttgggaaggagtgggcccatgccacaatcatccccaaggtcttggccatgtccggagaccccaactacctgcaccgcatgactacgctcttctgcatcaatgtgctgtctgaggtctgtgggcaggacatcaccaccaagcacatgctacccacggttctgcgcatggctggggacccggttgccaatgtccgcttcaatgtggccaagtctctgcagaagatagggcccatcctggacaacagcaccttgcagagtgaagtcaagcccatcctagagaagctgacccaggaccaggatgtggacgtcaaatactttgcccaggaggctctgactgttctgtctctcgcctgatgctggaagaggagcaaacactggcctctggtgtccaccctccaacccccacaagtccctctttggggagacactggggggcctttggctgtcactccctgtgcatggtctgaccccaggccccttcccccagcacggttcctcctctccccagcctgggaagatgtctcactgtccacctcccaacgggctaggggagcacggggttggacaggacagtgaccttgggaggaaggggctactccgcccacgtcagggagagatgtgagcatcccgggtcactggatcctgctgctgtaatgggaacccctcccccatttacttctccacctcccgtcctccccatcattggtttttttttgtgtgtcaactgtgccgtttttattttattccttttattttcccccttttcacagagaaataaaggtctagaagta

SEQ ID NO: 323235 - DNA, 2279 bp, Homo sapiens
aataggctaggtacgaggctgggtttgaatcggccgctggccgcagtctgacaggaaagggacggagccaagatggcggcggccgacggcgacgactcgctgtaccccatcgcggtgctcatagacgaactccgcaatgaggacgttcagcttcgcctcaacagcatcaagaagctgtccaccatcgccttggcccttggggttgaaaggacccgaagtgagcttctgcctttccttacagataccatctatgatgaagatgaggtcctcctggccctggcagaacagctgggaaccttcactaccctggtgggaggcccagagtacgtgcactgcctgctgccaccgctggagtcgctggccacagtggaggagacagtggtgcgggacaaggcagtggagtccttacgggccatctcacacgagcactcgccctctgacctggaggcgcactttgtgccgctagtgaagcggctggcgggcggcgactggttcacctcccgcacctcggcctgcggcctcttctccgtctgctacccccgagtgtccagtgctgtgaaggcggaacttcgacagtacttccggaacctgtgctcagatgacacccccatggtgcggcgggccgcagcctccaagctgggggagtttgccaaggtgctggagctggacaacgtcaagagtgagatcatccccatgttctccaacctggcctctgacgagcaggactcggtgcggctgctggcggtggaggcgtgcgtgaacatcgcccagcttctgccccaggaggatctggaggccctggtgatgcccactctgcgccaggccgctgaagacaagtcctggcgcgtccgctacatggtggctgacaagttcacagagctccagaaagcagtggggcctgagatcaccaagacagacctggtccctgccttccagaacctgatgaaagactgtgaggccgaggtgagggccgcagcctcccacaaggtcaaagagttctgtgaaaacctctcagctgactgtcgggagaatgtgatcatgtcccagatcttgccctgcatcaaggagctggtgtccgatgccaaccaacatgtcaagtctgccctggcctcagtcatcatgggtctctctcccatcttgggcaaagacaacaccatcgagcacctcttgcccctcttcctggctcagctgaaggatgagtgccctgaggtacggctgaacatcatctctaacctggactgtgtgaacgaggtgattggcatccggcagctgtcccagtccctgctccctgccattgtggagctggctgaggacgccaagtggcgggtgcggctggccatcattgagtacatgcccctcctggctggacagctgggagtggagttctttgatgagaaacttaactccttgtgcatggcctggcttgtggatcatgtatatgccatccgcgaggcagccaccagcaacctgaagaagctagtggaaaagtttgggaaggagtgggcccatgccacaatcatccccaaggtcttggccatgtccggagaccccaactacctgcaccgcatgactacgctcttctgcatcaatgtgctgtctgaggtctgtgggcaggacatcaccaccaagcacatgctacccacggttctgcgcatggctggggacccggttgccaatgtccgcttcaatgtggccaagtctctgcagaagatagggcccatcctggacaacagcaccttgcagagtgaagtcaagcccatcctagagaagctgacccaggaccaggatgtggacgtcaaatactttgcccaggaggctctgactgttctgtctctcgcctgatgctggaagaggagcaaacactggcctctggtgtccaccctccaacccccacaagtccctctttggggagacactggggggcctttggctgtcactccctgtgcatggtctgaccccaggccccttcccccagcacggttcctcctctccccagcctgggaagatgtctcactgtccacctcccaacgggctaggggagcacggggttggacaggacagtgaccttgggaggaaggggctactccgcccacgtcagggagagatgtgagcatcccgggtcactggatcctgctgctgtaatgggaacccctcccccatttacttctccacctcccgtcctccccatcattggtttttttttgtgtgtcaactgtgccgtttttattttattccttttattttcccccttttcacagagaaataaaggtctagaagta

SEQ ID NO: 323236 - DNA, 2491 bp, Homo sapiens
gtggagcagcccctgtaaactggctcgggcgcccccacgcccgcccttccttcttctcccagcattgcccccccccacgtttcagcacagcgctggccgcagtctgacaggaaagggacggagccaagatggcggcggccgacggcgacgactcgctgtaccccatcgcggtgctcatagacgaactccgcaatgaggacgttcagcttcgcctcaacagcatcaagaagctgtccaccatcgccttggcccttggggttgaaaggacccgaagtgagcttctgcctttccttacagataccatctatgatgaagatgaggtcctcctggccctggcagaacagctgggaaccttcactaccctggtgggaggcccagagtacgtgcactgcctgctgccaccgctggagtcgctggccacagtggaggagacagtggtgcgggacaaggcagtggagtccttacgggccatctcacacgagcactcgccctctgacctggaggcgcactttgtgccgctagtgaagcggctggcgggcggcgactggttcacctcccgcacctcggcctgcggcctcttctccgtctgctacccccgagtgtccagtgctgtgaaggcggaacttcgacagtacttccggaacctgtgctcagatgacacccccatggtgcggcgggccgcagcctccaagctgggggagtttgccaaggtgctggagctggacaacgtcaagagtgagatcatccccatgttctccaacctggcctctgacgagcaggactcggtgcggctgctggcggtggaggcgtgcgtgaacatcgcccagcttctgccccaggaggatctggaggccctggtgatgcccactctgcgccaggccgctgaagacaagtcctggcgcgtccgctacatggtggctgacaagttcacagagctccagaaagcagtggggcctgagatcaccaagacagacctggtccctgccttccagaacctgatgaaagactgtgaggccgaggtgagggccgcagcctcccacaaggtcaaagagttctgtgaaaacctctcagctgactgtcgggagaatgtgatcatgtcccagatcttgccctgcatcaaggagctggtgtccgatgccaaccaacatgtcaagtctgccctggcctcagtcatcatgggtctctctcccatcttgggcaaagacaacaccatcgagcacctcttgcccctcttcctggctcagctgaaggatgagtgccctgaggtacggctgaacatcatctctaacctggactgtgtgaacgaggtgattggcatccggcagctgtcccagtccctgctccctgccattgtggagctggctgaggacgccaagtggcgggtgcggctggccatcattgagtacatgcccctcctggctggacagctgggagtggagttctttgatgagaaacttaactccttgtgcatggcctggcttgtggatcatgtatatgccatccgcgaggcagccaccagcaacctgaagaagctagtggaaaagtttgggaaggagtgggcccatgccacaatcatccccaaggtcttggccatgtccggagaccccaactacctgcaccgcatgactacgctcttctgcatcaatgtgctgtctgaggtctgtgggcaggacatcaccaccaagcacatgctacccacggttctgcgcatggctggggacccggttgccaatgtccgcttcaatgtggccaagtctctgcagaagatagggcccatcctggacaacagcaccttgcagagtgaagtcaagcccatcctagagaagctgacccaggaccaggatgtggacgtcaaatactttgcccaggaggctctgactggtaagacctagaaagcacggagccctagcaggagggtggactttgaggacaggcactgggcctgtgggcagcagcttctgggagggggaggtaccttggcattgtgggcagagagagggctctggttctgattcttgcctgttcctgttttcctagttctgtctctcgcctgatgctggaagaggagcaaacactggcctctggtgtccaccctccaacccccacaagtccctctttggggagacactggggggcctttggctgtcactccctgtgcatggtctgaccccaggccccttcccccagcacggttcctcctctccccagcctgggaagatgtctcactgtccacctcccaacgggctaggggagcacggggttggacaggacagtgaccttgggaggaaggggctactccgcccacgtcagggagagatgtgagcatcccgggtcactggatcctgctgctgtaatgggaacccctcccccatttacttctccacctcccgtcctccccatcattggtttttttttgtgtgtcaactgtgccgtttttattttattccttttattttcccccttttcacagagaaataaaggtctagaagta

SEQ ID NO: 323237 - DNA, 1963 bp, Homo sapiens
gtggagcagcccctgtaaactggctcgggcgcccccacgcccgcccttccttcttctcccagcattgcccccccccacgtttcagcacagcgctggccgcagtctgacaggaaagggacggagccaagatggcggcggccgacggcgacgactcgctgtaccccatcgcggtgctcatagacgaactccgcaatgaggacgttcagcttcgcctcaacagcatcaagaagctgtccaccatcgccttggcccttggggttgaaaggacccgaagtgagcttctgcctttccttacagataccatctatgatgaagatgaggtcctcctggccctggcagaacagctgggaaccttcactaccctggtgggaggcccagagtacgtgcactgcctgctgccaccgctggagtcgctggccacagtggaggagacagtggtgcgggacaaggcagtggagtccttacgggccatctcacacgagcactcgccctctgacctggaggcgcactttgtgccgctagtgaagcggctggcgggcggcgactggttcacctcccgcacctcggcctgcggcctcttctccgtctgctacccccgagtgtccagtgctgtgaaggcggaacttcgacagtacttccggaacctgtgctcagatgacacccccatggtgcggcgggccgcagcctccaagctgggggagtttgccaaggtgctggagctggacaacgtcaagagtgagatcatccccatgttctccaacctggcctctgacgagcaggactcggtgcggctgctggcggtggaggcgtgcgtgaacatcgcccagcttctgccccaggaggatctggaggccctggtgatgcccactctgcgccaggccgctgaagacaagtcctggcgcgtccgctacatggtggctgacaagttcacagagctccagaaagcagtggggcctgagatcaccaagacagacctggtccctgccttccagaacctgatgaaagactgtgaggccgaggtgagggccgcagcctcccacaaggtcaaagagttctgtgaaaacctctcagctgactgtcgggagaatgtgatcatgtcccagatcttgccctgcatcaaggagctggtgtccgatgccaaccaacatgtcaagtctgccctggcctcagtcatcatgggtctctctcccatcttgggcaaagacaacaccatcgagcacctcttgcccctcttcctggctcagctgaaggatgagtgccctgaggtacggctgaacatcatctctaacctggactgtgtgaacgaggtgattggcatccggcagctgtcccagtccctgctccctgccattgtggagctggctgaggacgccaagtggcgggtgcggctggccatcattgagtacatgcccctcctggctggacagctgggagtggagttctttgatgagaaacttaactccttgtgcatggcctggcttgtggatcatgtatatgccatccgcgaggcagccaccagcaacctgaagaagctagtggaaaagtttgggaaggagtgggcccatgccacaatcatccccaaggtcttggccatgtccggagaccccaactacctgcaccgcatgactacgctcttctgcatcaatgtgctgtctgaggtctgtgggcaggacatcaccaccaagcacatgctacccacggttctgcgcatggctggggacccggttgccaatgtccgcttcaatgtggccaagtctctgcagaagatagggcccatcctggacaacagcacggttcctcctctccccagcctgggaagatgtctcactgtccacctcccccatttacttctccacctcccgtcctccccatcattggtttttttttgtgtgtcaactgtgccgtttttattttattccttttattttcccccttttcacagagaaataaaggtctagaagta

SEQ ID NO: 323238 - DNA, 1842 bp, Homo sapiens
gtggagcagcccctgtaaactggctcgggcgcccccacgcccgcccttccttcttctcccagcattgcccccccccacgtttcagcacagcgctggccgcagtctgacaggaaagggacggagccaagatggcggcggccgacggcgacgactcgctgtaccccatcgcggtgctcatagacgaactccgcaatgaggacgttcagcttcgcctcaacagcatcaagaagctgtccaccatcgccttggcccttggggttgaaaggacccgaagtgagcttctgcctttccttacagataccatctatgatgaagatgaggtcctcctggccctggcagaacagctgggaaccttcactaccctggtgggaggcccagagtacgtgcactgcctgctgccaccgctggagtcgctggccacagtggaggagacagtggtgcgggacaaggcagtggagtccttacgggccatctcacacgagcactcgccctctgacctggaggcgcactttgtgccgctagtgaagcggctggcgggcggcgactggttcacctcccgcacctcggcctgcggcctcttctccgtctgctacccccgagtgtccagtgctgtgaaggcggaacttcgacagtacttccggaacctgtgctcagatgacacccccatggtgcggcgggccgcagcctccaagctgggggagtttgccaaggtgctggagctggacaacgtcaagagtgagatcatccccatgttctccaacctggcctctgacgagcaggactcggtgcggctgctggcggtggaggcgtgcgtgaacatcgcccagcttctgccccaggaggatctggaggccctggtgatgcccactctgcgccaggccgctgaagacaagtcctggcgcgtccgctacatggtggctgacaagttcacagagctccagaaagcagtggggcctgagatcaccaagacagacctggtccctgccttccagaacctgatgaaagactgtgaggccgaggtgagggccgcagcctcccacaaggtcaaagagttctgtgaaaacctctcagctgactgtcgggagaatgtgatcatgtcccagatcttgccctgcatcaaggagctggtgtccgatgccaaccaacatgtcaagtctgccctggcctcagtcatcatgggtctctctcccatcttgggcaaagacaacaccatcgagcacctcttgcccctcttcctggctcagctgaaggatgagtgccctgaggtacggctgaacatcatctctaacctggactcaccttgcagagtgaagtcaagcccatcctagagaagctgacccaggaccaggatgtggacgtcaaatactttgcccaggaggctctgactgttctgtctctcgcctgatgctggaagaggagcaaacactggcctctggtgtccaccctccaacccccacaagtccctctttggggagacactggggggcctttggctgtcactccctgtgcatggtctgaccccaggccccttcccccagcacggttcctcctctccccagcctgggaagatgtctcactgtccacctcccaacgggctaggggagcacggggttggacaggacagtgaccttgggaggaaggggctactccgcccacgtcagggagagatgtgagcatcccgggtcactggatcctgctgctgtaatgggaacccctcccccatttacttctccacctcccgtcctccccatcattggtttttttttgtgtgtcaactgtgccgtttttattttattccttttattttcccccttttcacagagaaataaaggtctagaagta

SEQ ID NO: 323239 - DNA, 1680 bp, Homo sapiens
  misc_feature (1518)..(1518): n is a, c, g, or t
  misc_feature (1529)..(1529): n is a, c, g, or t
  misc_feature (1539)..(1539): n is a, c, g, or t
  misc_feature (1554)..(1554): n is a, c, g, or t
  misc_feature (1566)..(1566): n is a, c, g, or t
  misc_feature (1580)..(1580): n is a, c, g, or t
  misc_feature (1582)..(1583): n is a, c, g, or t
gtggagcagcccctgtaaactggctcgggcgcccccacgcccgcccttccttcttctcccagcattgcccccccccacgtttcagcacagcgctggccgcagtctgacaggaaagggacggagccaagatggcggcggccgacggcgacgactcgctgtaccccatcgcggtgctcatagacgaactccgcaatgaggacgttcagcttcgcctcaacagcatcaagaagctgtccaccatcgccttggcccttggggttgaaaggacccgaagtgagcttctgcctttccttacagataccatctatgatgaagatgaggtcctcctggccctggcagaacagctgggaaccttcactaccctggtgggaggcccagagtacgtgcactgcctgctgccaccgctggagtcgctggccacagtggaggagacagtggtgcgggacaaggcagtggagtccttacgggccatctcacacgagcactcgccctctgacctggaggcgcactttgtgccgctagtgaagcggctggcgggcggcgactggttcacctcccgcacctcggcctgcggcctcttctccgtctgctacccccgagtgtccagtgctgtgaaggcggaacttcgacagtacttccggaacctgtgctcagatgacacccccatggtgcggcgggccgcagcctccaagctgggggagtttgccaaggtgctggagctggacaacgtcaagagtgagatcatccccatgttctccaacctggcctctgacgagcaggactcggtgcggctgctggcggtggaggcgtgcgtgaacatcgcccagcttctgccccaggaggatctggaggccctggtgatgcccactctgcgccaggccgctgaagacaagtcctggcgcgtccgctacatggtggctgacaagttcacagagctccagaaagcagtggggcctgagatcaccaagacagacctggtccctgccttccagaacctgatgaaagactgtgaggccgaggtgagggccgcagcctcccacaaggtcaaagagttctgtgaaaacctctcagctgactgtcgggagaatgtgatcatgtcccagatcttgccctgcatcaaggagctggtgtccgatgccaaccaacatgtcaagtctgccctggcctcagtcatcatgggtctctctcccatcttgggcaaagacaacaccatcgagcacctcttgcccctcttcctggctcagctgaaggatgagtgccctgaggtacggctgaacatcatctctaacctggactgtgtgaacgaggtgattggcatccggcagctgtcccagtccctgctccctgccattgtggagctggctgaggacgccaagtggcgggtgcggctggccatcattgagtacatgcccctcctggctggacagctgggagtggagttctttgatgagaaacttaactccttgtgcatggcctggcttgtggatcatgtttatgccatcgggaggaggcaccgancctgaagactntggaattggngggtgggcctccaantcccaggttgcngtcgggaccactgncnngatacttgcaagggtggcgggcgggaacccccaagtccggtgggtgggccgcccgctcttctctaacactcgccctcgtggccagcacagcggtacc

SEQ ID NO: 323240 - DNA, 2456 bp, Homo sapiens
gtggagcagcccctgtaaactggctcgggcgcccccacgcccgcccttccttcttctcccagcattgcccccccccacgtttcagcacagcgctggccgcagtctgacaggaaagggacggagccaagatggcggcggccgacggcgacgactcgctgtaccccatcgcggtgctcatagacgaactccgcaatgaggacgttcagcttcgcctcaacagcatcaagaagctgtccaccatcgccttggcccttggggttgaaaggacccgaagtgagcttctgcctttccttacagataccatctatgatgaagatgaggtcctcctggccctggcagaacagctgggaaccttcactaccctggtgggaggcccagagtacgtgcactgcctgctgccaccgctggagtcgctggccacagtggaggagacagtggtgcgggacaaggcagtggagtccttacgggccatctcacacgagcactcgccctctgacctggaggcgcactttgtgccgctagtgaagcggctggcgggcggcgactggttcacctcccgcacctcggcctgcggcctcttctccgtctgctacccccgagtgtccagtgctgtgaaggcggaacttcgacagtacttccggaacctgtgctcagatgacacccccatggtgcggcgggccgcagcctccaagctgggggagtttgccaaggtgctggagctggacaacgtcaagagtgagatcatccccatgttctccaacctggcctctgacgagcaggtgagttttgcttcctggccctctgctctcccgtccttctggtggttcctgcccatgaaagagaatcccagagctcagcaaggcctctgctgccctcccactgttcctctcctctccctaggactcggtgcggctgctggcggtggaggcgtgcgtgaacatcgcccagcttctgccccaggaggatctggaggccctggtgatgcccactctgcgccaggccgctgaagacaagtcctggcgcgtccgctacatggtggctgacaagttcacagagctccagaaagcagtggggcctgagatcaccaagacagacctggtccctgccttccagaacctgatgaaagactgtgaggccgaggtgagggccgcagcctcccacaaggtcaaagagttctgtgaaaacctctcagctgactgtcgggagaatgtgatcatgtcccagatcttgccctgcatcaaggagctggtgtccgatgccaaccaacatgtcaagtctgccctggcctcagtcatcatgggtctctctcccatcttgggcaaagacaacaccatcgagcacctcttgcccctcttcctggctcagctgaaggatgagtgccctgaggtacggctgaacatcatctctaacctggactgtgtgaacgaggtgattggcatccggcagctgtcccagtccctgctccctgccattgtggagctggctgaggacgccaagtggcgggtgcggctggccatcattgagtacatgcccctcctggctggacagctgggagtggagttctttgatgagaaacttaactccttgtgcatggcctggcttgtggatcatgtatatgccatccgcgaggcagccaccagcaacctgaagaagctagtggaaaagtttgggaaggagtgggcccatgccacaatcatccccaaggtcttggccatgtccggagaccccaactacctgcaccgcatgactacgctcttctgcatcaatgtgctgtctgaggtctgtgggcaggacatcaccaccaagcacatgctacccacggttctgcgcatggctggggacccggttgccaatgtccgcttcaatgtggccaagtctctgcagaagatagggcccatcctggacaacagcaccttgcagagtgaagtcaagcccatcctagagaagctgacccaggaccaggatgtggacgtcaaatactttgcccaggaggctctgactgttctgtctctcgcctgatgctggaagaggagcaaacactggcctctggtgtccaccctccaacccccacaagtccctctttggggagacactggggggcctttggctgtcactccctgtgcatggtctgaccccaggccccttcccccagcacggttcctcctctccccagcctgggaagatgtctcactgtccacctcccaacgggctaggggagcacggggttggacaggacagtgaccttgggaggaaggggctactccgcccacgtcagggagagatgtgagcatcccgggtcactggatcctgctgctgtaatgggaacccctcccccatttacttctccacctcccgtcctccccatcattggtttttttttgtgtgtcaactgtgccgtttttattttattccttttattttcccccttttcacagagaaataaaggtctagaagta

SEQ ID NO: 323241 - DNA, 2460 bp, Homo sapiens
gtggagcagcccctgtaaactggctcgggcgcccccacgcccgcccttccttcttctcccagcattgcccccccccacgtttcagcacagcgctggccgcagtctgacaggaaagggacggagccaagatggcggcggccgacggcgacgactcgctgtaccccatcgcggtgctcatagacgaactccgcaatgaggacgttcagtgctgggagctattaataataggagaggcctcgtggtgatgaagaaatgaggggagagtttcacagtctgtcctgccatcagagcagctggctttggatcccacactccctcggtgcttgctttgcttcgcctcaacagcatcaagaagctgtccaccatcgccttggcccttggggttgaaaggacccgaagtgagcttctgcctttccttacagataccatctatgatgaagatgaggtcctcctggccctggcagaacagctgggaaccttcactaccctggtgggaggcccagagtacgtgcactgcctgctgccaccgctggagtcgctggccacagtggaggagacagtggtgcgggacaaggcagtggagtccttacgggccatctcacacgagcactcgccctctgacctggaggcgcactttgtgccgctagtgaagcggctggcgggcggcgactggttcacctcccgcacctcggcctgcggcctcttctccgtctgctacccccgagtgtccagtgctgtgaaggcggaacttcgacagtacttccggaacctgtgctcagatgacacccccatggtgcggcgggccgcagcctccaagctgggggagtttgccaaggtgctggagctggacaacgtcaagagtgagatcatccccatgttctccaacctggcctctgacgagcaggactcggtgcggctgctggcggtggaggcgtgcgtgaacatcgcccagcttctgccccaggaggatctggaggccctggtgatgcccactctgcgccaggccgctgaagacaagtcctggcgcgtccgctacatggtggctgacaagttcacagagctccagaaagcagtggggcctgagatcaccaagacagacctggtccctgccttccagaacctgatgaaagactgtgaggccgaggtgagggccgcagcctcccacaaggtcaaagagttctgtgaaaacctctcagctgactgtcgggagaatgtgatcatgtcccagatcttgccctgcatcaaggagctggtgtccgatgccaaccaacatgtcaagtctgccctggcctcagtcatcatgggtctctctcccatcttgggcaaagacaacaccatcgagcacctcttgcccctcttcctggctcagctgaaggatgagtgccctgaggtacggctgaacatcatctctaacctggactgtgtgaacgaggtgattggcatccggcagctgtcccagtccctgctccctgccattgtggagctggctgaggacgccaagtggcgggtgcggctggccatcattgagtacatgcccctcctggctggacagctgggagtggagttctttgatgagaaacttaactccttgtgcatggcctggcttgtggatcatgtatatgccatccgcgaggcagccaccagcaacctgaagaagctagtggaaaagtttgggaaggagtgggcccatgccacaatcatccccaaggtcttggccatgtccggagaccccaactacctgcaccgcatgactacgctcttctgcatcaatgtgctgtctgaggtctgtgggcaggacatcaccaccaagcacatgctacccacggttctgcgcatggctggggacccggttgccaatgtccgcttcaatgtggccaagtctctgcagaagatagggcccatcctggacaacagcaccttgcagagtgaagtcaagcccatcctagagaagctgacccaggaccaggatgtggacgtcaaatactttgcccaggaggctctgactgttctgtctctcgcctgatgctggaagaggagcaaacactggcctctggtgtccaccctccaacccccacaagtccctctttggggagacactggggggcctttggctgtcactccctgtgcatggtctgaccccaggccccttcccccagcacggttcctcctctccccagcctgggaagatgtctcactgtccacctcccaacgggctaggggagcacggggttggacaggacagtgaccttgggaggaaggggctactccgcccacgtcagggagagatgtgagcatcccgggtcactggatcctgctgctgtaatgggaacccctcccccatttacttctccacctcccgtcctccccatcattggtttttttttgtgtgtcaactgtgccgtttttattttattccttttattttcccccttttcacagagaaataaaggtctagaagta

SEQ ID NO: 323242 - DNA, 2002 bp, Homo sapiens
gtggagcagcccctgtaaactggctcgggcgcccccacgcccgcccttccttcttctcccagcattgcccccccccacgtttcagcacagcgctggccgcagtctgacaggaaagggacggagccaagatggcggcggccgacggcgacgactcgctgtaccccatcgcggtgctcatagacgaactccgcaatgaggacgttcagcttcgcctcaacagcatcaagaagctgtccaccatcgccttggcccttggggttgaaaggacccccagtgctgtgaaggcggaacttcgacagtacttccggaacctgtgctcagatgacacccccatggtgcggcgggccgcagcctccaagctgggggagtttgccaaggtgctggagctggacaacgtcaagagtgagatcatccccatgttctccaacctggcctctgacgagcaggactcggtgcggctgctggcggtggaggcgtgcgtgaacatcgcccagcttctgccccaggaggatctggaggccctggtgatgcccactctgcgccaggccgctgaagacaagtcctggcgcgtccgctacatggtggctgacaagttcacagagctccagaaagcagtggggcctgagatcaccaagacagacctggtccctgccttccagaacctgatgaaagactgtgaggccgaggtgagggccgcagcctcccacaaggtcaaagagttctgtgaaaacctctcagctgactgtcgggagaatgtgatcatgtcccagatcttgccctgcatcaaggagctggtgtccgatgccaaccaacatgtcaagtctgccctggcctcagtcatcatgggtctctctcccatcttgggcaaagacaacaccatcgagcacctcttgcccctcttcctggctcagctgaaggatgagtgccctgaggtacggctgaacatcatctctaacctggactgtgtgaacgaggtgattggcatccggcagctgtcccagtccctgctccctgccattgtggagctggctgaggacgccaagtggcgggtgcggctggccatcattgagtacatgcccctcctggctggacagctgggagtggagttctttgatgagaaacttaactccttgtgcatggcctggcttgtggatcatgtatatgccatccgcgaggcagccaccagcaacctgaagaagctagtggaaaagtttgggaaggagtgggcccatgccacaatcatccccaaggtcttggccatgtccggagaccccaactacctgcaccgcatgactacgctcttctgcatcaatgtgctgtctgaggtctgtgggcaggacatcaccaccaagcacatgctacccacggttctgcgcatggctggggacccggttgccaatgtccgcttcaatgtggccaagtctctgcagaagatagggcccatcctggacaacagcaccttgcagagtgaagtcaagcccatcctagagaagctgacccaggaccaggatgtggacgtcaaatactttgcccaggaggctctgactgttctgtctctcgcctgatgctggaagaggagcaaacactggcctctggtgtccaccctccaacccccacaagtccctctttggggagacactggggggcctttggctgtcactccctgtgcatggtctgaccccaggccccttcccccagcacggttcctcctctccccagcctgggaagatgtctcactgtccacctcccaacgggctaggggagcacggggttggacaggacagtgaccttgggaggaaggggctactccgcccacgtcagggagagatgtgagcatcccgggtcactggatcctgctgctgtaatgggaacccctcccccatttacttctccacctcccgtcctccccatcattggtttttttttgtgtgtcaactgtgccgtttttattttattccttttattttcccccttttcacagagaaataaaggtctagaagta

SEQ ID NO: 323243 - DNA, 1523 bp, Homo sapiens
gcgtcgacggaccaggtctgtcttggtgatctcaggccccactgctttctggagctctgtgaacttgtcagccaccatgtagcggacgcgccaggacttgtcttcagcggcctggcgcagagtgggcatcaccagggcctccagatcctcctggggcagaagctggtccctgccttccagaacctgatgaaagactgtgaggccgaggtgagggccgcagcctcccacaaggtcaaagagttctgtgaaaacctctcagctgactgtcgggagaatgtgatcatgtcccagatcttgccctgcatcaaggagctggtgtccgatgccaaccaacatgtcaagtctgccctggcctcagtcatcatgggtctctctcccatcttgggcaaagacaacaccatcgagcacctcttgcccctcttcctggctcagctgaaggatgagtgccctgaggtacggctgaacatcatctctaacctggactgtgtgaacgaggtgattggcatccggcagctgtcccagtccctgctccctgccattgtggagctggctgaggacgccaagtggcgggtgcggctggccatcattgagtacatgcccctcctggctggacagctgggagtggagttctttgatgagaaacttaactccttgtgcatggcctggcttgtggatcatgtatatgccatccgcgaggcagccaccagcaacctgaagaagctagtggaaaagtttgggaaggagtgggcccatgccacaatcatccccaaggtcttggccatgtccggagaccccaactacctgcaccgcatgactacgctcttctgcatcaatgtgctgtctgaggtctgtgggcaggacatcaccaccaagcacatgctacccacggttctgcgcatggctggggacccggttgccaatgtccgcttcaatgtggccaagtctctgcagaagatagggcccatcctggacaacagcaccttgcagagtgaagtcaagcccatcctagagaagctgacccaggaccaggatgtggacgtcaaatactttgcccaggaggctctgactgttctgtctctcgcctgatgctggaagaggagcaaacactggcctctggtgtccaccctccaacccccacaagtccctctttggggagacactggggggcctttggctgtcactccctgtgcatggtctgaccccaggccccttcccccagcacggttcctcctctccccagcctgggaagatgtctcactgtccacctcccaacgggctaggggagcacggggttggacaggacagtgaccttgggaggaaggggctactccgcccacgtcagggagagatgtgagcatcccgggtcactggatcctgctgctgtaatgggaacccctcccccatttacttctccacctcccgtcctccccatcattggtttttttttgtgtgtcaactgtgccgtttttattttattccttttattttcccccttttcacagagaaataaaggtctagaagta

SEQ ID NO: 323244 - DNA, 973 bp, Homo sapiens
  misc_feature (891)..(891): n is a, c, g, or t
gtggagcagcccctgtaaactggctcgggcgcccccacgcccgcccttccttcttctcccagcattgcccccccccacgtttcagcacagcgctggccgcagtctgacaggaaagggacggagccaagatggcggcggccgacggcgacgactcgctgtaccccatcgcggtgctcatagacgaactccgcaatgaggacgttcagcttcgcctcaacagcatcaagaagctgtccaccatcgccttggcccttggggttgaaaggacccgaagtgagcttctgcctttccttacagataccatctatgatgaagatgaggtcctcctggccctggcagaacagctgggaaccttcactaccctggtgggaggcccagagtacgtgcactgcctgctgccaccgctggagtcgctggccacagtggaggagacagtggtgcgggacaaggcagtggagtccttacgggccatctcacacgagcactcgccctctgacctggaggcgcactttgtgccgctagtgaagcggctggcgggcggcgactggttcacctcccgcacctcggcctgcggcctcttctccgtctgctacccccgagtgtccagtgctgtgaaggcggaacttcgacagtacttccggaacctgtgctcagatgacacccccatggtgcggcgggccgcagcctccaagctgggggagtttgccaaggtgctggagctggacaacgtcaagagtgagatcatccccatgttctccaacctggcctctgacgagcaggactcggtgcggctgctggcggtggaggcgtgcgtgaacatcgcccagcttctgccccaggaggatctggaggccctggtgatgcccactctgcgccaggccgctgaagagngaaacaggatgcgggcggtaaggggcagccagccaaacacaagaaggagagaaacaacaccgggcggacaaagaaacggcca

SEQ ID NO: 323245 - DNA, 1050 bp, Homo sapiens
gtggagcagcccctgtaaactggctcgggcgcccccacgcccgcccttccttcttctcccagcattgcccccccccacgtttcagcacagcgctggccgcagtctgacaggaaagggacggagccaagatggcggcggccgacggcgacgactcgctgtaccccatcgcggtgctcatagacgaactccgcaatgaggacgttcagcttcgcctcaacagcatcaagaagctgtccaccatcgccttggcccttggggttgaaaggacccgaagtgagcttctgcctttccttacagataccatctatgatgaagatgaggtcctcctggccctggcagaacagctgggaaccttcactaccctggtgggaggcccagagtacgtgcactgcctgctgccaccgctggagtcgctggccacagtggaggagacagtggtgcgggacaaggcagtggagtccttacgggccatctcacacgagcactcgccctctgacctggaggcgcactttgtgccgctagtgaagcggctggcgggcggcgactggttcacctcccgcacctcggcctgcggcctcttctccgtctgctacccccgagtgtccagtgctgtgaaggcggaacttcgacagtacttccggaacctgtgctcagatgacacccccatggtgcggcgggccgcagcctccaagctgggggagtttgccaaggtgctggagctggacaacgtcaagagtgagatcatccccatgttctccaacctggcctctgacgagcaggactcggtgcggctgctggcggtggaggcgtgcgtgaacatcgcccagcttctgccccaggaggatctggaggccctggtgatgcccactctgcgccaggccgctgaagagtaatgggtgcagtccgagtccgaaggtgggctggtccagaagactgtctgctcgactgtagattggggcggggggggctccaggtgagtgggctccggggggatgtttgccctccgcggggggcccacgttgtggcgctggtcctggagagccgcggggg

SEQ ID NO: 323246 - DNA, 1188 bp, Homo sapiens
aaataaatcagggatcggaaaaaccacaaaaccccggattccccctgccgggcaagacaacaccatcgagcacctcttgcccctcttcctggctcagctgaaggatgagtgccctgaggtacggctgaacatcatctctaacctggactgtgtgaacgaggtgattggcatccggcagctgtcccagtccctgctccctgccattgtggagctggctgaggacgccaagtggcgggtgcggctggccatcattgagtacatgcccctcctggctggacagctgggagtggagttctttgatgagaaacttaactccttgtgcatggcctggcttgtggatcatgtatatgccatccgcgaggcagccaccagcaacctgaagaagctagtggaaaagtttgggaaggagtgggcccatgccacaatcatccccaaggtcttggccatgtccggagaccccaactacctgcaccgcatgactacgctcttctgcatcaatgtgctgtctgaggtctgtgggcaggacatcaccaccaagcacatgctacccacggttctgcgcatggctggggacccggttgccaatgtccgcttcaatgtggccaagtctctgcagaagatagggcccatcctggacaacagcaccttgcagagtgaagtcaagcccatcctagagaagctgacccaggaccaggatgtggacgtcaaatactttgcccaggaggctctgactgttctgtctctcgcctgatgctggaagaggagcaaacactggcctctggtgtccaccctccaacccccacaagtccctctttggggagacactggggggcctttggctgtcactccctgtgcatggtctgaccccaggccccttcccccagcacggttcctcctctccccagcctgggaagatgtctcactgtccacctcccaacgggctaggggagcacggggttggacaggacagtgaccttgggaggaaggggctactccgcccacgtcagggagagatgtgagcatcccgggtcactggatcctgctgctgtaatgggaacccctcccccatttacttctccacctcccgtcctccccatcattggtttttttttgtgtgtcaactgtgccgtttttattttattccttttattttcccccttttcacagagaaataaaggtctagaagta

SEQ ID NO: 323247 - DNA, 1183 bp, Homo sapiens
  misc_feature (797)..(797): n is a, c, g, or t
gtggagcagcccctgtaaactggctcgggcgcccccacgcccgcccttccttcttctcccagcattgcccccccccacgtttcagcacagcgctggccgcagtctgacaggaaagggacggagccaagatggcggcggccgacggcgacgactcgctgtaccccatcgcggtgctcatagacgaactccgcaatgaggacgttcagcttcgcctcaacagcatcaagaagctgtccaccatcgccttggcccttggggttgaaaggacccgaagtgagcttctgcctttccttacagataccatctatgatgaagatgaggtcctcctggccctggcagaacagctgggaaccttcactaccctggtgggaggcccagagtacgtgcactgcctgctgccaccgctggagtcgctggccacagtggaggagacagtggtgcgggacaaggcagtggagtccttacgggccatctcacacgagcactcgccctctgacctggaggcgcactttgtgccgctagtgaagcggctggcgggcggcgactggttcacctcccgcacctcggcctgcggcctcttctccgtctgctacccccgagtgtccagtgctgtgaaggcggaacttcgacagtacttccggaacctgtgctcagatgacacccccatggtgcggcgggccgcagcctccaagctgggggagtttgccaaggtgctggagctggacaacgtcaagagtgagatcatccccatgttctccaacctggcctctgacgagcaggactcggtgcggtgtggngtggaagcgtggtgaacatcgccaagttaggcccaagaggaccgggaggaccaggaaatggcacactggccaagcagatgagaaaagtctgggagcggccgaacactggagtgtgtacaagaccaagagacccagaaagacacgagggccgtgaaatcaccaaagaaaaaccagagcccggaccacagcaacggtaatagaacggtagcgcaccacgtagtacgccacgcccaccagagagaaggaacggtggacacacacacgaatgaacaagattacacacaaaaagccaactagcaaggagacacgacacacaaagctaggtaggatacagcagatgcacatgcacagagacgacacagcaacaacagcagagagatagaaaa

SEQ ID NO: 323248 - DNA, 570 bp, Homo sapiens
gtggagcagcccctgtaaactggctcgggcgcccccacgcccgcccttccttcttctcccagcattgcccccccccacgtttcagcacagcgctggccgcagtctgacaggaaagggacggagccaagatggcggcggccgacggcgacgactcgctgtaccccatcgcggtgctcatagacgaactccgcaatgaggacgttcagagacggggtttcaccatgttggccaggcttggtcgggaactcttgacctcaagcgatccacccgcctcggcctcccaaagtgttggaattacaggcgtgagccaccgcgcccagcccggatgaacattcctggttatgggatgaggtgacccaaggctctgagccgggctggtgtgggattgagaacagttagaactgcaagtccacctcccacctgctgtgtgaccttgtgcaaattacttcaccgctttgggtctctgtgttccataaaatatgggctaattgtagtcctggtcttgctggagggacttgtgagggactgaacgaattatgacacaaataaaaagtagaatggtgtcaggcc

SEQ ID NO: 323249 - DNA, 527 bp, Homo sapiens
cccacgccactctctggagagcattgctttaaggagggatcctagggcttggtaattaaggtcgatctccagaataattaagggaagcctgaggacagagaaactgggacatggtgttaggatggtgttagtggagttgggagattcactccactaactgagtcacccgtattgctcagcctctgtggggcctgatgatcaccagagtggcctggtcagaggcagcaggaaatgagagttagccaggagctttgcatactcacccctgccactcactggcccccaggtgctgtctgaggtctgtgggcaggacatcaccaccaagcacatgctacccacggttctgcgcatggctggggacccggttgccaatgtccgcttcaatgtggccaagtctctgcagaagatagggcccatcctggacaacagggtgaggtctggatactcccccacacactggcaggggcttcttgtgggcaccttaatctttgacctttgaaggtagagcccagggtcagaggcctggc

SEQ ID NO: 323250 - DNA, 650 bp, Homo sapiens
caactcaacgaggacatcattgtctcatcttgctggctcatttcccggatgagtgccctgaggtacggctgaacatcatctctaacctggactgtgtgaacgaggtgattggcatccggcagctgtcccagtccctgctccctgccattgtggagctggctgaggacgccaagtggcgggtgcggctggccatcattgagtacatgcccctcctggctggacagctgggagtggagttctttgatgagaaacttaactccttgtgcatggcctggcttgtggatcatgtatatgccatccgcgaggcagccaccagcaacctgaagaagctagtggaaaagtttgggaaggagtgggcccatgccacaatcatccccaaggtcttggccatgtccggagaccccaactacctgcaccgcatgactacgctcttctgcatcaatgtgctgtctgaggtctgtgggcaggacatcaccaccaagcacatgctacccacggttctgcgcatggctggggacccggttgccaatgtccgcttcaatgtggccaagtctctgcagaagatagggcccatcctggacaacagcaccttgcagagtgagtcggcccatccgagcagtgtaaggatccgctagagtacctcagcacac

SEQ ID NO: 323251 - DNA, 2335 bp, Homo sapiens
gtggagcagcccctgtaaactggctcgggcgcccccacgcccgcccttccttcttctcccagcattgcccccccccacgtttcagcacagcgctggccgcagtctgacaggaaagggacggagccaagatggcggcggccgacggcgacgactcgctgtaccccatcgcggtgctcatagacgaactccgcaatgaggacgttcagcttcgcctcaacagcatcaagaagctgtccaccatcgccttggcccttggggttgaaaggacccgaagtgagcttctgcctttccttacagataccatctatgatgaagatgaggtcctcctggccctggcagaacagctgggaaccttcactaccctggtgggaggcccagagtacgtgcactgcctgctgccaccgctggagtcgctggccacagtggaggagacagtggtgcgggacaaggcagtggagtccttacgggccatctcacacgagcactcgccctctgacctggaggcgcactttgtgccgctagtgaagcggctggcgggcggcgactggttcacctcccgcacctcggcctgcggcctcttctccgtctgctacccccgagtgtccagtgctgtgaaggcggaacttcgacagtacttccggaacctgtgctcagatgacacccccatggtgcggcgggccgcagcctccaagctgggggagtttgccaaggtgctggagctggacaacgtcaagagtgagatcatccccatgttctccaacctggcctctgacgagcaggactcggtgcggctgctggcggtggaggcgtgcgtgaacatcgcccagcttctgccccaggaggatctggaggccctggtgatgcccactctgcgccaggccgctgaagacaagtcctggcgcgtccgctacatggtggctgacaagttcacagagctccagaaagcagtggggcctgagatcaccaagacagacctggtccctgccttccagaacctgatgaaagactgtgaggccgaggtgagggccgcagcctcccacaaggtcaaagagttctgtgaaaacctctcagctgactgtcgggagaatgtgatcatgtcccagatcttgccctgcatcaaggagctggtgtccgatgccaaccaacatgtcaagtctgccctggcctcagtcatcatgggtctctctcccatcttgggcaaagacaacaccatcgagcacctcttgcccctcttcctggctcagctgaaggatgagtgccctgaggtacggctgaacatcatctctaacctggactgtgtgaacgaggtgattggcatccggcagctgtcccagtccctgctccctgccattgtggagctggctgaggacgccaagtggcgggtgcggctggccatcattgagtacatgcccctcctggctggacagctgggagtggagttctttgatgagaaacttaactccttgtgcatggcctggcttgtggatcatgtatatgccatccgcgaggcagccaccagcaacctgaagaagctagtggaaaagtttgggaaggagtgggcccatgccacaatcatccccaaggtcttggccatgtccggagaccccaactacctgcaccgcatgactacgctcttctgcatcaatgtgctgtctgaggtctgtgggcaggacatcaccaccaagcacatgctacccacggttctgcgcatggctggggacccggttgccaatgtccgcttcaatgtggccaagtctctgcagaagatagggcccatcctggacaacagcaccttgcagagtgaagtcaagcccatcctagagaagctgacccaggaccaggatgtggacgtcaaatactttgcccaggaggctctgactgttctgtctctcgcctgatgctggaagaggagcaaacactggcctctggtgtccaccctccaacccccacaagtccctctttggggagacactggggggcctttggctgtcactccctgtgcatggtctgaccccaggccccttcccccagcacggttcctcctctccccagcctgggaagatgtctcactgtccacctcccaacgggctaggggagcacggggttggacaggacagtgaccttgggaggaaggggctactccgcccacgtcagggagagatgtgagcatcccgggtcactggatcctgctgctgtaatgggaacccctcccccatttacttctccacctcccgtcctccccatcattggtttttttttgtgtgtcaactgtgccgtttttattttattccttttattttcccccttttcacagagaaataaaggtctagaagta

SEQ ID NO: 323252 - DNA, 2304 bp, Homo sapiens
gtggagcagcccctgtaaactggctcgggcgcccccacgcccgcccttccttcttctcccagcattgcccccccccacgtttcagcacagcgctggccgcagtctgacaggaaagggacggagccaagatggcggcggccgacggcgacgactcgctgtaccccatcgcggtgctcatagacgaactccgcaatgaggacgttcagcttcgcctcaacagcatcaagaagctgtccaccatcgccttggcccttggggttgaaaggacccgaagtgagcttctgcctttccttacagataccatctatgatgaagatgaggtcctcctggccctggcagaacagctgggaaccttcactaccctggtgggaggcccagagtacgtgcactgcctgctgccaccgctggagtcgctggccacagtggaggagacagtggtgcgggacaaggcagtggagtccttacgggccatctcacacgagcactcgccctctgacctggaggcgcactttgtgccgctagtgaagcggctggcgggcggcgactggttcacctcccgcacctcggcctgcggcctcttctccgtctgctacccccgagtgtccagtgctgtgaaggcggaacttcgacagtacttccggaacctgtgctcagatgacacccccatggtgcggcgggccgcagcctccaagctgggggagtttgccaaggtgctggagctggacaacgtcaagagtgagatcatccccatgttctccaacctggcctctgacgagcaggactcggtgcggctgctggcggtggaggcgtgcgtgaacatcgcccagcttctgccccaggaggatctggaggccctggtgatgcccactctgcgccaggccgctgaagacaagtcctggcgcgtccgctacatggtggctgacaagttcacagagctccagaaagcagtggggcctgagatcaccaagacagacctggtccctgccttccagaacctgatgaaagactgtgaggccgagagttctgtgaaaacctctcagctgactgtcgggagaatgtgatcatgtcccagatcttgccctgcatcaaggagctggtgtccgatgccaaccaacatgtcaagtctgccctggcctcagtcatcatgggtctctctcccatcttgggcaaagacaacaccatcgagcacctcttgcccctcttcctggctcagctgaaggatgagtgccctgaggtacggctgaacatcatctctaacctggactgtgtgaacgaggtgattggcatccggcagctgtcccagtccctgctccctgccattgtggagctggctgaggacgccaagtggcgggtgcggctggccatcattgagtacatgcccctcctggctggacagctgggagtggagttctttgatgagaaacttaactccttgtgcatggcctggcttgtggatcatgtatatgccatccgcgaggcagccaccagcaacctgaagaagctagtggaaaagtttgggaaggagtgggcccatgccacaatcatccccaaggtcttggccatgtccggagaccccaactacctgcaccgcatgactacgctcttctgcatcaatgtgctgtctgaggtctgtgggcaggacatcaccaccaagcacatgctacccacggttctgcgcatggctggggacccggttgccaatgtccgcttcaatgtggccaagtctctgcagaagatagggcccatcctggacaacagcaccttgcagagtgaagtcaagcccatcctagagaagctgacccaggaccaggatgtggacgtcaaatactttgcccaggaggctctgactgttctgtctctcgcctgatgctggaagaggagcaaacactggcctctggtgtccaccctccaacccccacaagtccctctttggggagacactggggggcctttggctgtcactccctgtgcatggtctgaccccaggccccttcccccagcacggttcctcctctccccagcctgggaagatgtctcactgtccacctcccaacgggctaggggagcacggggttggacaggacagtgaccttgggaggaaggggctactccgcccacgtcagggagagatgtgagcatcccgggtcactggatcctgctgctgtaatgggaacccctcccccatttacttctccacctcccgtcctccccatcattggtttttttttgtgtgtcaactgtgccgtttttattttattccttttattttcccccttttcacagagaaataaaggtctagaagta

SEQ ID NO: 323253 - DNA, 2276 bp, Homo sapiens
  misc_feature (1)..(1): n is a, c, g, or t
  misc_feature (31)..(33): n is a, c, g, or t
naaccaatacggtaggtacgaggctgggtgnnnctggccgcagtctgacaggaaagggacggagccaagatggcggcggccgacggcgacgactcgctgtaccccatcgcggtgctcatagacgaactccgcaatgaggacgttcagcttcgcctcaacagcatcaagaagctgtccaccatcgccttggcccttggggttgaaaggacccgaagtgagcttctgcctttccttacagataccatctatgatgaagatgaggtcctcctggccctggcagaacagctgggaaccttcactaccctggtgggaggcccagagtacgtgcactgcctgctgccaccgctggagtcgctggccacagtggaggagacagtggtgcgggacaaggcagtggagtccttacgggccatctcacacgagcactcgccctctgacctggaggcgcactttgtgccgctagtgaagcggctggcgggcggcgactggttcacctcccgcacctcggcctgcggcctcttctccgtctgctacccccgagtgtccagtgctgtgaaggcggaacttcgacagtacttccggaacctgtgctcagatgacacccccatggtgcggcgggccgcagcctccaagctgggggagtttgccaaggtgctggagctggacaacgtcaagagtgagatcatccccatgttctccaacctggcctctgacgagcaggactcggtgcggctgctggcggtggaggcgtgcgtgaacatcgcccagcttctgccccaggaggatctggaggccctggtgatgcccactctgcgccaggccgctgaagacaagtcctggcgcgtccgctacatggtggctgacaagttcacagagctccagaaagcagtggggcctgagatcaccaagacagacctggtccctgccttccagaacctgatgaaagactgtgaggccgaggtgagggccgcagcctcccacaaggtcaaagagttctgtgaaaacctctcagctgactgtcgggagaatgtgatcatgtcccagatcttgccctgcatcaaggagctggtgtccgatgccaaccaacatgtcaagtctgccctggcctcagtcatcatgggtctctctcccatcttgggcaaagacaacaccatcgagcacctcttgcccctcttcctggctcagctgaaggatgagtgccctgaggtacggctgaacatcatctctaacctggactgtgtgaacgaggtgattggcatccggcagctgtcccagtccctgctccctgccattgtggagctggctgaggacgccaagtggcgggtgcggctggccatcattgagtacatgcccctcctggctggacagctgggagtggagttctttgatgagaaacttaactccttgtgcatggcctggcttgtggatcatgtatatgccatccgcgaggcagccaccagcaacctgaagaagctagtggaaaagtttgggaaggagtgggcccatgccacaatcatccccaaggtcttggccatgtccggagaccccaactacctgcaccgcatgactacgctcttctgcatcaatgtgctgtctgaggtctgtgggcaggacatcaccaccaagcacatgctacccacggttctgcgcatggctggggacccggttgccaatgtccgcttcaatgtggccaagtctctgcagaagatagggcccatcctggacaacagcaccttgcagagtgaagtcaagcccatcctagagaagctgacccaggaccaggatgtggacgtcaaatactttgcccaggaggctctgactgttctgtctctcgcctgatgctggaagaggagcaaacactggcctctggtgtccaccctccaacccccacaagtccctctttggggagacactggggggcctttggctgtcactccctgtgcatggtctgaccccaggccccttcccccagcacggttcctcctctccccagcctgggaagatgtctcactgtccacctcccaacgggctaggggagcacggggttggacaggacagtgaccttgggaggaaggggctactccgcccacgtcagggagagatgtgagcatcccgggtcactggatcctgctgctgtaatgggaacccctcccccatttacttctccacctcccgtcctccccatcattggtttttttttgtgtgtcaactgtgccgtttttattttattccttttattttcccccttttcacagagaaataaaggtctagaagta

SEQ ID NO: 323254 - DNA, 2343 bp, Homo sapiens
gaattccggttctcactcttgacgttgtccagctccagcaccttggcaactcccccagcttggacggccggcccgccgctccatgggggagtcatctgagctggccgcagtctgacaggaaagggacggagccaagatggcggcggccgacggcgacgactcgctgtaccccatcgcggtgctcatagacgaactccgcaatgaggacgttcagcttcgcctcaacagcatcaagaagctgtccaccatcgccttggcccttggggttgaaaggacccgaagtgagcttctgcctttccttacagataccatctatgatgaagatgaggtcctcctggccctggcagaacagctgggaaccttcactaccctggtgggaggcccagagtacgtgcactgcctgctgccaccgctggagtcgctggccacagtggaggagacagtggtgcgggacaaggcagtggagtccttacgggccatctcacacgagcactcgccctctgacctggaggcgcactttgtgccgctagtgaagcggctggcgggcggcgactggttcacctcccgcacctcggcctgcggcctcttctccgtctgctacccccgagtgtccagtgctgtgaaggcggaacttcgacagtacttccggaacctgtgctcagatgacacccccatggtgcggcgggccgcagcctccaagctgggggagtttgccaaggtgctggagctggacaacgtcaagagtgagatcatccccatgttctccaacctggcctctgacgagcaggactcggtgcggctgctggcggtggaggcgtgcgtgaacatcgcccagcttctgccccaggaggatctggaggccctggtgatgcccactctgcgccaggccgctgaagacaagtcctggcgcgtccgctacatggtggctgacaagttcacagagctccagaaagcagtggggcctgagatcaccaagacagacctggtccctgccttccagaacctgatgaaagactgtgaggccgaggtgagggccgcagcctcccacaaggtcaaagagttctgtgaaaacctctcagctgactgtcgggagaatgtgatcatgtcccagatcttgccctgcatcaaggagctggtgtccgatgccaaccaacatgtcaagtctgccctggcctcagtcatcatgggtctctctcccatcttgggcaaagacaacaccatcgagcacctcttgcccctcttcctggctcagctgaaggatgagtgccctgaggtacggctgaacatcatctctaacctggactgtgtgaacgaggtgattggcatccggcagctgtcccagtccctgctccctgccattgtggagctggctgaggacgccaagtggcgggtgcggctggccatcattgagtacatgcccctcctggctggacagctgggagtggagttctttgatgagaaacttaactccttgtgcatggcctggcttgtggatcatgtatatgccatccgcgaggcagccaccagcaacctgaagaagctagtggaaaagtttgggaaggagtgggcccatgccacaatcatccccaaggtcttggccatgtccggagaccccaactacctgcaccgcatgactacgctcttctgcatcaatgtgctgtctgaggtctgtgggcaggacatcaccaccaagcacatgctacccacggttctgcgcatggctggggacccggttgccaatgtccgcttcaatgtggccaagtctctgcagaagatagggcccatcctggacaacagcaccttgcagagtgaagtcaagcccatcctagagaagctgacccaggaccaggatgtggacgtcaaatactttgcccaggaggctctgactgttctgtctctcgcctgatgctggaagaggagcaaacactggcctctggtgtccaccctccaacccccacaagtccctctttggggagacactggggggcctttggctgtcactccctgtgcatggtctgaccccaggccccttcccccagcacggttcctcctctccccagcctgggaagatgtctcactgtccacctcccaacgggctaggggagcacggggttggacaggacagtgaccttgggaggaaggggctactccgcccacgtcagggagagatgtgagcatcccgggtcactggatcctgctgctgtaatgggaacccctcccccatttacttctccacctcccgtcctccccatcattggtttttttttgtgtgtcaactgtgccgtttttattttattccttttattttcccccttttcacagagaaataaaggtctagaagta

SEQ ID NO: 323255 - DNA, 2281 bp, Homo sapiens
gtggagcagcccctgtaaactggctcgggcgcccccacgcccgcccttccttcttctcccagcattgcccccccccacgtttcagcacagcgctggccgcagtctgacaggaaagggacggagccaagatggcggcggccgacggcgacgactcgctgtaccccatcgcggtgctcatagacgaactccgcaatgaggacgttcagcttcgcctcaacagcatcaagaagctgtccaccatcgccttggcccttggggttgaaaggacccgaagtgagcttctgcctttccttacagataccatctatgatgaagatgaggtcctcctggccctggcagaacagctgggaaccttcactaccctggtgggaggcccagagtacgtgcactgcctgctgccaccgctggagtcgctggccacagtggaggagacagtggtgcgggacaaggcagtggagtccttacgggccatctcacacgagcactcgccctctgacctggaggcgcactttgtgccgctagtgaagcggctggcgggcggcgactggttcacctcccgcacctcggcctgcggcctcttctccgtctgctacccccgagtgtccagtgctgtgaaggcggaacttcgacagtacttccggaacctgtgctcagatgacacccccatggtgcggcgggccgcagcctccaagctgggggagtttgccaaggtgctggagctggacaacgtcaagagtgagatcatccccatgttctccaacctggcctctgacgagcaggactcggtgcggctgctggcggtggaggcgtgcgtgaacatcgcccagcttctgccccaggaggatctggaggccctggtgatgcccactctgcgccaggccgctgaagacaagtcctggcgcgtccgctacatggtggctgacaagttcacagagctccagaaagcagtggggcctgagatcaccaagacagacctggtccctgccttccagaacctgatgaaagactgtgaggccgaggtgagggccgcagcctcccacaaggtcaaagagttctgtgaaaacctctcagctgactgtcgggagaatgtgatcatgtcccagatcttgccctgcatcaaggagctggtgtccgatgccaaccaacatgtcaagtctgccctggcctcagtcatcatgggtctctctcccatcttgggcaaagacaacaccatcgagcacctcttgcccctcttcctggctcagctgaaggatgagtgccctgaggtacggctgaacatcatctctaacctggactgtgtgaacgaggtgattggcatccggcagctgtcccagtccctgctccctgccattgtggagctggctgaggacgccaagtggcgggtgcggctggccatcattgagtacatgcccctcctggctggacagctgggagtggagttctttgatgagaaacttaactccttgtgcatggcctggcttgtggatcatgtatatgccatccgcgaggcagccaccagcaacctgaagaagctagtggtgtccggagaccccaactacctgcaccgcatgactacgctcttctgcatcaatgtgctgtctgaggtctgtgggcaggacatcaccaccaagcacatgctacccacggttctgcgcatggctggggacccggttgccaatgtccgcttcaatgtggccaagtctctgcagaagatagggcccatcctggacaacagcaccttgcagagtgaagtcaagcccatcctagagaagctgacccaggaccaggatgtggacgtcaaatactttgcccaggaggctctgactgttctgtctctcgcctgatgctggaagaggagcaaacactggcctctggtgtccaccctccaacccccacaagtccctctttggggagacactggggggcctttggctgtcactccctgtgcatggtctgaccccaggccccttcccccagcacggttcctcctctccccagcctgggaagatgtctcactgtccacctcccaacgggctaggggagcacggggttggacaggacagtgaccttgggaggaaggggctactccgcccacgtcagggagagatgtgagcatcccgggtcactggatcctgctgctgtaatgggaacccctcccccatttacttctccacctcccgtcctccccatcattggtttttttttgtgtgtcaactgtgccgtttttattttattccttttattttcccccttttcacagagaaataaaggtctagaagta

SEQ ID NO: 323256 - DNA, 1853 bp, Homo sapiens
gtggagcagcccctgtaaactggctcgggcgcccccacgcccgcccttccttcttctcccagcattgcccccccccacgtttcagcacagcgctggccgcagtctgacaggaaagggacggagccaagatggcggcggccgacggcgacgactcgctgtaccccatcgcggtgctcatagacgaactccgcaatgaggacgttcagcttcgcctcaacagcatcaagaagctgtccaccatcgccttggcccttggggttgaaaggacccgaagtgagcttctgcctttccttacagataccatctatgatgaagatgaggtcctcctggccctggcagaacagctgggaaccttcactaccctggtgggaggcccagagtacgtgcactgcctgctgccaccgctggagtcgctggccacagtggaggagacagtggtgcgggacaaggcagtggagtccttacgggccatctcacacgagcactcgccctctgacctggaggcgcactttgtgccgctagtgaagcggctggcgggcggcgactggttcacctcccgcacctcggcctgcggcctcttctccgtctgctacccccgagtgtccagtgctgtgaaggcggaacttcgacagtacttccggaacctgtgctcagatgacacccccatggtgcggcgggccgcagcctccaagctgggggagtttgccaaggtgctggagctggacaacgtcaagagtgagatcatccccatgttctccaacctggcctctgacgagcaggactcggtgcggctgctggcggtggaggcgtgcgtgaacatcgcccagcttctgccccaggaggatctggaggccctggtgatgcccactctgcgccaggccgctgaagacaagtcctggcgcgtccgctacatggtggctgacaagttcacagagctccagaaagcagtggggcctgagatcaccaagacagacctggtccctgccttccagaacctgatgaaagactgtgaggccgaggtgagggccgcagcctcccacaaggtcaaagagttctgtgaaaacctctcagctgactgtcgggagaatgtgatcatgtcccagatcttgccctgcatcaaggagctggtgtccgatgccaaccaacatgtcaagtctgccctggcctcagtcatcatgggtctctctcccatcttgggcaaagacaacaccatcgagcacctcttgcccctcttcctggctcagctgaaggatgagtgccctgaggtacggctgaacatcatctctaacctggactgtgtgaacgaggtgattggcatccggcagctgtcccagtccctgctccctgccattgtggagctggctgaggacgccaagtggcgggtgcggctggccatcattgagtacatgcccctcctggctggacagctgggagtggagttctttgatgagaaacttaactccttgtgcatggcctggcttgtggatcatgtatatgccatccgcgaggcagccaccagcaacctgaagaagctagtggaaaagtttgggaaggagtgggcccatgccacaatcatccccaaggtcttggccatgtccggagaccccaactacctgcaccgcatgactacgctcttctgcatcaatgtgctgtctgaggtctgtgggcaggacatcaccaccaagcacatgctacccacggttctgcgcatggctggggacccggttgccaatgtccgcttcaatgtggccaagtctctgcagaagatagggcccatcctggacaacagcaccttgcagagtgagtcggcccatccgagcagtgtaaggatccgctagagtacctcagcacac

SEQ ID NO: 323257 - DNA, 1807 bp, Homo sapiens
  misc_feature (1682)..(1682): n is a, c, g, or t
  misc_feature (1687)..(1687): n is a, c, g, or t
  misc_feature (1751)..(1751): n is a, c, g, or t
  misc_feature (1769)..(1769): n is a, c, g, or t
  misc_feature (1777)..(1777): n is a, c, g, or t
  misc_feature (1799)..(1799): n is a, c, g, or t
  misc_feature (1804)..(1804): n is a, c, g, or t
gtggagcagcccctgtaaactggctcgggcgcccccacgcccgcccttccttcttctcccagcattgcccccccccacgtttcagcacagcgctggccgcagtctgacaggaaagggacggagccaagatggcggcggccgacggcgacgactcgctgtaccccatcgcggtgctcatagacgaactccgcaatgaggacgttcagcttcgcctcaacagcatcaagaagctgtccaccatcgccttggcccttggggttgaaaggacccgaagtgagcttctgcctttccttacagataccatctatgatgaagatgaggtcctcctggccctggcagaacagctgggaaccttcactaccctggtgggaggcccagagtacgtgcactgcctgctgccaccgctggagtcgctggccacagtggaggagacagtggtgcgggacaaggcagtggagtccttacgggccatctcacacgagcactcgccctctgacctggaggcgcactttgtgccgctagtgaagcggctggcgggcggcgactggttcacctcccgcacctcggcctgcggcctcttctccgtctgctacccccgagtgtccagtgctgtgaaggcggaacttcgacagtacttccggaacctgtgctcagatgacacccccatggtgcggcgggccgcagcctccaagctgggggagtttgccaaggtgctggagctggacaacgtcaagagtgagatcatccccatgttctccaacctggcctctgacgagcaggactcggtgcggctgctggcggtggaggcgtgcgtgaacatcgcccagcttctgccccaggaggatctggaggccctggtgatgcccactctgcgccaggccgctgaagacaagtcctggcgcgtccgctacatggtggctgacaagttcacagagctccagaaagcagtggggcctgagatcaccaagacagacctggtccctgccttccagaacctgatgaaagactgtgaggccgaggtgagggccgcagcctcccacaaggtcaaagagttctgtgaaaacctctcagctgactgtcgggagaatgtgatcatgtcccagatcttgccctgcatcaaggagctggtgtccgatgccaaccaacatgtcaagtctgccctggcctcagtcatcatgggtctctctcccatcttgggcaaagacaacaccatcgagcacctcttgcccctcttcctggctcagctgaaggatgagtgccctgaggtacggctgaacatcatctctaacctggactgtgtgaacgaggtgattggcatccggcagctgtcccagtccctgctccctgccattgtggagctggctgaggacgccaagtggcgggtgcggctggccatcattgagtacatgcccctcctggctggacagctgggagtggagttctttgatgagaaacttaactccttgtgcatggcctggcttgtggatcatgtatatgccatccgcgaggcagccaccagcaacctgaagaagctagtggaaaagtttgggaaggagtgggcccatgccacaatcatccccaaggtcttggccatgtccggagaccccaactacctgcaccgcatgactacgctcttctgcatcaatgttctgtctgaagtctgttggggcaggacatcaccncccangccacattgcttaccccaccggttcctgccccattggcttgggggaaccccggtttgcccaatnttccccttccaattgttnggccaaanttctcctgccaaaaaaaaatanggggnccc

SEQ ID NO: 323258 - DNA, 1616 bp, Homo sapiens
gtggagcagcccctgtaaactggctcgggcgcccccacgcccgcccttccttcttctcccagcattgcccccccccacgtttcagcacagcgctggccgcagtctgacaggaaagggacggagccaagatggcggcggccgacggcgacgactcgctgtaccccatcgcggtgctcatagacgaactccgcaatgaggacgttcagcttcgcctcaacagcatcaagaagctgtccaccatcgccttggcccttggggttgaaaggacccgaagtgagcttctgcctttccttacagataccatctatgatgaagatgaggtcctcctggccctggcagaacagctgggaaccttcactaccctggtgggaggcccagagtacgtgcactgcctgctgccaccgctggagtcgctggccacagtggaggagacagtggtgcgggacaaggcagtggagtccttacgggccatctcacacgagcactcgccctctgacctggaggcgcactttgtgccgctagtgaagcggctggcgggcggcgactggttcacctcccgcacctcggcctgcggcctcttctccgtctgctacccccgagtgtccagtgctgtgaaggcggaacttcgacagtacttccggaacctgtgctcagatgacacccccatggtgcggcgggccgcagcctccaagctgggggagtttgccaaggtgctggagctggacaacgtcaagagtgagatcatccccatgttctccaacctggcctctgacgagcaggactcggtgcggctgctggcggtggaggcgtgcgtgaacatcgcccagcttctgccccaggaggatctggaggccctggtgatgcccactctgcgccaggccgctgaagacaagtcctggcgcgtccgctacatggtggctgacaagttcacagagctccagaaagcagtggggcctgagatcaccaagacagacctggtccctgccttccagaacctgatgaaagactgtgaggccgaggtgagggccgcagcctcccacaaggtcaaagagttctgtgaaaacctctcagctgactgtcgggagaatgtgatcatgtcccagatcttgccctgcatcaaggagctggtgtccgatgccaaccaacatgtcaagtctgccctggcctcagtcatcatgggtctctctcccatcttgggcaaagacaacaccatcgagcacctcttgcccctcttcctggctcagctgaaggatgagtgccctgaggtacggctgaacatcatctctaacctggactgtgtgaacgaggtgattggcatccggcagctgtcccagtccctgctccctgccattgtggagctggctgaggacgccaagtggcgggtgcggctggccatcattgagtacatgcccctcctggctggacagctgggagtggagttctttgatgagaaacttaactccttgtgcatggcctggcttgtggatcatgtatgtgccatccgcgaggcagccattaaaaagacggccagtcgtatgggcggccgagggaagatgcgggggaaagtgcagccaagcctcgcgatgttgcccatgcacggagagcgattaaccagc

SEQ ID NO: 323259 - DNA, 2158 bp, Homo sapiens
aacagagtggtcctggaaagtgcaactgacttcgcctcaacagcatcaagaagctgtccaccatcgccttggcccttggggttgaaaggacccgaagtgagcttctgcctttccttacagataccatctatgatgaagatgaggtcctcctggccctggcagaacagctgggaaccttcactaccctggtgggaggcccagagtacgtgcactgcctgctgccaccgctggagtcgctggccacagtggaggagacagtggtgcgggacaaggcagtggagtccttacgggccatctcacacgagcactcgccctctgacctggaggcgcactttgtgccgctagtgaagcggctggcgggcggcgactggttcacctcccgcacctcggcctgcggcctcttctccgtctgctacccccgagtgtccagtgctgtgaaggcggaacttcgacagtacttccggaacctgtgctcagatgacacccccatggtgcggcgggccgcagcctccaagctgggggagtttgccaaggtgctggagctggacaacgtcaagagtgagatcatccccatgttctccaacctggcctctgacgagcaggactcggtgcggctgctggcggtggaggcgtgcgtgaacatcgcccagcttctgccccaggaggatctggaggccctggtgatgcccactctgcgccaggccgctgaagacaagtcctggcgcgtccgctacatggtggctgacaagttcacagagctccagaaagcagtggggcctgagatcaccaagacagacctggtccctgccttccagaacctgatgaaagactgtgaggccgaggtgagggccgcagcctcccacaaggtcaaagagttctgtgaaaacctctcagctgactgtcgggagaatgtgatcatgtcccagatcttgccctgcatcaaggagctggtgtccgatgccaaccaacatgtcaagtctgccctggcctcagtcatcatgggtctctctcccatcttgggcaaagacaacaccatcgagcacctcttgcccctcttcctggctcagctgaaggatgagtgccctgaggtacggctgaacatcatctctaacctggactgtgtgaacgaggtgattggcatccggcagctgtcccagtccctgctccctgccattgtggagctggctgaggacgccaagtggcgggtgcggctggccatcattgagtacatgcccctcctggctggacagctgggagtggagttctttgatgagaaacttaactccttgtgcatggcctggcttgtggatcatgtatatgccatccgcgaggcagccaccagcaacctgaagaagctagtggaaaagtttgggaaggagtgggcccatgccacaatcatccccaaggtcttggccatgtccggagaccccaactacctgcaccgcatgactacgctcttctgcatcaatgtgctgtctgaggtctgtgggcaggacatcaccaccaagcacatgctacccacggttctgcgcatggctggggacccggttgccaatgtccgcttcaatgtggccaagtctctgcagaagatagggcccatcctggacaacagcaccttgcagagtgaagtcaagcccatcctagagaagctgacccaggaccaggatgtggacgtcaaatactttgcccaggaggctctgactgttctgtctctcgcctgatgctggaagaggagcaaacactggcctctggtgtccaccctccaacccccacaagtccctctttggggagacactggggggcctttggctgtcactccctgtgcatggtctgaccccaggccccttcccccagcacggttcctcctctccccagcctgggaagatgtctcactgtccacctcccaacgggctaggggagcacggggttggacaggacagtgaccttgggaggaaggggctactccgcccacgtcagggagagatgtgagcatcccgggtcactggatcctgctgctgtaatgggaacccctcccccatttacttctccacctcccgtcctccccatcattggtttttttttgtgtgtcaactgtgccgtttttattttattccttttattttcccccttttcacagagaaataaaggtctagaagta

SEQ ID NO: 323260 - DNA, 1944 bp, Homo sapiens
tattatgcgcaatctgcgaagtgtctcacacacactattttcatttaaacctcatgcggacctgtggggtaggtactgttactatcagctccgtttcatagggctgggaagacagagagggggtcatcacttgcccaaggtcattcagctaaaacctggacccacacaactgcagagtctgtgcttgctcctctctgccatactgcctgctgcctcaggatccccgtccccgactcccaggtacttccggaacctgtgctcagatgacacccccatggtgcggcgggccgcagcctccaagctgggggagtttgccaaggtgctggagctggacaacgtcaagagtgagatcatccccatgttctccaacctggcctctgacgagcaggactcggtgcggctgctggcggtggaggcgtgcgtgaacatcgcccagcttctgccccaggaggatctggaggccctggtgatgcccactctgcgccaggccgctgaagacaagtcctggcgcgtccgctacatggtggctgacaagttcacagagctccagaaagcagtggggcctgagatcaccaagacagacctggtccctgccttccagaacctgatgaaagactgtgaggccgaggtgagggccgcagcctcccacaaggtcaaagagttctgtgaaaacctctcagctgactgtcgggagaatgtgatcatgtcccagatcttgccctgcatcaaggagctggtgtccgatgccaaccaacatgtcaagtctgccctggcctcagtcatcatgggtctctctcccatcttgggcaaagacaacaccatcgagcacctcttgcccctcttcctggctcagctgaaggatgagtgccctgaggtacggctgaacatcatctctaacctggactgtgtgaacgaggtgattggcatccggcagctgtcccagtccctgctccctgccattgtggagctggctgaggacgccaagtggcgggtgcggctggccatcattgagtacatgcccctcctggctggacagctgggagtggagttctttgatgagaaacttaactccttgtgcatggcctggcttgtggatcatgtatatgccatccgcgaggcagccaccagcaacctgaagaagctagtggaaaagtttgggaaggagtgggcccatgccacaatcatccccaaggtcttggccatgtccggagaccccaactacctgcaccgcatgactacgctcttctgcatcaatgtgctgtctgaggtctgtgggcaggacatcaccaccaagcacatgctacccacggttctgcgcatggctggggacccggttgccaatgtccgcttcaatgtggccaagtctctgcagaagatagggcccatcctggacaacagcaccttgcagagtgaagtcaagcccatcctagagaagctgacccaggaccaggatgtggacgtcaaatactttgcccaggaggctctgactgttctgtctctcgcctgatgctggaagaggagcaaacactggcctctggtgtccaccctccaacccccacaagtccctctttggggagacactggggggcctttggctgtcactccctgtgcatggtctgaccccaggccccttcccccagcacggttcctcctctccccagcctgggaagatgtctcactgtccacctcccaacgggctaggggagcacggggttggacaggacagtgaccttgggaggaaggggctactccgcccacgtcagggagagatgtgagcatcccgggtcactggatcctgctgctgtaatgggaacccctcccccatttacttctccacctcccgtcctccccatcattggtttttttttgtgtgtcaactgtgccgtttttattttattccttttattttcccccttttcacagagaaataaaggtctagaagta

SEQ ID NO: 323261 - DNA, 1082 bp, Homo sapiens
  misc_feature (891)..(891): n is a, c, g, or t
  misc_feature (906)..(906): n is a, c, g, or t
gtggagcagcccctgtaaactggctcgggcgcccccacgcccgcccttccttcttctcccagcattgcccccccccacgtttcagcacagcgctggccgcagtctgacaggaaagggacggagccaagatggcggcggccgacggcgacgactcgctgtaccccatcgcggtgctcatagacgaactccgcaatgaggacgttcagcttcgcctcaacagcatcaagaagctgtccaccatcgccttggcccttggggttgaaaggacccgaagtgagcttctgcctttccttacagataccatctatgatgaagatgaggtcctcctggccctggcagaacagctgggaaccttcactaccctggtgggaggcccagagtacgtgcactgcctgctgccaccgctggagtcgctggccacagtggaggagacagtggtgcgggacaaggcagtggagtccttacgggccatctcacacgagcactcgccctctgacctggaggcgcactttgtgccgctagtgaagcggctggcgggcggcgactggttcacctcccgcacctcggcctgcggcctcttctccgtctgctacccccgagtgtccagtgctgtgaaggcggaacttcgacagtacttccggaacctgtgctcagatgacacccccatggtgcggcgggccgcagcctccaagctgggggagtttgccaaggtgctggagctggacaacgtcaagagtgagatcatccccatgttctccaacctggcctctgacgagcaggactcggtgcggctgctggcggtggaggcgtgcgtgaacatcgcccagcttctgccccaggaggatctggaggccctggtgatgcccactctgcgccaggccgctgaagagngggaaaaaagcgggngcccaaaggggcgcaacgtcacaacccaaagacgggggcgggaacccgaagacgggccgcccccagctggagacgcggcgcggggcgcgccccaggaaagggaacaacaccgcgggagacagccgccccgcagagcgcggccacaaacaacgccctggtcgctcgcaacaacacca

SEQ ID NO: 323262 - DNA, 1229 bp, Homo sapiens
aataggctaggtacgaggctgggtttgaatcggccgcaacatgtcaagtctgccctggcctcagtcatcatgggtctctctcccatcttgggcaaagacaacaccatcgagcacctcttgcccctcttcctggctcagctgaaggatgagtgccctgaggtacggctgaacatcatctctaacctggactgtgtgaacgaggtgattggcatccggcagctgtcccagtccctgctccctgccattgtggagctggctgaggacgccaagtggcgggtgcggctggccatcattgagtacatgcccctcctggctggacagctgggagtggagttctttgatgagaaacttaactccttgtgcatggcctggcttgtggatcatgtatatgccatccgcgaggcagccaccagcaacctgaagaagctagtggaaaagtttgggaaggagtgggcccatgccacaatcatccccaaggtcttggccatgtccggagaccccaactacctgcaccgcatgactacgctcttctgcatcaatgtgctgtctgaggtctgtgggcaggacatcaccaccaagcacatgctacccacggttctgcgcatggctggggacccggttgccaatgtccgcttcaatgtggccaagtctctgcagaagatagggcccatcctggacaacagcaccttgcagagtgaagtcaagcccatcctagagaagctgacccaggaccaggatgtggacgtcaaatactttgcccaggaggctctgactgttctgtctctcgcctgatgctggaagaggagcaaacactggcctctggtgtccaccctccaacccccacaagtccctctttggggagacactggggggcctttggctgtcactccctgtgcatggtctgaccccaggccccttcccccagcacggttcctcctctccccagcctgggaagatgtctcactgtccacctcccaacgggctaggggagcacggggttggacaggacagtgaccttgggaggaaggggctactccgcccacgtcagggagagatgtgagcatcccgggtcactggatcctgctgctgtaatgggaacccctcccccatttacttctccacctcccgtcctccccatcattggtttttttttgtgtgtcaactgtgccgtttttattttattccttttattttcccccttttcacagagaaataaaggtctagaagta

SEQ ID NO: 323263 - DNA, 872 bp, Homo sapiens
  misc_feature (16)..(16): n is a, c, g, or t
  misc_feature (23)..(23): n is a, c, g, or t
  misc_feature (25)..(26): n is a, c, g, or t
  misc_feature (37)..(37): n is a, c, g, or t
  misc_feature (44)..(44): n is a, c, g, or t
  misc_feature (49)..(50): n is a, c, g, or t
  misc_feature (63)..(63): n is a, c, g, or t
  misc_feature (74)..(74): n is a, c, g, or t
gctgactgagctgtcntgtcagntnntgtatataccntcctcgntgcannatccaacgtcttnaagatccgcgnggcaaagtacgggccggcgttttaccatgccacaatcatccccaaggtcttggccatgtccggagaccccaactacctgcaccgcatgactacgctcttctgcatcaatgtgctgtctgaggtctgtgggcaggacatcaccaccaagcacatgctacccacggttctgcgcatggctggggacccggttgccaatgtccgcttcaatgtggccaagtctctgcagaagatagggcccatcctggacaacagcaccttgcagagtgaagtcaagcccatcctagagaagctgacccaggaccaggatgtggacgtcaaatactttgcccaggaggctctgactgttctgtctctcgcctgatgctggaagaggagcaaacactggcctctggtgtccaccctccaacccccacaagtccctctttggggagacactggggggcctttggctgtcactccctgtgcatggtctgaccccaggccccttcccccagcacggttcctcctctccccagcctgggaagatgtctcactgtccacctcccaacgggctaggggagcacggggttggacaggacagtgaccttgggaggaaggggctactccgcccacgtcagggagagatgtgagcatcccgggtcactggatcctgctgctgtaatgggaacccctcccccatttacttctccacctcccgtcctccccatcattggtttttttttgtgtgtcaactgtgccgtttttattttattccttttattttcccccttttcacagagaaataaaggtctagaagta

SEQ ID NO: 323264 - DNA, 1406 bp, Homo sapiens
gtggagcagcccctgtaaactggctcgggcgcccccacgcccgcccttccttcttctcccagcattgcccccccccacgtttcagcacagcgctggccgcagtctgacaggaaagggacggagccaagatggcggcggccgacggcgacgactcgctgtaccccatcgcggtgctcatagacgaactccgcaatgaggacgttcagcttcgcctcaacagcatcaagaagctgtccaccatcgccttggcccttggggttgaaaggacccgaagtgagcttctgcctttccttacagataccatctatgatgaagatgaggtcctcctggccctggcagaacagctgggaaccttcactaccctggtgggaggcccagagtacgtgcactgcctgctgccaccgctggagtcgctggccacagtggaggagacagtggtgcgggacaaggcagtggagtccttacgggccatctcacacgagcactcgccctctgacctggaggcgcactttgtgccgctagtgaagcggctggcgggcggcgactggttcacctcccgcacctcggcctgcggcctcttctccgtctgctacccccgagtgtccagtgctgtgaaggcggaacttcgacagtgagtctctgcctccttggaagctccaagctcccatctcagctccaaccttctctaaagcctcagactccttttggtctagctggggcccaaatgcccctgaactctctccactcccactcctgcttaccacctgataggccacatcctcgagagttggtctctggacacggccacgtgtcagtttacccacctctgcccccttgctcacttaggaattgagatgatgacaggtcctccttcccactggttaatgtgaggatttaaaagaattatcacacataaagtgcttagagcaaaatctggaacataaaaactttcagcaacttacatctgatggtatctccagcctgtcccaggtccagtgcctttggcagataaaccacctcagttttcagcctcctgctcgtctactttgcaaacgattgaccgtcaagcccgggtttgagcctgactcactccagaactctggtttatggctgtacacttgcttagatacttacactggcccccaccgcctttgatcgaagcaattgctgctgaaaaataaagcctttctgtggctctagacctgcctcttagttaagcagttttttgtttgtttgttttttgagataggatctcgctctgtcatccaggctgaagtgcactggtgcagtcatagcccactgcagcctcaacctcctgggctcaagcattcctcctgccttagcctctcaaatagctgggaccacaggtgtgcaacaccacgctgggctcattttttatttttggc

SEQ ID NO: 323265 - DNA, 395 bp, Homo sapiens
ggtggcttagctgtggtcctcactttccccacctagggcctagagacaggagcagggctaagcccactggatttttaaatgtatagctgaacgtcacttgaatcagagcctcatcaatgtctagcactttttgctgttgtttctaccccttgagggagtgtatttaccctgcccccagtcctctgtattcaacagaatacaattcttgtatatgaagacaacacgggcttaccatgacaagcctagaagaggtcctaatgaacaggtgccctgctatctactcaggctacgaaagaaaagactagagattcctccaaactacagactcgattcatgggagatgctctccacctctaactggtttccaagaatccaccatagtgggccatcttgtt

SEQ ID NO: 323266 - DNA, 738 bp, Homo sapiens
aatcaaattccctcaggattggttgctggacaattccactaacacttacaatgggacaaggggaaccaggagacccctcaagtggatcactgggttccacacacattcctcctgccctcattgtgacagcagcccaacctcctcctggagattaggatctattacctgtgcctggagaggaggggactcctcacttgctggtctctgggcacatactgtccaaatctctctgggggcaatagtaatgtgttcttcagtaggctctcatttgtcctgatttaagagtaccttcctttagaatccaggaccttctaccctgcagagcacaggtttgggagatgagaagtgcaaaatcccacagcaggtgaatctaaggaatgagacatggagccatacccactttcactccttagtttctggacccacatgttcttcctactgagaacacggcactgtagagatgtctctgatttaataaatgcaccatgtcccgaaagacagcacccacccctcagagtgcttcctccaggctggcactgagttgtgcctgtagaagacctgtccagcattcttagtggctggcagaccctgggtggtgcagatggtgatagaaccagtggatcccatggccatgaaaatgctgcacctgcttccctgtcaagtgggttccaccaggaagacagtgtgctaagagcaatgccatgcctgtgaatcaggaatgtcaacagtccctggaga

SEQ ID NO: 323267 - DNA, 251 bp, Homo sapiens
cctttcccctggcttacagtaggggctcaatcagtgtatgtggattgaatgaatgaaagttctctctagttcattgtatgggactagctgatggcgttagagacaccctccgccccatatgtccaaagtggcttcagatctgccccggaggaacccccactctgggaaaacagagctggaccaacagctgctgtggtgtcagggctgggataaatggaaggacaggaatggggtgtcccagagggctctct

SEQ ID NO: 323268 - DNA, 286 bp, Homo sapiens
aaaaaaacaaaacagcattctcagagtaaaaatattagacctggaagcaaccttagaaatcatcatgctttagcagtggattttagaaataggaaactttttattaggtgagatgatttgcctgggattatgcagtagcaaaagcatttaagaatctggatttctgcctcagtctcagaatttcttgttacatgggtatattttatttttatttttatttatttatttatttatttatttatttgagatggagttttgctcttgttgcttaagctggagtgcaatg

SEQ ID NO: 323269 - DNA, 890 bp, Homo sapiens
cccgccacgacgtccggctaatttttgtatttttagtagagacgaggtttcaccgtgttagccaggatggtctccatctcctgacctcgtgatccaccagcactttgggaagccaaggtgggcggatcacttcaggttaggagttggagaccagcctggccaacatggcgaaaccctgtctctactaaaaatacaaaaattagccgggcgtggtggcacttgcctgtaatcccagctactcgggaggctgaggcacgagaatcgattaaacctgggaggcggagattgcaatgagatcgaaccactgcactccagcctgggtgacagagagagacactgccttggaaaaaaaaagaatctcactcactatctagagaggattgtcagaatattcacgattcaggtcttgaaactttgattatgcaaaagaaggtatataataaatatttcattatgattcagtttttaaggctttgcagcttctataagtgttctcagatgccactagataattttaaaagcatcatattagaaatactttaagaagacttatataagaaatagaagattgttgaattttacagaggatttggttcattaagacccagattctgtaagttttcattctgaaattctagttaaacatattcaccatttttcttaggaatcttatacaataaatccttcaggttgcacaaaagcaaattattagttttcattagaaactctggttctgaattacaatcataggttatataaatttaactgttagatggtctataaaaatgacaaatcttattaaaatatgtgcaatatttatggaagtcaaacagcttcatatcagtgataaagattgttattaaaagataaatactgtctgttaatttaca

SEQ ID NO: 323270 - DNA, 687 bp, Homo sapiens
aataatcagaagtggttttcatttgggcatttggttttgcaactgttcttgtcctgtcatgccagtgtacctttttctttgaagcggtgacctttttgtaattatttggtcaaaaaccaagtcaaggtggatgctgtcttaactatgcctagactaattatgttgcattaattatacctgggttatttgccttgcagcatgtgcctaagcctggacacaagagaacagactccacccacagcagcaacgagtctgaatatatctttagctctgaaattgcagaaatggaagacattccatcaaggacagaggtacagtttagacatctgtcactgaaagtaggatatgagcatgctgttgttaacaaggaacatttccattgcaaagcagactccaattggccataaacatagtatttgtttgaatcatttattcttcataagtgacttgtagatacaaacttatttacatttttgtatacttaagtgctgtgtacatacatacctattgcatttttttgtcaatacaaattttaattttaatttttaatgcaattttgatggtgagattttatttttataattctctttacccctaacatgatatgtttacaggaatttatttcagactgaggtaaattattttatttttacttattatttatttactttatatctgtggaccacc

SEQ ID NO: 323271 - DNA, 7755 bp, Homo sapiens
aatacaccccgggcaggtggagcgctcgcggctgctcgcggcgagcccgggagtgatggcgaggcccctgcgggcggccagcgcctgaggcgccccgccccgccccgccccgcgcggccctccccgcccggccctgccctgccctgctccctgccggcggctgcgggcgcttcctagtccgctcgggcggccgcccaggcgaggtgcggcctccgcacaggccggggggcgtaggcgcgcggggcccgccatggctgcgtcggagctctacacaaagtttgccagggtttggatacctgatccagaggaagtctggaagtcagcagagctgctcaaagattataagccaggagataaagtcctcctgcttcacctcgaggaaggaaaggatttggaataccatctagatccaaagaccaaggagctgcctcacttacgaaatcctgacatacttgttggtgaaaatgacctcacagccctcagctatcttcatgagcctgctgtgctccataatctcagagtccgctttattgattccaaacttatttatacgtattgtggtatagtcctagtagctataaatccctatgaacagctgcctatttatggagaagatattattaatgcatacagtggtcagaacatgggtgatatggatccacatatctttgcagtagctgaagaagcttacaagcaaatggccagagatgaacgaaatcagtccatcatcgtaagtggagagtctggggcaggaaaaacagtctcagctaagtatgccatgcgatactttgcaactgtgagtggttctgccagtgaggccaatgtggaggaaaaggtcttggcctccaaccccatcatggagtccattggaaatgctaaaacaaccaggaatgataatagcagccgttttgggaagtatattgagattggttttgataagagatatcgaatcattggtgccaatatgagaacttatcttttagagaaatccagagtggtattccaggcagaagaggagagaaactatcatatcttctatcagctttgtgcctcagcaaagttacctgaatttaaaatgctacgattaggaaatgcagataactttaattacacaaaacaaggaggcagtcctgtgattgaaggagtggatgatgcaaaggagatggcacatactaggcaggcctgcactttgctaggaattagtgaatctcatcaaatgggaattttccgaatacttgctggcatccttcacttaggcaatgttggatttacatcccgagatgcagacagctgcacaatacctcccaagcatgaacctctctgcatcttctgtgacctcatgggtgtggactatgaggagatgtgtcactggctctgccatcggaaactggctactgccacagagacatacatcaagcccatctccaagctgcaggccacgaatgcccgcgatgctttggccaaacacatctatgccaagctctttaactggattgtagataatgtcaatcaggctctccattctgctgtcaaacagcactcttttattggtgtgctagacatttacggatttgaaacatttgagataaatagttttgaacagttttgcataaattatgcaaatgaaaaactacagcaacaattcaatatgcatgtcttcaaattggagcaagaagaatatatgaaggaacaaattccatggacactcatagatttttatgataatcagccttgtattaatcttatagaatcaaaactaggcattctagatttactggatgaggaatgcaagatgcctaaaggcacagatgacacctgggcccaaaaattgtacaacacacatttgaacaaatgtgcactctttgaaaagcctcgtctatcaaacaaagctttcatcatccaacattttgctgacaaagtggaataccagtgtgaaggatttctcgaaaagaataaagacaccgtttttgaagaacaaattaaagttcttaaatcaagcaagtttaagatgctaccagaactatttcaagatgatgagaaggccatcagtccaacttcagccacctcctcagggcgcacacccctcacacgaactcctgcaaagcccaccaaaggcagaccaggccaaatggccaaagagcacaagaaaacagtggggcatcagttcagaaactccctgcacctgcttatggagacactcaatgccactacccctcactatgtgcgctgtatcaagcctaatgacttcaagttcccattcacgtttgatgagaagagggcagtgcagcagctgagagcatgtggtgtcctggaaaccatccgaatcagtgcggccggtttcccctcacggtggacttaccaagaatttttcagccgctaccgtgtcctaatgaagcagaaagatgtgctgagtgacagaaagcaaacatgcaagaatgtgttagagaaactgatactggacaaggacaaataccagtttggtaagacaaagatctttttccgtgccggtcaagtggcctatctagaaaaattgagagctgacaaactgagagctgcctgcatccggatccagaagaccatccgagggtggctgctgagaaagaagtacctacgcatgcggaaggcagccatcaccatgcagagatacgtgcggggctaccaggcccgatgctatgctaagtttctgcgcagaaccaaggcagcaaccatcattcaaaagtactggcgcatgtatgtggtccgcaggaggtacaagattagacgagctgccactattgttcttcagtcttacttgcgaggcttcttggccagaaataggtatcgcaagatactccgtgagcacaaagcagtcatcattcagaagcgagtccggggctggctggcccgcacacactacaagaggagcatgcatgccatcatctaccttcagtgctgcttcaggcggatgatggccaagcgtgagctaaagaagctcaaaatcgaggctcgctcagtggagcgctataagaagctgcacatcggcatggagaacaagatcatgcagctgcagcgcaaagttgatgagcagaacaaagactacaaatgccttgtggagaaactaaccaatctggaaggaatatacaactctgagactgagaaactacgaagtgacttagaacgtcttcaactaagtgaagaggaagcgaaagttgccactgggcgggtccttagtctgcaggaagaaattgccaagctccggaaagacctggagcaaactcgttcagagaaaaaatgcattgaggaacatgcagatcgatacaaacaagaaacagagcagctggtatcaaatctgaaggaagaaaatactttgctgaagcaagaaaaagaagccctcaatcaccgcatcgtgcagcaggctaaggagatgacagaaactatggagaagaagttagtagaagaaacgaaacaactggaactcgaccttaatgatgaaaggctgagatatcagaaccttctgaatgagttcagtcgcctggaagaaagatatgatgacctcaaggaagagatgacccttatggtgcatgtgcctaagcctggacacaagagaacagactccacccacagcagcaacgagtctgaatatatctttagctctgaaattgcagaaatggaagacattccatcaaggacagaggaaccaagtgagaagaaggtacctctggacatgtcattgttccttaagctccagaagcgggtcacagagctggagcaggagaagcaggtgatgcaggatgagctggaccgcaaggaggagcaggtgctccgcagcaaggccaaggaagaagaaagaccacaaattagaggtgcagaactggaatatgagtcactcaagcgtcaagaactagaatcagaaaacaaaaaactgaagaatgagctaaatgagttgcgcaaggccctcagtgagaaaagtgccccagaggtgaccgccccaggtgcacctgcctaccgtgtcctcatggagcagctgacctctgtgagcgaggagcttgatgtccgcaaggaggaagtcctcatcttaaggtctcaactggtgagccagaaagaggccatccaacccaaggatgacaagaatacaatgacagattccacaatacttttggaagatgtacaaaaaatgaaagataaaggtgaaatagcacaagcatacattggtttgaaagaaacaaatagatcatctgctctggattaccatgagttgaatgaggatggagagctgtggctggtttatgaagggttaaaacaagccaacaggctcctggaatcccagctgcagtcacagaagaggagccatgagaatgaggccgaggccctccgtggggagatccagagcctgaaggaggagaacaaccgacagcagcagctgctggcccagaacctgcagctgcccccagaggcccgcattgaggccagcctgcagcacgagatcacccggctgaccaacgaaaacttgtattttgaggaattatatgcagatgaccctaagaagtatcaatcatatcggatttccctttacaaacggatgattgatttgatggaacaacttgaaaaacaggataagacggtccgtaaactgaaaaaacaactgaaagtatttgccaaaaaaattggcgaactagaagtgggccagatggagaacatatccccaggacagatcattgatgaacccatccgaccagtcaacattcccaggaaagaaaaggatttccaagggatgctggaatacaagaaggaggatgagcaaaaacttgttaagaacctgattctggaactgaagccacgtggtgtagcagtcaatttgattccaggattaccggcatatatcctgttcatgtgtgttcgacatgctgactacctgaatgatgatcagaaagtaaggtcgttgctaacatcaacaattaacagcatcaaaaaagtattgaagaaaagaggtgatgattttgaaaccgtctccttctggctctctaacacatgccgatttttgcactgcttgaaacagtacagtggagaagagggctttatgaagcacaacacatctcgccagaatgaacactgcctcaccaattttgacctggctgagtatcggcaggtgctgagtgacttggccattcagatctaccagcagctcgtgcgggtgttagagaacatccttcagccaatgattgtctcaggcatgctggaacatgaaacgattcagggcgtgtctggggtgaagcccacagggttgagaaagcgaacctccagtatcgccgatgagggcacctacacactggactccatcctccggcagctcaactccttccactcggtcatgtgtcagcatggcatggaccctgaactgatcaagcaggtggtcaagcagatgttctacatcataggggccatcaccctgaacaaccttctcctgcggaaggacatgtgctcctggagtaaaggcatgcagatcaggtacaatgtcagtcaactggaagaatggctgcgtgacaagaatctgatgaatagtggggctaaagaaaccctggaacctctcattcaggctgctcaacttttgcaagtgaaaaagaaaacagatgatgatgcagaagccatttgttctatgtgcaatgctttaactactgcccagattgtgaaagtgttgaatttgtatactccagttaatgagtttgaagaaagagtctctgtgtcgttcattcgtactatacagatgcgtttacgagacaggaaagactctccccagctgctcatggatgctaaacacatctttcctgtcacctttcctttcaacccatcttccctcgcactagaaaccatccagattccagccagcctcggcctgggcttcatttcacgggtctgaaagtgatgtccaggcaaaaattgacaatacatttcttgcccgaaataagaacccattatttccagtgagttactgaaaatacatttttaaagagaaagtactgattatctcccaaatgagaagtcattaactggaaatctccctagaatactttcatcactttggaaacaaagataggctctttcgtgctgtgttatctttatagcaacactcatccttaaccaactaggtaccgtgagtttacatacaggagaatgatggaaggaagggaggaaggaaaggaggagaaaaatgtgtcttcagctggcagcatttattttaaatccttagcactgagtttgaatggtataaaaagtataacttccatagatgagctgttgttaggaaggcaccaaagaacctcctctgcactaaacaggagaatggaaagaaaagtctccattgagtacatatcatgtcagtttagtaatcaattatgttgatattgttaaactggttcaaagaaataaactggcaatatgtaaagtaattcctcatttgtgtcactatgatatagagatattaaaggaatgttggtttgctaaatagtatagatgtccatttgtactatagtttactgagcattttaaattgctgctacatactgtcttcttaaaatgtaagtgatattaggcactacaataagtttctcttgtcaattctgtttacaattcaatcagatcacagttttaactggattatatgcaaatacctacagattcacctgcacaagtagcagacactggaaagtcatgtagtaatatgacaaaatgcttgacatttaggggtaggattagacaaagtggctattgttgatgtcattatttattcaggatgtattacattgatgtgctcattaattttccctgggtggatattgcgtcagggtacagtgttctgtgaagtgacttatttttaactaccagatctgattccttcagtgcatattttcaaccttgacaggttttctctcttcttaatttattaagaattaatctcggctgggcgcggtggctcacgcctgtaatcccagcactttgggaagccaaggtgggcggatcacttcaggttaggagttggagaccagcctggccaacatggcgaaaccctgtctctactaaaaatacaaaaattagccgggcgtggtggcacttgcctgtaatcccagctactcgggaggctgaggcacgagaatcgattaaacctgggaggcggagattgcaatgagatcgaaccactgcactccagcctgggtgacagagagagacactgccttggaaaaaaaaagaatctcactcactatctagagaggattgtcagaatattcacgattcaggtcttgaaactttgattatgcaaaagaaggtatataataaatatttcattatgattcagtttttaaggctttgcagcttctataagtgttctcagatgccactagataattttaaaagcatcatattagaaatactttaagaagacttatataagaaatagaagattgttgaattttacagaggatttggttcattaagacccagattctgtaagttttcattctgaaattctagttaaacatattcaccatttttcttaggaatcttatacaataaatccttcaggttgcacaaaagcaaattattagttttcattagaaactctggttctgaattacaatcataggttatataaatttaactgttagatggtctataaaaatgacaaatcttattaaaatatgtgcaatatttatggaagtcaaacagcttcatatcagtgataaagattgttattaaaagataaatactgtctgttaatttaca

SEQ ID NO: 323272 - DNA, 7674 bp, Homo sapiens
aatacaccccgggcaggtggagcgctcgcggctgctcgcggcgagcccgggagtgatggcgaggcccctgcgggcggccagcgcctgaggcgccccgccccgccccgccccgcgcggccctccccgcccggccctgccctgccctgctccctgccggcggctgcgggcgcttcctagtccgctcgggcggccgcccaggcgaggtgcggcctccgcacaggccggggggcgtaggcgcgcggggcccgccatggctgcgtcggagctctacacaaagtttgccagggtttggatacctgatccagaggaagtctggaagtcagcagagctgctcaaagattataagccaggagataaagtcctcctgcttcacctcgaggaaggaaaggatttggaataccatctagatccaaagaccaaggagctgcctcacttacgaaatcctgacatacttgttggtgaaaatgacctcacagccctcagctatcttcatgagcctgctgtgctccataatctcagagtccgctttattgattccaaacttatttatacgtattgtggtatagtcctagtagctataaatccctatgaacagctgcctatttatggagaagatattattaatgcatacagtggtcagaacatgggtgatatggatccacatatctttgcagtagctgaagaagcttacaagcaaatggccagagatgaacgaaatcagtccatcatcgtaagtggagagtctggggcaggaaaaacagtctcagctaagtatgccatgcgatactttgcaactgtgagtggttctgccagtgaggccaatgtggaggaaaaggtcttggcctccaaccccatcatggagtccattggaaatgctaaaacaaccaggaatgataatagcagccgttttgggaagtatattgagattggttttgataagagatatcgaatcattggtgccaatatgagaacttatcttttagagaaatccagagtggtattccaggcagaagaggagagaaactatcatatcttctatcagctttgtgcctcagcaaagttacctgaatttaaaatgctacgattaggaaatgcagataactttaattacacaaaacaaggaggcagtcctgtgattgaaggagtggatgatgcaaaggagatggcacatactaggcaggcctgcactttgctaggaattagtgaatctcatcaaatgggaattttccgaatacttgctggcatccttcacttaggcaatgttggatttacatcccgagatgcagacagctgcacaatacctcccaagcatgaacctctctgcatcttctgtgacctcatgggtgtggactatgaggagatgtgtcactggctctgccatcggaaactggctactgccacagagacatacatcaagcccatctccaagctgcaggccacgaatgcccgcgatgctttggccaaacacatctatgccaagctctttaactggattgtagataatgtcaatcaggctctccattctgctgtcaaacagcactcttttattggtgtgctagacatttacggatttgaaacatttgagataaatagttttgaacagttttgcataaattatgcaaatgaaaaactacagcaacaattcaatatgcatgtcttcaaattggagcaagaagaatatatgaaggaacaaattccatggacactcatagatttttatgataatcagccttgtattaatcttatagaatcaaaactaggcattctagatttactggatgaggaatgcaagatgcctaaaggcacagatgacacctgggcccaaaaattgtacaacacacatttgaacaaatgtgcactctttgaaaagcctcgtctatcaaacaaagctttcatcatccaacattttgctgacaaagtggaataccagtgtgaaggatttctcgaaaagaataaagacaccgtttttgaagaacaaattaaagttcttaaatcaagcaagtttaagatgctaccagaactatttcaagatgatgagaaggccatcagtccaacttcagccacctcctcagggcgcacacccctcacacgaactcctgcaaagcccaccaaaggcagaccaggccaaatggccaaagagcacaagaaaacagtggggcatcagttcagaaactccctgcacctgcttatggagacactcaatgccactacccctcactatgtgcgctgtatcaagcctaatgacttcaagttcccattcacgtttgatgagaagagggcagtgcagcagctgagagcatgtggtgtcctggaaaccatccgaatcagtgcggccggtttcccctcacggtggacttaccaagaatttttcagccgctaccgtgtcctaatgaagcagaaagatgtgctgagtgacagaaagcaaacatgcaagaatgtgttagagaaactgatactggacaaggacaaataccagtttggtaagacaaagatctttttccgtgccggtcaagtggcctatctagaaaaattgagagctgacaaactgagagctgcctgcatccggatccagaagaccatccgagggtggctgctgagaaagaagtacctacgcatgcggaaggcagccatcaccatgcagagatacgtgcggggctaccaggcccgatgctatgctaagtttctgcgcagaaccaaggcagcaaccatcattcaaaagtactggcgcatgtatgtggtccgcaggaggtacaagattagacgagctgccactattgttcttcagtcttacttgcgaggcttcttggccagaaataggtatcgcaagatactccgtgagcacaaagcagtcatcattcagaagcgagtccggggctggctggcccgcacacactacaagaggagcatgcatgccatcatctaccttcagtgctgcttcaggcggatgatggccaagcgtgagctaaagaagctcaaaatcgaggctcgctcagtggagcgctataagaagctgcacatcggcatggagaacaagatcatgcagctgcagcgcaaagttgatgagcagaacaaagactacaaatgccttgtggagaaactaaccaatctggaaggaatatacaactctgagactgagaaactacgaagtgacttagaacgtcttcaactaagtgaagaggaagcgaaagttgccactgggcgggtccttagtctgcaggaagaaattgccaagctccggaaagacctggagcaaactcgttcagagaaaaaatgcattgaggaacatgcagatcgatacaaacaagaaacagagcagctggtatcaaatctgaaggaagaaaatactttgctgaagcaagaaaaagaagccctcaatcaccgcatcgtgcagcaggctaaggagatgacagaaactatggagaagaagttagtagaagaaacgaaacaactggaactcgaccttaatgatgaaaggctgagatatcagaaccttctgaatgagttcagtcgcctggaagaaagatatgatgacctcaaggaagagatgacccttatggtgcatgtgcctaagcctggacacaagagaacagactccacccacagcagcaacgagtctgaatatatctttagctctgaaattgcagaaatggaagacattccatcaaggacagaggaaccaagtgagaagaaggtacctctggacatgtcattgttccttaagctccagaagcgggtcacagagctggagcaggagaagcaggtgatgcaggatgagctggaccgcaaggaggagcaggtgctccgcagcaaggccaaggaagaagaaagaccacaaattagaggtgcagaactggaatatgagtcactcaagcgtcaagaactagaatcagaaaacaaaaaactgaagaatgagctaaatgagttgcgcaaggccctcagtgagaaaagtgccccagaggtgaccgccccaggtgcacctgcctaccgtgtcctcatggagcagctgacctctgtgagcgaggagcttgatgtccgcaaggaggaagtcctcatcttaaggtctcaactggtgagccagaaagaggccatccaacccaaggatgacaagaatacaatgacagattccacaatacttttggaagatgtacaaaaaatgaaagataaaggtgaaatagcacaagcatacattggtttgaaagaaacaaataggctcctggaatcccagctgcagtcacagaagaggagccatgagaatgaggccgaggccctccgtggggagatccagagcctgaaggaggagaacaaccgacagcagcagctgctggcccagaacctgcagctgcccccagaggcccgcattgaggccagcctgcagcacgagatcacccggctgaccaacgaaaacttgtattttgaggaattatatgcagatgaccctaagaagtatcaatcatatcggatttccctttacaaacggatgattgatttgatggaacaacttgaaaaacaggataagacggtccgtaaactgaaaaaacaactgaaagtatttgccaaaaaaattggcgaactagaagtgggccagatggagaacatatccccaggacagatcattgatgaacccatccgaccagtcaacattcccaggaaagaaaaggatttccaagggatgctggaatacaagaaggaggatgagcaaaaacttgttaagaacctgattctggaactgaagccacgtggtgtagcagtcaatttgattccaggattaccggcatatatcctgttcatgtgtgttcgacatgctgactacctgaatgatgatcagaaagtaaggtcgttgctaacatcaacaattaacagcatcaaaaaagtattgaagaaaagaggtgatgattttgaaaccgtctccttctggctctctaacacatgccgatttttgcactgcttgaaacagtacagtggagaagagggctttatgaagcacaacacatctcgccagaatgaacactgcctcaccaattttgacctggctgagtatcggcaggtgctgagtgacttggccattcagatctaccagcagctcgtgcgggtgttagagaacatccttcagccaatgattgtctcaggcatgctggaacatgaaacgattcagggcgtgtctggggtgaagcccacagggttgagaaagcgaacctccagtatcgccgatgagggcacctacacactggactccatcctccggcagctcaactccttccactcggtcatgtgtcagcatggcatggaccctgaactgatcaagcaggtggtcaagcagatgttctacatcataggggccatcaccctgaacaaccttctcctgcggaaggacatgtgctcctggagtaaaggcatgcagatcaggtacaatgtcagtcaactggaagaatggctgcgtgacaagaatctgatgaatagtggggctaaagaaaccctggaacctctcattcaggctgctcaacttttgcaagtgaaaaagaaaacagatgatgatgcagaagccatttgttctatgtgcaatgctttaactactgcccagattgtgaaagtgttgaatttgtatactccagttaatgagtttgaagaaagagtctctgtgtcgttcattcgtactatacagatgcgtttacgagacaggaaagactctccccagctgctcatggatgctaaacacatctttcctgtcacctttcctttcaacccatcttccctcgcactagaaaccatccagattccagccagcctcggcctgggcttcatttcacgggtctgaaagtgatgtccaggcaaaaattgacaatacatttcttgcccgaaataagaacccattatttccagtgagttactgaaaatacatttttaaagagaaagtactgattatctcccaaatgagaagtcattaactggaaatctccctagaatactttcatcactttggaaacaaagataggctctttcgtgctgtgttatctttatagcaacactcatccttaaccaactaggtaccgtgagtttacatacaggagaatgatggaaggaagggaggaaggaaaggaggagaaaaatgtgtcttcagctggcagcatttattttaaatccttagcactgagtttgaatggtataaaaagtataacttccatagatgagctgttgttaggaaggcaccaaagaacctcctctgcactaaacaggagaatggaaagaaaagtctccattgagtacatatcatgtcagtttagtaatcaattatgttgatattgttaaactggttcaaagaaataaactggcaatatgtaaagtaattcctcatttgtgtcactatgatatagagatattaaaggaatgttggtttgctaaatagtatagatgtccatttgtactatagtttactgagcattttaaattgctgctacatactgtcttcttaaaatgtaagtgatattaggcactacaataagtttctcttgtcaattctgtttacaattcaatcagatcacagttttaactggattatatgcaaatacctacagattcacctgcacaagtagcagacactggaaagtcatgtagtaatatgacaaaatgcttgacatttaggggtaggattagacaaagtggctattgttgatgtcattatttattcaggatgtattacattgatgtgctcattaattttccctgggtggatattgcgtcagggtacagtgttctgtgaagtgacttatttttaactaccagatctgattccttcagtgcatattttcaaccttgacaggttttctctcttcttaatttattaagaattaatctcggctgggcgcggtggctcacgcctgtaatcccagcactttgggaagccaaggtgggcggatcacttcaggttaggagttggagaccagcctggccaacatggcgaaaccctgtctctactaaaaatacaaaaattagccgggcgtggtggcacttgcctgtaatcccagctactcgggaggctgaggcacgagaatcgattaaacctgggaggcggagattgcaatgagatcgaaccactgcactccagcctgggtgacagagagagacactgccttggaaaaaaaaagaatctcactcactatctagagaggattgtcagaatattcacgattcaggtcttgaaactttgattatgcaaaagaaggtatataataaatatttcattatgattcagtttttaaggctttgcagcttctataagtgttctcagatgccactagataattttaaaagcatcatattagaaatactttaagaagacttatataagaaatagaagattgttgaattttacagaggatttggttcattaagacccagattctgtaagttttcattctgaaattctagttaaacatattcaccatttttcttaggaatcttatacaataaatccttcaggttgcacaaaagcaaattattagttttcattagaaactctggttctgaattacaatcataggttatataaatttaactgttagatggtctataaaaatgacaaatcttattaaaatatgtgcaatatttatggaagtcaaacagcttcatatcagtgataaagattgttattaaaagataaatactgtctgttaatttaca

SEQ ID NO: 323273 - DNA, 6996 bp, Homo sapiens
aggacctgtgttctactccatcttttctctctctgagcagattctgtaaatgtcatgttatgaattacacttctaaaatcttattttctcccttgctttttagtccattggaaatgctaaaacaaccaggaatgataatagcagccgttttgggaagtatattgagattggttttgataagagatatcgaatcattggtgccaatatgagaacttatcttttagagaaatccagagtggtattccaggcagaagaggagagaaactatcatatcttctatcagctttgtgcctcagcaaagttacctgaatttaaaatgctacgattaggaaatgcagataactttaattacacaaaacaaggaggcagtcctgtgattgaaggagtggatgatgcaaaggagatggcacatactaggcaggcctgcactttgctaggaattagtgaatctcatcaaatgggaattttccgaatacttgctggcatccttcacttaggcaatgttggatttacatcccgagatgcagacagctgcacaatacctcccaagcatgaacctctctgcatcttctgtgacctcatgggtgtggactatgaggagatgtgtcactggctctgccatcggaaactggctactgccacagagacatacatcaagcccatctccaagctgcaggccacgaatgcccgcgatgctttggccaaacacatctatgccaagctctttaactggattgtagataatgtcaatcaggctctccattctgctgtcaaacagcactcttttattggtgtgctagacatttacggatttgaaacatttgagataaatagttttgaacagttttgcataaattatgcaaatgaaaaactacagcaacaattcaatatgcatgtcttcaaattggagcaagaagaatatatgaaggaacaaattccatggacactcatagatttttatgataatcagccttgtattaatcttatagaatcaaaactaggcattctagatttactggatgaggaatgcaagatgcctaaaggcacagatgacacctgggcccaaaaattgtacaacacacatttgaacaaatgtgcactctttgaaaagcctcgtctatcaaacaaagctttcatcatccaacattttgctgacaaagtggaataccagtgtgaaggatttctcgaaaagaataaagacaccgtttttgaagaacaaattaaagttcttaaatcaagcaagtttaagatgctaccagaactatttcaagatgatgagaaggccatcagtccaacttcagccacctcctcagggcgcacacccctcacacgaactcctgcaaagcccaccaaaggcagaccaggccaaatggccaaagagcacaagaaaacagtggggcatcagttcagaaactccctgcacctgcttatggagacactcaatgccactacccctcactatgtgcgctgtatcaagcctaatgacttcaagttcccattcacgtttgatgagaagagggcagtgcagcagctgagagcatgtggtgtcctggaaaccatccgaatcagtgcggccggtttcccctcacggtggacttaccaagaatttttcagccgctaccgtgtcctaatgaagcagaaagatgtgctgagtgacagaaagcaaacatgcaagaatgtgttagagaaactgatactggacaaggacaaataccagtttggtaagacaaagatctttttccgtgccggtcaagtggcctatctagaaaaattgagagctgacaaactgagagctgcctgcatccggatccagaagaccatccgagggtggctgctgagaaagaagtacctacgcatgcggaaggcagccatcaccatgcagagatacgtgcggggctaccaggcccgatgctatgctaagtttctgcgcagaaccaaggcagcaaccatcattcaaaagtactggcgcatgtatgtggtccgcaggaggtacaagattagacgagctgccactattgttcttcagtcttacttgcgaggcttcttggccagaaataggtatcgcaagatactccgtgagcacaaagcagtcatcattcagaagcgagtccggggctggctggcccgcacacactacaagaggagcatgcatgccatcatctaccttcagtgctgcttcaggcggatgatggccaagcgtgagctaaagaagctcaaaatcgaggctcgctcagtggagcgctataagaagctgcacatcggcatggagaacaagatcatgcagctgcagcgcaaagttgatgagcagaacaaagactacaaatgccttgtggagaaactaaccaatctggaaggaatatacaactctgagactgagaaactacgaagtgacttagaacgtcttcaactaagtgaagaggaagcgaaagttgccactgggcgggtccttagtctgcaggaagaaattgccaagctccggaaagacctggagcaaactcgttcagagaaaaaatgcattgaggaacatgcagatcgatacaaacaagaaacagagcagctggtatcaaatctgaaggaagaaaatactttgctgaagcaagaaaaagaagccctcaatcaccgcatcgtgcagcaggctaaggagatgacagaaactatggagaagaagttagtagaagaaacgaaacaactggaactcgaccttaatgatgaaaggctgagatatcagaaccttctgaatgagttcagtcgcctggaagaaagatatgatgacctcaaggaagagatgacccttatggtgcatgtgcctaagcctggacacaagagaacagactccacccacagcagcaacgagtctgaatatatctttagctctgaaattgcagaaatggaagacattccatcaaggacagaggaaccaagtgagaagaaggtacctctggacatgtcattgttccttaagctccagaagcgggtcacagagctggagcaggagaagcaggtgatgcaggatgagctggaccgcaaggaggagcaggtgctccgcagcaaggccaaggaagaagaaagaccacaaattagaggtgcagaactggaatatgagtcactcaagcgtcaagaactagaatcagaaaacaaaaaactgaagaatgagctaaatgagttgcgcaaggccctcagtgagaaaagtgccccagaggtgaccgccccaggtgcacctgcctaccgtgtcctcatggagcagctgacctctgtgagcgaggagcttgatgtccgcaaggaggaagtcctcatcttaaggtctcaactggtgagccagaaagaggccatccaacccaaggatgacaagaatacaatgacagattccacaatacttttggaagatgtacaaaaaatgaaagataaaggtgaaatagcacaagcatacattggtttgaaagaaacaaatagatcatctgctctggattaccatgagttgaatgaggatggagagctgtggctggtttatgaagggttaaaacaagccaacaggctcctggaatcccagctgcagtcacagaagaggagccatgagaatgaggccgaggccctccgtggggagatccagagcctgaaggaggagaacaaccgacagcagcagctgctggcccagaacctgcagctgcccccagaggcccgcattgaggccagcctgcagcacgagatcacccggctgaccaacgaaaacttgtattttgaggaattatatgcagatgaccctaagaagtatcaatcatatcggatttccctttacaaacggatgattgatttgatggaacaacttgaaaaacaggataagacggtccgtaaactgaaaaaacaactgaaagtatttgccaaaaaaattggcgaactagaagtgggccagatggagaacatatccccaggacagatcattgatgaacccatccgaccagtcaacattcccaggaaagaaaaggatttccaagggatgctggaatacaagaaggaggatgagcaaaaacttgttaagaacctgattctggaactgaagccacgtggtgtagcagtcaatttgattccaggattaccggcatatatcctgttcatgtgtgttcgacatgctgactacctgaatgatgatcagaaagtaaggtcgttgctaacatcaacaattaacagcatcaaaaaagtattgaagaaaagaggtgatgattttgaaaccgtctccttctggctctctaacacatgccgatttttgcactgcttgaaacagtacagtggagaagagggctttatgaagcacaacacatctcgccagaatgaacactgcctcaccaattttgacctggctgagtatcggcaggtgctgagtgacttggccattcagatctaccagcagctcgtgcgggtgttagagaacatccttcagccaatgattgtctcaggcatgctggaacatgaaacgattcagggcgtgtctggggtgaagcccacagggttgagaaagcgaacctccagtatcgccgatgagggcacctacacactggactccatcctccggcagctcaactccttccactcggtcatgtgtcagcatggcatggaccctgaactgatcaagcaggtggtcaagcagatgttctacatcataggggccatcaccctgaacaaccttctcctgcggaaggacatgtgctcctggagtaaaggcatgcagatcaggtacaatgtcagtcaactggaagaatggctgcgtgacaagaatctgatgaatagtggggctaaagaaaccctggaacctctcattcaggctgctcaacttttgcaagtgaaaaagaaaacagatgatgatgcagaagccatttgttctatgtgcaatgctttaactactgcccagattgtgaaagtgttgaatttgtatactccagttaatgagtttgaagaaagagtctctgtgtcgttcattcgtactatacagatgcgtttacgagacaggaaagactctccccagctgctcatggatgctaaacacatctttcctgtcacctttcctttcaacccatcttccctcgcactagaaaccatccagattccagccagcctcggcctgggcttcatttcacgggtctgaaagtgatgtccaggcaaaaattgacaatacatttcttgcccgaaataagaacccattatttccagtgagttactgaaaatacatttttaaagagaaagtactgattatctcccaaatgagaagtcattaactggaaatctccctagaatactttcatcactttggaaacaaagataggctctttcgtgctgtgttatctttatagcaacactcatccttaaccaactaggtaccgtgagtttacatacaggagaatgatggaaggaagggaggaaggaaaggaggagaaaaatgtgtcttcagctggcagcatttattttaaatccttagcactgagtttgaatggtataaaaagtataacttccatagatgagctgttgttaggaaggcaccaaagaacctcctctgcactaaacaggagaatggaaagaaaagtctccattgagtacatatcatgtcagtttagtaatcaattatgttgatattgttaaactggttcaaagaaataaactggcaatatgtaaagtaattcctcatttgtgtcactatgatatagagatattaaaggaatgttggtttgctaaatagtatagatgtccatttgtactatagtttactgagcattttaaattgctgctacatactgtcttcttaaaatgtaagtgatattaggcactacaataagtttctcttgtcaattctgtttacaattcaatcagatcacagttttaactggattatatgcaaatacctacagattcacctgcacaagtagcagacactggaaagtcatgtagtaatatgacaaaatgcttgacatttaggggtaggattagacaaagtggctattgttgatgtcattatttattcaggatgtattacattgatgtgctcattaattttccctgggtggatattgcgtcagggtacagtgttctgtgaagtgacttatttttaactaccagatctgattccttcagtgcatattttcaaccttgacaggttttctctcttcttaatttattaagaattaatctcggctgggcgcggtggctcacgcctgtaatcccagcactttgggaagccaaggtgggcggatcacttcaggttaggagttggagaccagcctggccaacatggcgaaaccctgtctctactaaaaatacaaaaattagccgggcgtggtggcacttgcctgtaatcccagctactcgggaggctgaggcacgagaatcgattaaacctgggaggcggagattgcaatgagatcgaaccactgcactccagcctgggtgacagagagagacactgccttggaaaaaaaaagaatctcactcactatctagagaggattgtcagaatattcacgattcaggtcttgaaactttgattatgcaaaagaaggtatataataaatatttcattatgattcagtttttaaggctttgcagcttctataagtgttctcagatgccactagataattttaaaagcatcatattagaaatactttaagaagacttatataagaaatagaagattgttgaattttacagaggatttggttcattaagacccagattctgtaagttttcattctgaaattctagttaaacatattcaccatttttcttaggaatcttatacaataaatccttcaggttgcacaaaagcaaattattagttttcattagaaactctggttctgaattacaatcataggttatataaatttaactgttagatggtctataaaaatgacaaatcttattaaaatatgtgcaatatttatggaagtcaaacagcttcatatcagtgataaagattgttattaaaagataaatactgtctgttaatttaca

SEQ ID NO: 323274 - DNA, 7658 bp, Homo sapiens
aatacaccccgggcaggtggagcgctcgcggctgctcgcggcgagcccgggagtgatggcgaggcccctgcgggcggccagcgcctgaggcgccccgccccgccccgccccgcgcggccctccccgcccggccctgccctgccctgctccctgccggcggctgcgggcgcttcctagtccgctcgggcggccgcccaggcgaggtgcggcctccgcacaggccggggggcgtaggcgcgcggggcccgccatggctgcgtcggagctctacacaaagtttgccagggtttggatacctgatccagaggaagtctggaagtcagcagagctgctcaaagattataagccaggagataaagtcctcctgcttcacctcgaggaaggaaaggatttggaataccatctagatccaaagaccaaggagctgcctcacttacgaaatcctgacatacttgttggtgaaaatgacctcacagccctcagctatcttcatgagcctgctgtgctccataatctcagagtccgctttattgattccaaacttatttatacgtattgtggtatagtcctagtagctataaatccctatgaacagctgcctatttatggagaagatattattaatgcatacagtggtcagaacatgggtgatatggatccacatatctttgcagtagctgaagaagcttacaagcaaatggccagagatgaacgaaatcagtccatcatcgtaagtggagagtctggggcaggaaaaacagtctcagctaagtatgccatgcgatactttgcaactgtgagtggttctgccagtgaggccaatgtggaggaaaaggtcttggcctccaaccccatcatggagtccattggaaatgctaaaacaaccaggaatgataatagcagccgttttgggaagtatattgagattggttttgataagagatatcgaatcattggtgccaatatgagaacttatcttttagagaaatccagagtggtattccaggcagaagaggagagaaactatcatatcttctatcagctttgtgcctcagcaaagttacctgaatttaaaatgctacgattaggaaatgcagataactttaattacacaaaacaaggaggcagtcctgtgattgaaggagtggatgatgcaaaggagatggcacatactaggcaggcctgcactttgctaggaattagtgaatctcatcaaatgggaattttccgaatacttgctggcatccttcacttaggcaatgttggatttacatcccgagatgcagacagctgcacaatacctcccaagcatgaacctctctgcatcttctgtgacctcatgggtgtggactatgaggagatgtgtcactggctctgccatcggaaactggctactgccacagagacatacatcaagcccatctccaagctgcaggccacgaatgcccgcgatgctttggccaaacacatctatgccaagctctttaactggattgtagataatgtcaatcaggctctccattctgctgtcaaacagcactcttttattggtgtgctagacatttacggatttgaaacatttgagataaatagttttgaacagttttgcataaattatgcaaatgaaaaactacagcaacaattcaatatgcatgtcttcaaattggagcaagaagaatatatgaaggaacaaattccatggacactcatagatttttatgataatcagccttgtattaatcttatagaatcaaaactaggcattctagatttactggatgaggaatgcaagatgcctaaaggcacagatgacacctgggcccaaaaattgtacaacacacatttgaacaaatgtgcactctttgaaaagcctcgtctatcaaacaaagctttcatcatccaacattttgctgacaaagtggaataccagtgtgaaggatttctcgaaaagaataaagacaccgtttttgaagaacaaattaaagttcttaaatcaagcaagtttaagatgctaccagaactatttcaagatgatgagaaggccatcagtccaacttcagccacctcctcagggcgcacacccctcacacgaactcctgcaaagcccaccaaaggcagaccaggccaaatggccaaagagcacaagaaaacagtggggcatcagttcagaaactccctgcacctgcttatggagacactcaatgccactacccctcactatgtgcgctgtatcaagcctaatgacttcaagttcccattcacgtttgatgagaagagggcagtgcagcagctgagagcatgtggtgtcctggaaaccatccgaatcagtgcggccggtttcccctcacggtggacttaccaagaatttttcagccgctaccgtgtcctaatgaagcagaaagatgtgctgagtgacagaaagcaaacatgcaagaatgtgttagagaaactgatactggacaaggacaaataccagtttggtaagacaaagatctttttccgtgccggtcaagtggcctatctagaaaaattgagagctgacaaactgagagctgcctgcatccggatccagaagaccatccgagggtggctgctgagaaagaagtacctacgcatgcggaaggcagccatcaccatgcagagatacgtgcggggctaccaggcccgatgctatgctaagtttctgcgcagaaccaaggcagcaaccatcattcaaaagtactggcgcatgtatgtggtccgcaggaggtacaagattagacgagctgccactattgttcttcagtcttacttgcgaggcttcttggccagaaataggtatcgcaagatactccgtgagcacaaagcagtcatcattcagaagcgagtccggggctggctggcccgcacacactacaagaggagcatgcatgccatcatctaccttcagtgctgcttcaggcggatgatggccaagcgtgagctaaagaagctcaaaatcgaggctcgctcagtggagcgctataagaagctgcacatcggcatggagaacaagatcatgcagctgcagcgcaaagttgatgagcagaacaaagactacaaatgccttgtggagaaactaaccaatctggaaggaatatacaactctgagactgagaaactacgaagtgacttagaacgtcttcaactaagtgaagaggaagcgaaagttgccactgggcgggtccttagtctgcaggaagaaattgccaagctccggaaagacctggagcaaactcgttcagagaaaaaatgcattgaggaacatgcagatcgatacaaacaagaaacagagcagctggtatcaaatctgaaggaagaaaatactttgctgaagcaagaaaaagaagccctcaatcaccgcatcgtgcagcaggctaaggagatgacagaaactatggagaagaagttagtagaagaaacgaaacaactggaactcgaccttaatgatgaaaggctgagatatcagaaccttctgaatgagttcagtcgcctggaagaaagatatgatgacctcaaggaagagatgacccttatggtgcatgtgcctaagcctggacacaagagaacagactccacccacagcagcaacgagtctgaatatatctttagctctgaaattgcagaaatggaagacattccatcaaggacagaggaaccaagtgagaagaaggtacctctggacatgtcattgttccttaagctccagaagcgggtcacagagctggagcaggagaagcaggtgatgcaggatgagctggaccgcaaggaggagcaggtgctccgcagcaaggccaaggaagaagaaagaccacaaattagaggtgcagaactggaatatgagtcactcaagcgtcaagaactagaatcagaaaacaaaaaactgaagaatgagctaaatgagttgcgcaaggccctcagtgagaaaagtgccccagaggtgaccgccccaggtgcacctgcctaccgtgtcctcatggagcagctgacctctgtgagcgaggagcttgatgtccgcaaggaggaagtcctcatcttaaggtctcaactggtgagccagaaagaggccatccaacccaaggatgacaagaatacaatgacagattccacaatacttttggaagatgtacaaaaaatgaaagataaaggtgaaatagcacaagcatacattggtttgaaagaaacaaatagatcatctgctctggattaccatgagttgaatgaggatggagagctgtggctggtttatgaagggttaaaacaagccaacaggctcctggaatcccagctgcagtcacagaagaggagccatgagaatgaggccgaggccctccgtggggagatccagagcctgaaggaggagaacaaccgacagcagcagctgctggcccagaacctgcagctgcccccagaggcccgcattgaggccagcctgcagcacgagatcacccggctgaccaacgaaaacttgtattttgaggaattatatgcagatgaccctaagaagtatcaatcatatcggatttccctttacaaacggatgattgatttgatggaacaacttgaaaaacaggataagacggtccgtaaactgaaaaaacaactgaaagtatttgccaaaaaaattggcgaactagaagtgggccagatggagaacatatccccaggacagatcattgatgaacccatccgaccagtcaacattcccaggaaagaaaaggatttccaagggatgctggaatacaagaaggaggatgagcaaaaacttgttaagaacctgattctggaactgaagccacgtggtgtagcagtcaatttgattccaggattaccggcatatatcctgttcatgtgtgttcgacatgctgactacctgaatgatgatcagaaagtaaggtcgttgctaacatcaacaattaacagcatcaaaaaagtattgaagaaaagaggtgatgattttgaaaccgtctccttctggctctctaacacatgccgatttttgcactgcttgaaacagtacagtggagaagagggctttatgaagcacaacacatctcgccagaatgaacactgcctcaccaattttgacctggctgagtatcggcaggtgctgagtgacttggccattcagatctaccagcagctcgtgcgggtgttagagaacatccttcagccaatgattgtctcaggcatgctggaacatgaaacgattcagggcgtgtctggggtgaagcccacagggttgagaaagcgaacctccagtatcgccgatgagggcacctacacactggactccatcctccggcagctcaactccttccactcggtcatgtgtcagcatggcatggaccctgaactgatcaagcaggtggtcaagcagatgttctacatcataggggccatcaccctgaacaaccttctcctgcggaaggacatgtgctcctggagtaaaggcatgcagatcaggtacaatgtcagtcaactggaagaatggctgcgtgacaagaatctgatgaatagtggggctaaagaaaccctggaacctctcattcaggctgctcaacttttgcaagtgaaaaagaaaacagatgatgatgcagaagccatttgttctatgtgcaatgctttaactactgcccagattgtgaaagtgttgaatttgtatactccagttaatgagtttgaagaaagagtctctgtgtcgttcattcgtactatacagtagaaaccatccagattccagccagcctcggcctgggcttcatttcacgggtctgaaagtgatgtccaggcaaaaattgacaatacatttcttgcccgaaataagaacccattatttccagtgagttactgaaaatacatttttaaagagaaagtactgattatctcccaaatgagaagtcattaactggaaatctccctagaatactttcatcactttggaaacaaagataggctctttcgtgctgtgttatctttatagcaacactcatccttaaccaactaggtaccgtgagtttacatacaggagaatgatggaaggaagggaggaaggaaaggaggagaaaaatgtgtcttcagctggcagcatttattttaaatccttagcactgagtttgaatggtataaaaagtataacttccatagatgagctgttgttaggaaggcaccaaagaacctcctctgcactaaacaggagaatggaaagaaaagtctccattgagtacatatcatgtcagtttagtaatcaattatgttgatattgttaaactggttcaaagaaataaactggcaatatgtaaagtaattcctcatttgtgtcactatgatatagagatattaaaggaatgttggtttgctaaatagtatagatgtccatttgtactatagtttactgagcattttaaattgctgctacatactgtcttcttaaaatgtaagtgatattaggcactacaataagtttctcttgtcaattctgtttacaattcaatcagatcacagttttaactggattatatgcaaatacctacagattcacctgcacaagtagcagacactggaaagtcatgtagtaatatgacaaaatgcttgacatttaggggtaggattagacaaagtggctattgttgatgtcattatttattcaggatgtattacattgatgtgctcattaattttccctgggtggatattgcgtcagggtacagtgttctgtgaagtgacttatttttaactaccagatctgattccttcagtgcatattttcaaccttgacaggttttctctcttcttaatttattaagaattaatctcggctgggcgcggtggctcacgcctgtaatcccagcactttgggaagccaaggtgggcggatcacttcaggttaggagttggagaccagcctggccaacatggcgaaaccctgtctctactaaaaatacaaaaattagccgggcgtggtggcacttgcctgtaatcccagctactcgggaggctgaggcacgagaatcgattaaacctgggaggcggagattgcaatgagatcgaaccactgcactccagcctgggtgacagagagagacactgccttggaaaaaaaaagaatctcactcactatctagagaggattgtcagaatattcacgattcaggtcttgaaactttgattatgcaaaagaaggtatataataaatatttcattatgattcagtttttaaggctttgcagcttctataagtgttctcagatgccactagataattttaaaagcatcatattagaaatactttaagaagacttatataagaaatagaagattgttgaattttacagaggatttggttcattaagacccagattctgtaagttttcattctgaaattctagttaaacatattcaccatttttcttaggaatcttatacaataaatccttcaggttgcacaaaagcaaattattagttttcattagaaactctggttctgaattacaatcataggttatataaatttaactgttagatggtctataaaaatgacaaatcttattaaaatatgtgcaatatttatggaagtcaaacagcttcatatcagtgataaagattgttattaaaagataaatactgtctgttaatttaca

SEQ ID NO: 323275 - DNA, 1002 bp, Homo sapiens
aatacaccccgggcaggtggagcgctcgcggctgctcgcggcgagcccgggagtgatggcgaggcccctgcgggcggccagcgcctgaggcgccccgccccgccccgccccgcgcggccctccccgcccggccctgccctgccctgctccctgccggcggctgcgggcgcttcctagtccgctcgggcggccgcccaggcgaggtgcggcctccgcacaggccggggggcgtaggcgcgcggggcccgccatggctgcgtcggagctctacacaaagtttgccagggtttggatacctgatccagaggaagtctggaagtcagcagagctgctcaaagattataagccaggagataaagtcctcctgcttcacctcgaggaaggaaaggatttggaataccatctagatccaaagaccaaggagctgcctcacttacgaaatcctgacatacttgttggtgaaaatgacctcacagccctcagctatcttcatgagcctgctgtgctccataatctcagagtccgctttattgattccaaacttatttatacgtattgtggtatagtcctagtagctataaatccctatgaacagctgcctatttatggagaagatattattaatgcatacagtggtcagaacatgggtgatatggatccacatatctttgcagtagctgaagaagcttacaagcaaatggccagagatgaacgaaatcagtccatcatcgtaagtggagagtctggggcaggaaaaacagtctcagctaagtatgccatgcgatactttgcaactgtgagtggttctgccagtgaggccaatgtggaggaaaaggtcttggcctccaaccccatcatggaggtaagacagcgagtcttcggctttcttcctatattctcttgataagaaacatgctcaaaaaattgattgatacagcatgtctcagaaagcctggggtctccagccactaaaattaagaaaatgcttttctacatgtttat

SEQ ID NO: 323276 - DNA, 206 bp, Homo sapiens
caattctacttgatgtcagacttccttaatttgcaaagcagggctcctggcagaacctaggaagccattcactagggtaactctgatgaactttttcagcagaattcttctaccagcttgggagaagtttgagcatccaacgtaaagttgaggatgacagcaatgaacttttctttgtcttttcatacagcgtcaagaactagaat

SEQ ID NO: 323277 - DNA, 117 bp, Homo sapiens
cttttaattttccagattataggtacccagtgtgtatttgataatatgccaaaaactttgatcatttcatttctcacagattgtgaaagtgttgaatttgtatactccagttaatga

SEQ ID NO: 323278 - DNA, 286 bp, Homo sapiens
ggataatgtgttatcttttattatcttattttacaatgcactaacttttttgataatagttaattgggaaaatgaagtgagtttaaaacaaaagtaaacattcttcattagttgagaatttgagggtagaaattttagtagaaaaaagtcttttagattcaaagaactgatgctctgtttattttttttcctaatcttctcagatgcgtttacgagacaggaaagactctccccagctgctcatggatgctaaacacatctttcctgtcacctttcctttcaaccc

SEQ ID NO: 323279 - DNA, 461 bp, Homo sapiens
atcttattttatgatagaattccctgaattttagattaaaatgctgtaattgaaaactcttcttatttcgaaggcagaagaggagagaaactatcatatcttctatcagctttgtgcctcagcaaagttacctgaatttaaaatgctacgattaggtatgaatatggcattaaatttattgttctggtattgttttctgttaatttccaagttcctaaatttacttgttaaaaaggagcttatctcatgttggaatacttatggataatatgataaaaagtcagcccttggcttcaaaataacccataggggtagaggaggagtaagtggctgtataaatggaacaggattggcctggaggtgatttagatggctgtttaagatgagtaatgagtacctaggggctcattctattagtctctctacttttgtatgtgtttgatatttgctttgattaaagg

SEQ ID NO: 323280 - DNA, 481 bp, Homo sapiens
gttggtatgtctaatgaaaacgcacttcatattgtttccatctccaccagtttctgtgatattggaaggtgctaggaaaataatgcatttaatagctgagaagcaaatcaggaataggaagtaagcaaaatgcatgggcctctttcacagtccttgccataattcatccagatgctgtgccttgtgcattttcaggatttggaataccatctagatccaaagaccaaggagctgcctcacttacgaaatcctgacatacttgttggtgaaaatgacctcacagccctcagctatcttcatgagcctgctgtgctccataatctcagagtccgctttattgattccaaacttatttatacgtattgtggtaagtatgctttgctttccgaatagactgtggactctttcctctaatggacatagccatagaaatattgtacatggggaaagcaggctgtggttggattttctctaagagaca

SEQ ID NO: 323281 - DNA, 7680 bp, Homo sapiens
aatacaccccgggcaggtggagcgctcgcggctgctcgcggcgagcccgggagtgatggcgaggcccctgcgggcggccagcgcctgaggcgccccgccccgccccgccccgcgcggccctccccgcccggccctgccctgccctgctccctgccggcggctgcgggcgcttcctagtccgctcgggcggccgcccaggcgaggtgcggcctccgcacaggccggggggcgtaggcgcgcggggcccgccatggctgcgtcggagctctacacaaagtttgccagggtttggatacctgatccagaggaagtctggaagtcagcagagctgctcaaagattataagccaggagataaagtcctcctgcttcacctcgaggaaggaaaggatttggaataccatctagatccaaagaccaaggagctgcctcacttacgaaatcctgacatacttgttggtgaaaatgacctcacagccctcagctatcttcatgagcctgctgtgctccataatctcagagtccgctttattgattccaaacttatttatacgtattgtggtatagtcctagtagctataaatccctatgaacagctgcctatttatggagaagatattattaatgcatacagtggtcagaacatgggtgatatggatccacatatctttgcagtagctgaagaagcttacaagcaaatggccagagatgaacgaaatcagtccatcatcgtaagtggagagtctggggcaggaaaaacagtctcagctaagtatgccatgcgatactttgcaactgtgagtggttctgccagtgaggccaatgtggaggaaaaggtcttggcctccaaccccatcatggagtccattggaaatgctaaaacaaccaggaatgataatagcagccgttttgggaagtatattgagattggttttgataagagatatcgaatcattggtgccaatatgagaacttatcttttagagaaatccagagtggtattccaggcagaagaggagagaaactatcatatcttctatcagctttgtgcctcagcaaagttacctgaatttaaaatgctacgattaggaaatgcagataactttaattacacaaaacaaggaggcagtcctgtgattgaaggagtggatgatgcaaaggagatggcacatactaggcaggcctgcactttgctaggaattagtgaatctcatcaaatgggaattttccgaatacttgctggcatccttcacttaggcaatgttggatttacatcccgagatgcagacagctgcacaatacctcccaagcatgaacctctctgcatcttctgtgacctcatgggtgtggactatgaggagatgtgtcactggctctgccatcggaaactggctactgccacagagacatacatcaagcccatctccaagctgcaggccacgaatgcccgcgatgctttggccaaacacatctatgccaagctctttaactggattgtagataatgtcaatcaggctctccattctgctgtcaaacagcactcttttattggtgtgctagacatttacggatttgaaacatttgagataaatagttttgaacagttttgcataaattatgcaaatgaaaaactacagcaacaattcaatatgcatgtcttcaaattggagcaagaagaatatatgaaggaacaaattccatggacactcatagatttttatgataatcagccttgtattaatcttatagaatcaaaactaggcattctagatttactggatgaggaatgcaagatgcctaaaggcacagatgacacctgggcccaaaaattgtacaacacacatttgaacaaatgtgcactctttgaaaagcctcgtctatcaaacaaagctttcatcatccaacattttgctgacaaagtggaataccagtgtgaaggatttctcgaaaagaataaagacaccgtttttgaagaacaaattaaagttcttaaatcaagcaagtttaagatgctaccagaactatttcaagatgatgagaaggccatcagtccaacttcagccacctcctcagggcgcacacccctcacacgaactcctgcaaagcccaccaaaggcagaccaggccaaatggccaaagagcacaagaaaacagtggggcatcagttcagaaactccctgcacctgcttatggagacactcaatgccactacccctcactatgtgcgctgtatcaagcctaatgacttcaagttcccattcacgtttgatgagaagagggcagtgcagcagctgagagcatgtggtgtcctggaaaccatccgaatcagtgcggccggtttcccctcacggtggacttaccaagaatttttcagccgctaccgtgtcctaatgaagcagaaagatgtgctgagtgacagaaagcaaacatgcaagaatgtgttagagaaactgatactggacaaggacaaataccagtttggtaagacaaagatctttttccgtgccggtcaagtggcctatctagaaaaattgagagctgacaaactgagagctgcctgcatccggatccagaagaccatccgagggtggctgctgagaaagaagtacctacgcatgcggaaggcagccatcaccatgcagagatacgtgcggggctaccaggcccgatgctatgctaagtttctgcgcagaaccaaggcagcaaccatcattcaaaagtactggcgcatgtatgtggtccgcaggaggtacaagattagacgagctgccactattgttcttcagtcttacttgcgaggcttcttggccagaaataggtatcgcaagatactccgtgagcacaaagcagtcatcattcagaagcgagtccggggctggctggcccgcacacactacaagaggagcatgcatgccatcatctaccttcagtgctgcttcaggcggatgatggccaagcgtgagctaaagaagctcaaaatcgaggctcgctcagtggagcgctataagaagctgcacatcggcatggagaacaagatcatgcagctgcagcgcaaagttgatgagcagaacaaagactacaaatgccttgtggagaaactaaccaatctggaaggaatatacaactctgagactgagaaactacgaagtgacttagaacgtcttcaactaagtgaagaggaagcgaaagttgccactgggcgggtccttagtctgcaggaagaaattgccaagctccggaaagacctggagcaaactcgttcagagaaaaaatgcattgaggaacatgcagatcgatacaaacaagaaacagagcagctggtatcaaatctgaaggaagaaaatactttgctgaagcaagaaaaagaagccctcaatcaccgcatcgtgcagcaggctaaggagatgacagaaactatggagaagaagttagtagaagaaacgaaacaactggaactcgaccttaatgatgaaaggctgagatatcagaaccttctgaatgagttcagtcgcctggaagaaagatatgatgacctcaaggaagagatgacccttatggtgcatgtgcctaagcctggacacaagagaacagactccacccacagcagcaacgagtctgaatatatctttagctctgaaattgcagaaatggaagacattccatcaaggacagaggaaccaagtgagaagaaggtacctctggacatgtcattgttccttaagctccagaagcgggtcacagagctggagcaggagaagcaggtgatgcaggatgagctggaccgcaaggaggagcaggtgctccgcagcaaggccaaggaagaagaaagaccacaaattagaggtgcagaactggaatatgagtcactcaagcgtcaagaactagaatcagaaaacaaaaaactgaagaatgagctaaatgagttgcgcaaggccctcagtgagaaaagtgccccagaggtgaccgccccaggtgcacctgcctaccgtgtcctcatggagcagctgacctctgtgagcgaggagcttgatgtccgcaaggaggaagtcctcatcttaaggtctcaactggtgagccagaaagaggccatccaacccaaggatgacaagaatacaatgacagattccacaatacttttggaagatgtacaaaaaatgaaagataaaggtgaaatagcacaagcatacattggtttgaaagaaacaaatagatcatctgctctggattaccatgagttgaatgaggatggagagctgtggctggtttatgaagggttaaaacaagccaacaggctcctggaatcccagctgcagtcacagaagaggagccatgagaatgaggccgaggccctccgtggggagatccagagcctgaaggaggagaacaaccgacagcagcagctgctggcccagaacctgcagctgcccccagaggcccgcattgaggccagcctgcagcacgagatcacccggctgaccaacgaaaacttggatttgatggaacaacttgaaaaacaggataagacggtccgtaaactgaaaaaacaactgaaagtatttgccaaaaaaattggcgaactagaagtgggccagatggagaacatatccccaggacagatcattgatgaacccatccgaccagtcaacattcccaggaaagaaaaggatttccaagggatgctggaatacaagaaggaggatgagcaaaaacttgttaagaacctgattctggaactgaagccacgtggtgtagcagtcaatttgattccaggattaccggcatatatcctgttcatgtgtgttcgacatgctgactacctgaatgatgatcagaaagtaaggtcgttgctaacatcaacaattaacagcatcaaaaaagtattgaagaaaagaggtgatgattttgaaaccgtctccttctggctctctaacacatgccgatttttgcactgcttgaaacagtacagtggagaagagggctttatgaagcacaacacatctcgccagaatgaacactgcctcaccaattttgacctggctgagtatcggcaggtgctgagtgacttggccattcagatctaccagcagctcgtgcgggtgttagagaacatccttcagccaatgattgtctcaggcatgctggaacatgaaacgattcagggcgtgtctggggtgaagcccacagggttgagaaagcgaacctccagtatcgccgatgagggcacctacacactggactccatcctccggcagctcaactccttccactcggtcatgtgtcagcatggcatggaccctgaactgatcaagcaggtggtcaagcagatgttctacatcataggggccatcaccctgaacaaccttctcctgcggaaggacatgtgctcctggagtaaaggcatgcagatcaggtacaatgtcagtcaactggaagaatggctgcgtgacaagaatctgatgaatagtggggctaaagaaaccctggaacctctcattcaggctgctcaacttttgcaagtgaaaaagaaaacagatgatgatgcagaagccatttgttctatgtgcaatgctttaactactgcccagattgtgaaagtgttgaatttgtatactccagttaatgagtttgaagaaagagtctctgtgtcgttcattcgtactatacagatgcgtttacgagacaggaaagactctccccagctgctcatggatgctaaacacatctttcctgtcacctttcctttcaacccatcttccctcgcactagaaaccatccagattccagccagcctcggcctgggcttcatttcacgggtctgaaagtgatgtccaggcaaaaattgacaatacatttcttgcccgaaataagaacccattatttccagtgagttactgaaaatacatttttaaagagaaagtactgattatctcccaaatgagaagtcattaactggaaatctccctagaatactttcatcactttggaaacaaagataggctctttcgtgctgtgttatctttatagcaacactcatccttaaccaactaggtaccgtgagtttacatacaggagaatgatggaaggaagggaggaaggaaaggaggagaaaaatgtgtcttcagctggcagcatttattttaaatccttagcactgagtttgaatggtataaaaagtataacttccatagatgagctgttgttaggaaggcaccaaagaacctcctctgcactaaacaggagaatggaaagaaaagtctccattgagtacatatcatgtcagtttagtaatcaattatgttgatattgttaaactggttcaaagaaataaactggcaatatgtaaagtaattcctcatttgtgtcactatgatatagagatattaaaggaatgttggtttgctaaatagtatagatgtccatttgtactatagtttactgagcattttaaattgctgctacatactgtcttcttaaaatgtaagtgatattaggcactacaataagtttctcttgtcaattctgtttacaattcaatcagatcacagttttaactggattatatgcaaatacctacagattcacctgcacaagtagcagacactggaaagtcatgtagtaatatgacaaaatgcttgacatttaggggtaggattagacaaagtggctattgttgatgtcattatttattcaggatgtattacattgatgtgctcattaattttccctgggtggatattgcgtcagggtacagtgttctgtgaagtgacttatttttaactaccagatctgattccttcagtgcatattttcaaccttgacaggttttctctcttcttaatttattaagaattaatctcggctgggcgcggtggctcacgcctgtaatcccagcactttgggaagccaaggtgggcggatcacttcaggttaggagttggagaccagcctggccaacatggcgaaaccctgtctctactaaaaatacaaaaattagccgggcgtggtggcacttgcctgtaatcccagctactcgggaggctgaggcacgagaatcgattaaacctgggaggcggagattgcaatgagatcgaaccactgcactccagcctgggtgacagagagagacactgccttggaaaaaaaaagaatctcactcactatctagagaggattgtcagaatattcacgattcaggtcttgaaactttgattatgcaaaagaaggtatataataaatatttcattatgattcagtttttaaggctttgcagcttctataagtgttctcagatgccactagataattttaaaagcatcatattagaaatactttaagaagacttatataagaaatagaagattgttgaattttacagaggatttggttcattaagacccagattctgtaagttttcattctgaaattctagttaaacatattcaccatttttcttaggaatcttatacaataaatccttcaggttgcacaaaagcaaattattagttttcattagaaactctggttctgaattacaatcataggttatataaatttaactgttagatggtctataaaaatgacaaatcttattaaaatatgtgcaatatttatggaagtcaaacagcttcatatcagtgataaagattgttattaaaagataaatactgtctgttaatttaca

SEQ ID NO: 323282 - DNA, 7599 bp, Homo sapiens
aatacaccccgggcaggtggagcgctcgcggctgctcgcggcgagcccgggagtgatggcgaggcccctgcgggcggccagcgcctgaggcgccccgccccgccccgccccgcgcggccctccccgcccggccctgccctgccctgctccctgccggcggctgcgggcgcttcctagtccgctcgggcggccgcccaggcgaggtgcggcctccgcacaggccggggggcgtaggcgcgcggggcccgccatggctgcgtcggagctctacacaaagtttgccagggtttggatacctgatccagaggaagtctggaagtcagcagagctgctcaaagattataagccaggagataaagtcctcctgcttcacctcgaggaaggaaaggatttggaataccatctagatccaaagaccaaggagctgcctcacttacgaaatcctgacatacttgttggtgaaaatgacctcacagccctcagctatcttcatgagcctgctgtgctccataatctcagagtccgctttattgattccaaacttatttatacgtattgtggtatagtcctagtagctataaatccctatgaacagctgcctatttatggagaagatattattaatgcatacagtggtcagaacatgggtgatatggatccacatatctttgcagtagctgaagaagcttacaagcaaatggccagagatgaacgaaatcagtccatcatcgtaagtggagagtctggggcaggaaaaacagtctcagctaagtatgccatgcgatactttgcaactgtgagtggttctgccagtgaggccaatgtggaggaaaaggtcttggcctccaaccccatcatggagtccattggaaatgctaaaacaaccaggaatgataatagcagccgttttgggaagtatattgagattggttttgataagagatatcgaatcattggtgccaatatgagaacttatcttttagagaaatccagagtggtattccaggcagaagaggagagaaactatcatatcttctatcagctttgtgcctcagcaaagttacctgaatttaaaatgctacgattaggaaatgcagataactttaattacacaaaacaaggaggcagtcctgtgattgaaggagtggatgatgcaaaggagatggcacatactaggcaggcctgcactttgctaggaattagtgaatctcatcaaatgggaattttccgaatacttgctggcatccttcacttaggcaatgttggatttacatcccgagatgcagacagctgcacaatacctcccaagcatgaacctctctgcatcttctgtgacctcatgggtgtggactatgaggagatgtgtcactggctctgccatcggaaactggctactgccacagagacatacatcaagcccatctccaagctgcaggccacgaatgcccgcgatgctttggccaaacacatctatgccaagctctttaactggattgtagataatgtcaatcaggctctccattctgctgtcaaacagcactcttttattggtgtgctagacatttacggatttgaaacatttgagataaatagttttgaacagttttgcataaattatgcaaatgaaaaactacagcaacaattcaatatgcatgtcttcaaattggagcaagaagaatatatgaaggaacaaattccatggacactcatagatttttatgataatcagccttgtattaatcttatagaatcaaaactaggcattctagatttactggatgaggaatgcaagatgcctaaaggcacagatgacacctgggcccaaaaattgtacaacacacatttgaacaaatgtgcactctttgaaaagcctcgtctatcaaacaaagctttcatcatccaacattttgctgacaaagtggaataccagtgtgaaggatttctcgaaaagaataaagacaccgtttttgaagaacaaattaaagttcttaaatcaagcaagtttaagatgctaccagaactatttcaagatgatgagaaggccatcagtccaacttcagccacctcctcagggcgcacacccctcacacgaactcctgcaaagcccaccaaaggcagaccaggccaaatggccaaagagcacaagaaaacagtggggcatcagttcagaaactccctgcacctgcttatggagacactcaatgccactacccctcactatgtgcgctgtatcaagcctaatgacttcaagttcccattcacgtttgatgagaagagggcagtgcagcagctgagagcatgtggtgtcctggaaaccatccgaatcagtgcggccggtttcccctcacggtggacttaccaagaatttttcagccgctaccgtgtcctaatgaagcagaaagatgtgctgagtgacagaaagcaaacatgcaagaatgtgttagagaaactgatactggacaaggacaaataccagtttggtaagacaaagatctttttccgtgccggtcaagtggcctatctagaaaaattgagagctgacaaactgagagctgcctgcatccggatccagaagaccatccgagggtggctgctgagaaagaagtacctacgcatgcggaaggcagccatcaccatgcagagatacgtgcggggctaccaggcccgatgctatgctaagtttctgcgcagaaccaaggcagcaaccatcattcaaaagtactggcgcatgtatgtggtccgcaggaggtacaagattagacgagctgccactattgttcttcagtcttacttgcgaggcttcttggccagaaataggtatcgcaagatactccgtgagcacaaagcagtcatcattcagaagcgagtccggggctggctggcccgcacacactacaagaggagcatgcatgccatcatctaccttcagtgctgcttcaggcggatgatggccaagcgtgagctaaagaagctcaaaatcgaggctcgctcagtggagcgctataagaagctgcacatcggcatggagaacaagatcatgcagctgcagcgcaaagttgatgagcagaacaaagactacaaatgccttgtggagaaactaaccaatctggaaggaatatacaactctgagactgagaaactacgaagtgacttagaacgtcttcaactaagtgaagaggaagcgaaagttgccactgggcgggtccttagtctgcaggaagaaattgccaagctccggaaagacctggagcaaactcgttcagagaaaaaatgcattgaggaacatgcagatcgatacaaacaagaaacagagcagctggtatcaaatctgaaggaagaaaatactttgctgaagcaagaaaaagaagccctcaatcaccgcatcgtgcagcaggctaaggagatgacagaaactatggagaagaagttagtagaagaaacgaaacaactggaactcgaccttaatgatgaaaggctgagatatcagaaccttctgaatgagttcagtcgcctggaagaaagatatgatgacctcaaggaagagatgacccttatggtgcatgtgcctaagcctggacacaagagaacagactccacccacagcagcaacgagtctgaatatatctttagctctgaaattgcagaaatggaagacattccatcaaggacagaggaaccaagtgagaagaaggtacctctggacatgtcattgttccttaagctccagaagcgggtcacagagctggagcaggagaagcaggtgatgcaggatgagctggaccgcaaggaggagcaggtgctccgcagcaaggccaaggaagaagaaagaccacaaattagaggtgcagaactggaatatgagtcactcaagcgtcaagaactagaatcagaaaacaaaaaactgaagaatgagctaaatgagttgcgcaaggccctcagtgagaaaagtgccccagaggtgaccgccccaggtgcacctgcctaccgtgtcctcatggagcagctgacctctgtgagcgaggagcttgatgtccgcaaggaggaagtcctcatcttaaggtctcaactggtgagccagaaagaggccatccaacccaaggatgacaagaatacaatgacagattccacaatacttttggaagatgtacaaaaaatgaaagataaaggtgaaatagcacaagcatacattggtttgaaagaaacaaataggctcctggaatcccagctgcagtcacagaagaggagccatgagaatgaggccgaggccctccgtggggagatccagagcctgaaggaggagaacaaccgacagcagcagctgctggcccagaacctgcagctgcccccagaggcccgcattgaggccagcctgcagcacgagatcacccggctgaccaacgaaaacttggatttgatggaacaacttgaaaaacaggataagacggtccgtaaactgaaaaaacaactgaaagtatttgccaaaaaaattggcgaactagaagtgggccagatggagaacatatccccaggacagatcattgatgaacccatccgaccagtcaacattcccaggaaagaaaaggatttccaagggatgctggaatacaagaaggaggatgagcaaaaacttgttaagaacctgattctggaactgaagccacgtggtgtagcagtcaatttgattccaggattaccggcatatatcctgttcatgtgtgttcgacatgctgactacctgaatgatgatcagaaagtaaggtcgttgctaacatcaacaattaacagcatcaaaaaagtattgaagaaaagaggtgatgattttgaaaccgtctccttctggctctctaacacatgccgatttttgcactgcttgaaacagtacagtggagaagagggctttatgaagcacaacacatctcgccagaatgaacactgcctcaccaattttgacctggctgagtatcggcaggtgctgagtgacttggccattcagatctaccagcagctcgtgcgggtgttagagaacatccttcagccaatgattgtctcaggcatgctggaacatgaaacgattcagggcgtgtctggggtgaagcccacagggttgagaaagcgaacctccagtatcgccgatgagggcacctacacactggactccatcctccggcagctcaactccttccactcggtcatgtgtcagcatggcatggaccctgaactgatcaagcaggtggtcaagcagatgttctacatcataggggccatcaccctgaacaaccttctcctgcggaaggacatgtgctcctggagtaaaggcatgcagatcaggtacaatgtcagtcaactggaagaatggctgcgtgacaagaatctgatgaatagtggggctaaagaaaccctggaacctctcattcaggctgctcaacttttgcaagtgaaaaagaaaacagatgatgatgcagaagccatttgttctatgtgcaatgctttaactactgcccagattgtgaaagtgttgaatttgtatactccagttaatgagtttgaagaaagagtctctgtgtcgttcattcgtactatacagatgcgtttacgagacaggaaagactctccccagctgctcatggatgctaaacacatctttcctgtcacctttcctttcaacccatcttccctcgcactagaaaccatccagattccagccagcctcggcctgggcttcatttcacgggtctgaaagtgatgtccaggcaaaaattgacaatacatttcttgcccgaaataagaacccattatttccagtgagttactgaaaatacatttttaaagagaaagtactgattatctcccaaatgagaagtcattaactggaaatctccctagaatactttcatcactttggaaacaaagataggctctttcgtgctgtgttatctttatagcaacactcatccttaaccaactaggtaccgtgagtttacatacaggagaatgatggaaggaagggaggaaggaaaggaggagaaaaatgtgtcttcagctggcagcatttattttaaatccttagcactgagtttgaatggtataaaaagtataacttccatagatgagctgttgttaggaaggcaccaaagaacctcctctgcactaaacaggagaatggaaagaaaagtctccattgagtacatatcatgtcagtttagtaatcaattatgttgatattgttaaactggttcaaagaaataaactggcaatatgtaaagtaattcctcatttgtgtcactatgatatagagatattaaaggaatgttggtttgctaaatagtatagatgtccatttgtactatagtttactgagcattttaaattgctgctacatactgtcttcttaaaatgtaagtgatattaggcactacaataagtttctcttgtcaattctgtttacaattcaatcagatcacagttttaactggattatatgcaaatacctacagattcacctgcacaagtagcagacactggaaagtcatgtagtaatatgacaaaatgcttgacatttaggggtaggattagacaaagtggctattgttgatgtcattatttattcaggatgtattacattgatgtgctcattaattttccctgggtggatattgcgtcagggtacagtgttctgtgaagtgacttatttttaactaccagatctgattccttcagtgcatattttcaaccttgacaggttttctctcttcttaatttattaagaattaatctcggctgggcgcggtggctcacgcctgtaatcccagcactttgggaagccaaggtgggcggatcacttcaggttaggagttggagaccagcctggccaacatggcgaaaccctgtctctactaaaaatacaaaaattagccgggcgtggtggcacttgcctgtaatcccagctactcgggaggctgaggcacgagaatcgattaaacctgggaggcggagattgcaatgagatcgaaccactgcactccagcctgggtgacagagagagacactgccttggaaaaaaaaagaatctcactcactatctagagaggattgtcagaatattcacgattcaggtcttgaaactttgattatgcaaaagaaggtatataataaatatttcattatgattcagtttttaaggctttgcagcttctataagtgttctcagatgccactagataattttaaaagcatcatattagaaatactttaagaagacttatataagaaatagaagattgttgaattttacagaggatttggttcattaagacccagattctgtaagttttcattctgaaattctagttaaacatattcaccatttttcttaggaatcttatacaataaatccttcaggttgcacaaaagcaaattattagttttcattagaaactctggttctgaattacaatcataggttatataaatttaactgttagatggtctataaaaatgacaaatcttattaaaatatgtgcaatatttatggaagtcaaacagcttcatatcagtgataaagattgttattaaaagataaatactgtctgttaatttaca

SEQ ID NO: 323283 - DNA, 7680 bp, Homo sapiens
aatacaccccgggcaggtggagcgctcgcggctgctcgcggcgagcccgggagtgatggcgaggcccctgcgggcggccagcgcctgaggcgccccgccccgccccgccccgcgcggccctccccgcccggccctgccctgccctgctccctgccggcggctgcgggcgcttcctagtccgctcgggcggccgcccaggcgaggtgcggcctccgcacaggccggggggcgtaggcgcgcggggcccgccatggctgcgtcggagctctacacaaagtttgccagggtttggatacctgatccagaggaagtctggaagtcagcagagctgctcaaagattataagccaggagataaagtcctcctgcttcacctcgaggaaggaaaggatttggaataccatctagatccaaagaccaaggagctgcctcacttacgaaatcctgacatacttgttggtgaaaatgacctcacagccctcagctatcttcatgagcctgctgtgctccataatctcagagtccgctttattgattccaaacttatttatacgtattgtggtatagtcctagtagctataaatccctatgaacagctgcctatttatggagaagatattattaatgcatacagtggtcagaacatgggtgatatggatccacatatctttgcagtagctgaagaagcttacaagcaaatggccagagatgaacgaaatcagtccatcatcgtaagtggagagtctggggcaggaaaaacagtctcagctaagtatgccatgcgatactttgcaactgtgagtggttctgccagtgaggccaatgtggaggaaaaggtcttggcctccaaccccatcatggagtccattggaaatgctaaaacaaccaggaatgataatagcagccgttttgggaagtatattgagattggttttgataagagatatcgaatcattggtgccaatatgagaacttatcttttagagaaatccagagtggtattccaggcagaagaggagagaaactatcatatcttctatcagctttgtgcctcagcaaagttacctgaatttaaaatgctacgattaggaaatgcagataactttaattacacaaaacaaggaggcagtcctgtgattgaaggagtggatgatgcaaaggagatggcacatactaggcaggcctgcactttgctaggaattagtgaatctcatcaaatgggaattttccgaatacttgctggcatccttcacttaggcaatgttggatttacatcccgagatgcagacagctgcacaatacctcccaagcatgaacctctctgcatcttctgtgacctcatgggtgtggactatgaggagatgtgtcactggctctgccatcggaaactggctactgccacagagacatacatcaagcccatctccaagctgcaggccacgaatgcccgcgatgctttggccaaacacatctatgccaagctctttaactggattgtagataatgtcaatcaggctctccattctgctgtcaaacagcactcttttattggtgtgctagacatttacggatttgaaacatttgagataaatagttttgaacagttttgcataaattatgcaaatgaaaaactacagcaacaattcaatatgcatgtcttcaaattggagcaagaagaatatatgaaggaacaaattccatggacactcatagatttttatgataatcagccttgtattaatcttatagaatcaaaactaggcattctagatttactggatgaggaatgcaagatgcctaaaggcacagatgacacctgggcccaaaaattgtacaacacacatttgaacaaatgtgcactctttgaaaagcctcgtctatcaaacaaagctttcatcatccaacattttgctgacaaagtggaataccagtgtgaaggatttctcgaaaagaataaagacaccgtttttgaagaacaaattaaagttcttaaatcaagcaagtttaagatgctaccagaactatttcaagatgatgagaaggccatcagtccaacttcagccacctcctcagggcgcacacccctcacacgaactcctgcaaagcccaccaaaggcagaccaggccaaatggccaaagagcacaagaaaacagtggggcatcagttcagaaactccctgcacctgcttatggagacactcaatgccactacccctcactatgtgcgctgtatcaagcctaatgacttcaagttcccattcacgtttgatgagaagagggcagtgcagcagctgagagcatgtggtgtcctggaaaccatccgaatcagtgcggccggtttcccctcacggtggacttaccaagaatttttcagccgctaccgtgtcctaatgaagcagaaagatgtgctgagtgacagaaagcaaacatgcaagaatgtgttagagaaactgatactggacaaggacaaataccagtttggtaagacaaagatctttttccgtgccggtcaagtggcctatctagaaaaattgagagctgacaaactgagagctgcctgcatccggatccagaagaccatccgagggtggctgctgagaaagaagtacctacgcatgcggaaggcagccatcaccatgcagagatacgtgcggggctaccaggcccgatgctatgctaagtttctgcgcagaaccaaggcagcaaccatcattcaaaagtactggcgcatgtatgtggtccgcaggaggtacaagattagacgagctgccactattgttcttcagtcttacttgcgaggcttcttggccagaaataggtatcgcaagatactccgtgagcacaaagcagtcatcattcagaagcgagtccggggctggctggcccgcacacactacaagaggagcatgcatgccatcatctaccttcagtgctgcttcaggcggatgatggccaagcgtgagctaaagaagctcaaaatcgaggctcgctcagtggagcgctataagaagctgcacatcggcatggagaacaagatcatgcagctgcagcgcaaagttgatgagcagaacaaagactacaaatgccttgtggagaaactaaccaatctggaaggaatatacaactctgagactgagaaactacgaagtgacttagaacgtcttcaactaagtgaagaggaagcgaaagttgccactgggcgggtccttagtctgcaggaagaaattgccaagctccggaaagacctggagcaaactcgttcagagaaaaaatgcattgaggaacatgcagatcgatacaaacaagaaacagagcagctggtatcaaatctgaaggaagaaaatactttgctgaagcaagaaaaagaagccctcaatcaccgcatcgtgcagcaggctaaggagatgacagaaactatggagaagaagttagtagaagaaacgaaacaactggaactcgaccttaatgatgaaaggctgagatatcagaaccttctgaatgagttcagtcgcctggaagaaagatatgatgacctcaaggaagagatgacccttatggtgcatgtgcctaagcctggacacaagagaacagactccacccacagcagcaacgagtctgaatatatctttagctctgaaattgcagaaatggaagacattccatcaaggacagaggaaccaagtgagaagaaggtacctctggacatgtcattgttccttaagctccagaagcgggtcacagagctggagcaggagaagcaggtgatgcaggatgagctggaccgcaaggaggagcaggtgctccgcagcaaggccaaggaagaagaaagaccacaaattagaggtgcagaactggaatatgagtcactcaagcgtcaagaactagaatcagaaaacaaaaaactgaagaatgagctaaatgagttgcgcaaggccctcagtgagaaaagtgccccagaggtgaccgccccaggtgcacctgcctaccgtgtcctcatggagcagctgacctctgtgagcgaggagcttgatgtccgcaaggaggaagtcctcatcttaaggtctcaactggtgagccagaaagaggccatccaacccaaggatgacaagaatacaatgacagattccacaatacttttggaagatgtacaaaaaatgaaagataaaggtgaaatagcacaagcatacattggtttgaaagaaacaaatagatcatctgctctggattaccatgagttgaatgaggatggagagctgtggctggtttatgaagggttaaaacaagccaacaggctcctggaatcccagctgcagtcacagaagaggagccatgagaatgaggccgaggccctccgtggggagatccagagcctgaaggaggagaacaaccgacagcagcagctgctggcccagaacctgcagctgcccccagaggcccgcattgaggccagcctgcagcacgagatcacccggctgaccaacgaaaacttgtattttgaggaattatatgcagatgaccctaagaagtatcaatcatatcggatttccctttacaaacggatgattgatttgatggaacaacttgaaaaacaggataagacggtccgtaaactgaaaaaacaactgaaagtatttgccaaaaaaattggcgaactagaagtgggccagatggagaacatatccccaggacagatcattgatgaacccatccgaccagtcaacattcccaggaaagaaaaggatttccaagggatgctggaatacaagaaggaggatgagcaaaaacttgttaagaacctgattctggaactgaagccacgtggtgtagcagtcaatttgattccaggattaccggcatatatcctgttcatgtgtgttcgacatgctgactacctgaatgatgatcagaaagtaaggtcgttgctaacatcaacaattaacagcatcaaaaaagtattgaagaaaagaggtgatgattttgaaaccgtctccttctggctctctaacacatgccgatttttgcactgcttgaaacagtacagtggagaagagggctttatgaagcacaacacatctcgccagaatgaacactgcctcaccaattttgacctggctgagtatcggcaggtgctgagtgacttggccattcagatctaccagcagctcgtgcgggtgttagagaacatccttcagccaatgattgtctcaggcatgctggaacatgaaacgattcagggcgtgtctggggtgaagcccacagggttgagaaagcgaacctccagtatcgccgatgagggcacctacacactggactccatcctccggcagctcaactccttccactcggtcatgtgtcagcatggcatggaccctgaactgatcaagcaggtggtcaagcagatgttctacatcataggggccatcaccctgaacaaccttctcctgcggaaggacatgtgctcctggagtaaaggcatgcagatcaggtacaatgtcagtcaactggaagaatggctgcgtgacaagaaaacagatgatgatgcagaagccatttgttctatgtgcaatgctttaactactgcccagattgtgaaagtgttgaatttgtatactccagttaatgagtttgaagaaagagtctctgtgtcgttcattcgtactatacagatgcgtttacgagacaggaaagactctccccagctgctcatggatgctaaacacatctttcctgtcacctttcctttcaacccatcttccctcgcactagaaaccatccagattccagccagcctcggcctgggcttcatttcacgggtctgaaagtgatgtccaggcaaaaattgacaatacatttcttgcccgaaataagaacccattatttccagtgagttactgaaaatacatttttaaagagaaagtactgattatctcccaaatgagaagtcattaactggaaatctccctagaatactttcatcactttggaaacaaagataggctctttcgtgctgtgttatctttatagcaacactcatccttaaccaactaggtaccgtgagtttacatacaggagaatgatggaaggaagggaggaaggaaaggaggagaaaaatgtgtcttcagctggcagcatttattttaaatccttagcactgagtttgaatggtataaaaagtataacttccatagatgagctgttgttaggaaggcaccaaagaacctcctctgcactaaacaggagaatggaaagaaaagtctccattgagtacatatcatgtcagtttagtaatcaattatgttgatattgttaaactggttcaaagaaataaactggcaatatgtaaagtaattcctcatttgtgtcactatgatatagagatattaaaggaatgttggtttgctaaatagtatagatgtccatttgtactatagtttactgagcattttaaattgctgctacatactgtcttcttaaaatgtaagtgatattaggcactacaataagtttctcttgtcaattctgtttacaattcaatcagatcacagttttaactggattatatgcaaatacctacagattcacctgcacaagtagcagacactggaaagtcatgtagtaatatgacaaaatgcttgacatttaggggtaggattagacaaagtggctattgttgatgtcattatttattcaggatgtattacattgatgtgctcattaattttccctgggtggatattgcgtcagggtacagtgttctgtgaagtgacttatttttaactaccagatctgattccttcagtgcatattttcaaccttgacaggttttctctcttcttaatttattaagaattaatctcggctgggcgcggtggctcacgcctgtaatcccagcactttgggaagccaaggtgggcggatcacttcaggttaggagttggagaccagcctggccaacatggcgaaaccctgtctctactaaaaatacaaaaattagccgggcgtggtggcacttgcctgtaatcccagctactcgggaggctgaggcacgagaatcgattaaacctgggaggcggagattgcaatgagatcgaaccactgcactccagcctgggtgacagagagagacactgccttggaaaaaaaaagaatctcactcactatctagagaggattgtcagaatattcacgattcaggtcttgaaactttgattatgcaaaagaaggtatataataaatatttcattatgattcagtttttaaggctttgcagcttctataagtgttctcagatgccactagataattttaaaagcatcatattagaaatactttaagaagacttatataagaaatagaagattgttgaattttacagaggatttggttcattaagacccagattctgtaagttttcattctgaaattctagttaaacatattcaccatttttcttaggaatcttatacaataaatccttcaggttgcacaaaagcaaattattagttttcattagaaactctggttctgaattacaatcataggttatataaatttaactgttagatggtctataaaaatgacaaatcttattaaaatatgtgcaatatttatggaagtcaaacagcttcatatcagtgataaagattgttattaaaagataaatactgtctgttaatttaca

SEQ ID NO: 323284 - DNA, 6443 bp, Homo sapiens
aatacaccccgggcaggtggagcgctcgcggctgctcgcggcgagcccgggagtgatggcgaggcccctgcgggcggccagcgcctgaggcgccccgccccgccccgccccgcgcggccctccccgcccggccctgccctgccctgctccctgccggcggctgcgggcgcttcctagtccgctcgggcggccgcccaggcgaggtgcggcctccgcacaggccggggggcgtaggcgcgcggggcccgccatggctgcgtcggagctctacacaaagtttgccagggtttggatacctgatccagaggaagtctggaagtcagcagagctgctcaaagattataagccaggagataaagtcctcctgcttcacctcgaggaaggaaaggatttggaataccatctagatccaaagaccaaggagctgcctcacttacgaaatcctgacatacttgttggtgaaaatgacctcacagccctcagctatcttcatgagcctgctgtgctccataatctcagagtccgctttattgattccaaacttatttatacgtattgtggtatagtcctagtagctataaatccctatgaacagctgcctatttatggagaagatattattaatgcatacagtggtcagaacatgggtgatatggatccacatatctttgcagtagctgaagaagcttacaagcaaatggccagagatgaacgaaatcagtccatcatcgtaagtggagagtctggggcaggaaaaacagtctcagctaagtatgccatgcgatactttgcaactgtgagtggttctgccagtgaggccaatgtggaggaaaaggtcttggcctccaaccccatcatggagtccattggaaatgctaaaacaaccaggaatgataatagcagccgttttgggaagtatattgagattggttttgataagagatatcgaatcattggtgccaatatgagaacttatcttttagagaaatccagagtggtattccaggcagaagaggagagaaactatcatatcttctatcagctttgtgcctcagcaaagttacctgaatttaaaatgctacgattaggaaatgcagataactttaattacacaaaacaaggaggcagtcctgtgattgaaggagtggatgatgcaaaggagatggcacatactaggcaggcctgcactttgctaggaattagtgaatctcatcaaatgggaattttccgaatacttgctggcatccttcacttaggcaatgttggatttacatcccgagatgcagacagctgcacaatacctcccaagcatgaacctctctgcatcttctgtgacctcatgggtgtggactatgaggagatgtgtcactggctctgccatcggaaactggctactgccacagagacatacatcaagcccatctccaagctgcaggccacgaatgcccgcgatgctttggccaaacacatctatgccaagctctttaactggattgtagataatgtcaatcaggctctccattctgctgtcaaacagcactcttttattggtgtgctagacatttacggatttgaaacatttgagataaatagttttgaacagttttgcataaattatgcaaatgaaaaactacagcaacaattcaatatgcatgtcttcaaattggagcaagaagaatatatgaaggaacaaattccatggacactcatagatttttatgataatcagccttgtattaatcttatagaatcaaaactaggcattctagatttactggatgaggaatgcaagatgcctaaaggcacagatgacacctgggcccaaaaattgtacaacacacatttgaacaaatgtgcactctttgaaaagcctcgtctatcaaacaaagctttcatcatccaacattttgctgacaaagtggaataccagtgtgaaggatttctcgaaaagaataaagacaccgtttttgaagaacaaattaaagttcttaaatcaagcaagtttaagatgctaccagaactatttcaagatgatgagaaggccatcagtccaacttcagccacctcctcagggcgcacacccctcacacgaactcctgcaaagcccaccaaaggcagaccaggccaaatggccaaagagcacaagaaaacagtggggcatcagttcagaaactccctgcacctgcttatggagacactcaatgccactacccctcactatgtgcgctgtatcaagcctaatgacttcaagttcccattcacgtttgatgagaagagggcagtgcagcagctgagagcatgtggtgtcctggaaaccatccgaatcagtgcggccggtttcccctcacggtggacttaccaagaatttttcagccgctaccgtgtcctaatgaagcagaaagatgtgctgagtgacagaaagcaaacatgcaagaatgtgttagagaaactgatactggacaaggacaaataccagtttggtaagacaaagatctttttccgtgccggtcaagtggcctatctagaaaaattgagagctgacaaactgagagctgcctgcatccggatccagaagaccatccgagggtggctgctgagaaagaagtacctacgcatgcggaaggcagccatcaccatgcagagatacgtgcggggctaccaggcccgatgctatgctaagtttctgcgcagaaccaaggcagcaaccatcattcaaaagtactggcgcatgtatgtggtccgcaggaggtacaagattagacgagctgccactattgttcttcagtcttacttgcgaggcttcttggccagaaataggtatcgcaagatactccgtgagcacaaagcagtcatcattcagaagcgagtccggggctggctggcccgcacacactacaagaggagcatgcatgccatcatctaccttcagtgctgcttcaggcggatgatggccaagcgtgagctaaagaagctcaaaatcgaggctcgctcagtggagcgctataagaagctgcacatcggcatggagaacaagatcatgcagctgcagcgcaaagttgatgagcagaacaaagactacaaatgccttgtggagaaactaaccaatctggaaggaatatacaactctgagactgagaaactacgaagtgacttagaacgtcttcaactaagtgaagaggaagcgaaagttgccactgggcgggtccttagtctgcaggaagaaattgccaagctccggaaagacctggagcaaactcgttcagagaaaaaatgcattgaggaacatgcagatcgatacaaacaagaaacagagcagctggtatcaaatctgaaggaagaaaatactttgctgaagcaagaaaaagaagccctcaatcaccgcatcgtgcagcaggctaaggagatgacagaaactatggagaagaagttagtagaagaaacgaaacaactggaactcgaccttaatgatgaaaggctgagatatcagaaccttctgaatgagttcagtcgcctggaagaaagatatgatgacctcaaggaagagatgacccttatggtgcatgtgcctaagcctggacacaagagaacagactccacccacagcagcaacgagtctgaatatatctttagctctgaaattgcagaaatggaagacattccatcaaggacagaggaaccaagtgagaagaaggtacctctggacatgtcattgttccttaagctccagaagcgggtcacagagctggagcaggagaagcaggtgatgcaggatgagctggaccgcaaggaggagcaggtgctccgcagcaaggccaaggaagaagaaagaccacaaattagaggtgcagaactggaatatgagtcactcaagcgtcaagaactagaatcagaaaacaaaaaactgaagaatgagctaaatgagttgcgcaaggccctcagtgagaaaagtgccccagaggtgaccgccccaggtgcacctgcctaccgtgtcctcatggagcagctgacctctgtgagcgaggagcttgatgtccgcaaggaggaagtcctcatcttaaggtctcaactggtgagccagaaagaggccatccaacccaaggatgacaagaatacaatgacagattccacaatacttttggaagatgtacaaaaaatgaaagataaaggtgaaatagcacaagcatacattggtttgaaagaaacaaataggctcctggaatcccagctgcagtcacagaagaggagccatgagaatgaggccgaggccctccgtggggagatccagagcctgaaggaggagaacaaccgacagcagcagctgctggcccagaacctgcagctgcccccagaggcccgcattgaggccagcctgcagcacgagatcacccggctgaccaacgaaaacttggatttgatggaacaacttgaaaaacaggataagacggtccgtaaactgaaaaaacaactgaaagtatttgccaaaaaaattggcgaactagaagtgggccagatggagaacatatccccaggacagatcattgatgaacccatccgaccagtcagtgttttgtgtgcctgctgtgtgtcagtcactgttagatgattcctctttaatgattggaattccgctactgaacttggatctcacctcaatagtagcaccttctttcactttgtggaattgtaggttcaagatagggcagcgtacgggagctttgggtttgccttctaagacatacaggcttcagttccaggtattcatgtgctagcttgaccctaggagaagctccagattctcatttgtgaaatgataacagtaatatctaccccttggggctactgcaaagacttgatacaagaacccagtaccctacctggcaattaataactgctcaataaaaatgtcttccttgtgtacttgtatttctcttcaactacacttgaggatccttgaggtcaggagctgtgtttcatttttcaccatatacccatcacctagtatgaattcacatataaagtagatgtggaacaaatgtttgttgaatagtgaatgaaggtgaatgaataagtgcataaagaaatggctccactcagagctaccccggtgatgaggataggggaatacttctattacattaaaggcaacagcagttagtaaaaaggtttttacagtgtttctgctgtttgaaagtgcaatataaattttttgctagcccatgatcaatcgacttctattgtttgatatacacttcagcatttaagttctgtcgaattgacatttgctacttataaacttagtccctaagtcttcttatgctgtgctatatatctaccattggcacttagtaaactatgccatcaaggccaacacagagcatcagggacttactgaaaggctgtaaaagtaccgtgtggaaaagaaatgccccttatggagaaaactgtaaatatcactgggaatccaatcaaattcatgttaactccatgaactgaagactcaaagtgccgcttttgtccttgactcattccctccttcctcttctgaccccctttcccctctcttcagcctgctaggatattgacagggattttagaggagtggaaggtctttatctctttgagatgagctgcaatatgattacaatcgattgagtgatttacagtatagagcacctttcattaccttctctgctttatagaagtataaatgacatactgtatgtgaatatatattattattattggatatttatgtaccacctttctcaaagaagctcagtgttctttttagactttaaataactagagagattctgcaaccttgtgcaaaatttaaattgaagagactggaacttggaaacttttcccataaataaaactatgctcttgtatgggtggtaggacacttggtgttcaggcagctctggggcagaggaaaaacggtacagggtaattgtattttatggctgggataataattctaagttttcataattagagacaacttctgcaggccagaatttgtattaactacttaaactagagcttccatgtgacaatagggaaaacaaaacttgtaattcactaaccagctttgaaattatgcaatatttgatgattgttttaattcagaagaatgtatgttattactgatgcctcacatagagggagatgttattaatatttttatttatgtcacactatttcagataagtataattttaaaaatcccataaagtgtgactacactgtatttctaatcttgaaagatattatttaattaaaatagatgcattatggttggaaatcaagaaaatctttatcttacatccctggttacattgtacctagaagtgaccctcaaatttttaattattcattttactgagtccctaaactataatatttataacatttaacatatggctaaataaatatgatgg

SEQ ID NO: 323285 - DNA, 418 bp, Homo sapiens
cggccgcccaggcgaggtgcggcctccgcacaggccggggggcgtaggcgcgcggggcccgccatggctgcgtcggagctctacacaaaggtaaggcaccccgcggccggcgtcgaggactggggctgtgcggccctcgccgccagctgtcaggctggggagggggcgggagcgccgggcccaggcgagccccaccagcgccatccccttcagcgcctcagaaccctcggccctaccagccggtcgcccgctgcggcaccttcctctttcgggcgagatggtgaaggcggcggaaggtggcccgcctcgggggtctcccaggcccctgccgcgctgctcgagctgggggcagagcgggcttcggagtggaaagggggcccatgtggatttagcagggcgggcgtgcctcccctcctgc

SEQ ID NO: 323286 - DNA, 714 bp, Homo sapiens
caatctgagcatgtgttcgcgaccacgatgagtgtgccgcacttccggccagatcgccggatttccgctgagtgacccttacaagtccttcttgatcctgaactgtgggttaggtgccgctgttgctgctcgtgttgaatctagaaccgtagccagacatgggactggaggacgagcaaaagatgcttaccgaatccggagatcctgaggaggaggaagaggaagaggaggaattagtggatcccctaacaacagtgagagagcaatgcgagcagttggagaaatgtgtaaaggcccgggagcggctagagctctgtgatgagcgtgtatcctctcgatcacatacagaagaggattgcacggaggagctctttgacttcttgcatgcgagggaccattgcgtggcccacaaactctttaacaacttgaaataaatgtgtggacttaattcaccccagtcttcatcatctgggcatcagaatatttccttatggttttggatgtaccatttgtttcttatttgtgtaactgtaagttcacatgaacctcatgggtttggcttaggctggtagcttctatgtaattcgcaatgattccatctaaataaaagttctatgatctgcaaaaaaaacaacaacaagacagaacgacacgaaaaaggagcacaaacagacgcaaagacaacaacaagaagacacaacacaacaaaagggc

SEQ ID NO: 323287 - DNA, 771 bp, Homo sapiens
caatctgagcatgtgttcgcgaccacgatgagtgtgccgcacttccggccagatcgccggatttccgctgagtgacccttacaagtccttcttgatcctgaactgtgggttaggtgccgctgttgctgctcgtgttgaatctagaaccgtagccagacatgggactggaggacgagcaaaagatgcttaccgaatccggagatcctgaggaggaggaagaggaagaggaggaattagtggatcccctaacaacagtgagagagcaatgcgagcagttggagaaatgtgtaaaggcccgggagcggctagagctctgtgatgagcgtgtatcctctcgatcacatacagaagaggattgcacggaggagctctttgacttcttgcatgcgagggaccattgcgtggcccacaaactctttaacaacttgaaataaatgtgtggacttaattcaccccagtcttcatcatctgggcatcagaatatttccttatggttttggatgtaccatttgtttcttatttgtgtaactgtaagttcacatgaacctcatgggtttggcttaggctggtagcttctatgtaattcgcaatgattccatctaaataaaagttctatgatctgcaaaaaaaaaaaaaaacaaaaaaaaaaaaaaaaaaagggggggttttgggggggggggggaaagggggtatgaaaaggggaatgggaatgggggttcgtggaccacattttttggtaccaagggggaaacttggggggccccataaagg

SEQ ID NO: 323288 - DNA, 674 bp, Homo sapiens
  misc_feature (26)..(26): n is a, c, g, or t
  misc_feature (594)..(594): n is a, c, g, or t
  misc_feature (613)..(613): n is a, c, g, or t
  misc_feature (619)..(619): n is a, c, g, or t
  misc_feature (622)..(622): n is a, c, g, or t
  misc_feature (626)..(626): n is a, c, g, or t
  misc_feature (631)..(631): n is a, c, g, or t
  misc_feature (636)..(637): n is a, c, g, or t
  misc_feature (639)..(639): n is a, c, g, or t
  misc_feature (642)..(642): n is a, c, g, or t
  misc_feature (654)..(655): n is a, c, g, or t
  misc_feature (661)..(661): n is a, c, g, or t
actatagctagtacgaggctggggtnaatcggccgactgggttaggtgccgctgttgctgctcgtgttgaatctagaaccgtagccagacatgggactggaggacgagcaaaagatgcttaccgaatccggagatcctgaggaggaggaagaggaagaggaggaattagtggatcccctaacaacagtgagagagcaatgcgagcagttggagaaatgtgtaaaggcccgggagcggctagagctctgtgatgagcgtgtatcctctcgatcacatacagaagaggattgcacggaggagctctttgacttcttgcatgcgagggaccattgcgtggcccacaaactctttaacaacttgaaataaatgtgtggacttaattcaccccagtcttcatcatctgggcatcagaatatttccttatggttttggatgtaccatttgtttcttatttgtgtaactgtaagttcacatgaacctcatgggtttggcttaggctggtagcttctatgtaattcgcaatgattccatctaaataaaagttctatgatctgcaaaaaaaaaaaaaaacaaaaaaaaaaaaaaaaaaaaaanggggggggggcaaaaaatnccccgnggngggncccangtttnngngtnacccagtttttnnggtacnaaggggccccaat

SEQ ID NO: 323289 - DNA, 2221 bp, Homo sapiens
ggcacgaggcgccgcgctccccgccctcgagcctcggtgccggagccgcccgccgccggaggaggaggtggagggagccggaggggcccgccgaggcggcggcggcggcggcaagatggcggacttcctgccgtcgcggtccgtgctgtccgtgtgcttccccggctgcctgctgacgagtggcgaggccgagcagcaacgcaagtccaaggagatcgacaaatgcctgtctcgggaaaagacctatgtgaagcggctggtgaagatcctgctgctgggcgcgggcgagagcggcaagtccaccttcctgaagcagatgcggatcatccacgggcaggacttcgaccagcgcgcgcgcgaggagttccgccccaccatctacagcaacgtgatcaaaggtatgagggtgctggttgatgctcgagagaagcttcatattccctggggagacaactcaaaccaacaacatggagataagatgatgtcgtttgatacccgggcccccatggcagcccaaggaatggtggaaacaagggttttcttacaatatcttcctgctataagagcattatgggcagacagcggcatacagaatgcctatgaccggcgtcgagaatttcaactgggtgaatctgtaaaatatttcctggataacttggataaacttggagaaccagattatattccatcacaacaagatattctgcttgccagaagacccaccaaaggcatccatgaatacgactttgaaataaaaaatgttcctttcaaaatggttgatgtaggtggtcagagatcagaaaggaaacgttggtttgaatgtttcgacagtgtgacatcaatacttttccttgtttcctcaagtgaatttgaccaggtgcttatggaagatcgactgaccaatcgccttacagagtctctgaacatttttgaaacaatcgtcaataaccgggttttcagcaatgtctccataattctgttcttaaacaagacagacttgcttgaggagaaggtgcaaattgtgagcatcaaagactatttcctagaatttgaaggggatccccactgcttaagagacgtccaaaaattcctggtggaatgtttccggaacaaacgccgggaccagcaacagaagcccttataccaccacttcaccactgctatcaacacggagaacatccgccttgttttccgtgacgtgaaggatactattctgcatgacaacctcaagcagcttatgctacagtgatgtacaaaagacttgctgttttaatatctttttgtgtttttgatgttttctgtttgttttgttttttaaaatagcagtttacaaccaaaaaaaaaaaaaaaaaactcgagactagttctctctctcgaaccgtagccagacatgggactggaggacgagcaaaagatgcttaccgaatccggagatcctgaggaggaggaagaggaagaggaggaattagtggatcccctaacaacagtgagagagcaatgcgagcagttggagaaatgtgtaaaggcccgggagcggctagagctctgtgatgagcgtgtatcctctcgatcacatacagaagaggattgcacggaggagctctttgacttcttgcatgcgagggaccattgcgtggcccacaaactctttaacaacttgaaataaatgtgtggacttaattcaccccagtcttcatcatctgggcatcagaatatttccttatggttttggatgtaccatttgtttcttatttgtgtaactgtaagttcacatgaacctcatgggtttggcttaggctggtagcttctatgtaattcgcaatgattccatctaaataaaagttctatgatctgcaaagaataaaatcaacaaactatctaacacatggtttggggctcgactggccctatcagaaattgtttcaatgacaacaatttcgtggtgagaggcagcacgtgggccacccctgagtggatcaactgcaccatggggccactaagaagcgagacaccacgaagagagaatactcggctacacaccaattgagtgtgggggagcgttcccccacgaaggaaaaaaatgcccggcgggagaaacagcaggggtgcttggccaaaagaagctgcaagagggggcagccagggagggccagaaagcgaggaccaacacaccaggggcgaggccaaggaaggactgcgaagagctaagatagacgccgga

SEQ ID NO: 323290 - DNA, 829 bp, Homo sapiens
caatctgagcatgtgttcgcgaccacgatgagtgtgccgcacttccggccagatcgccggatttccgctgagtgacccttacaagtccttcttgatcctgaactgtgggttaggtgccgctgttgctgctcgtgttgaatctagaaccgtagccagacatgggactggaggacgagcaaaagatgcttaccgaatccggagatcctgaggaggaggaagaggaagaggaggaattagtggatcccctaacaacagtgagagagcaatgcgagcagttggagaaatgtgtaaaggcccgggagcggctagagctctgtgatgagcgtgtatcctctcgatcacatacagaagaggattgcacggaggagctctttgacttcttgcatgcgagggaccattgcgtggcccacaaactctttaacaacttgaaataaatgtgtggacttaattcaccccagtcttcatcatctgggcatcagaatatttccttatggttttggatgtaccatttgtttcttatttgtgtaactgtaagttcacatgaacctcatgggtttggcttaggctggtagcttctatgtaattcgcaatgattccatctaaataaaagttctatgatctgcaaaaaaaaaaaaaaacaaaaaaaaaaaaaaaaaaaaaaagaaagacgagaacaaaaagaaaaaaaaaaaaaaaaattcttggggggggggcccggccccaattcccccttatagggagttgtttaaccccccctatttgcccgttgtttaaaaacgtgggaatgggaaaacccttggtttcccaaattaaatggcgttgaaaaaaa

SEQ ID NO: 323291 - DNA, 657 bp, Homo sapiens
  misc_feature (6)..(6): n is a, c, g, or t
gcggcnctactactactaaattcgcggccgcgtcgacgaactgggttaggtgccgctgttgctgctcgtgttgaatctagaaccgtagccagacatgggactggaggacgagcaaaagatgcttaccgaatccggagatcctgaggaggaggaagaggaagaggaggaattagtggatcccctaacaacagtgagagagcaatgcgagcagttggagaaatgtgtaaaggcccgggagcggctagagctctgtgatgagcgtgtatcctctcgatcacatacagaagaggattgcacggaggagctctttgacttcttgcatgcgagggaccattgcgtggcccacaaactctttaacaacttgaaataaatgtgtggacttaattcaccccagtcttcatcatctgggcatcagaatatttccttatggttttggatgtaccatttgtttcttatttgtgtaactgtaagttcacatgaacctcatgggtttggcttaggctggtagcttctatgtaattcgcaatgattccatctaaataaaagttctatgatctgcaaaaaaaaaatcctgagctgacctgacctcattgccacctcttgcattgggatcctgagggctggcccctgctcactgatgggccctcccaggcccgt

SEQ ID NO: 323292 - DNA, 697 bp, Homo sapiens
  misc_feature (6)..(6): n is a, c, g, or t
gcggcnctactactactaaattcgcggccgcgtcgacgaactgggttaggtgccgctgttgctgctcgtgttgaatctagaaccgtagccagacatgggactggaggacgagcaaaagatgcttaccgaatccggagatcctgaggaggaggaagaggaagaggaggaattagtggatcccctaacaacagtgagagagcaatgcgagcagttggagaaatgtgtaaaggcccgggagcggctagagctctgtgatgagcgtgtatcctctcgatcacatacagaagaggattgcacggaggagctctttgacttcttgcatgcgagggaccattgcgtggcccacaaactctttaacaacttgaaataaatgtgtggacttaattcaccccagtcttcatcatctgggcatcagaatatttccttatggttttggatgtaccatttgtttcttatttgtgtaactgtaagttcacatgaacctcatgggtttggcttaggctggtagcttctatgtaattcgcaatgattccatctaaataaaagttctatgatctgcaaaaaaaaaaacacaacaagaaaagaaaagaaaaagaagaaaataagaaaaagaagaagcgagagcagagagaaggagaaaagaaaagagaagcaaaaaaaagacggggggcggggtaaaaaaagcggggggagaaac

SEQ ID NO: 323293 - DNA, 1013 bp, Homo sapiens
  misc_feature (1)..(1): n is a, c, g, or t
  misc_feature (999)..(999): n is a, c, g, or t
naaggattcaggctaggtacgaggctgggtggctgggttaggtgccgctgttgctgctcgtgttgaatctagaaccgtagccagacatgggactggaggacgagcaaaagatgcttaccgaatccggagatcctgaggaggaggaagaggaagaggaggaattagtggatcccctaacaacagtgagagagcaatgcgagcagttggagaaatgtgtaaaggcccgggagcggctagagctctgtgatgagcgtgtatcctctcgatcacatacagaagaggattgcacggaggagctctttgacttcttgcatgcgagggaccattgcgtggcccacaaactctttaacaacttgaaataaatgtgtggacttaattcaccccagtcttcatcatctgggcatcagaatatttccttatggttttggatgtaccatttgtttcttatttgtgtaactgtaagttcacatgaacctcatgggtttggcttaggctggtagcttctatgtaattcgcaatgattccatctaaataaaagttctatgatctgcaaaaaaaaaaaaaaacaaaaaaaaaaaaaaaaaaatcccgaaaaaattcccggaattttgggggcggggggaaagaggggggggtccccctttttcccggtaaaaaccttgtgtggggaaagggggggcccaaaaatatacacgggggggtggaaccctggcaagggggagaaataccgggaaacgtggttctaaatgggagcccaatttatgaaagggcagtctgatatggaaacgcctgtgggttctcaacatgtcccaacggttgggcacgcaaaatgccgctgggaaaggtggcccggaaaaaagggcttcaggggccaactttggcgacggcgaatgtggggaggcaaaaccacgcgcgacgaaggcgctttttaaagccacacacggttgggcgcgtaaaggcgacagcggtccacaggtgtagcacgaatcatgtgggggnaactgacaacgtag

SEQ ID NO: 323294 - DNA, 1946 bp, Homo sapiens
ggcacgaggcgccgcgctccccgccctcgagcctcggtgccggagccgcccgccgccggaggaggaggtggagggagccggaggggcccgccgaggcggcggcggcggcggcaagatggcggacttcctgccgtcgcggtccgtgctgtccgtgtgcttccccggctgcctgctgacgagtggcgaggccgagcagcaacgcaagtccaaggagatcgacaaatgcctgtctcgggaaaagacctatgtgaagcggctggtgaagatcctgctgctgggcgcgggcgagagcggcaagtccaccttcctgaagcagatgcggatcatccacgggcaggacttcgaccagcgcgcgcgcgaggagttccgccccaccatctacagcaacgtgatcaaaggtatgagggtgctggttgatgctcgagagaagcttcatattccctggggagacaactcaaaccaacaacatggagataagatgatgtcgtttgatacccgggcccccatggcagcccaaggaatggtggaaacaagggttttcttacaatatcttcctgctataagagcattatgggcagacagcggcatacagaatgcctatgaccggcgtcgagaatttcaactgggtgaatctgtaaaatatttcctggataacttggataaacttggagaaccagattatattccatcacaacaagatattctgcttgccagaagacccaccaaaggcatccatgaatacgactttgaaataaaaaatgttcctttcaaaatggttgatgtaggtggtcagagatcagaaaggaaacgttggtttgaatgtttcgacagtgtgacatcaatacttttccttgtttcctcaagtgaatttgaccaggtgcttatggaagatcgactgaccaatcgccttacagagtctctgaacatttttgaaacaatcgtcaataaccgggttttcagcaatgtctccataattctgttcttaaacaagacagacttgcttgaggagaaggtgcaaattgtgagcatcaaagactatttcctagaatttgaaggggatccccactgcttaagagacgtccaaaaattcctggtggaatgtttccggaacaaacgccgggaccagcaacagaagcccttataccaccacttcaccactgctatcaacacggagaacatccgccttgttttccgtgacgtgaaggatactattctgcatgacaacctcaagcagcttatgctacagtgatgtacaaaagacttgctgttttaatatctttttgtgtttttgatgttttctgtttgttttgttttttaaaatagcagtttacaaccaaaaaaaaaaaaaaaaaactcgagactagttctctctctcgaaccgtagccagacatgggactggaggacgagcaaaagatgcttaccgaatccggagatcctgaggaggaggaagaggaagaggaggaattagtggatcccctaacaacagtgagagagcaatgcgagcagttggagaaatgtgtaaaggcccgggagcggctagagctctgtgatgagcgtgtatcctctcgatcacatacagaagaggattgcacggaggagctctttgacttcttgcatgcgagggaccattgcgtggcccacaaactctttaacaacttgaaataaatgtgtggacttaattcaccccagtcttcatcatctgggcatcagaatatttccttatggttttggatgtaccatttgtttcttatttgtgtaactgtaagttcacatgaacctcatgggtttggcttaggctggtagcttctatgtaattcgcaatgattccatctaaataaaagttctatgatctgcaaaaaaaacaacaacaagacagaacgacacgaaaaaggagcacaaacagacgcaaagacaacaacaagaagacacaacacaacaaaagggc

SEQ ID NO: 323295 - DNA, 909 bp, Homo sapiens
caatctgagcatgtgttcgcgaccacgatgagtgtgccgcacttccggccagatcgccggatttccgctgagtgacccttacaagtccttcttgatcctgaactgtgggttaggtgccgctgttgctgctcgtgttgaatctagaaccgtagccagacatgggactggaggacgagcaaaagatgcttaccgaatccggagatcctgaggaggaggaagaggaagaggaggaattagtgataggactgaggctttcagtgcatactggcaaccttggaaggcaggaatgtgaaacttttccctactacttagcatcagaattgaatgggagaccgcattctgccatttctggcggcagtgtggctctgccagctggccttctgcacggatcccctaacaacagtgagagagcaatgcgagcagttggagaaatgtgtaaaggcccgggagcggctagagctctgtgatgagcgtgtatcctctcgatcacatacagaagaggattgcacggaggagctctttgacttcttgcatgcgagggaccattgcgtggcccacaaactctttaacaacttgaaataaatgtgtggacttaattcaccccagtcttcatcatctgggcatcagaatatttccttatggttttggatgtaccatttgtttcttatttgtgtaactgtaagttcacatgaacctcatgggtttggcttaggctggtagcttctatgtaattcgcaatgattccatctaaataaaagttctatgatctgcaaaaaaaaaaacacaacaagaaaagaaaagaaaaagaagaaaataagaaaaagaagaagcgagagcagagagaaggagaaaagaaaagagaagcaaaaaaaagacggggggcggggtaaaaaaagcggggggagaaac

SEQ ID NO: 323296 - DNA, 1792 bp, Homo sapiens
  misc_feature (6)..(6): n is a, c, g, or t
gcggcnctactactactaaattcgcggccgcgtcgacgaactgggttaggtgccgctgttgctgctcgtgttgaatctagaaccgtagccagacatgggactggaggacgagcaaaagatgcttaccgaatccggagatcctgaggaggaggaagaggaagaggaggaattagtggtaagaactgtctcaggtttggaaacatctcagtaaaagcagggtttgagcttcatgaaattctaagggcattttaaggagtttttacttgataccttgtagataatgggggtggaataagctttgatacttcctgtgcagtggagagtttagggtgtgagccttggaagctgagtctgttctgggtttggggcttcttcagttgtggtaccagggagcagatggcatcttgagggcctggcactcaatcatctgctatttgtggtttaataaagaactttgggctaggcatggtggctcgtgcctgtaatctcagcactttgggaggccaaggcaggcggattaccagcctgaacaacgtagagaaaccccatctctactaaaaatacaaaattagccgggcgtggtggcacatgcctgtaatcccagctactcgagaggctgaggcaggagaattgctcgaacccgagaggcggaggttgtggtgagctgagattgcgccattgcgctccagcctgggcaacaagagcaaaactccgtcttaaaaaaaaaaaaaaaaagaactctgaaggaacctttgttagatagtccttctctatgttagcattgcctttctagttgggcagctggggtgcataggcctggttctcagacaaggggatttgaagtttcagacgtgtcatattccaaaatgctgtgttaacaagtaaggcctcctatagatctacttcaagtttggccaggtttcctttaccaccttgtttttcagataggactgaggctttcagtgcatactggcaaccttggaaggcaggaatgtgaaacttttccctactacttagcatcagaattgaatgggagaccgcattctgccatttctggcggcagtgtggctctgccagctggccttctgcacggtaattcagaggcagcaccttggtttggtggttgtgttaatcaaagcatatgtgtttggtgggtctctgctaaaaatgcccattttgttttttttctgtttctacatcaggatcccctaacaacagtgagagagcaatgcgagcagttggagaaatgtgtaaaggcccgggagcggctagagctctgtgatgagcgtgtatcctctcgatcacatacagaagaggattgcacggaggagctctttgacttcttgcatgcgagggaccattgcgtggcccacaaactctttaacaacttgaaataaatgtgtggacttaattcaccccagtcttcatcatctgggcatcagaatatttccttatggttttggatgtaccatttgtttcttatttgtgtaactgtaagttcacatgaacctcatgggtttggcttaggctggtagcttctatgtaattcgcaatgattccatctaaataaaagttctatgatctgcaaaaaaaaaaaaaaacaaaaaaaaaaaaaaaaaaaaaaagaaagacgagaacaaaaagaaaaaaaaaaaaaaaaattcttggggggggggcccggccccaattcccccttatagggagttgtttaaccccccctatttgcccgttgtttaaaaacgtgggaatgggaaaacccttggtttcccaaattaaatggcgttgaaaaaaa

SEQ ID NO: 323297 - DNA, 802 bp, Homo sapiens
caatctgagcatgtgttcgcgaccacgatgagtgtgccgcacttccggccagatcgccggatttccgctgagtgacccttacaagtccttcttgatcctgaactgtgggttaggtgccgctgttgctgctcgtgttgaatctagaaccgtagccagacatgggactggaggacgagcaaaagatgcttaccgaatccggagatcctgaggaggatcccctaacaacagtgagagagcaatgcgagcagttggagaaatgtgtaaaggcccgggagcggctagagctctgtgatgagcgtgtatcctctcgatcacatacagaagaggattgcacggaggagctctttgacttcttgcatgcgagggaccattgcgtggcccacaaactctttaacaacttgaaataaatgtgtggacttaattcaccccagtcttcatcatctgggcatcagaatatttccttatggttttggatgtaccatttgtttcttatttgtgtaactgtaagttcacatgaacctcatgggtttggcttaggctggtagcttctatgtaattcgcaatgattccatctaaataaaagttctatgatctgcaaaaaaaaaaaaaaacaaaaaaaaaaaaaaaaaaaaaaagaaagacgagaacaaaaagaaaaaaaaaaaaaaaaattcttggggggggggcccggccccaattcccccttatagggagttgtttaaccccccctatttgcccgttgtttaaaaacgtgggaatgggaaaacccttggtttcccaaattaaatggcgttgaaaaaaa

SEQ ID NO: 323298 - DNA, 481 bp, Homo sapiens
tctggacacatttctccaactgctcgcatgctctctcactgttgttaggggatccgtgcagaaggccagctggcagagctctgtgatgagcgtgtatcctctcgatcacatacagaagaggattgcacggaggagctctttgacttcttgcatgcgagggaccattgcgtggcccacaaactctttaacaacttgaaataaatgtgtggacttaattcaccccagtcttcatcatctgggcatcagaatatttccttatggttttggatgtaccatttgtttcttatttgtgtaactgtaagttcacatgaacctcatgggtttggcttaggctggtagcttctatgtaattcgcaatgattccatctaaataaaagttctatgatctgcaaaaaaaacaacaacaagacagaacgacacgaaaaaggagcacaaacagacgcaaagacaacaacaagaagacacaacacaacaaaagggc

SEQ ID NO: 323299 - DNA, 488 bp, Homo sapiens
  misc_feature (6)..(6): n is a, c, g, or t
gcggcnctactactactaaattcgcggccgcgtcgacgaactgggttaggtgccgctgttgctgctcgtgttgaatctagaaccgtagccagacatgggactggaggacgagcaaaagatgcttaccgaatccggagatcctgaggaggaggaagaggaagaggaggaattagtggtggcccacaaactctttaacaacttgaaataaatgtgtggacttaattcaccccagtcttcatcatctgggcatcagaatatttccttatggttttggatgtaccatttgtttcttatttgtgtaactgtaagttcacatgaacctcatgggtttggcttaggctggtagcttctatgtaattcgcaatgattccatctaaataaaagttctatgatctgcaaaaaaaacaacaacaagacagaacgacacgaaaaaggagcacaaacagacgcaaagacaacaacaagaagacacaacacaacaaaagggc

SEQ ID NO: 323300 - DNA, 1620 bp, Homo sapiens
  misc_feature (6)..(6): n is a, c, g, or t
gcggcnctactactactaaattcgcggccgcgtcgacgaactgggttaggtgccgctgttgctgctcgtgttgaatctagaaccgtagccagacatgggactggaggacgagcaaaagatgcttaccgaatccggagatcctgaggaggtaaggcaaggcgatccactcggccctcttctctgccctgaagcccaggacctagcccgccaaaacacgcacggggccctcttagcccccagtttaccctctagggtttgcatagtcgggagctctagttccctcgacctttccccagaattcgtccggtgactttggacagatagatgactagtttttctctgggcctcggcttctgcattctgtgaatgtagtgaaggtttgagagcgaaaatgttttgtggactaaagtcttgtaaaaatatgacctatgtttgcagtcagtcagatgttctgaagcccgcgtttcacagatttggggagcaaacagaccgccttgccccagctcaggttaggaatccctaccacatcttctatggaggttcggaagacctggccttgtgttccttttctttgaggaaggtgtgtgtctttggggacaatgaaagaatgtacgatgtgattctgtgatggaagagggagctctttcccagagaaagagtgctgctataattattgactgcttgctattccaagtgctttatatgcactaattaattttttttttttttttgagatggaatctcgctctgtcgcccaggctggagtgcagtggcgtggtctcggctcgctgcaacctccgcctcctgggttcaagcgattctcctgcctcagcctcccaggtagctgggactacaggtgtccgccaccacgcctggctaatttttgtgtttttagtagcgacgggggtttcactctgttggccaggctgatctcgaactcctgacctagtgatccgcccaccccggcctcccaaagtcctgggattacaggcgtgagccaccgcgcccggccctaattcatttcatctacacactattcctatgaagtaagtgttgggtactattagtgccatttttacagatgaggaaacaagcatagaggttaaatatcttttctaaggtcatgcagctaccaaattggtgcagccaggaattgcggccaagcagcgcggttctagaaccaggactcttatcaattttgcgacacagctactagttgtttctaatctcatttcctgtccgtctgttctctggtcacttgggggcagccattctgggctgtgggttcagaataattggagacttatttatcccttaatttttctagtcttattatttctaaaaagaaatagaacctgaggccgggcgcggtggctcacgcctgtaatcccaacactttgggaggacggccgaggcagacaggtagcatgagtccaggagttggaccagcctgggcaacgtggcgaaaccccgtctctacaaaaaatataaaaattagccgggcatggtggtgaacgcctgtggtctcaactgctcgggagtttgagcccaggaagtccaggctgcagtgagccgtgatcgtgtcctgcactccagccgaggcaacccgagtgagaccct

SEQ ID NO: 323301 - DNA, 1566 bp, Homo sapiens
  misc_feature (6)..(6): n is a, c, g, or t
gcggcnctactactactaaattcgcggccgcgtcgacgaactgggttaggtgccgctgttgctgctcgtgttgaatctagaaccgtagccagacatgggactggaggacgagcaaaagatgcttaccgaatccggagatcctgaggaggtaaggcaaggcgatccactcggccctcttctctgccctgaagcccaggacctagcccgccaaaacacgcacggggccctcttagcccccagtttaccctctagggtttgcatagtcgggagctctagttccctcgacctttccccagaattcgtccggtgactttggacagatagatgactagtttttctctgggcctcggcttctgcattctgtgaatgtagtgaaggtttgagagcgaaaatgttttgtggactaaagtcttgtaaaaatatgacctatgtttgcagtcagtcagatgttctgaagcccgcgtttcacagatttggggagcaaacagaccgccttgccccagctcaggttaggaatccctaccacatcttctatggaggttcggaagacctggccttgtgttccttttctttgaggaaggtgtgtgtctttggggacaatgaaagaatgtacgatgtgattctgtgatggaagagggagctctttcccagagaaagagtgctgctataattattgactgcttgctattccaagtgctttatatgcactaattaattttttttttttttttgagatggaatctcgctctgtcgcccaggctggagtgcagtggcgtggtctcggctcgctgcaacctccgcctcctgggttcaagcgattctcctgcctcagcctcccaggtagctgggactacaggtgtccgccaccacgcctggctaatttttgtgtttttagtagcgacgggggtttcactctgttggccaggctgatctcgaactcctgacctagtgatccgcccaccccggcctcccaaagtcctgggattacaggcgtgagccaccgcgcccggccctaattcatttcatctacacactattcctatgaagtaagtgttgggtactattagtgccatttttacagatgaggaaacaagcatagaggttaaatatcttttctaaggtcatgcagctaccaaattggtgcagccaggaattgcggccaagcagcgcggttctagaaccaggactcttatcaattttgcgacacagctactagttgtttctaatctcatttcctgtccgtctgttctctggtcacttgggggcagccattctgggctgtgggttcagaataattggagacttatttatcccttaatttttctagtcttattatttctactttgggaggacggccgaggcagacaggtagcatgagtccaggagttggaccagcctgggcaacgtggcgaaaccccgtctctacaaaaaatataaaaattagccgggcatggtggtgaacgcctgtggtctcaactgctcgggagtttgagcccaggaagtccaggctgcagtgagccgtgatcgtgtcctgcactccagccgaggcaacccgagtgagaccct

SEQ ID NO: 323302 - DNA, 691 bp, Homo sapiens
  misc_feature (6)..(6): n is a, c, g, or t
gcggcnctactactactaaattcgcggccgcgtcgacgaactgggttaggtgccgctgttgctgctcgtgttgaatctagaaccgtagccagacatgggactggaggacgagcaaaagatgcttaccgaatccggagatcctgaggaggaggaagaggaagaggaggaattagtgataggactgaggctttcagtgcatactggcaaccttggaaggcaggaatgtgaaacttttccctactacttagcatcagaattgaatgggagaccgcattctgccatttctggcggcagtgtggctctgccagctggccttctgcacggatcccctaacaacagtgagagagcaatgcgagcagttggagaaatgtgtaaaggcccgggagcggctagagctctgtgatgagcgtgtatcctctcgatcacatacagaagaggattgcacggaggagctctttgacttcttgcatgcgagggaccattgcgcaaagaaggacttccattcattgttttggtgtatagcatagcctttttgagcctttcttcagcttcatgatgtgaccagaaccacgtgagcattccaagagcagacacaccccatttacagataagagaaccctccttgccttgtttacaaagctcttcagtatgctatatacacttggcttgacttttggccacaatagcaaac

SEQ ID NO: 323303 - DNA, 489 bp, Homo sapiens
  misc_feature (6)..(6): n is a, c, g, or t
gcggcnctactactactaaattcgcggccgcgtcgacgaactgggttaggtgccgctgttgctgctcgtgttgaatctagaaccgtagccagacatgggactggaggacgagcaaaagatgcttaccgaatccggagatcctgaggaggaggaagaggaagaggaggaattagtgataggactgaggctttcagtgcatactggcaaccttggaaggcaggaatgtgaaacttttccctactacttagcatcagaatatttccttatggttttggatgtaccatttgtttcttatttgtgtaactgtaagttcacatgaacctcatgggtttggcttaggctggtagcttctatgtaattcgcaatgattccatctaaataaaagttctatgatctgcaaaaaaaacaacaacaagacagaacgacacgaaaaaggagcacaaacagacgcaaagacaacaacaagaagacacaacacaacaaaagggc

SEQ ID NO: 323304 - DNA, 531 bp, Homo sapiens
tcatgagatagaagtttcaggaagttacttaaattaatgttgaattcttgtgacccatgtttcaaatttaatccaatggcaaaggtcatccctctctgaagagctcctttagttactgaggtgaatttaggagtctgagataattctggaagaagccagtataatattttatctgcctctgtactcctttatcttggtaacaggagcagagaaagcagacatagtaggtaatgaaatgaaagttattatatctcttatctgaaatggcaaagaagtctagggaatcatattccagcagaagttaagaggtgaaaatgcgggtaaaatctaagaatgatttgtttaaagaaattgagtaaaaatcccaaaagtaactacatggctggtagcttctatgtaattcgcaatgattccatctaaataaaagttctatgatctgcaaaaaaaacaacaacaagacagaacgacacgaaaaaggagcacaaacagacgcaaagacaacaacaagaagacacaacacaacaaaagggc

SEQ ID NO: 323305 - DNA, 255 bp, Homo sapiens
tgattacctccttttctttcccccatctaggtggcccacaaactctttaacaacttgaaataaatgtgtggacttaattcaccccagtcttcatcatctgggcatcagaatatttccttatggttttggatgtaccatttgtttcttatttgtgtaactgtaagttcacatgaacctcatgggtttggcttaggctggtagcttctatgtaattcgcaatgattccatctaaataaaagttctatgatctgcaaa

SEQ ID NO: 323306 - DNA, 646 bp, Homo sapiens
  misc_feature (26)..(26): n is a, c, g, or t
actatagctagtacgaggctggggtnaatcggccgactgggttaggtgccgctgttgctgctcgtgttgaatctagaaccgtagccagacatgggactggaggacgagcaaaagatgcttaccgaatccggagatcctgaggaggaggaagaggaagaggaggaattagtggatcccctaacaacagtgagagagcaatgcgagcagttggagaaatgtgtaaaggcccgggagcggctagagctctgtgatgagcgtgtatcctctcgatcacatacagaagaggattgcacggaggagctctttgacttcttgcatgcgagggaccattgcgtggcccacaaactctttaacaacttgaaataaatgtgtggacttaattcaccccagtcttcatcatctgggcatcagaatatttccttatggttttggatgtaccatttgtttcttatttgtgtaactgtaagttcacatgaacctcatgggtttggcttaggctggtagcttctatgtaattcgcaatgattccatctaaataaaagttctatgatctgcaaaaaaaacaacaacaagacagaacgacacgaaaaaggagcacaaacagacgcaaagacaacaacaagaagacacaacacaacaaaagggc

SEQ ID NO: 323307 - DNA, 1575 bp, Homo sapiens
taagaccctcatcaatagatggagacatacagaaatagtcaaaccacatctacaaaatgtcagtatcaggcggcggcttcgaagccaaagtgatgtttggatgtaaagtgaaatattagttggcggatgaagcagatagtgaggaaagttgagccaataatgacgtgaagtccgtggaagcctgtggctacaaaaaaatgttgagccgtagatgccgtcggaaatggtgaagggagactcgaagtactctgaggcttgtaggagggtaaaatagagacccagtaaaattgtaatgagcagtgcttgaattatttggtttcggttgttttctattagactatggtgagctcaggtgattgatactcctgatgcgagtaatacggatgtgtttaggagtgggacttctaggggatttagcggggtgatgcctgttgggggccagtgccctcctaattggggggtaggggctaggctggagtggtaaaaggctcagaaaaatcctgcgaagaaaaaaacttctgaggtaataaataggattatcccgtatcgaaggcctttttggacaggtggtgtgtggtggccttggtatgtgctttctcgtgttacatcgcgccatcattggtatatggttagtgtgttggttagtaggcctagtatgaggagcgttatggagtggaagtgaaatcacatggctaggccggaggtcattaggagggctgagagggcccctgttaggggtcatgggctgggttttactatatgataggcatgtgggttaggtgccgctgttgctgctcgtgttgaatctagaaccgtagccagacatgggactggaggacgagcaaaagatgcttaccgaatccggagatcctgaggaggaggaagaggaagaggaggaattagtgataggactgaggctttcagtgcatactggcaaccttggaaggcaggaatgtgaaacttttccctactacttagcatcagaattgaatgggagaccgcattctgccatttctggcggcagtgtggctctgccagctggccttctgcacggatcccctaacaacagtgagagagcaatgcgagcagttggagaaatgtgtaaaggcccgggagcggctagagctctgtgatgagcgtgtatcctctcgatcacatacagaagaggattgcacggaggagctctttgacttcttgcatgcgagggaccattgcgtggcccacaaactctttaacaacttgaaataaatgtgtggacttaattcaccccagtcttcatcatctgggcatcagaatatttccttatggttttggatgtaccatttgtttcttatttgtgtaactgtaagttcacatgaacctcatgggtttggcttaggctggtagcttctatgtaattcgcaatgattccatctaaataaaagttctatgatctgcaaaaaaaaaaacacaacaagaaaagaaaagaaaaagaagaaaataagaaaaagaagaagcgagagcagagagaaggagaaaagaaaagagaagcaaaaaaaagacggggggcggggtaaaaaaagcggggggagaaac

SEQ ID NO: 323308 - DNA, 777 bp, Homo sapiens
  misc_feature (7)..(7): n is a, c, g, or t
  misc_feature (31)..(31): n is a, c, g, or t
  misc_feature (76)..(76): n is a, c, g, or t
  misc_feature (104)..(104): n is a, c, g, or t
  misc_feature (183)..(183): n is a, c, g, or t
gatcganagatatgaagtttcctgcacttgnatgtgtcggcggctgttggcacagggccagcgctcaccgcccagncaggcgctcagcagcaagagcagggccncgaggctcctcatggctatgggctcctctgccttggtatatcccacaggctcggtctagcaacagaagggccacgcctnccctgcaacagggcagctcgtgccgaattcggcacgagctgggttaggtgccgctgttgctgctcgtgttgaatctagaaccgtagccagacatgggactggaggacgagcaaaagatgcttaccgaatccggagatcctgaggaggaggaagaggaagaggaggaattagtggatcccctaacaacagtgagagagcaatgcgagcagttggagaaatgtgtaaaggcccgggagcggctagagctctgtgatgagcgtgtatcctctcgatcacatacagaagaggattgcacggaggagctctttgacttcttgcatgcgagggaccattgcgtggcccacaaactctttaacaacttgaaataaatgtgtggatggatgtaccatttgtttcttatttgtgtaactgtaagttcacatgaacctcatgggtttggcttaggctggtagcttctatgtaattcgcaatgattccatctaaataaaagttctatgatctgcaaaaaaaacaacaacaagacagaacgacacgaaaaaggagcacaaacagacgcaaagacaacaacaagaagacacaacacaacaaaagggc

SEQ ID NO: 323309 - DNA, 1258 bp, Homo sapiens
  misc_feature (1244)..(1244): n is a, c, g, or t
gggcagatgaaggtatcacggagatactggataccctcattggtaaggtacccacgtagaaatgtctccaggcaaaactgttcccttcacgtagcctcgggacttgagagacttgcatggccttcatagacatgaaggttgggcacattcttgtctgccagctccgggtgcttaggcatgtggacatccttcttggccaccatgactccctccttaaaaaggagttcataaatggcaatccggttcttcttaggcatcaacatctctgcggctgcaggtgggttaggtgccgctgttgctgctcgtgttgaatctagaaccgtagccagacatgggactggaggacgagcaaaagatgcttaccgaatccggagatcctgaggaggaggaagaggaagaggaggaattagtggatcccctaacaacagtgagagagcaatgcgagcagttggagaaatgtgtaaaggcccgggagcggctagagctctgtgatgagcgtgtatcctctcgatcacatacagaagaggattgcacggaggagctctttgacttcttgcatgcgagggaccattgcgtggcccacaaactctttaacaacttgaaataaatgtgtggacttaattcaccccagtcttcatcatctgggcatcagaatatttccttatggttttggatgtaccatttgtttcttatttgtgtaactgtaagttcacatgaacctcatgggtttggcttaggctggtagcttctatgtaattcgcaatgattccatctaaataaaagttctatgatctgcaaaaaaaaaaaaaaacaaaaaaaaaaaaaaaaaaatcccgaaaaaattcccggaattttgggggcggggggaaagaggggggggtccccctttttcccggtaaaaaccttgtgtggggaaagggggggcccaaaaatatacacgggggggtggaaccctggcaagggggagaaataccgggaaacgtggttctaaatgggagcccaatttatgaaagggcagtctgatatggaaacgcctgtgggttctcaacatgtcccaacggttgggcacgcaaaatgccgctgggaaaggtggcccggaaaaaagggcttcaggggccaactttggcgacggcgaatgtggggaggcaaaaccacgcgcgacgaaggcgctttttaaagccacacacggttgggcgcgtaaaggcgacagcggtccacaggtgtagcacgaatcatgtgggggnaactgacaacgtag

SEQ ID NO: 323310 - DNA, 800 bp, Homo sapiens
  misc_feature (6)..(6): n is a, c, g, or t
gcggcnctactactactaaattcgcggccgcgtcgacgaactgggttaggtgccgctgttgctgctcgtgttgaatctagaaccgtagccagacatgggactggaggacgagcaaaagatgcttaccgaatccggagatcctgaggaggaggaagaggaagaggaggaattagtggatcccctaacaacagtgagagagcaatgcgagcagttggagaaatgtgtaaaggcccgggagcggctagagctctgtgatgagcgtgtatcctctcgatcacatacagaagaggattgcacggaggagctctttgacttcttgcatgcgagggaccattgcgtggcccacaaactctttaacaacttgaaataaatgtgtggacttaattcaccccagtcttcatcatctgggcatcagaatatttccttatggttttggatgtaccatttgtttcttatttgtgtaactgtaagttcacatgaacctcatgggtttggcttaggctggtagcttctatgtaattcgcaatgattccatctaaataaaagttctatgatctgcaaaggaaacaaagaatgccgaaaagaatgaaaacagacaaaaaatgtatgtgcttgaaaagtaaaatacttacaatagtaacttaactatttcactcttcaggggggggcacgaaaccaattcgcccatactggaataatatgtcacctccacaatgtttttattttcaaatatttttaatgggaaacactttagggtgtccaaactgtatttttcgtaacaaacccccgttattacaaag

SEQ ID NO: 323311 - DNA, 642 bp, Homo sapiens
  misc_feature (1)..(1): n is a, c, g, or t
naaggattcaggctaggtacgaggctgggtggctgggttaggtgccgctgttgctgctcgtgttgaatctagaaccgtagccagacatgggactggaggacgagcaaaagatgcttaccgaatccggagatcctgaggaggaggaagaggaagaggaggaattagtggatcccctaacaacagtgagagagcaatgcgagcagttggagaaatgtgtaaaggcccgggagcggctagagctctgtgatgagcgtgtatcctctcgatcacatacagaagaggattgcacggaggagctctttgacttcttgcatgcgagggaccattgcgtggcccacaaactctttaacaacttgaaataaatgtgtggacttaattcaccccagtcttcatcatctgggcatcagaatatttccttatggttttggatgtaccatttgtttcttatttgtgtaactgtaagttcacatgaacctcatgggtttggcttaggctggtagcttctatgtaattcgcaatgattccatctaaataaaagttctatgatctgcaaaaaaaacaacaacaagacagaacgacacgaaaaaggagcacaaacagacgcaaagacaacaacaagaagacacaacacaacaaaagggc

SEQ ID NO: 323312 - DNA, 1085 bp, Homo sapiens
  misc_feature (1071)..(1071): n is a, c, g, or t
caatctgagcatgtgttcgcgaccacgatgagtgtgccgcacttccggccagatcgccggatttccgctgagtgacccttacaagtccttcttgatcctgaactgtgggttaggtgccgctgttgctgctcgtgttgaatctagaaccgtagccagacatgggactggaggacgagcaaaagatgcttaccgaatccggagatcctgaggaggaggaagaggaagaggaggaattagtggatcccctaacaacagtgagagagcaatgcgagcagttggagaaatgtgtaaaggcccgggagcggctagagctctgtgatgagcgtgtatcctctcgatcacatacagaagaggattgcacggaggagctctttgacttcttgcatgcgagggaccattgcgtggcccacaaactctttaacaacttgaaataaatgtgtggacttaattcaccccagtcttcatcatctgggcatcagaatatttccttatggttttggatgtaccatttgtttcttatttgtgtaactgtaagttcacatgaacctcatgggtttggcttaggctggtagcttctatgtaattcgcaatgattccatctaaataaaagttctatgatctgcaaaaaaaaaaaaaaacaaaaaaaaaaaaaaaaaaatcccgaaaaaattcccggaattttgggggcggggggaaagaggggggggtccccctttttcccggtaaaaaccttgtgtggggaaagggggggcccaaaaatatacacgggggggtggaaccctggcaagggggagaaataccgggaaacgtggttctaaatgggagcccaatttatgaaagggcagtctgatatggaaacgcctgtgggttctcaacatgtcccaacggttgggcacgcaaaatgccgctgggaaaggtggcccggaaaaaagggcttcaggggccaactttggcgacggcgaatgtggggaggcaaaaccacgcgcgacgaaggcgctttttaaagccacacacggttgggcgcgtaaaggcgacagcggtccacaggtgtagcacgaatcatgtgggggnaactgacaacgtag

SEQ ID NO: 323313 - DNA, 742 bp, Homo sapiens
  misc_feature (662)..(662): n is a, c, g, or t
  misc_feature (681)..(681): n is a, c, g, or t
  misc_feature (687)..(687): n is a, c, g, or t
  misc_feature (690)..(690): n is a, c, g, or t
  misc_feature (694)..(694): n is a, c, g, or t
  misc_feature (699)..(699): n is a, c, g, or t
  misc_feature (704)..(705): n is a, c, g, or t
  misc_feature (707)..(707): n is a, c, g, or t
  misc_feature (710)..(710): n is a, c, g, or t
  misc_feature (722)..(723): n is a, c, g, or t
  misc_feature (729)..(729): n is a, c, g, or t
caatctgagcatgtgttcgcgaccacgatgagtgtgccgcacttccggccagatcgccggatttccgctgagtgacccttacaagtccttcttgatcctgaactgtgggttaggtgccgctgttgctgctcgtgttgaatctagaaccgtagccagacatgggactggaggacgagcaaaagatgcttaccgaatccggagatcctgaggaggaggaagaggaagaggaggaattagtggatcccctaacaacagtgagagagcaatgcgagcagttggagaaatgtgtaaaggcccgggagcggctagagctctgtgatgagcgtgtatcctctcgatcacatacagaagaggattgcacggaggagctctttgacttcttgcatgcgagggaccattgcgtggcccacaaactctttaacaacttgaaataaatgtgtggacttaattcaccccagtcttcatcatctgggcatcagaatatttccttatggttttggatgtaccatttgtttcttatttgtgtaactgtaagttcacatgaacctcatgggtttggcttaggctggtagcttctatgtaattcgcaatgattccatctaaataaaagttctatgatctgcaaaaaaaaaaaaaaacaaaaaaaaaaaaaaaaaaaaaanggggggggggcaaaaaatnccccgnggngggncccangtttnngngtnacccagtttttnnggtacnaaggggccccaat

SEQ ID NO: 323314 - DNA, 650 bp, Homo sapiens
  misc_feature (6)..(6): n is a, c, g, or t
gcggcnctactactactaaattcgcggccgcgtcgacgaactgggttaggtgccgctgttgctgctcgtgttgaatctagaaccgtagccagacatgggactggaggacgagcaaaagatgcttaccgaatccggagatcctgaggaggaggaagaggaagaggaggaattagtggatcccctaacaacagtgagagagcaatgcgagcagttggagaaatgtgtaaaggcccgggagcggctagagctctgtgatgagcgtgtatcctctcgatcacatacagaagaggattgcacggaggagctctttgacttcttgcatgcgagggaccattgcgtggcccacaaactctttaacaacttgaaataaatgtgtggacttaattcaccccagtcttcatcatctgggcatcagaatatttccttatggttttggatgtaccatttgtttcttatttgtgtaactgtaagttcacatgaacctcatgggtttggcttaggctggtagcttctatgtaattcgcaatgattccatctaaataaaagttctatgatctgcaaaaaaaacaacaacaagacagaacgacacgaaaaaggagcacaaacagacgcaaagacaacaacaagaagacacaacacaacaaaagggc

SEQ ID NO: 323315 - DNA, 1109 bp, Homo sapiens
ctcgccctcaaatgggaacgctggcctgggactaaagcatagaccaccaggctgagtatcctgacctgagtcatccccagggatcaggagcctccagcagggaaccttccattatattcttcaagcaacttacagctgcaccgacagttgcgatgaaagttctaatctcttccctcctcctgttgctgccactaatgctgatgtccatggtctctagcagcctgaatccaggggtcgccagaggccacagggaccgaggccaggcttctaggagatggctccaggaaggcggccaagaatgtgagtgcaaagattggttcctgagagccccgagaagaaaattcatgacagtgtctgggctgccaaagaagcagtgcccctgtgatcatttcaagggcaatgtgaagaaaacaagacaccaaaggcaccacagaaagccaaacaagcattccagagcctgccagcaatttctcaaacaatgtcagctaagaagctttgctctgcctttgtaggagctctgagcgcccactcttccaattaaacattctcagccaagaagacagtgagcacacctaccagacactcttcttctcccacctcactctcccactgtacccacccctaaatcattccagtgctctcaaaaagcatgtttttcaagatcattttgtttgttgctctctctagtgtcttcttctctcgtcagtcttagcctgtgccctccccttacccaggcttaggcttaattacctgaaagattccaggaaactgtagcttcctagctagtgtcatttaaccttaaatgcaatcaggaaagtagcaaacagaagtcaataaatatttttaaatgtcacagatcaaaattgtttccttcaaatggggtctgccaattcacaaccagatgacccattttaccctattcactgcagactgaatccagattctacacatacttatccccaccaagaccctcactctgtctccattggcctacttgttcatctttcactcattcgacaaatctttctgaggtaagagcgaggtgggacaaaaaaaaaaaagcataccaatgaaccagacacggtcttattaaagataatataggttta

SEQ ID NO: 323316 - DNA, 444 bp, Homo sapiens
tactactactactaaattcgcggccgctcgatatatgattgcgagtggaaaaataggggacagaaatcaggtattggcagtttttccattttcatttgtgtgtgaatttttaatataaatgcggagacgtaaagcattaatgcaagttaaaatgtttcagtgaacaagtttcagcggttcaactttataataattataaataaacctgttaaatttttctggacaatgccagcatttggatttttttaaaacaagtaaatttcttattgatggcaactaaatggtgtttgtagcatttttatcatacagtagattccatccattcactatacttttctaactgagttgtcctacatgcaagtacatgtttttaatgttgtctgtcttctgtgctgttcctgtaagtttgctattaaaatacattaaactataaaaaaaaaaaaa

SEQ ID NO: 323317 - DNA, 585 bp, Homo sapiens
cctttagtaaagagactacccaaggatgatcttccagaaggggaatgattctaaaaggattatctggaattggaaaactagttagcccataaatgatcaccataagtaaatttaaaccgttgtttgtataaaaccattataatgaagtgtttataagaaattgtgcacccatgtgaaacttaatgtgctgaattccgcacctcattctcaaaaaaaaaaaaaaaatttctcttcttcctgttattggtagttctgaacgttagatattttttttccatggggtcaaaaggtacctaagtatatgattgcgagtggaaaaataggggacagaaatcaggtattggcagtttttccattttcatttgtgtgtgaatttttaatataaatgcggagacgtaaagcattaatgcaagttaaaatgtttcagtgaacaagtttcagcggttcaactttataataattataaataaacctgttaaatttttctggacaatgccagcatttggatttttttaaaacaagtaaatttcttattgatggcaactaaatgtgtgctgaagggatcctctagactcacctacgctc

SEQ ID NO: 323318 - DNA, 348 bp, Homo sapiens
tactactactactaaattcgcggccgctcgaaacgtgtaacaattatgccaaaagacatccagctagcacgccgcatacgtggagaacgtgcttaagaatccactatgatgggaaacatttcattctcaaaaaaaaaaaaaaaatttctcttcttcctgttattggtagttctgaacgttagatattttttttccatggggtcaaaaggtacctaagtatatgattgcgagtggaaaaataggggacagaaatcaggtattggcagtttttccattttcatttgtgtgtgaatttttaatataaatgcggagacgtaaagcatgtcgacgcggccgcgaatttagtag

SEQ ID NO: 323319 - DNA, 795 bp, Homo sapiens
  misc_feature (1)..(2): n is a, c, g, or t
  misc_feature (5)..(5): n is a, c, g, or t
nnatnggttcgcagccgccgccgcgccgccgtcgctctccaacgccagcgccgcctctcgctcgccgagctccagccgaaggagaaggggggtaagtaaggaggtctctgtaccatggctcgtacaaagcagactgcccgcaaatcgaccggtggtaaagcacccaggaagcaactggctacaaaagccgctcgcaagagtgcgccctctactggaggggtgaagaaacctcatcgttacaggcctggtactgtggcgctccgtgaaattagacgttatcagaagtccactgaacttctgattcgcaaacttcccttccagcgtctggtgcgagaaattgctcaggactaaaactgcgctgagagccattcacataatctctgagaaacgacttccttacttgtgcgcagcgtgagccggtacatctgggcttgcaggttcggctccaagcgcagcaggcatccaatctgggtggttttcgtgtggatgattccagctcccacgaaattcgcaggattaggatcaacttcttcaagaagtgcagaaccaaatcctatgatcttggctttggtgacttctgtgtccattgggtgctttgctttgaagatgttctgcacttcctgttgctcaactgcttcgcaacgttgaaagaaatcctgagaagccatttctgtcggctggaagaatttgttgagagtgatgggcagctgcacagacacgttctggaaggtgcccccatacctgaactgaatgttgaggactgcgccgcctgaagtcgacaccctctatgtgcca

SEQ ID NO: 323320 - DNA, 537 bp, Homo sapiens
attcaacattgctagttagttggcatgccagatttctcctagtgtgtttaattttgagagagaaactccaacaaatgcattttatcactagtggtcagggagatttaaagaataaattggcttttgaaaatcaaagaccaaaatactgttatctgatgtgaataatgtcaaagaactctctcacaggcagtcacaagtctcgggtattgcaagggaacatgaaactggttaatggaatcctcaccaggtgttctgctttagttatgatggttgttactgatctgttttacatttcaaaggaaaaccatggtctagtaagaaaatacccttttcatttcaggcgttttgaagagaatggagtggctcttggaactgatgggttatattagaaatgttgcttaccagtcaacatccattcactatacttttctaactgagttgtcctacatgcaagtacatgtttttaatgttgtctgtcttctgtgctgttcctgtaagtttgctattaaaatacattaaactataaaaaaaaaaaaa

SEQ ID NO: 323321 - DNA, 382 bp, Homo sapiens
ataaaccgctgaaacttgttcactgaaacattttaacttgcattaatgctttacgtctccgcatttatattaaatcattctcaaaaaaaaaaaaaaaatttctcttcttcctgttattggtagttctgaacgttagatattttttttccatggggtcaaaaggtacctaagtatatgattgcgagtggaaaaataggggacagaaatcaggtattggcagtttttccattttcatttgtgtgtgaatttttaatataaatgcggagacgtaaagcattttttgtacccagtccagagatccccggctttcttttgtacgattaaactgccgccctggaggctcttttaccttaatgccccgggcctcctctcttccaggaaa

SEQ ID NO: 323322 - DNA, 549 bp, Homo sapiens
  misc_feature (37)..(38): n is a, c, g, or t
gactccagaggatccccaagcttttaccgcattctcnnatcattctcaaaaaaaaaaaaaaaatttctcttcttcctgttattggtagttctgaacgttagatattttttttccatggggtcaaaaggtacctaagtatatgattgcgagtggaaaaataggggacagaaatcaggtattggcagtttttccattttcatttgtgtgtgaatttttaatataaatgcggagacgtaaagcattaatgcaagttaaaatgtttcagtgaacaagtttcagcggttcaactttataataattataaataaacctgttaaatttttctggacaatgccagcatttggatttttttaaaacaagtaaatttcttattgatggcaactaaatggtgtttgtagcatttttatcatacagtagattccatccattcactatacttttctaactgagttgtcctacatgcaagtacatgtttttaatgttgtctgtcttctgtgctgttcctgtaagtttgctattaaaatacattaaactataaaaaaaaaaaaa

SEQ ID NO: 323323 - DNA, 1336 bp, Homo sapiens
  misc_feature (1)..(2): n is a, c, g, or t
  misc_feature (5)..(5): n is a, c, g, or t
nnatnggttcgcagccgccgccgcgccgccgtcgctctccaacgccagcgccgcctctcgctcgccgagctccagccgaaggagaaggggggtaagtaaggaggtctctgtaccatggctcgtacaaagcagactgcccgcaaatcgaccggtggtaaagcacccaggaagcaactggctacaaaagccgctcgcaagagtgcgccctctactggaggggtgaagaaacctcatcgttacaggcctggtactgtggcgctccgtgaaattagacgttatcagaagtccactgaacttctgattcgcaaacttcccttccagcgtctggtgcgagaaattgctcaggactttaaaacagatctgcgcttccagagcgcagctatcggtgctttgcaggaggcaagtgaggcctatctggttggcctttttgaagacaccaacctgtgtgctatccatgccaaacgtgtaacaattatgccaaaagacatccagctagcacgccgcatacgtggagaacgtgcttaagaatccactatgatgggaaacatttcattctcaaaaaaaaaaaaaaaatttctcttcttcctgttattggtagttctgaacgttagatattttttttccatggggtcaaaaggtacctaagtatatgattgcgagtggaaaaataggggacagaaatcaggtattggcagtttttccattttcatttgtgtgtgaatttttaatataaatgcggagacgtaaagcattaatgcaagttaaaatgtttcagtgaacaagtttcagcggttcaactttataataattataaataaacctgttaaatttttctggacaatgccagcatttggatttttttaaaacaagtaaatttcttattgatggcaactaaatggtgtttgtagcatttttatcatacagtagattccatccattcactatacttttctaactgagttgtcctacatgcaagtacatgtttttaatgttgtctgtcttctgtgctgttcctgtaagtttgctattaaaatacattaaactataaaaaaaaaaaaaaaaaaagggaaaaacaaacacaaaacaaaaaaaaaccttgtgcggcacggccggccccgaaagaacttttaaaaaccccgtggggggccgagccccataaaatacactggccaacggttcccaaaaaccgggcaaaaaaagcgcgggttcttccccaaaaaacgcgcgggggaacccgagctgggcgaaaaccggaaggaccaggagcaaagaggtcacacggggcccaggacctaaagccagcgagagggaaacaaacaaaaacaacgaaacaaga

SEQ ID NO: 323324 - DNA, 1276 bp, Homo sapiens
  misc_feature (1)..(2): n is a, c, g, or t
  misc_feature (5)..(5): n is a, c, g, or t
nnatnggttcgcagccgccgccgcgccgccgtcgctctccaacgccagcgccgcctctcgctcgccgagctccagccgaaggagaaggggggtaagtaaggaggtctctgtaccatggctcgtacaaagcagactgcccgcaaatcgaccggtggtaaagcacccaggaagcaactggctacaaaagccgctcgcaagagtgcgccctctactggaggggtgaagaaacctcatcgttacaggcctggtactgtggcgctccgtgaaattagacgttatcagaagtccactgaacttctgattcgcaaacttcccttccagcgtctggtgcgagaaattgctcaggactttaaaacagatctgcgcttccagagcgcagctatcggtgctttgcaggaggcaagtgaggcctatctggttggcctttttgaagacaccaacctgtgtgctatccatgccaaacgtgtaacaattatgccaaaagacatccagctagcacgccgcatacgtggagaacgtgcttaagaatccactatgatgggaaacatttcattctcaaaaaaaaaaaaaaaatttctcttcttcctgttattggtagttctgaacgttagatattttttttccatggggtcaaaaggtacctaagtatatgattgcgagtggaaaaataggggacagaaatcaggtattggcagtttttccattttcatttgtgtgtgaatttttaatataaatgcggagacgtaaagcattaatgcaagttaaaatgtttcagtgaacaagtttcagcggttcaactttataataattataaataaacctgttaaatttttctggacaatgccagcatttggatttttttaaaacaagtaaatttcttattgatggcaactaaatggtgtttgtagcatttttatcatacagtagattccatccattcactatacttttctaactgagttgtcctacatgcaagtacatgtttttaatgttgtctgtcttctgtgctgttcctgtaagtttgctattaaaatacattaaactataaaaaaaaaaaaaccgcaaaaaaaaacaaaataaatgaataacaacaacacaaagacaaaaaacaatgtcatcagaacataaccacgatataataacgataagtggatgatagaaagacggagggagcgtgatcgcaccgtgtcgatgtccgccttcagctggtcgactcgcttctctgtggcggtctgacgccctttgtctatcctggtactgcggccggatgattggg

SEQ ID NO: 323325 - DNA, 1207 bp, Homo sapiens
  misc_feature (1)..(2): n is a, c, g, or t
  misc_feature (5)..(5): n is a, c, g, or t
nnatnggttcgcagccgccgccgcgccgccgtcgctctccaacgccagcgccgcctctcgctcgccgagctccagccgaaggagaaggggggtaagtaaggaggtctctgtaccatggctcgtacaaagcagactgcccgcaaatcgaccggtggtaaagcacccaggaagcaactggctacaaaagccgctcgcaagagtgcgccctctactggaggggtgaagaaacctcatcgttacaggcctggtactgtggcgctccgtgaaattagacgttatcagaagtccactgaacttctgattcgcaaacttcccttccagcgtctggtgcgagaaattgctcaggactttaaaacagatctgcgcttccagagcgcagctatcggtgctttgcaggaggcaagtgaggcctatctggttggcctttttgaagacaccaacctgtgtgctatccatgccaaacgtgtaacaattatgccaaaagacatccagctagcacgccgcatacgtggagaacgtgcttaagaatccactatgatgggaaacatttcattctcaaaaaaaaaaaaaaaatttctcttcttcctgttattggtagttctgaacgttagatattttttttccatggggtcaaaaggtacctaagtatatgattgcgagtggaaaaataggggacagaaatcaggtattggcagtttttccattttcatttgtgtgtgaatttttaatataaatgcggagacgtaaagcattaatgcaagttaaaatgtttcagtgaacaagtttcagcggttcaactttataataattataaataaacctgttaaatttttctggacaatgccagcatttggatttttttaaaacaagtaaatttcttattgatggcaactaaatggtgtttgtagcatttttatcatacagtagattccatccattcactatacttttctaactgagttgtcctacatgcaagtacatgtttttaatgttgtctgtcttctgtgctgttcctgtaagtttgctattaaaatacattaaactataaaaaaaaaaaaataattatttatcattataatttattatattcatttatacttttatttatatcatttttccttatttttatttataatatttacttttggtgtggctctttactcaattctatttttggattgttttttactttaattggcctttattt

SEQ ID NO: 323326 - DNA, 1048 bp, Homo sapiens
  misc_feature (1)..(2): n is a, c, g, or t
  misc_feature (5)..(5): n is a, c, g, or t
nnatnggttcgcagccgccgccgcgccgccgtcgctctccaacgccagcgccgcctctcgctcgccgagctccagccgaaggagaaggggggtaagtaaggaggtctctgtaccatggctcgtacaaagcagactgcccgcaaatcgaccggtggtaaagcacccaggaagcaactggctacaaaagccgctcgcaagagtgcgccctctactggaggggtgaagaaacctcatcgttacaggcctggtactgtggcgctccgtgaaattagacgttatcagaagtccactgaacttctgattcgcaaacttcccttccagcgtctggtgcgagaaattgctcaggactttaaaacagatctgcgcttccagagcgcagctatcggtgctttgcaggaggcaagtgaggcctatctggttggcctttttgaagacaccaacctgtgtgctatccatgccaaacgtgtaacaattatgccaaaagacatccagctagcacgccgcatacgtggagaacgtgcttaagaatccactatgatgggaaacatttcattctcaaaaaaaaaaaaaaaatttctcttcttcctgttattggtagttctgaacgttagatattttttttccatggggtcaaaaggtacctaagtatatgattgcgagtggaaaaataggggacagaaatcaggtattggcagtttttccattttcatttgtgtgtgaatttttaatataaatgcggagacgtaaagcattaatgcaagttaaaatgtttcagtgaacaagtttcagcggttcaactttataataattataaataaacctgttaaatttttctggacaatgccagcatttggatttttttaaaacaagtaaatttcttattgatggcaactaaatggtgtttgtagcatttttatcatacagtagattccatccattcactatacttttctaactgagttgtcctacatgcaagtacatgtttttaatgttgtctgtcttctgtgctgttccgcaatgtcggggatccttagaatcgacacgcatc

SEQ ID NO: 323327 - DNA, 898 bp, Homo sapiens
  misc_feature (1)..(2): n is a, c, g, or t
  misc_feature (5)..(5): n is a, c, g, or t
nnatnggttcgcagccgccgccgcgccgccgtcgctctccaacgccagcgccgcctctcgctcgccgagctccagccgaaggagaaggggggtaagtaaggaggtctctgtaccatggctcgtacaaagcagactgcccgcaaatcgaccggtggtaaagcacccaggaagcaactggctacaaaagccgctcgcaagagtgcgccctctactggaggggtgaagaaacctcatcgttacaggcctggtactgtggcgctccgtgaaattagacgttatcagaagtccactgaacttctgattcgcaaacttcccttccagcgtctggtgcgagaaattgctcaggactttaaaacagatctgcgcttccagagcgcagctatcggtgctttgcaggaggcaagtgaggcctatctggttggcctttttgaagacaccaacctgtgtgctatccatgccaaacgtgtaacaattatgccaaaagacatccagctagcacgccgcatacgtggagaacgtgcttaagaatccactatgatgggaaacatttcattctcaaaaaaaaaaaaaaaatttctcttcttcctgttattggtagttctgaacgttagatattttttttccatggggtcaaaaggtacctaagtatatgattgcgagtggaaaaataggggacagaaatcaggtattggcagtttttccattttcatttgtgtgtgaatttttaatataaatgcggagacgtaaagcattaatgcaagttaaaatgtttcagtgaacaagtttcagcggttcaactttataataattataaataaacctgttaaatttttctggacaatgccagcatttggatttttttaaaacaagtaaatttcttattgatggcaactaaatg

SEQ ID NO: 323328 - DNA, 940 bp, Homo sapiens
  misc_feature (1)..(2): n is a, c, g, or t
  misc_feature (5)..(5): n is a, c, g, or t
nnatnggttcgcagccgccgccgcgccgccgtcgctctccaacgccagcgccgcctctcgctcgccgagctccagccgaaggagaaggggggtaagtaaggaggtctctgtaccatggctcgtacaaagcagactgcccgcaaatcgaccggtggtaaagcacccaggaagcaactggctacaaaagccgctcgcaagagtgcgccctctactggaggggtgaagaaacctcatcgttacaggcctggtactgtggcgctccgtgaaattagacgttatcagaagtccactgaacttctgattcgcaaacttcccttccagcgtctggtgcgagaaattgctcaggactttaaaacagatctgcgcttccagagcgcagctatcggtgctttgcaggaggcaagtgaggcctatctggttggcctttttgaagacaccaacctgtgtgctatccatgccaaacgtgtaacaattatgccaaaagacatccagctagcacgccgcatacgtggagaacgtgcttaagaatccactatgatgggaaacatttcattctcaaaaaaaaaaaaaaaatttctcttcttcctgttattggtagttctgaacgttagatattttttttccatggggtcaaaaggtacctaagtatatgattgcgagtggaaaaataggggacagaaatcaggtattggcagtttttccattttcatttgtgtgtgaatttttaatataaatgcggagacgtaaagcattaatgcaagttaaaatgtttcagtgaacaagtttcagcggttcaactttataataattataaataaacctgttaaatttttctggacaatgccagcatttggatttttttaaaacaagtaaatttcttattgatggcaactaaatgaaaaaaatttgggaggattaaaaccttcaggggggggcccga

SEQ ID NO: 323329 - DNA, 871 bp, Homo sapiens
  misc_feature (1)..(2): n is a, c, g, or t
  misc_feature (5)..(5): n is a, c, g, or t
nnatnggttcgcagccgccgccgcgccgccgtcgctctccaacgccagcgccgcctctcgctcgccgagctccagccgaaggagaaggggggtaagtaaggaggtctctgtaccatggctcgtacaaagcagactgcccgcaaatcgaccggtggtaaagcacccaggaagcaactggctacaaaagccgctcgcaagagtgcgccctctactggaggggtgaagaaacctcatcgttacaggcctggtactgtggcgctccgtgaaattagacgttatcagaagtccactgaacttctgattcgcaaacttcccttccagcgtctggtgcgagaaattgctcaggactttaaaacagatctgcgcttccagagcgcagctatcggtgctttgcaggaggcaagtgaggcctatctggttggcctttttgaagacaccaacctgtgtgctatccatgccaaacgtgtaacaattatgccaaaagacatccagctagcacgccgcatacgtggagaacgtgcttaagaatccactatgatgggaaacatttcattctcaaaaaaaaaaaaaaaatttctcttcttcctgttattggtagttctgaacgttagatattttttttccatggggtcaaaaggtacctaagtatatgattgcgagtggaaaaataggggacagaaatcaggtattggcagtttttccattttcatttgtgtgtgaatttttaatataaatgcggagacgtaaagcattaatgcaagttaaaatgtttcagtgaacaagtttcagcggttcaactttataataattataaataaacctgttaaatttttctggacaataaaaaaaaaaagtcgacgcggcgcgcaat

SEQ ID NO: 323330 - DNA, 829 bp, Homo sapiens
  misc_feature (1)..(2): n is a, c, g, or t
  misc_feature (5)..(5): n is a, c, g, or t
nnatnggttcgcagccgccgccgcgccgccgtcgctctccaacgccagcgccgcctctcgctcgccgagctccagccgaaggagaaggggggtaagtaaggaggtctctgtaccatggctcgtacaaagcagactgcccgcaaatcgaccggtggtaaagcacccaggaagcaactggctacaaaagccgctcgcaagagtgcgccctctactggaggggtgaagaaacctcatcgttacaggcctggtactgtggcgctccgtgaaattagacgttatcagaagtccactgaacttctgattcgcaaacttcccttccagcgtctggtgcgagaaattgctcaggactttaaaacagatctgcgcttccagagcgcagctatcggtgctttgcaggaggcaagtgaggcctatctggttggcctttttgaagacaccaacctgtgtgctatccatgccaaacgtgtaacaattatgccaaaagacatccagctagcacgccgcatacgtggagaacgtgcttaagaatccactatgatgggaaacatttcattctcaaaaaaaaaaaaaaaatttctcttcttcctgttattggtagttctgaacgttagatattttttttccatggggtcaaaaggtacctaagtatatgattgcgagtggaaaaataggggacagaaatcaggtattggcagtttttccattttcatttgtgtgtgaatttttaatataaatgcggagacgtaaagcatatgcagtaatgttcaggacagtcagcgtcactatatatatatacttattctgacacagcatgattaacacgatctta
